United States Patent Application Publication US 2020/0163878 A1 - sequence listing, part 11

SEQ ID NO: 44569 - RNA, 1701 nt, Artificial Sequence
  derived and/or modified CDS sequence (wt) from hemagglutinin__InfluenzaA__AIJ10774
augaagacuaucauugcuuugagcuacauucuaugucugguuuucgcucaaaaacuuccuggaaaugacaauagcacggcaacgcugugccuugggcaccaugcaguaccaaacggaacgauagugaaaacaaucacgaaugaccgaauugaaguuacuaaugcuacugagcugguucagaauuccucaauaggugaaauaugcaacaguccucaucagauccuugauggagaaaacugcacacuaauagaugcucuauugggagacccucagugugauggcuuucaaaauaagaaaugggaccuuuuuguugaacggagcaaagccuacagcaacuguuacccuuaugaugugccggauuaugccucccuuaggucacuaguugccucauccggcacacuggaguuuaacaaugaaagcuucaauugggcuggagucacucaaaacggaacaaguucugcuugcauaaggggaucuaauaguaguuucuuuaguagauuaaauugguugacccacuuaaacuucaaauacccagcauugaacgugacuaugccaaacaaugaacaauuugacaaauuguacauuugggggguccaccacccggguacggacaaggaccaaaucuuccuguaugcucaaucaucaggaagaaucacaguaucuaccaaaagaagccaacaagcuguaaucccgaauaucggaucuagacccagaauaaggaauaucccuagcagaauaagcaucuauuggacaauaguaaaaccgggagacauacuuuugauuaacagcacagggaaucuaauugcuccuagggguuacuucaaaauacgaagugggaaaagcucaauaaugagaucagaugcacccauuggcaaaugcaagucugaaugcaucacuccaaauggaagcauucccaaugacaaaccauuccaaaauguaaacaggaucacauacggggccugucccagauauguuaagcaaagcacucugaaauuggcaacaggaaugcgaaauguaccagagaaacaaacuagaggcauauuuggcgcaauagcggguuucauagaaaaugguugggagggaaugauggaugguugguacgguuucaggcaucaaaauucugagggaagaggacaagcagcagaucucaaaagcacucaaucagcaaucgaucaaaucaaugggaagcugaaucgauugaucgggaaaaccaacgagaaauuccaucagauugaaaaagaauucucagaaguagaagggagaauucaggaccuugagaaauauguugaggacacaaaaauagaucucuggucauacaacgcggagcuucuuguugcccuggagaaccaacauacaauugaucuaacugacucagaaaugaacaaacuguuugaaaaaacaaagaagcaacugagggaaaaugcugaggauaugggcaaugguuguuucaaaauauaccacaaaugugacaaugccugcauaggaucaaucagaaauggaacuuaugaccacgauguauacagggaugaagcauuaaacaaccgguuccagaucaagggaguugagcugaagucaggguacaaagauuggauccuauggauuuccuuugccauaucauguuuuuugcuuuguguuguuuuguugggguucaucaugugggccugccaaaagggcaacauuaggugcaacauuugcauuuga

SEQ ID NO: 44570 - RNA, 1701 nt, Artificial Sequence
  derived and/or modified CDS sequence (wt) from hemagglutinin__InfluenzaA__AIJ10776
augaagacuaucauugcuuugagcugcauucuaugucugguuuucgcucaaaaacuuccuggaaaugacaauagcacggcaacgcugugccuugggcaccaugcaguaccaaacggaacgauagugaaaacaaucacgaaugaccgaauugaaguuacuaaugcuacugagcugguucagaauuccucaauaggugaaauaugcgacaguccucaucagauccuugauggagaaaacugcacacuaauagaugcucuauugggagacccucagugugauggcuuucaaaauaagaaaugggaccuuuuuguugaacgaagcaaagccuacagcaacuguuacccuuaugaugugccggauuaugccucccuuaggucacuaguugccucauccggcacacuggaguuuaacaaugaaagcuucaauugggcuggagucacucaaaacggaacaaguucugcuugcauaaggggaucuaauaguaguuucuuuaguagauuaaauugguugacccacuuaaacuucaaauacccagcauugaacgugacuaugccaaacaaugaacaauuugacaaauuguacauuugggggguucaccacccggguacggacaaggaccaaaucuuccuguaugcucaaucaucagggagaaucacaguaucuaccaaaagaagccaacaagcuguaaucccgaauaucggaucuagacccagaauaagaaauaucccuagcagaauaagcaucuauuggacaauaguaaaaccgggagacauacuuuugauuaacagcacagggaaucuaauugcuccuagggguuacuucaaaauacgaagugggaaaagcucaauaaugagaucagaugcacccauuggcaaaugcaagucugaaugcaucacuccgaauggaagcauucccaaugacaaaccauuccaaaauguaaacaggaucacauacggggccugucccagauauguuaagcaaagcacucugaaauuggcaacaggaaugcgaaauguaccagagaaacaaacuagaggcauauuuggcgcaauagcggguuucauagaaaaugguugggagggaaugguggaugguugguacgguuucaggcaucaaaauucugagggaagaggacaagcagcagaucucaaaagcacucaagcagcaaucgaucaaauuaaugggaagcugaaucgauugaucgggaaaaccaacgagaaauuccaucagauugaaaaagaauucucagaaguagaagggagaauucaggaccuugagaaauauguugaggacacaaaaauagaucucuggucauacaacgcggagcuucuuguugcccuggagaaccaacauacaauugaucuaacugacucagaaaugagcaaacuguuugaaaaaacaaaaaagcaacugagggaaaaugcugaggauaugggcaaugguuguuucaaaauauaccacaaaugugacaaugccugcauaggaucaaucagaaauggaacuuaugaccacgauguauacagggaugaagcauuaaacaaccgguuccagaucaagggaguugagcugaagucaggguacaaagauuggauccuauggauuuccuuugccauaucauguuuuuugcuuuguguuguuuuguugggguucaucaugugggccugccaaaagggcaacauuaggugcaacauuugcauuuga

SEQ ID NO: 44571 - RNA, 1701 nt, Artificial Sequence
  derived and/or modified CDS sequence (wt) from hemagglutinin__InfluenzaA__AIJ10777
augaagacuaucauugcuuugagcuacauucuaugucugguuuucgcucaaaaacuuccuggaaaugacaauagcacggcaacgcugugccuugggcaccaugcaguaccaaacggaacgauagugaaaacaaucacgaaugaccgaauugaaguuacuaaugcuacugagcugguucagaauuccucaauaggugaaauaugcgacaguccucaucagauccuugauggagaaaacugcacacuaauagaugcucuauugggagacccucagugugauggcuuucaaaauaagaaaugggaccuuuuuguugaacgaagcaaagccuacagcaacuguuacccuuaugaugugccggauuaugccucccuuaggucacuaguugccucauccggcacacuggaguuuaacaaugaaagcuucaauugggcuggagucacucaaaacggaacaaguucugcuugcauaaggggaucuaauaguaguuucuuuaguagauuaaauugguugacccacuuaaacuucaaauacccagcauugaacgugacuaugccaaacaaugaacaauuugacaaauuguacauuugggggguucaccacccggguacggacaaggaccaaaucuuccuguaugcucaaucaucaggaagaaucacaguaucuaccaaaagaagccaacaagcuguaaucccgaauaucggaucuagacccagaauaaggaauaucccuagcagaauaagcaucuauuggacaauaguaaaaccgggagacauacuuuugauuaacagcacagggaaucuaauugcuccuagggguuacuucaaaauacgaagugggaaaagcucaauaaugagaucagaugcacccauuggcaaaugcaagucugaaugcaucacuccaaauggaagcauucccaaugacaaaccauuccaaaauguaaacaggaucacauacggggccugucccagauauguuaagcaaagcacucugaaauuagcaacaggaaugcgaaauguaccagagaaacaaacuagaggcauauuuggcgcaauagcggguuucauagaaaaugguugggagggaaugguggaugguugguacgguuucaggcaccaaaauucugagggaagaggacaagcagcagaucucaaaagcacucaagcagcaaucgaucaaaucaaugggaagcugaaucgauugaucgggaaaaccaacgagaaauuccaucagauugaaaaagaauucucagaaguagaagggagaauucaggaccuugagaaauauguugaggacacaaaaauagaucucuggucauacaacgcggagcuucuuguugcccuggagaaccaacauacaauugaucuaacugacucagaaaugaacaaacuguuugaaaaaacaaagaagcaacugagggaaaaugcugaggauaugggcaaugguuguuucaaaauauaccacaaaugugacaaugccugcauaggaucaaucagaaauggaacuuaugaccacgauguauacagggaugaagcauuaaacaaccgguuccagaucaagggaguugagcugaagucaggguacaaagauuggauccuauggauuuccuuugccauaucauguuuuuugcuuuguguuguuuuguugggguucaucaugugggccugccaaaagggcaacauuaggugcaacauuugcauuuga

SEQ ID NO: 44572 - RNA, 1701 nt, Artificial Sequence; identical to SEQ ID NO: 44568
  derived and/or modified CDS sequence (wt) from hemagglutinin__InfluenzaA__AIJ10778

SEQ ID NO: 44573 - RNA, 1701 nt, Artificial Sequence
  derived and/or modified CDS sequence (wt) from hemagglutinin__InfluenzaA__AIJ10780
augaagacuaucauugcuuugagcuacauucuaugucugguuuucgcucaaaaacuuccuggaaaugacaauagcacagcaacgcugugccuugggcaccaugcaguaccaaacggaacgauagugaaaacaaucacgaaugaccgaauugaaguuacuaaugcuacugagcugguucagaauuccucaauaggugaaauaugcgacaguccucaucagauccuugauggagaaaacugcacacuaauagaugcucuauugggagacccucagugugauagcuuucaaaauaagaaaugggaccuuuuuguugaacgaagcaaagccuacagcaacuguuacccuuaugaugugccggauuaugccucccuuaggucacuaguugccucauccggcacacuggaguuuaacaaugaaagcuucaauugggcuggagucacucaaaacggaacaaguucugcuugcauaaggggaucuaauaguaguuucuuuaguagauuaaauugguugacccacucaaacuucaaauacccagcauugaacgugacuaugccaaacaaugaacaauuugacaaauuguacauuugggggguucaccacccggguacggacaaggaccaaaucuuccuguaugcucaaucaucaggaagaaucacaguaucuaccaaaagaagccaacaagcuguaaucccgaauaucggaucuagacccagaauaaggaauaucccuagcagaauaagcaucuauuggacaauaguaaaaccgggagacauacuuuugauuaacagcacagggaaucuaauugcuccuagggguuacuucaaaauacgaagugggaaaagcucaauaaugagaucagaugcacccauuggcaaaugcaagucugaaugcaucacuccaaauggaagcauucccaaugacaaaccauuccaaaauguaaacaggaucacauacggggccugucccagauauguuaagcaaagcacucugaaauuggcaacaggaaugcgaaauguaccagagaaacaaacuagaggcauauuuggcgcaauagcggguuucauagaaaaugguugggagggaaugauggaugguugguacgguuucaggcaucaaaauucugagggaagaggacaagcagcagaucucaaaagcacucaagcagcaaucgaucaaaucaaugggaagcugaaucgauugaucgggaaaaccaacgagaaauuccaucagauugaaaaagaauucucagaaguagaagggagaauucaggacauugagaaauauguugaggacacaaaaauagaucucuggucauacaacgcggagcuucuuguugcccuggagaaccaacauacaauugaucuaacugacucagaaaugaacaaacuguuugaaaaaacaaagaagcaacugagggaaaaugcugaggauaugggcaaugguuguuucaaaauauaccacaaaugugacaaugccugcauaggaucaaucagaaauggaacuuaugaccacgauguauacagggaugaagcauuaaacaaccgguuccagaucaagggaguugagcugaagucaggguacaaagauuggauccuauggauuuccuuugccauaucauguuuuuugcuuuguguugcuuuguugggguucaucaugugggccugccaaaagggcaacauuaggugcaacauuugcauuuga

SEQ ID NO: 44574 - RNA, 1701 nt, Artificial Sequence; identical to SEQ ID NO: 44571
  derived and/or modified CDS sequence (wt) from hemagglutinin__InfluenzaA__AIJ10781

SEQ ID NO: 44575 - RNA, 1701 nt, Artificial Sequence
  derived and/or modified CDS sequence (wt) from hemagglutinin__InfluenzaA__AIJ10782
augaagacuaucauugcuuugagcuacauucuaugucugguuuucgcucaaaaacuuccuggaaaugacaauagcacggcaacgcugugccuugggcaccaugcaguaccaaacggaacgauagugaaaacaaucacgaaugaccgaauugaaguuacuaaugcuacugagcugguucagaauuccucaauaggugaaauaugcgacaguccucaucagauccuugauggagaaaacugcacacuaauagaugcucuauugggagacccucagugugauggcuuucaaaauaagaaaugggaccuuuuuguugaacgaagcaaagccuacagcaacuguuacccuuaugaugugccggauuaugccucccuuaggucacuaguugccucauccggcacacuggaguuuaacaaugaaagcuucaauugggcuggagucacucaaaacggaacaaguucugcuugcauaaggggaucuaauaguaguuucuuuaguagauuaaauugguugacccacuuaaacuucaaauacccagcauugaacgugacuaugccaaacaaugaacaauuugacaaauuguacauuugggggguucaccacccggguacggacaaggaccaaaucuuccuguaugcucaaucaucaggaagaaucacaguaucuaccaaaagaagccaacaagcuguaaucccgaauaucggaucuagacccagaauaaggaauaucccuagcagaauaagcaucuauuggacaauaguaaaaccgggagacauacuuuugauuaacagcacagggaaucuaauugcuccuagggguuacuucaaaauacgaagugggaaaagcucaauaaugagaucagaugcacccauuggcaaaugcaagucugaaugcaucacuccaaauggaagcauucccaaugacaaaccauuccaaaauguaaacaggaucacauacggggccugucccagauauguuaagcaaagcacucugaaauuggcaacaggaaugcgaaauguaccagagaaacaaacuagaggcauauuuggcgcaauagcggguuucauagaaaaugguugggagggaaugguggaugguugguacgguuucaggcaccaaaauucugagggaagaggacaagcagcagaucucaaaagcacucaagcagcaaucgaucaaaucaaugggaagcugaaucgauugaucgggaaaaccaacgagaaauuccaucagauugaaaaagaauucucagaaguagaagggagaauucaggaccuugagaaauauguugaggacacaaaaauagaucucuggucauacaacgcggagcuucuuguugcccuggagaaccaacauacaauugaucuaacugacucagaaaugaacaaacuguuugaaaaaacaaagaagcaacugagggaaaaugcugaggauaugggcaaugguuguuucaaaauauaccacaaaugugacaaugccugcauaggaucaaucagaaauggaacuuaugaccacgauguauacagggaugaagcauuaaacaaccgguuccagaucaagggaguugagcugaagucaggguacaaagauuggauccuauggauuuccuuugccauaucauguuuuuugcuuuguguuguuuuguugggguucaucaugugggccugccaaaagggcaacauuaggugcaacauuugcauuuga

SEQ ID NO: 44576 - RNA, 1701 nt, Artificial Sequence
  derived and/or modified CDS sequence (wt) from hemagglutinin__InfluenzaA__AIJ10783
augaagacuaucauugcuuugagcuacauucuaugucugguuuucgcucaaaaacuuccuggaaaugacaauagcacggcaacgcugugccuugggcaccaugcaguaccaaacggaacgauagugaaaacaaucacgaaugaccgaauugaaguuacuaaugcuacugagcugguucagaauuccucaauaggugaaauaugcgacaguccucaucagauccuugauggagaaaacugcacacuaauagaugcucuauugggagacccucagugugauggcuuucaaaauaagaaaugggaccuuuuuguugaacgaagcaaagccuacagcaacuguuacccuuaugaugugccggauuaugccucccuuaggucacuaguugccucauccggcacacuggaguuuaacaaugaaagcuucaauuggguuggagucacucaaaacggaacaaguucugcuugcauaaggggaucuaauaguaguuucuuuaguagauuaaauugguugacccacuuaaacuucaaauacccagcauugaacgugacuaugccaaacaaugaacaauuugacaaauuguacauuugggggguucaccacccggguacggacaaggaccaaaucuuccuguaugcucaaucaucaggaagaaucacaguaucuaccaaaagaagccaacaagcuguaaucccgaauaucggaucuagacccagaauaaggaauaucccuagcagaauaagcaucuauuggacaauaguaaaaccgggagacauacuuuugauuaacagcacagggaaucuaauugcuccuagggguuacuucaaaauacgaagugggaaaagcucaauaaugagaucagaugcacccauuggcaaaugcaagucugaaugcaucacuccaaauggaagcauucccaaugacaaaccauuccaaaauguaaacaggaucacauacggggccugucccagauauguuaagcaaagcacucugaaauuggcaacaggaaugcgaaauguaccagagaaacaaacuagaggcauauuuggcgcaauagcggguuucauagaaaaugguugggaaggaaugaaggaugguugguacgguuucaggcaucaaaauucugagggaagaggacaagcagcagaucucaaaagcacucaagcagcaaucgaucaaaucaaugggaagcugaaucgauugaucgggaaaaccaacgagaaauuccaucagauugaaaaagaauucucagaaguagaagggagaauucaggaccuugaaaaauauguugaggacacaaaaauagaucucuggucauacaacgcggagcuucuuguugcccuggagaaccaacauacaauugaucuaacugacucagaaaugaacaaacuguuugaaaaaacaaagaagcaacugagggaaaaugcugaggauaugggcaaugguuguuucaaaauauaccacaaaugugacaaugccugcauaggaucaaucagaaauggaacuuaugaccacgauguauacagggaugaagcauuaaacaaccgguuccagaucaagggaguugagcugaagucaggguacaaagauuggauccuauggauuuccuuugccauaucauguuuuuugcuuuguguugcuuuguugggguucaucaugugggccugccaaaagggcaacauuaggugcaacauuugcauuuga

SEQ ID NO: 44577 - RNA, 1701 nt, Artificial Sequence
  derived and/or modified CDS sequence (wt) from hemagglutinin__InfluenzaA__AIJ10784
augaagacuaucauugcuuugagcuacauucuaugucugguuuucgcucaaaaacuuccuggaaaugacaauagcacggcaacgcugugccuugggcaccaugcaguaccaaacggaacgauagugaaaacaaucacgaaugaccgaauugaaguuacuaaugcuacugagcugguucagaauuccucaauaggugaaauaugcgacaguccucaucagauccuugauggagaaaacugcacacuaauagaugcucuauugggagacccucagugugauggcuuucaaaauaagaaaugggaccuuuuuguugaacgaagcaaagccuacagcaacuguuacccuuaugaugugccggauuaugccucccuuaggucacuaguugccucauccggcacacuggaguuuaacaaugaaagcuucaauuggguuggagucacucaaaacggaacaaguucugcuugcauaaggggaucuaauaguaguuucuuuaguagauuaaauugguugacccacuuaaacuucaaauacccagcauugaacgugacuaugccaaacaaugaacaauuugacaaauuguacauuugggggguucaccacccggguacggacaaggaccaaaucuuccuguaugcucaaucaucaggaagaaucacaguaucuaccaaaagaagccaacaagcuguaaucccgaauaucggaucuagacccagaauaaggaauaucccuagcagaauaagcaucuauuggacaauaguaaaaccgggagacauacuuuugauuaacagcacagggaaucuaauugcuccuagggguuacuucaaaauacgaagugggaaaagcucaauaaugagaucagaugcacccauuggcaaaugcaagucugaaugcaucacuccaaauggaagcauucccaaugacaaaccauuccaaaauguaaacaggaucacauacggggccugucccagauauguuaagcaaagcacucugaaauuggcaacaggaaugcgaaauguaccagagaaacaaacuagaggcauauuuggcgcaauagcggguuucauagaaaaugguugggaaggaaugaaggaugguugguacgguuucaggcaucaaaauucugagggaagaggacaagcagcagaucucaaaagcacucaagcagcaaucgaucaaaucaaugggaagcugaaucgauugaucgggaaaaccaacgagaaauuccaucagauugaaaaagaauucucagaaguagaagggagaauucaggaccuugaaaaauauguugaggacacaaaaauagaucuuuggucauacaacgcggagcuucuuguugcccuggagaaccaacauacaauugaucuaacugacucagaaaugaacaaacuguuugaaaaaacaaagaagcaacugagggaaaaugcugaggauaugggcaaugguuguuucaaaauauaccacaaaugugacaaugccugcauaggaucaaucagaaauggaacuuaugaccacgauguauacagggaugaagcauuaaacaaccgguuccagaucaagggaguugagcugaagucaggguacaaagauuggauccuauggauuuccuuugccauaucauguuuuuugcuuuguguugcuuuguugggguucaucaugugggccugccaaaagggcaacauuaggugcaacauuugcauuuga

SEQ ID NO: 44578 - RNA, 1701 nt, Artificial Sequence
  derived and/or modified CDS sequence (wt) from hemagglutinin__InfluenzaA__AIJ10785
augaagacuaucauugcuuugagcuacauucuaugucugguuuucgcucaaaaacuuccaggaaaugacaauagcacggcaacgcugugccuugggcaccaugcaguaccaaacggaacgauagugaaaacaaucacgaaugaccgaauugaaguuacuaaugcuacugagcugguucagaauuccucaauaggugaaauaugcaacaguccucaucagauccuugauggagaaaacugcacacuaauagaugcucuauugggagacccucagugugauggcuuucaaaauaagaaaugggaccuuuuuguugaacggagcaaagccuacagcaacuguuacccuuaugaugugccggauuaugccucccuuaggucacuaguugccucauccggcacacuggaguuuaacaaugaaagcuucaauugggcuggagucacucaaaacggaacaaguucugcuugcauaaggggaucuaauaguaguuucuuuaguagauuaaauugguugacccacuuaaacuucaaauacccagcauugaacgugacuaugccaaacaaugaacaauuugacaaauuguacauuugggggguccaccacccggguacggacaaggaccaaaucuuccuguaugcucaaucaucaggaagaaucacaguaucuaccaaaagaagccaacaagcuguaaucccgaauaucggaucuagacccagaauaaggaauaucccuagcagaauaagcaucuauuggacaauaguaaaaccgggagacauacuuuugauuaacagcacagggaaucuaauugcuccuagggguuacuucaaaauacgaagugggaaaagcucaauaaugagaucagaugcacccauuggcaaaugcaagucugaaugcaucacuccaaauggaagcauucccaaugacaaaccauuccaaaauguaaacaggaucacauacggggccugucccagauauguuaagcaaagcacucugaaauuggcaacaggaaugcgaaauguaccagagaaacaaacuagaggcauauuuggcgcaauagcggguuucauagaaaaugguugggagggaaugauggaugguugguacgguuucaggcaucaaaauucugagggaagaggacaagcagcagaucucaaaagcacucaaucagcaaucgaucaaaucaaugggaagcugaaucgauugaucgggaaaaccaacgagaaauuccaucagauugaaaaagaauucucagaaguagaagggagaauucaggaccuugagaaauauguugaggacacaaaaauagaucucuggucauacaacgcggagcuucuuguugcccuggagaaccaacauacaauugaucuaacugacucagaaaugaacaaacuguuugaaaaaacaaagaagcaacugagggaaaaugcugaggauaugggcaaugguuguuucaaaauauaccacaaaugugacaaugccugcauaggaucaaucagaaauggaacuuaugaccacgauguauacagggaugaagcauuaaacaaccgguuccagaucaagggaguugagcugaagucaggguacaaagauuggauccuauggauuuccuuugccauaucauguuuuuugcuuuguguugcuuuguugggguucaucaugugggccugccaaaagggcaacauuaggugcaacauuugcauuuga

SEQ ID NO: 44579 - RNA, 1701 nt, Artificial Sequence; identical to SEQ ID NO: 44576
  derived and/or modified CDS sequence (wt) from hemagglutinin__InfluenzaA__AIJ10786

SEQ ID NO: 44580 - RNA, 1701 nt, Artificial Sequence
  derived and/or modified CDS sequence (wt) from hemagglutinin__InfluenzaA__AIJ10787
augaagacuaucauugcuuugagcuacauucuaugucugguuuucgcucaaaaacuuccuggaaaugacaauagcacggcaacgcugugccuugggcaccaugcaguaccaaacggaacgauagugaaaacaaucacgaaugaccgaauugaaguuacuaaugcuacugagcugguucagaauuccucaauaggugaaauaugcgacaguccucaucagauccuugauggagaaaacugcacacuaauagaugcucuauugggagacccucagugugauggcuuucaaaauaagaaaugggaccuuuuuguugaacgaagcaaagccuacagcaacuguuacccuuaugaugugccggauuaugccucccuuaggucacuaguugccucauccggcacacuggaguuuaacaaugaaagcuucaauuggguuggagucacucaaaacggaacaaguucugcuugcauaaggggaucuaauaguaguuucuuuaguagauuaaauugguugacccacuuaaacuucaaauacccagcauugaacgugacuaugccaaacaaugaacaauuugacaaauuguacauuugggggguucaccacccggguacggacaaggaccaaaucuuccuguaugcucaaucaucaggaagaaucacaguaucuaccaaaagaagccaacaagcuguaaucccgaauaucggaucuagacccagaauaaggaauaucccuagcagaauaagcaucuauuggacaauaguaaaaccgggagacauacuuuugauuaacagcacagggaaucuaauugcuccuagggguuacuucaaaauacgaagugggaaaagcucaauaaugagaucagaugcacccauuggcaaaugcaagucugaaugcaucacuccaaauggaagcauucccaaugacaaaccauuccaaaauguaaacaggaucacauacggggccugucccagauauguuaagcaaagcacucugaaauuggcaacaggaaugcgaaauguaccagagaaacaaacuagaggcauauuuggcgcaauagcggguuucauagaaaaugguugggaaggaaugaaggaugguugguacgguuucaggcaucaaaauucugagggaagaggacaagcagcagaucucaaaagcacucaagcagcaaucgaucaaaucaaugggaagcugaaucgauugaucgggaaaaccaacgagaaauuccaucagauugaaaaagaauucucagaaguagaagggaggauucaggaccuugaaaaauauguugaggacacaaaaauagaucuuuggucauacaacgcggagcuucuuguugcccuggagaaccaacauacaauugaucuaacugacucagaaaugaacaaacuguuugaaaaaacaaagaagcaacugagggaaaaugcugaggauaugggcaaugguuguuucaaaauauaccacaaaugugacaaugccugcauaggaucaaucagaaauggaacuuaugaccacgauguauacagggaugaagcauuaaacaaccgguuccggaucaagggaguugagcugaagucaggguacaaagauuggauccuauggauuuccuuugccauaucauguuuuuugcuuuguguugcuuuguugggguucaucaugugggccugccaaaagggcaacauuaggugcaacauuugcauuuga

SEQ ID NO: 44581 - RNA, 1701 nt, Artificial Sequence
  derived and/or modified CDS sequence (wt) from hemagglutinin__InfluenzaA__AIJ10788
augaagacuaucauugcuuugagcuacauucuaugucugguuuucgcucaaaaacuuccuggaaaugacaauagcacggcaacgcugugccuugggcaccaugcaguaccaaacggaacgauagugaaaacaaucacgaaugaccgaauugaaguuacuaaugcuacugagcugguucagaauuccucaauaggugaaauaugcaacaguccucaucagauccuugauggagaaaacugcacacuaauagaugcucuauugggagacccucagugugauggcuuucaaaauaagaaaugggaccuuuuuguugaacggagcaaagccuacagcaacuguuacccuuaugaugugccggauuaugccucccuuaggucacuaguugccucauccggcacacuggaguuuaacaaugaaagcuucaauugggcuggagucacucaaaacggaacaaguucugcuugcauaaggggaucuaauaguaguuucuuuaguagauuaaauugguugacccacuuaaacuucaaauacccagcauugaacgugacuaugccaaacaaugaacaauuugacaaauuguacauuugggggguccaccacccggguacggacaaggaccaaaucuuccuguaugcucaaucaucaggaagaaucacaguaucuaccaaaagaagccaacaagcuguaaucccgaauaucggaucuagacccagaauaaggaauaucccuagcagaauaagcaucuauuggacaauaguaaaaccgggagacauacuuuugauuaacagcacagggaaucuaauugcuccuagggguuacuucaaaauacgaagugggaaaagcucaauaaugagaucagaugcacccauuggcaaaugcaagucugaaugcaucacuccaaauggaagcauucccaaugacaaaccauuccaaaauguaaacaggaucacauacggggccugucccagauauguuaagcaaagcacucugaaauuggcaacaggaaugcgaaauguaccagagaaacaaacuagaggcauauuuggcgcaauagcggguuucauagaaaaugguugggagggaaugauggaugguugguacgguuucaggcaucaaaauucugagggaagaggacaagcagcagaucucaaaagcacucaaucagcaaucgaucaaaucaaugggaagcugaaucgauugaucgggaaaaccaacgagaaauuccaucagauugaaaaagaauucucagaaguagaagggagaauucaggaccuugagaaauauguugaggacacaaaaauagaucucuggucauacaacgcggagcuucuuguugcccuggagaaccaacauacaauugaucuaacugacucagaaaugaacaaacuguuugaaaaaacaaagaagcaacugagggaaaaugcugaggauaugggcaaugguuguuucaaaauauaccacaaaugugacaaugccugcauaggaucaaucagaaauggaacuuaugaccacgauguauacagggaugaagcauuaaacaaccgguuccagaucaagggaguugagcugaagucaggguacaaagauuggauccuauggauuuccuuugccauaucauguuuuuugcuuuguguugcuuuguugggguucaucaugugggccugccaaaagggcaacauuaggugcaacauuugcauuuga

SEQ ID NO: 44582 - RNA, 1701 nt, Artificial Sequence; identical to SEQ ID NO: 44581
  derived and/or modified CDS sequence (wt) from hemagglutinin__InfluenzaA__AIJ10789

SEQ ID NO: 44583 - RNA, 1701 nt, Artificial Sequence
  derived and/or modified CDS sequence (wt) from hemagglutinin__InfluenzaA__AIJ10790
augaagacuaucauugcuuugagcuacauucuaugucugguuuucgcucaaaaacuuccuggaaaugacaauagcacggcaacgcugugccuugggcaccaugcaguaccaaacggaacgauagugaaaacaaucacgaaugaccgaauugaaguuacuaaugcuacugagcugguucagaauuccucaauaggugaaauaugcgacaguccucaucagauccuugauggagaaaacugcacacuaauagaugcucuauugggagacccucagugugauggcuuucaaaauaagaaaugggaccuuuuuguugaacgaagcaaagccuacagcaacuguuacccuuaugaugugccggauuaugccucccuuaggucacuaguugccucauccggcacacuggaguuuaacaaugaaagcuucaauuggguuggagucacucaaaacggaacaaguucugcuugcauaaggggaucuaauaguaguuucuuuaguagauuaaauugguugacccacuuaaacuucaaauacccagcauugaacgugacuaugccaaacaaugaacaauuugacaaauuguacauuugggggguucaccacccggguacggacaaggaccaaaucuuccuguaugcucaaucaucaggaagaaucacaguaucuaccaaaagaagccaacaagcuguaaucccgaauaucggaucuagacccagaauaaggaauaucccuagcagaauaagcaucuauuggacaauaguaaaaccgggagacauacuuuugauuaacagcacagggaaucuaauugcuccuagggguuacuucaaaauacgaagugggaaaagcucaauaaugagaucagaugcacccauuggcaaaugcaagucugaaugcaucacuccaaauggaagcauucccaaugacaaaccauuccaaaauguaaacaggaucacauacggggccugucccagauauguuaagcaaagcacucugaaauuggcaacaggaaugcgaaauguaccagagaaacaaacuagaggcauauuuggcgcaauagcggguuucauagaaaaugguugggaaggaaugaaggaugguugguacgguuucaggcaucaaaauucugagggaagaggacaagcagcagaucucaaaagcacucaagcagcaaucgaucaaaucaaugggaagcugaaucgauugaucgggaaaaccaacgagaaauuccaucagauugaaaaagaauucucagaaguagaagggagaauucaggaccuugaaaaauauguugaggacacaaagauagaucucuggucauacaacgcggagcuucuuguugcccuggagaaccaacauacaauugaucuaacugacucagaaaugaacaaacuguuugaaaaaacaaagaagcaacugagggaaaaugcugaggauaugggcaaugguuguuucaaaauauaccacaaaugugacaaugccugcauaggaucaaucagaaauggaacuuaugaccacgauguauacagggaugaagcauuaaacaaccgguuccagaucaagggaguugagcugaagucaggguacaaagauuggauccuauggauuuccuuugccauaucauguuuuuugcuuuguguugcuuuguugggguucaucaugugggccugccaaaagggcaacauuaggugcaacauuugcauuuga

SEQ ID NO: 44584 - RNA, 1701 nt, Artificial Sequence
  derived and/or modified CDS sequence (wt) from hemagglutinin__InfluenzaA__AIJ10791
augaagacuaucauugcuuugagcuacauucuaugucugguuuucgcucaaaaacuuccuggaaaugacaauagcacggcaacgcugugccuugggcaccaugcaguaccaaacggaacgauagugaaaacaaucacgaaugaccgaauugaaguuacuaaugcuacugagcugguucagaauuccucaauaggugaaauaugcgacaguccucaucagauccuugauggagaaaacugcacacuaauagaugcucuauugggagacccucagugugauggcuuucaaaauaagaaaugggaccuuuuuguugaacgaagcaaagccuacagcaacuguuacccuuaugaugugccggauuaugccucccuuaggucacuaguugccucauccggcacacuggaguuuaacaaugaaagcuucaauugggcuggagucacucaaaacggaacaaguucugcuugcauaaggggaucuaauaguaguuucuuuaguagauuaaauugguugacccacuuaaacuucaaauacccagcauugaacgugacuaugccaaacaaugaacaauuugacaaauuguacauuugggggguucaccacccggguacggacaaggaccaaaucuuccuguaugcucaaucaucaggaagaaucacaguaucuaccaaaagaagccaacaagcuguaauuccgaauaucggaucuagacccagaauaaggaauaucccuagcagaauaagcaucuacuggacaauaguaaaaccgggagacauacuuuugauuaacagcacagggaaucuaauugcuccuagggguuacuucaaaauacgaagugggaaaagcucaauaaugagaucagaugcacccauuggcaaaugcaagucugaaugcaucacuccaaauggaagcauucccaaugacaaaccauuccaaaauguaaacaggaucacauacggggccugucccagauauguuaagcaaagcacucugaaauuggcaacaggaaugcgaaauguaccagagaaacaaacuagaggcauauuuggcgcaauagcggguuucauagaaaaugguugggagggaaugguggaugguugguacgguuucaggcaccaaaauucugagggaagaggacaagcagcagaucucaaaagcacucaagcagcaaucgaucaaaucaaugggaagcugaaucgauugaucgggaaaaccaacgagaaauuccaucagauugaaaaagaauucucagaaguagaagggagaauucaggaccuugagaaauauguugaggacacaaaaauagaucucuggucauacaacgcggagcuacuuguugcccuggagaaccaacauacaauugaucuaacugacucagaaaugaacaaacuguuugaaaaaacaaagaagcaacugagggaaaaugcugaggauaugggcaaugguuguuucaaaauauaccacaaaugugacaaugccugcauaggaucaaucagaaauggaacuuaugaccacgauguauacagggaugaagcauuaaacaaccgauuccagaucaagggaguugagcugaagucaggguacaaagauuggauccuauggauuuccuuugccauaucauguuuuuugcuuuguguuguuuuguugggguucaucaugugggccugccaaaagggcaacauuaggugcaacauuugcauuuga

SEQ ID NO: 44585 - RNA, 1701 nt, Artificial Sequence
  derived and/or modified CDS sequence (wt) from hemagglutinin__InfluenzaA__AIJ10792
augaagacuaucauugcuuugagcuacauucuaugucugguuuucgcucaaaaacuuccuggagaugacaauagcacggcaacgcugugccuugggcaccaugcaguaccaaacggaacgauagugaaaacaaucacgaaugaccgaauugaaguuacuaaugcuacugagcugguucagaauuccucaauaggugaaauaugcgacaguccucaucagauccuugauggagaaaacugcacacuaauagaugcucuauugggagacccucagugugauggcuuucaaaauaagaaaugggaccuuuuuguugaacgaagcaaagccuacagcaacuguuacccuuaugaugugccggauuaugccucccuuaggucacuaguugccucauccggcacacuggaguuuaacaaugaaagcuucaauugggcuggagucacucaaaacggaacaaguucugcuugcauaagggggucuaauaguaguuucuuuaguagauuaaauugguugacccacuuaaacuucaaauacccagcauugaacgugacuaugccaaacaaugaacaauuugacaaauuguacauuugggggguucaccacccggguacggacaaggaccaaaucuuccuguaugcucaaucaucaggaagaaucacaguaucuaccaaaagaagccaacaagcuguaaucccgaauaucggaucuagacccagaauaaggaacaucccuagcagaauaagcaucuauuggacaauaguaaaaccaggagacauacuuuugauuaacagcacagggaaucuaauugcuccuagggguuacuucaaaauacgaagugggaaaagcucaauaaugagaucagaugcacccauuggcaaaugcaagucugaaugcaucacuccaaauggaagcauucccaaugacaaaccauuccaaaauguaaacaggaucacauacggggccugucccagauauguuaagcaaagcacucugaaauuggcaacaggaaugcgaaauguaccagagaaacaaacuagaggcauauuuggcgcaauagcggguuucauagaaaaugguugggagggaaugguggaugguugguacgguuucaggcaucaaaauucugagggaagaggacaagcagcagaucucaaaagcacucaagcagcaaucgaucaaaucaaugggaagcugaaucgauugaucgggaaaaccaacgagaaauuccaucagauugaaaaagaauucucagaaguagaagggagaauucaggaccuugagaaauauguugaggacacaaaaauagaucucuggucauacaacgcggagcuucuuguugcccuggagaaccaacauacaauugaucuaacugacucagaaaugaacaaacuguuugaaaaaacaaagaagcaacugagggaaaaugcugaggauaugggcaaugguuguuucaaaauauaccacaaaugugacaaugccugcauaggaucaaucagaaauggaacuuaugaccacgauguauacagggaugaagcauuaaacaaccgguuccagaucaagggaguugagcugaagucaggguacaaagauuggauccuauggauuuccuuugccauaucauguuuuuugcuuuguguuguuuuguugggguucaucaugugggccugccaaaagggcaacauuaggugcaacauuugcauuuga

SEQ ID NO: 44586 - RNA, 1701 nt, Artificial Sequence
  derived and/or modified CDS sequence (wt) from hemagglutinin__InfluenzaA__AIJ29347
augaagacuaucauugcuuugagcuacauucuaugucugguuuucgcucaaaaacuuccuggaaaugacaauagcacggcaacgcugugccuugggcaccaugcaguaccaaacggaacgauagugaaaacaaucacgaaugaccgaauugaaguuacuaaugcuacugagcugguucagaauuccucaauaggugaaauaugcgacaguccucaucagauccuugauggagaaaacugcacacuaauagaugcucuauugggagacccucagugugauggcuuucaaaauaagaaaugggaccuuuuuguugaacgaagcaaagccuacagcaacuguuacccuuaugaugugccggauuaugccucccuuaggucacuaguugccucauccggcacacuggaguuuaacaaugaaagcuucaauuggacuggagucacucaaaacggaacaaguucugcuugcauaaggagaucuaauaguaguuucuuuaguagauuaaauugguugacccacuuaaacuucaaauacccagcauugaacgugacuaugccaaacaaugaacaauuugacaaauuguacauuugggggguucaccacccggguacggacaaggaccaaaucuuccuguaugcucaaucaucaggaagaaucacaguaucuaccaaaagaagccaacaagcuguaaucccgaauaucggaucuagacccagaauaaggaauaucccuagcagaauaagcaucuauuggacaauaguaaaaccgggagacauacuuuugauuaacagcacagggaaucuaauugcuccuagggguuacuucaaaauacgaagugggaaaagcucaauaaugagaucagaugcacccauuggcaaaugcaagucugaaugcaucacuccaaauggaagcauucccaaugacaaaccauuccaaaauguaaacaggaucacauacggggccugucccagauauguuaagcaaagcacucugaaauuggcaacaggaaugcgaaauguaccagagaaacaaacuagaggcauauuuggcgcaauagcggguuucauagaaaaugguugggagggaaugguggaugguugguacgguuucaggcaucaaaauucugagggaagaggacaagcagcagaucucaaaagcacucaagcagcaaucgaucaaaucaaugggaagcugaaucgauugaucgggaaaaccaacgagaaauuccaucagauugaaaaagaauucucagaaguagaagggagaauucaggaccuugagaaauauguugaggacacuaaaauagaucucuggucauacaacgcggagcuucuuguugcccuggagaaccaacauacaauugaucuaacugacucagaaaugaacaaacuguuugaaaaaacaaagaagcaacugagggaaaaugcugaggauaugggcaaugguuguuucaaaauauaccacaaaugugacaaugccugcauaggaucaaucagaaauggaacuuaugaccacgauguauacagggaugaagcauuaaacaaccgguuccagaucaagggaguugagcugaagucaggguacaaagauuggauccuauggauuuccuuugccauaucauguuuuuugcuuuguguugcuuuguugggguucauaaugugggccugccaaaagggcaacauuaggugcaacauuugcauuuga

SEQ ID NO: 44587 - RNA, 1701 nt, Artificial Sequence
  derived and/or modified CDS sequence (wt) from hemagglutinin__InfluenzaA__AIJ29349
augaagacuaucauugcuuugagcuacauucuaugucugguuuucgcucaaaaauuuccuggaaaugacaauagcacggcaacgcugugccuugggcaccaugcaguaccaaacggaacgauagugaaaacaaucacgaaugaccgaauugaaguuacuaaugcuacugagcugguucagaauuccucaauaggugaaauaugcgacaguccucaucagauccuugauggagaaaacugcacacuaauagaugcucuauugggagacccucagugugauggcuuccaaaauaagaaaugggaccuuuuuguugaacgaagcaaagccuacagcaacuguuacccuuaugaugugccggauuaugccucccuuaggucacuaguugccucauccggcacacuggaguuuaacaaugaaagcuucaauuggacuggagucacucaaaacggaacaaguucugcuugcauaaggagaucuaauaguaguuucuuuaguagauuaaauugguugacccacuuaaacuucaaauacccagcauugaacgugacuaugccaaacaaugaacaauuugacaaauuguacauuugggggguucaccacccggguacggacaaggaccaaaucuuccuguaugcucaaucaucaggaagaaucacaguaucuaccaaaagaagccaacaagcuguaaucccgaauaucggaucuagacccagaauaaggaauaucccuagcagaauaagcaucuauuggacaauaguaaaaccgggagacauacuuuugauuaacagcacagggaaucugauugcuccuagggguuacuucaaaauacgaagugggaaaagcucaauaaugagaucagaugcacccauuggcaaaugcaagucugaaugcaucacuccaaauggaagcauucccaaugacaaaccauuccaaaauguaaacaggaucacauacggggccugucccagauauguuaagcaaagcacucugaaauuggcaacaggaaugcgaaauguaccagagaaacaaacuagaggcauauuuggcgcaauagcggguuucauagaaaaugguugggagggaaugguggaugguugguacgguuucaggcaucaaaauucugagggaagaggacaagcagcagaucucaaaagcacucaagcagcaaucgaucaaaucaaugggaagcugaaucgauugaucgggaaaaccaacgagaaauuccaucagauugaaaaagaauucucagaaguagaagggagaauucaggaccuugagaaauauguugaggacacuaaaauagaucucuggucauacaacgcggagcuucuuguugcccuggagaaccaacauacaauugaucuaacugacucagaaaugaacaaacuguuugaaaaaacaaagaagcaacugagggaaaaugcugaggauaugggcaaugguuguuucaaaauauaccacaaaugugacaaugccugcauaggaucaaucagaaauggaacuuaugaccacgauguauacagagaugaagcauuaaacaaccgguuccagaucaagggaguugagcugaagucaggguacaaagauuggauccuauggauuuccuuugccauaucauguuuuuugcuuuguguugcuuuguugggguucaucaugugggccugccaaaagggcaacauuaggugcaacauuugcauuuga

SEQ ID NO: 44588 - RNA, 1701 nt, Artificial Sequence
  derived and/or modified CDS sequence (wt) from hemagglutinin__InfluenzaA__AIJ29351
augaagacuaucauugcuuugagcuacauucuaugucugguuuucgcucaaaaacuuccuggaaaugacaauagcacggcaacgcugugccuugggcaccaugcaguaccaaacggaacgauagugaaaacaaucacgaaugaccgaauugaaguuacuaaugcuacugagcugguucagaauuccucaauaggugaaauaugcgacaguccucaucagauccuugauggagaaaacugcacacuaauagaugcucuauugggagacccucagugugauggcuuucaaaauaagaaaugggaccuuuuuguugaacgaagcaaagccuacagcaacuguuacccuuaugaugugccggauuaugccucccuuaggucacuaguugccucauccggcacacuggaguuuaacaaugaaagcuucaauuggacuggagucacucaaaacggaacaaguucugcuugcauaaggagauccaauaguaguuucuuuaguagauuaaauugguugacccacuuaaacuucaaauacccagcauugaacgugacuaugccaaacaaugaacaauuugacaaauuguacauuugggggguucaccacccggguacggacaaggaccaaaucuuccuguaugcucaaucaucaggaagaaucacaguaucuaccaaaagaagccaacaagcuguaaucccgaauaucggaucuagacccagaauaaggaauaucccuagcagaauaagcaucuauuggacaauaguaaaaccgggagacauacuuuugauuaacagcacagggaaucuaauugcuccuagggguuacuucaaaauacgaagugggaaaagcucaauaaugagaucagaugcacccauuggcaaaugcaagucugaaugcaucacuccaaauggaagcauucccaaugacaaaccauuccaaaauguaaacaggaucacauacggggccugucccagauauguuaagcaaagcacucugaaauuggcaacaggaaugcgaaauguaccagagaaacaaacuagaggcauauuuggcgcaauagcggguuucauagaaaaugguugggagggaaugguggaugguugguacgguuucaggcaucaaaauucugagggaagaggacaagcagcagaucucaaaagcacucaagcagcaaucgaucaaaucaaugggaagcugaaucgauugaucgggaaaaccaacgagaaauuccaucagauugaaaaagaauucucagaaguagaagggagaauucaggaccuugagaaauauguugaggacacuaaaauagaucucuggucauacaacgcggagcuucuuguugcccuggagaaccaacauacaauugaucuaacugacucagaaaugaacaaacuguuugaaaaaacaaagaagcaacugagggaaaaugcugaggauaugggcaaugguuguuucaaaauauaccacaaaugugacaaugccugcauaggaucaaucagaaauggaacuuaugaccacgauguguacagggaugaagcauuaaacaaccgguuccagaucaagggaguugagcugaagucaggguacaaagauuggauccuauggauuuccuuugccauaucaugucuuuugcuuuguguugcuuuguugggguucaucaugugggccugccaaaagggcaacauuaggugcaacauuugcauuuga

SEQ ID NO: 44589 - RNA, 1701 nt, Artificial Sequence
  derived and/or modified CDS sequence (wt) from hemagglutinin__InfluenzaA__AIJ29353
augaagacuaucauugcuuugagcuacauucuaugucugguuuucgcucaaaaacuuccugaaaaugacaacagcacggcaacgcugugccuugggcaccaugcagugccaaacggaacgauagugaaaacaaucacgaaugaccaaauugaaguuacuaaugcuacugagcugguucagaguuccucaacaggugaaauaugcaacaguccucaucagauccuugauggagaaaacugcacacuaauagaugcucuauugggagacccucagugugauggcuuccaaaacaagaaaugggaccuuuuuguugaacgaagcaaagcccacagcaacuguuacccuuaugaugugccggauuaugccucccuuaggucacuaguugccucauccggcacacuggaguuuaacaaugaaagcuucaauuggacuggagucacucaaaacggaacaagcucugcuugcauaaggagaucuaauaauaguuucuuuaguagauugaauugguugacccacuuaaacuucaaauacccagcauugaacgugacuaugccaaacaaugaacaauuugacaaauuauacauuugggggguucaccacccggguacggacaaggaccaaaucuuccuguaugcucaagcaucaggaagaaucacaguaucuaccaaaagaagccaacaagcuguaauuccgaauaucggaucuagacccagaguaaggaauaucccuagcagaguaagcaucuauuggacaauaguaaaaccgggagacauacuuuugauuaacagcacagggaaucuaauugcuccuagggguuacuucaaaauacgaagugggaaaagcucaauaaugagaucagaugcacccauuggcaaaugcaauucuacaugcaucacuccaaauggaagcauucccaaugacaaaccauuccaaaauguaaacaggaucacauacggggccugucccagauauguuaagcaaaacacucugaaauuggcaacaggaaugagaaauguaccagagaaacaaacuagaggcauauuuggcgcaauagcggguuucauagaaaaugguugggagggaaugguggaugguugguacgguuucaggcaucaaaauucugagggaaggggucaagcagcagaucucaaaagcacucaagcagcaaucgaucaaaucaaugggaagcugaauagauugaucgggaaaaccaacgagaaauuccaucagauugaaaaagaauucucagaagucgaagggagaauucaggaccuugagaaauauguugaggacacuaaaauagaucucuggucauacaacgcggagcuucuuguugcccuggagaaccaacacacaauugaucuaacugacucagaaaugaacaaacuguuugaaaaaacaaagaagcaacugagggaaaaugcugaggauaugggcaaugguuguuucaaaauauaccacaaaugugacaaugccugcauaggaucaaucagaaauggaaccuaugaccacgauguguacagagaugaagcauuaaacaaccgauuccagaucaagggaguugagcugaagucaggguacaaagauuggauccuauggauuuccuuugccauaucauguuuuuugcuuuguguugcuuuguugggguucaucaugugggccugccaaaaaggcaacauuaggugcaacauuugcauuuga

SEQ ID NO: 44590 - RNA, 1701 nt, Artificial Sequence
  derived and/or modified CDS sequence (wt) from hemagglutinin__InfluenzaA__AIJ29355
augaagacuaucauugcuuugagcuacauucuaugucugguuuucgcucaaaaacuuccuggaaaugacaacagcacggcaacgcugugccuugggcaccaugcaguaccaaacggaacgauagugaaaacaaucacgaaugaccaaauugaaguuacuaaugcuacugagcugguucagaguuccucaacaggugaaauaugcgacaguccucaucagauccuugauggagaaaacugcacacuaauagaugcucuauugggagacccucagugugauggcuuccaaaauaagaagugggaccuuuuuguugaacgaagcaaagccuacagcaacuguuacccuuaugaugugccggauuaugccucccucaggucacuaguugccucauccggcacacuggaguuuaacaaugaaagcuucaauuggacuggagucacucaaaacggaacaagcucugcuugcauaaggagaucuaauaguaguuucuuuaguagauugaauugguugacccacuuaaacuucaaauacccagcauugaacgugacuaugccaaacaaugaacaauuugacaaauuguacauuugggggguucaccacccggguacggacaaggaccaaaucuuccuguaugcucaaucaucaggaagaaucacaguaucuaccaaaagaagccagcaagcuguaaucccgaauaucggaucuagauccagaauaaggaauaucccuagcagaauaagcaucuauuggacaauaguaaaaccgggagacauacuuuugauuaacagcacagggaaucuaauugcuccuagggguuacuucaaaauacgaagugggaaaagcucaauaaugagaucagaugcacccauuggcaaaugcaauucugaaugcaucacuccaaauggaagcauucccaaugacaaaccauuccaaaauguaaacaggaucacauacggggccugucccagauauguuaagcaaagcacucugaaauuggcaacaggaaugcgaaauguaccagagaaacaaacuagaggcauauuuggcgcaauagcggguuucauagaaaaugguugggagggaaugguggaugguugguacgguuucaggcaucaaaauucugagggaagaggacaagcagcagaucucaaaagcacucaagcagcaaucgaucaaaucaaugggaagcugaaucgauugaucgggaaaaccaacgagaaauuccaucagauugaaaaagaauucucagaagucgaagggagaauucaggaccucgagaaauacguugaggacacuaaaauagaucucuggucauacaacgcggagcuucuuguugcccuggagaaccaacauacaauugaucuaacugacucagaaaugaacaaacuguuugaaaaaacaaagaagcaacugagggaaaaugcugaggauaugggcaaugguuguuucaaaauauaccacaaaugugacaaugccugcauaggaucaaucagaaauggaacuuauaaccacgauguauacagagaugaagcauuaaacaaccgguuccagaucaagggaguugagcugaagucaggguacaaagauuggauccuauggauuuccuuugccauaucauguuuuuugcuuuguguugcuuuguugggguucaucaugugggccugccaaaagggcaacauuaggugcaacauuugcauuuga

SEQ ID NO: 44591 - RNA, 1701 nt, Artificial Sequence
  derived and/or modified CDS sequence (wt) from hemagglutinin__InfluenzaA__AIJ29357
augaagacuaucauugcuuugagcuacauucuaugucugguuuucgcucaaaaacuuccuggaaaugacaacagcacugcaacgcugugccuugggcaccaugcaguaccaaacggaacgauagugaaaacaaucacgaaugaccaaauugaaguuacuaaugcuacugagcugguucagaguuccucaacaggugaaauaugcgacaguccucaucagauccuugauggagaaaacugcacacuaauagaugcucuauugggagacccucagugugauggcuuccaaaauaagaagugggaccuuuuuguugaacgaagcaaagccuacagcaacuguuacccuuaugaugugccggauuaugccucccuuaggucacuaguugccucauccggcacacuggaguuuaacaaugaaagcuucaauuggacuggagucacucaaaacggaacaagcucugcuugcauaaggagaucuaauaguaguuucuuuaguagauugaauugguugacccacuuaaacuucaaauacccagcauugaacgugacuaugccaaacaaugaacaauuugacaaauuguacauuugggggguucaccacccggguacggacaaggaccaaaucuuccuguaugcucaaucaucaggaagaaucacaguaucuaccaaaagaagccagcaagcuguaaucccgaauaucggaucuagacccagaauaaggaauaucccuagcagaauaagcaucuauuggacaauaguaaaaccgggagacauacuuuugauuaacagcacagggaaucuaauugcuccuagggguuacuucaaaauacgaagugggaaaagcucaauaaugagaucagaugcacccauuggcaaaugcaauucugaaugcaucacuccaaauggaagcauucccaaugacaaaccauuccaaaauguaaacaggaucacauacggggccugucccagauauguuaagcaaagcacucugaaauuggcaacaggaaugcgaaauguaccagagaaacaaacuagaggcauauuuggcgcaauagcggguuucauagaaaaugguugggagggaaugguggaugguugguacgguuucaggcaucaaaauucugagggaagaggacaagcagcagaucucaaaagcacucaagcagcaaucgaucaaaucaaugggaaacugaaucgauugaucgggaaaaccaacgagaaauuccaucagauugaaaaagaauucucagaagucgaagggagaauucaggaccucgagaaauacguugaggacacuaaaauagaucucuggucauacaacgcggagcuucuuguugcccuggagaaccaacauacaauugaucuaacugacucagaaaugaacaaacuguuugaaaaaacaaagaagcaacugagggaaaaugcugaggauaugggcaaugguuguuucaaaauauaccacaaaugugacaaugccugcauaggaucaaucagaaauggaacuuauaaccacgauguauacagagaugaagcauuaaacaaccgguuccagaucaaaggaguugagcugaagucaggguacaaagauuggauccuauggauuuccuuugccauaucauguuuuuugcuuuguguugccuuguugggguucaucaugugggcuugccaaaagggcaacauuaggugcaacauuugcauuuga

SEQ ID NO: 44592 - RNA, 1701 nt, Artificial Sequence
  derived and/or modified CDS sequence (wt) from hemagglutinin__InfluenzaA__AIJ29359
augaagacuaucauugcuuugagcuacauucuaugucugguuuucgcucaaaaacuuccuggaaaugacaauagcacggcaacgcugugccuugggcaccaugcaguaccaaacggaacgauagugaaaacaaucacgaaugaccgaauugaaguuacuaaugcuacugagcugguucagaauuccucaauaggugaaauaugcgacaguccucaucagauccuugauggagaaaacugcacacuaauagaugcucuauugggagacccucagugugauggcuuccaaaauaagaaaugggaccuuuuuguugaacgaagcaaagccuacagcaacuguuacccuuaugaugugccggauuaugccucccuuaggucacuaguugccucauccggcacacuggaguuuaacaaugaaagcuucaauuggacuggagucacucaaaacggaacaaguucugcuugcauaaggagaucuaauaauaguuucuuuaguagauuaaauugguugacccacuuaaacuucaaauacccagcauugaacgugacuaugccaaacaaugaacaauuugacaaauuguacauuugggggguucaccacccggguacggacaaggaccaaaucuuccuguaugcucaaucaucaggaagaaucacaguaucuaccaaaagaagccaacaagcuguaaucccgaauaucggaucuagacccagaauaaggaauaucccuagcagaauaagcaucuauuggacaauaguaaaaccgggagacauacuuuugauuaacagcacagggaaucuaauugcuccuagggguuacuucaaaauacgaagugggaaaagcucaauaaugagaucagaugcacccauuggcaaaugcaagucugaaugcaucacuccaaauggaagcauucccaaugacaaaccauuccaaaauguaaacaggaucacauacggggccugucccagauauguuaagcaaagcacucugaaauuggcaacaggaaugcgaaauguaccagagaaacaaacuagaggcauauuuggcgcaauagcggguuucauagaaaaugguugggagggaaugguggaugguugguacgguuucaggcaucaaaauucugagggaagaggacaagcagcagaucucaaaagcacucaagcagcaaucgaucaaaucaaugggaagcugaaucgauugaucgggaaaaccaacgagaaauuccaucagauugaaaaagaauucucagaaguagaagggagaauucaggaccucgagaaauacguugaggacacuaaaauagaucucuggucauacaacgcggagcuucuuguugcccuggagaaccaacauacaauugaucuaacugacucagaaaugaacaaacuguuugaaaaaacaaagaagcaacugagggaaaaugcugaggauaugggcaaugguuguuucaaaauauaccacaaaugugacaaugccugcauaggaucaaucagaaauggaacuuaugaccacgauguauacagagaugaagcaauaaacaaccgguuccagaucaagggaguugagcugaagucaggguacaaagauuggauccuauggauuuccuuugccauaucauguuuuuugcuuuguguugcuuuguugggguucaucaugugggccugccaaaagggcaacauuaggugcaacauuugcauuuga

SEQ ID NO: 44593 - RNA, 1701 nt, Artificial Sequence
  derived and/or modified CDS sequence (wt) from hemagglutinin__InfluenzaA__AIJ29361
augaagacuaucauugcuuugagcuacauucuaugucugguuuucgcucaaaaacuuccuggaaaugacaauagcacggcaacgcugugccuugggcaccaugcaguaccaaacggaacgauagugaaaacaaucacgaaugaccgaauugaaguuacuaaugcuacugagcugguucagaauuccucaauaggugaaauaugcgacaguccucaucagauccuugauggagaaaacugcacacuaauagaugcucuauugggagacccucagugugauggcuuccaaaauaagaaaugggaccuuuuuguugaacgaagcaaagccuacagcaacuguuacccuuaugaugugccggauuaugucucccuuaggucacuaguugccucauccggcacacuggaguuuaacaaugaaagcuucaauuggacuggagucacucaaaacggaacaaguucugcuugcauaaggagaucuaauaauaguuucuuuaguagauuaaauugguugacccacuuaaacuucaaauacccagcauugaacgugacuaugccaaacaaugaacaauuugacaaauuguacauuugggggguucaccacccggguacggacaaggaccaaaucuuccuguaugcucaaucaucaggaagaaucacaguaucuaccaaaagaagccaacaagcuguaaucccgaauaucggaucuagacccagaauaaggaauaucccuagcagaauaagcaucuauuggacaauaguaaaaccgggagacauacuuuugauuaacagcacagggaaucuaauugcuccuagggguuacuucaaaauacgaagugggaaaagcucaauaaugagaucagaugcacccauuggcaaaugcaagucugaaugcaucacuccaaauggaagcauucccaaugacaaaccauuccaaaauguaaacaggaucacauacggggccugucccagauauguuaagcaaagcacucugaaauuggcaacaggaaugcgaaauguaccagagaaacaaacuagaggcauauuuggcgcaauagcggguuucauagaaaaugguugggagggaaugguggaugguugguacgguuucaggcaucaaaauucugagggaagaggacaagcagcagaucucaaaagcacucaagcagcaaucgaucaaaucaaugggaagcugaaucgauugaucgggaaaaccaacgagaaauuccaucagauugaaaaagaauucucagaaguagaagggagaauucaggaccuugagaaauauguugaggacacuaaaauagaucucuggucauacaacgcggagcuucuuguugcccuggagaaccaacauacaauugaucuaacugacucagaaaugaacaaacuguuugaaaaaacaaagaagcaacugagggaaaaugcugaggauaugggcaaugguuguuucaaaauauaccacaaaugugacaaugccugcauaggaucaaucagaaauggaacuuaugaccacgauguauacagagaugaagcauuaaacaaccgguuccagaucaagggaguugagcugaagucaggguacaaagauuggauccuauggauuuccuuugccauaucauguuuuuugcuuuguguugcuuuguugggguucaucaugugggccugccaaaagggcaacauuaggugcaacauuugcauuuga

SEQ ID NO: 44594 - RNA, 1701 nt, Artificial Sequence
  derived and/or modified CDS sequence (wt) from hemagglutinin__InfluenzaA__AIL93623
augaaggcaauacuaguaguucugcuauauacauuugcaaccgcaaaugcagacacauuauguauagguuaucaugcgaacaauucaacagacacuguagauacaguacuagaaaagaauguaacaguaacacacucuguuaaccuucuagaagacaagcauaacgggaaacuaugcaaacuaagagggguagccccauugcauuuggguaaauguaacauugcuggcuggauccugggaaauccagagugugaaucacucuccacagcaaguucaugguccuacauuguggaaacaucuaguucagacaauggaacguguuacccaggagauuucaucaauuaugaggagcuaagagagcaauugagcucagugucaucauuugaaagguuugagauauuccccaagacaaguucauggcccaaucaugacucgaacaaagguguaacggcagcauguccucacgcuggagcaaaaagcuucuacaaaaauuuaauauggcuaguuaaaaaaggaaauucauacccaaagcucagccaauccuacauuaaugauaaagggaaagaaguccucgugcuguggggcauccaccauccaucuacuacugcugaccaacaaagucucuaucagaaugcagaugcauauguuuuuguggggacaucaagauacagcaaaaaguucaagccggaaauagcaauaagacccaaagugagggaucaagaagggagaaugaacuauuacuggacacuaguagagccaggagacaaaauaacauucgaagcaacuggaaaucuagugguaccgagauaugcauucacaauggaaagaaaugcuggaucugguauuaucauuucagauacaccaguccacgauugcaauacaacuugucagacacccgagggugcuauaaacaccagccucccauuucagaauauacauccgaucacaauuggaaaauguccaaaguauguaaaaagcacaaaauugagacuggccacaggauugaggaaugucccgucuauucaaucuagaggccuauucggggccauugccggcuucauugaagggggguggacagggaugguagauggaugguacgguuaucaccaucaaaaugagcaggggucaggauaugcagccgaccugaagagcacacaaaaugccauugacaagauuacuaacaaaguaaauucuguuauugaaaagaugaauacacaguucacagcaguggguaaagaguucaaccaccuggaaaaaagaauagagaauuuaaauaaaaaaguugaugaugguuuccuggacauuuggacuuacaaugccgaacuguugguucuauuggaaaaugaaagaacuuuggacuaccacgauucaaaugugaagaacuuguaugaaaagguaagaaaccaguuaaaaaacaaugccaaggaaauuggaaacggcugcuuugaauuuuaccacaaaugcgauaacacgugcauggaaagugucaaaaaugggacuuaugacuacccaaaauacucagaggaagcaaaauuaaacagagaaaaaauagaugggguaaagcuggaaucaacaaggauuuaccagauuuuggcgaucuauucaacugucgccaguucauugguacugguagucucccugggggcaaucagcuucuggaugugcucuaaugggucucuacaauguagaauauguauuuaa

SEQ ID NO: 44595 - RNA, 1701 nt, Artificial Sequence
  derived and/or modified CDS sequence (wt) from hemagglutinin__InfluenzaA__AIL93634
augaaggcaauacuaguaguucuacuauauacauuugcaaccgcaaaugcagacacauuauguauagguuaucaugcgaacaauucaacagacacuguagacacaguacuagaaaagaauguaacaguaacacacucuguuaaccuucuagaagacaagcauaacgggaaacuaugcaaacuaagagggguagccccauugcauuuggguaaauguaacauugcuggcuggauccugggaaauccagagugugaaucacucuccacagcaaguucaugguccuacauuguggaaacaucuaguucagacaauggaacguguuacccaggagauuucaucaauuaugaggagcuaagagagcaauugagcucagugucaucauuugaaagguuugagauauuccccaagacaaguucauggcccaaucaugacucgaacaaagguguaacggcagcauguccucacgcuggagcaaaaagcuucuacaaaaauuuaauauggcuaguuaaaaaaggaaauucauacccaaagcucagccaauccuacauuaaugauaaagggaaagaaguccucgugcuguggggcauccaccauccaucuacuacugcugaccaacaaagucucuaucagaaugcagaugcauauguuuuuguggggacaucaagauacagcaaaaaguucaagccggaaauagcaauaagacccaaagugagggaucaagaagggagaaugaacuauuacuggacacuaguagagccgggagacaaaauaacauucgaagcaacuggaaaucuagugguaccgagauaugcauucacaauggaaagaaaugcuggaucugguauuaucauuucagauacaccaguccacgauugcaauacaacuugucagacacccgagggugcuauaaacaccagccucccauuucagaauauacauccgaucacaauuggaaaauguccaaaguauguaaaaaguacaaaauugagacuggccacaggauugaggaaugucccgucuauucaaucuagaggccuauucggggccauugccggcuucauugaagggggguggacagggaugguagauggaugguacgguuaucaccaccaaaaugagcaggggucaggauaugcagccgaccugaagagcacacaaaaugccauugacaagauuacuaacaaaguaaauucuguuauugaaaagaugaauacacaguucacagcaguggguaaagaguucaaccaccuggaaaaaagaauagagaauuuaaauaaaaaaguugaugaugguuuccuggacauuuggacuuacaaugccgaacuguugguucuauuggaaaaugaaagaacuuuggacuaccacgauucaaaugugaagaacuuguaugaaaagguaagaaaccaguuaaaaaacaaugccaaggaaauuggaaacggcugcuuugaauuuuaccacaaaugcaauaacacgugcauggaaagugucaagaaugggacuuaugacuacccaaaauacucagaggaagcaaaauuaaacagagaaaaaauagaugggguaaagcuggaaucaacaaggauuuaccagauuuuggcgaucuauucaacugucgccaguucauugguacugguagucucccugggggcaaucagcuucuggaugugcucuaaugggucucuacaauguagaauauguauuuaa

SEQ ID NO: 44596 - RNA, 1701 nt, Artificial Sequence
  derived and/or modified CDS sequence (wt) from hemagglutinin__InfluenzaA__AIL93645
augaagacuaucauugcuuugagcuacauucuaugucugguuuucgcucaaaaacuuccuggaaaugacaauagcacggcaacgcugugccuugggcaccaugcaguaccaaacggaacgauagugaaaacaaucacgaaugaucgaauugaaguuacuaaugcuacugagcugguucagaauuccucaauaggugaaauaugcgacaguccucaucagauccuugauggagaaaacugcacacuaauagaugcucuauugggagacccucagugugauggcuuucaaaauaagaaaugggaccuuuuuguugaacgaagcaaagccuacagcaacuguuacccuuaugaugugccggauuaugccucccuuaggucacuaguugccucauccggcacacuggaguuuaacaaugaaagcuucaauugggcuggagucacucaaaacggaacaaguucugcuugcauaaggggaucuaauaguaguuucuuuaguagauuaaauugguugacccacuuaaacuucagauacccagcauugaacgugacuaugccaaacaaugaacaauuugacaaauuguacauuugggggguucaccacccggguacggacaaggaccaaaucuuccuguaugcucaaucaucaggaagaaucacaguaucuaccaaaagaagccaacaagcuguaaucccgaauaucggaucuagacccagaauaaggaauaucccuagcagaauaagcaucuauuggacaauaguaaaaccgggagacauacuuuugauuaacagcacagggaaucuaauugcuccuagggguuacuucaaaauacgaagugggaaaagcucaauaaugagaucagaugcacccauuggcaaaugcaagucugaaugcaucacuccaaauggaagcauucccaaugacaaaccauuccaaaauguaaacaggaucacauacggggccugucccagauauguuaagcaaagcacucugaaauuggcaacaggaaugcgaaauguaccagagaaacaaacuagaggcauauuuggcgcaauagcggguuucauagaaaaugguugggagggaaugguggaugguugguacgguuucaggcaucaaaauucugagggaagaggacaagcagcagaucucaaaagcacucaagcagcaaucgaucaaaucaaugggaagcugaaucgauugaucgggaaaaccaacgagaaauuccaucagauugaaaaagaauucucagaaguagaagggagaauucaggaccuugagaaauauguugaggacacaaaaauagaucucuggucauacaacgcggagcuucuuguugcccuggagaaccaacauacaauugaucuaacugacucagaaaugaacaaacuguuugaaaaaacaaagaagcaacugagggaaaaugcugaggauaugggcaaugguuguuucaaaauauaccacaaaugugacaaugccugcauaggaucaaucagaaauggaacuuaugaccacgauguauacagggaugaggcauugaacaaccgguuccagaucaagggaguugaguugaagucaggguacaaagauuggauccuauggauuuccuuugccauaucauguuuuuugcuuuguguugcuuuguugggguucaucaugugggccugccaaaagggcaacauuaggugcaacauuugcauuuga

SEQ ID NO: 44597 - RNA, 1701 nt, Artificial Sequence; identical to SEQ ID NO: 42155
  derived and/or modified CDS sequence (wt) from hemagglutinin__InfluenzaA__AIL93657

SEQ ID NO: 44598 - RNA, 1701 nt, Artificial Sequence; identical to SEQ ID NO: 42155
  derived and/or modified CDS sequence (wt) from hemagglutinin__InfluenzaA__AIL93669

SEQ ID NO: 44599 - RNA, 1701 nt, Artificial Sequence
  derived and/or modified CDS sequence (wt) from hemagglutinin__InfluenzaA__AIL93681
augaaggcaauacuaguaguucuacuauauacauuugcaaccgcaaaugcagacacauuauguauagguuaucaugcgaacaauucaacagacacuguagacacaguacuagaaaagaauguaacaguaacacacucuguuaaccuucuagaagacaagcauaacgggaaacuaugcaaacuaagagggguagccccauugcauuuggguaaauguaacauugcuggcuggauccuggggaauccagagugugaaucacucuccacagcaaguucaugguccuacauuguggaaacaucuaguucagacaauggaacguguuacccaggagauuucaucaauuaugaggagcuaagagagcaauugagcucagugucaucauuugaaagguuugagauauuccccaagacaaguucauggcccaaucaugacucgaacaaagguguaacggcagcauguccucacgcuggagcaaaaagcuucuacaaaaauuuaauauggcuaguuaaaaaaggaaauucuuacccaaagcucagccaauccuacauuaaugauaaagggaaagaaguccucgugcuguggggcauccaccauccaucuacuacugcugaccaacaaagucucuaucagaaugcagaugcauauguuuuuguggggacaucaagauacagcaaaaaguucaagccggaaauagcaauaagacccaaagugagggaucaagaagggagaaugaacuauuacuggacacuaguagagccgggagacaaaauaacauucgaagcaacuggaaaucuagugguaccgagauaugcauucacaauggaaagaagugcuggaucugguauuaucauuucagauacaccaguccacgauugcaauacaacuugucagacacccgagggugcuauaaacaccagccucccauuucagaauauacauccgaucacaauuggaaaauguccaaaguauguaaaaagcacaaaauugagacuggccacaggauugaggaaugucccgucuauucaaucuagaggccuauucggggccauugccggcuucauugaagggggguggacagggaugguagacggaugguacgguuaucaccaccaaaaugagcaggggucaggauaugcagccgaccugaagagcacacaaaaugccauugacaagauuacuaacaaaguaaauucuguuauugaaaagaugaauacacaguucacagcaguggguaaagaguucaaccaccuggaaaaaagaauagagaauuugaauaaaaaaguugaugaugguuuccuggacauuuggacuuacaaugccgaacuguugguucuauuggaaaaugaaagaacuuuggacuaccacgauucaaaugugaagaacuuguaugaaaagguaagaaaccaguuaaaaaacaaugccaaggaaauuggaaacggcugcuuugaauuuuaccacaaaugcgauaacacgugcauggaaagugucaagaaugggacuuaugacuacccaaaauacucagaggaagcaaaauuaaacagagaaaaaauagaugggguaaagcuggaaucaacaaggauuuaccagauuuuggcgaucuauucaacugucgccaguucauugguacugguagucucccugggggcaaucagcuucuggaugugcucuaaugggucucuacaauguagaauauguauuuaa

SEQ ID NO: 44600 - RNA, 1701 nt, Artificial Sequence; identical to SEQ ID NO: 44596
  derived and/or modified CDS sequence (wt) from hemagglutinin__InfluenzaA__AIL93692

SEQ ID NO: 44601 - RNA, 1701 nt, Artificial Sequence; identical to SEQ ID NO: 44596
  derived and/or modified CDS sequence (wt) from hemagglutinin__InfluenzaA__AIL93716

SEQ ID NO: 44602 - RNA, 1701 nt, Artificial Sequence; identical to SEQ ID NO: 42155
  derived and/or modified CDS sequence (wt) from hemagglutinin__InfluenzaA__AIL93728

SEQ ID NO: 44603 - RNA, 1701 nt, Artificial Sequence
  derived and/or modified CDS sequence (wt) from hemagglutinin__InfluenzaA__AIL93740
augaagacuaucauugcuuugagcuacauucuaugucugguuuucgcucaaaaacuuccuggaaaugacaauagcacggcaacgcugugccuugggcaccaugcaguaccaaacggaacgauagugaaaacaaucacgaaugaccgaauugaaguuacuaaugcuacugagcugguucagaauuccucaauaggugaaauaugcgacaguccucaucagauccuugauggagaaaacugcacacuaauagaugcucuauugggagacccucagugugauggcuuucaaaauaagaaaugggaccuuuuuguugaacgaagcaaagccuacagcaacuguuacccuuaugaugugccggauuaugccucccuuaggucacuaguugccucauccggcacacuggaguuuaacaaugaaagcuucaauugggcuggagucacucaaaacggaacaaguucugcuugcauaaggggaucuaauaguaguuucuuuaguagauuaaauugguugacccacuuaaacuucaaauacccagcauugaacgugacuaugccaaacaaugaacaauuugacaaauuguacauuugggggguucaccacccggguacggacaaggaccaaaucuuccuguaugcucaaucaucaggaagaaucacaguaucuaccaaaagaagccaacaagcuguaaucccgaauaucggaucuagacccagaauaaggaauaucccuagcagaauaagcaucuauuggacaauaguaaaaccaggagacauacuuuugauuaacagcacagggaaucuaauugcuccuagggguuacuucaaaauacgaagugggaaaagcucaauaaugagaucagaugcacccauuggcaaaugcaagucugaaugcaucacuccaaauggaagcauucccaaugacaaaccauuccaaaauguaaacaggaucacauacggggccugucccagauauguuaagcaaagcacucugaaauuggcaacaggaaugcgaaauguaccagagaaacaaacuagaggcauauuuggcgcaauagcggguuucauagaaaaugguugggagggaaugguggaugguugguacgguuucaggcaucaaaauucugagggaagaggacaagcagcagaucucaaaagcacucaagcagcaaucgaucaaaucaaugggaagcugaaucgauugaucgggaaaaccaacgagaaauuccaucagauugaaaaagaauucucagaaguagaagggagaauucaggaccuugagaaauauguugaggacacaaaaauagaucucuggucauacaacgcggagcuucuuguugcccuggagaaccaacauacaauugaucuaacugacucagaaaugaacaaacuguuugaaaaaacaaagaagcaacugagggaaaaugcugaggauaugggcaaugguuguuucaaaauauaccacaaaugugacaaugccugcauaggaucaaucagaaauggaacuuaugaccacgauguauacagggaugaggcauugaacaaccgguuccagaucaagggaguugaguugaagucaggguacaaagauuggauccuauggauuuccuuugccauaucauguuuuuugcuuuguguugcuuuguugggguucaucaugugggccugccaaaagggcaacauuaggugcaacauuugcauuuga

SEQ ID NO: 44604 - RNA, 1701 nt, Artificial Sequence
  derived and/or modified CDS sequence (wt) from hemagglutinin__InfluenzaA__AIL93752
augaagacuaucauugcuuugagcuacauucuaugucugguuuucgcucaaaaacuuccuggaaaugacaauagcacggcaacgcugugccuugggcaccaugcaguaccaaacggaacgauagugaaaacaaucacgaaugaccgaauugaaguuacuaaugcuacugagcugguucagaauuccucaauaggugaaauaugcgacagaccucaucagauccuugauggagaaaacugcacacuaauagaugcucuauugggagacccucagugugauggcuuucaaaauaagaaaugggaccuuuuuguugaacgaagcaaagccuacagcaacuguuacccuuaugaugugccggauuaugccucccuuaggucacuaguugccucauccggcacacuggaguuuaacaaugaaagcuucaauugggcuggagucacucaaaacggaacaaguucugcuugcauaaggggaucuaauaguaguuucuuuaguagauuaaauugguugacccacuuaaacuucaaauacccagcauugaacgugacuaugccaaacaaugaacaauuugacaaauuguacauuugggggguucaccacccggguacggacaaggaccaaaucuuccuguaugcucaaucaucaggaagaaucacaguaucuaccaaaaaaagccaacaagcuguaaucccgaauaucggaucuagacccagaauaaggaauaucccuagcagaauaagcaucuauuggacaauaguaaaaccgggagacauacuuuugauuaacagcacagggaaucuaauugcuccuagggguuacuucaaaauacgaagugggaaaagcucaauaaugagaucagaugcacccauuggcaaaugcaagucugaaugcaucacuccaaauggaagcauucccaaugacaaaccauuccaaaauguaaacaggaucacauacggggccugucccagauauguuaagcaaagcacucugaaauuggcaacaggaaugcgaaauguaccagagaaacaaacuagaggcauauuuggcgcaauagcggguuucauagaaaaugguugggagggaaugguggaugguugguacgguuucaggcaucaaaauucugagggaagaggacaagcagcagaucucaaaagcacucaagcagcaaucgaucaaaucaaugggaagcugaaucgauugaucgggaaaaccaacgagaaauuccaucagauugaaaaagaauucucagaaguagaagggagaauucaggaccuugagaaauauguugaggacacaaaaauagaucucuggucauacaacgcggagcuucuuguugcccuggagaaccaacauacaauugaucuaacugacucagaaaugaacaaacuguuugaaaaaacaaagaagcaacugagggaaaaugcugaggauaugggcaaugguuguuucaaaauauaccacaaaugugacaaugccugcauaggaucaaucagaaauggaacuuaugaccacgauguauacagggaugaggcauugaacaaccgguuccagaucaagggaguugaguugaagucaggguacaaagauuggauccuauggauuuccuuugccauaucauguuuuuugcuuuguguugcuuuguugggguucaucaugugggccugccaaaagggcaacauuaggugcaacauuugcauuuga

SEQ ID NO: 44605 - RNA, 1701 nt, Artificial Sequence
  derived and/or modified CDS sequence (wt) from hemagglutinin__InfluenzaA__AIL93764
augaagacuaucauugcuuugagcuacauucuaugucugguuuucacucaaaaacuuccuggaaaugacaauagcacggcaacgcugugccuugggcaccaugcaguaccaaacggaacgauagugaaaacaaucacgaaugaccgaauugaaguuacuaaugcuacugagcugguucagaauuccucaauaggugaaauaugcgacaguccucaucagauccuugauggagaaaacugcacacuaauagaugcucuauugggagacccucagugugauggcuuucaaaauaagaaaugggaccuuuuuguugaacgaagcaaagccuacagcaacuguuacccuuaugaugugccggauuaugccucccuuaggucacuaguugccucauccggcacacuggaguuuaacaaugaaagcuucaauugggcuggagucacucaaaacggaacaaguucugcuugcauaaggggaucuaauaguaguuucuuuaguagauuaaauugguugacccacuuaaacuucaaauacccagcauugaacgugacuaugccaaacaaugaacaauuugacaaauuguacauuugggggguucaccacccggguacggacaaggaccaaaucuuccuguaugcucaaucaucaggaagaaucacaguaucuaccaaaagaagccaacaagcuguaaucccgaauaucggaucuagacccagaauaaggaauaucccuagcagaauaagcaucuauuggacaauaguaaaaccgggagacauacuuuugauuaacagcacagggaaucuaauugcuccuagggguuacuucaaaauacgaagugggaaaagcucaauaaugagaucagaugcacccauuggcaaaugcaagucugaaugcaucacuccaaauggaagcauucccaaugacaaaccauuccaaaauguaaacaggaucacauacggggccugucccagauauguuaagcaaagcacucugaaauuggcaacaggaaugcgaaauguaccagagaaacaaacuagaggcauauuuggcgcaauagcggguuucauagaaaaugguugggagggaaugguggaugguugguacgguuucaggcaucaaaauucugagggaagaggacaagcagcagaucucaaaagcacucaagcagcaaucgaucaaaucaaugggaagcugaaucgauugaucgggaaaaccaacgagaaauuccaucagauugaaaaagaauucucagaaguagaagggagaauucaggaccuugagaaauauguugaggacacaaaaauagaucucuggucauacaacgcggagcuucuuguugcccuggagaaccaacauacaauugaucuaacugacucagaaaugaacaaacuguuugaaaaaacaaagaagcaacugagggaaaaugcugaggauaugggcaaugguuguuucaaaauauaccacaaaugugacaaugccugcauaggaucaaucagaaaugaaacuuaugaccacgauguauacagggaugaagcauuaaacaaccgguuccagaucaagggaguugaguugaagucaggguacaaagauuggauccuauggauuuccuuugccauaucauguuuuuugcuuuguguugcuuuguugggguucaucaugugggccugccaaaagggcaacauuaggugcaacauuugcauuuga

SEQ ID NO: 44606 - RNA, 1701 nt, Artificial Sequence; identical to SEQ ID NO: 42155
  derived and/or modified CDS sequence (wt) from hemagglutinin__InfluenzaA__AIL93776

SEQ ID NO: 44607 - RNA, 1701 nt, Artificial Sequence
  derived and/or modified CDS sequence (wt) from hemagglutinin__InfluenzaA__AIL93788
augaagacuaucauugcuuugagcuacauucuaugucugguuuucgcucaaaaacuuccuggaaaugacaauagcacggcaacgcugugccuugggcaccaugcaguaccaaacggaacgauagugaaaacaaucacgaaugaccgaauugaaguuacuaaugcuacugagcugguucagaauuccucaauaggugaaauaugcgacaguccucaucagauccuugauggagaaaacugcacacuaauagaugcucuauugggagacccucagugugauggcuuucaaaauaagaaaugggaccuuuuuguugaacgaagcaaagccuacagcaacuguuacccuuaugaugugccggauuaugccucccuuaggucacuaguugccucauccggcacacuggaguuuaacaaugaaagcuucaauugggcuggagucacucaaaacggaacaaguucugcuugcauaaggggaucuaauaguaguuucuuuaguagauuaaauugguugacccacuuaaacuucaaauacccagcauugaacgugacuaugccaaacaaugaacaauuugacaaauuguacauuugggggguucaccacccggguacggacaaggaccaaaucuuccuguaugcucaaucaucaggaagaaucacaguaucuaccaaaagaagccaacaagcuguaaucccgaauaucggaucuagacccagaauaaggaauaucccuagcagaauaagcaucuauuggacaauaguaaaaccgggagacauacuuuugauuaacagcacagggaaucuaauugcuccuagggguuacuucaaaauacgaagugggaaaagcucaauaaugagaucagaugcacccauuggcaaaugcaagucugaaugcaucacuccaaauggaagcauucccaaugacaaaccauuccaaaauguaaacaggaucacauacggggccugucccagauacguuaagcaaagcacucugaaauuggcaacaggaaugcgaaauguaccagagaaacaaacuagaggcauauuuggcgcaauagcggguuucauagaaaaugguugggagggaaugguggaugguugguacgguuucaggcaucaaaauucugagggaagaggacaagcagcagaucucaaaagcacucaagcagcaaucgaucaaaucaaugggaagcugaaucgauugaucgggaaaaccaacgagaaauuccaucagauugaaaaagaauucucagaaguagaagggagaauucaggaccuugagaaauauguugaggacacaaaaauagaucucuggucauacaacgcggagcuucuuguugcccuggagaaccaacauacaauugaucuaacugacucagaaaugaacaaacuguuugaaaaaacaaagaagcagcugagggaaaaugcugaggauaugggcaaugguuguuucaaaauauaccacaaaugugacaaugccugcauaggaucaaucagaaauggaacuuaugaccacgauguauacagggaugaggcauugaacaaccgguuccagaucaagggaguugaguugaagucaggguacaaagauuggauccuauggauuuccuuugccauaucauguuuuuugcuuuguguugcuuuguugggguucaucaugugggccugccaaaagggcaacauuaggugcaacauuugcauuuga

SEQ ID NO: 44608 - RNA, 1701 nt, Artificial Sequence; identical to SEQ ID NO: 42155
  derived and/or modified CDS sequence (wt) from hemagglutinin__InfluenzaA__AIL93812

SEQ ID NO: 44609 - RNA, 1701 nt, Artificial Sequence; identical to SEQ ID NO: 42155
  derived and/or modified CDS sequence (wt) from hemagglutinin__InfluenzaA__AIL93824

SEQ ID NO: 44610 - RNA, 1701 nt, Artificial Sequence
  derived and/or modified CDS sequence (wt) from hemagglutinin__InfluenzaA__AIL93836
augaaggcaauacuaguaguucuacuauauacauuugcaaccgcaaaugcagacacauuauguauagguuaucaugcgaacaauucaacagacacuguagacacaguacuagaaaagaauguaacaguaacacacucuguuaaccuucuagaagacaagcauaacgggaaacuaugcaaacuaagagggguagccccauugcauuuggguaaauguaacauugcuggcuggauccugggaaauccagagugugaaucacucuccacagcaaguucaugguccuacauuguggaaacaucuaguucagacaauggaacguguuacccaggagauuucaucaauuaugaggagcuaagagagcaauugagcucagugucaucauuugaaagguuugagauauuccccaagacaaguucauggcccaaucaugacucgaacaaagguguaacggcagcauguccucacgcuggagcaaaaagcuucuacaaaaauuuaauauggcuaguuaaaaaaggaaauucauacccaaagcucagccaauccuacauuaaugauaaagggaaagaaguccucgugcuguggggcauccaccauccaucuacuacugcugaccaacaaagucucuaucagaaugcagaugcauauguuuuuguggggacaucaagauacagcaaaaaguucaagccggaaauagcaauaagacccaaagugagggaucaagaagggagaaugaacuauuacuggacacuaguagagccgggagacaaaauaacauucgaagcaacuggaaaucuagugguaccgagauaugcauucacaauggaaagaagugcuggaucugguauuaucauuucagauacaccaguccacgauugcaauacaacuugucagacacccgagggugcuauaaacaccagccucccauuucagaauauacauccgaucacaauuggaaaauguccaaaguauguaaaaagcacaaaauugagacuggccacaggauugaggaaugucccgucuauucaaucuagaggccuauucggggccauugccggcuucauugaagggggguggacagggaugguagauggaugguacgguuaucaccaccaaaaugagcaggggucaggauaugcagccgaccugaagagcacacaaaaugccauugacaagauuacuaacaaaguaaauucuguuauugaaaagaugaauacacaguucacagcaguggguaaagaguucaaccaccuggaaaaaagaauagagaauuuaaauaaaaaaguugaugaugguuuccuggacauuuggacuuacaaugccgaacuguugguucuauuggaaaaugaaagaacuuuggacuaccacgauucaaaugugaagaacuuguaugaaaagguaagaaaccaguuaaaaaacaaugccaaggaaauuggaaacggcugcuuugaauuuuaccacaaaugcgauaacacgugcauggaaagugucaagaaugggacuuaugacuacccaaaauacucagaggaagcaaaauuaaacagagaaaaaauagaugggguaaagcuggaaucaacaaggauuuaccagauuuuggcgaucuauucaacugucgccaguucauugguacugguagucucccugggggcaaucagcuucuggaugugcucuaaugggucucuacaauguagaauauguauuuaa

SEQ ID NO: 44611 - RNA, 1701 nt, Artificial Sequence
  derived and/or modified CDS sequence (wt) from hemagglutinin__InfluenzaA__AIL93847
augaaggcaauacuaguaguucuacuauauacauuugcaaccgcaaaugcagacacauuauguauagguuaucaugcgaacaauucaacagacacuguagacacaguacuagaaaagaauguaacaguaacacacucuguuaaccuucuagaagacaagcauaacgggaaacuaugcaaacuaagagggguagccccauugcauuuggguaaauguaacauugcuggcuggauccugggaaauccagagugugaaucacucuccacagcaaguucaugguccuacauuguggaaacaucuaguucagacaauggaacguguuacccaggagauuucaucaauuaugaggagcuaagagagcaauugagcuccgugucaucauuugaaagguuugagauauuccccaagacaaguucauggcccaaucaugacucgaacaaagguguaacggcagcauguccucacgcuggagcaaaaagcuucuacaaaaauuuaauauggcuaguuaaaaaaggaaauucauacccaaagcucagccaauccuacauuaaugauaaagggaaagaaguccucgugcuguggggcauccaccauccaucuacuacugcugaccaacaaagucucuaucagaaugcagaugcauauguuuuuguggggacaucaagauacagcaaaaaguucaagccggaaauagcaauaagacccaaagugagggaucaagaagggagaaugaacuauuacuggacacuaguagagccgggagacaaaauaacauucgaagcaacuggaaaucuagugguaccgagauaugcauucacaauggaaagaagugcuggaucugguauuaucauuucagauacaccaguccacgauugcaauacaacuugucagacacccgagggugcuauaaacaccagccucccauuucagaauauacauccgaucacaauuggaaaauguccaaaguauguaaaaagcacaaaauugagacuggccacaggauugaggaaugucccgucuauucaaucuagaggccuauucggggccauugccggcuucauugaagggggguggacagggaugguagauggaugguacgguuaucaccaccaaaaugagcaggggucaggauaugcagccgaccugaagagcacacaaaaugccauugacaagauuacuaacaaaguaaauucuguuauugaaaagaugaauacacaguucacagcaguggguaaagaguucaaccaccuggaaaaaagaauagagaauuuaaauaaaaaaguugaugaugguuuccuggacauuuggacuuacaaugccgaacuguugguucuauuggaaaaugaaagaacuuuggacuaccacgauucaaaugugaagaacuuguaugaaaagguaagaaaccaguuaaaaaacaaugccaaggaaauuggaaacggcugcuuugaauuuuaccacaaaugcgauaacacgugcauggaaagugucaagaaugggacuuaugacuacccaaaauacucagaggaagcaaaauuaaacagagaaaaaauagaugggguaaagcuggaaucaacaaggauuuaccagauuuuggcgaucuauucaacugucgccaguucauugguacugguagucucccugggggcaaucugcuucuggaugugcucuaaugggucucuacaauguagaauauguauuuaa

SEQ ID NO: 44612 - RNA, 1701 nt, Artificial Sequence
  derived and/or modified CDS sequence (wt) from hemagglutinin__InfluenzaA__AIL93858
augaagacuaucauugcuuugagcuacauucuaugucugguuuucgcucaaaaacuuccuggaaaugacaauagcacggcaacgcugugccuugggcaccaugcaguaccaaacggaacgauagugaaaacaaucacgaaugaucgaauugaaguuacuaaugcuacugagcugguucagaauuccucaauaggugaaauaugcgacaguccucaucagauccuugauggagaaaacugcacacuaauagaugcucuauugggagacccucagugugauggcuuucaaaauaagaaaugggaccuuuuuguugaacgaagcaaagccuacagcaacuguuacccuuaugaugugccggauuaugccucccuuaggucacuaguugccucauccggcacacuggaguuuaacaaugaaagcuucaauugggcuggagucacucaaaacggaacaaguucugcuugcauaaggggaucuaauaguaguuucuuuaguagauuaaauugguugacccacuuaaacuucagauacccagcauugaacgugacuaugccaaacaaugaacaauuugacaaauuguacauuugggggguucaccacccggguacggacaaggaccaaaucuuccuguaugcucaaucaucaggaagaaucacaguaucuaccaaaagaagccaacaagcuguaaucccgaauaucggaucuagacccagaauaaggaauaucccuagcagaauaagcaucuauuggacaauaguaaaaccgggagacauacuuuugauuaacagcacagggaaucuaauugccccuagggguuacuucaaaauacgaagugggaaaagcucaauaaugagaucagaugcacccauuggcaaaugcaagucugaaugcaucacuccaaauggaagcauucccaaugacaaaccauuccaaaauguaaacaggaucacauacggggccugucccagauauguuaagcaaagcacucugaaauuggcaacaggaaugcgaaauguaccagagaaacaaacuagaggcauauuuggcgcaauagcggguuucauagaaaaugguugggagggaaugguggaugguugguacgguuucaggcaucaaaauucugagggaagaggacaagcagcagaucucaaaagcacucaagcagcaaucgaucaaaucaaugggaagcugaaucgauugaucgggaaaaccaacgagaaauuccaucagauugaaaaagaauucucagaaguagaagggagaauucaggaccuugagaaauauguugaggacacaaaaauagaucucuggucauacaacgcggagcuucuuguugcccuggagaaccaacauacaauugaucuaacugacucagaaaugaacaaacuguuugaaaaaacaaagaagcaacugagggaaaaugcugaggauaugggcaaugguuguuucaaaauauaccacaaaugugacaaugccugcauaggaucaaucagaaauggaacuuaugaccacgauguauacagggaugaggcauugaacaaccgguuccagaucaagggaguugaguugaagucaggguacaaagauuggauccuauggauuuccuuugccauaucauguuuuuugcuuuguguugcuuuguugggguucaucaugugggccugccaaaagggcaacauuaggugcaacauuugcauuuga

SEQ ID NO: 44613 - RNA, 1701 nt, Artificial Sequence
  derived and/or modified CDS sequence (wt) from hemagglutinin__InfluenzaA__AIL93870
augaagacuaucauugcuuugagcuacauucuaugucugguuuucgcucaaaaacuuccuggaaaugacaauagcacggcaacgcugugccuugggcaccaugcaguaccaaacggaacgauagugaaaacaaucacgaaugaccgaauugaaguuacuaaugcuacugagcugguucagaauuccucaauaggugaaauaugcgacaguccucaucagauccuugauggagaaaacugcacacuaauagaugcucuauugggagacccucagugugauggcuuucaaaauaagaaaugggaccuuuuuguugaacgaagcaaagccuacagcaacuguuacccuuaugaugugccggauuaugccucccuuaggucacuaguugccucauccggcacacuggaguuuaacaaugaaagcuucaauugggcuggagucacucaaaacggaacaaguucugcuugcauaaggggaucuaauaguaguuucuuuaguagauuaaauugguugacccacuuaaacuucaaauacccagcauugaacgugacuaugccaaacaaugaacaauuugacaaauuguacauuugggggguucaccacccggguacggacaaggaccaaaucuuccuguaugcucaaucaucaggaagaaucacaguaucuaccaaaagaagccaacaagcuguaaucccgaauaucggaucuagacccagaauaaggaauaucccuagcagaauaagcaucuauuggacaauaguaaaaccgggagacauacuuuugauuaacagcacagggaaucuaauugcuccuagggguuacuucaaaauacgaagugggaaaagcucaauaaugagaucagaugcacccauuggcaaaugcaagucugaaugcaucacuccaaauggaagcauucccaaugacaaaccauuccaaaauguaaacaggaucacauacggggccugucccagauauguuaagcaaagcacucugaaauuggcaacaggaaugcgaaauguaccagagaaacaaacuagaggcauauuuggcgcaauagcggguuucauagaaaaugguugggagggaaugguggaugguugguacgguuucaggcaucaaaauucugagggaagaggacaagcagcagaucucaaaagcacucaagcagcaaucgaucaaaucaaugggaagcugaaucgauugaucgggaaaaccaacgagaaauuccaucagauugaaaaagaauucucagaaguagaagggagaauucaggaccuugagaaauauguugaggacacaaaaauagaucucuggucauacaacgcggagcuucuuguugcccuggagaaccaacauacaauugaucuaacugacucagaaaugaacaaacuguuugaaaaaacaaagaagcagcugagggaaaaugcugaggauaugggcaaugguuguuucaaaauauaccacaaaugugacaaugccugcauaggaucaaucagaaauggaacuuaugaccacgauguauacagggaugaggcauugaacaaccgguuccagaucaagggaguugaguugaagucaggguacaaagauuggauccuauggauuuccuuugccauaucauguuuuuugcuuuguguugcuuuguugggguucaucaugugggccugccaaaagggcaacauuaggugcaacauuugcauuuga

SEQ ID NO: 44614 - RNA, 1701 nt, Artificial Sequence
  derived and/or modified CDS sequence (wt) from hemagglutinin__InfluenzaA__AIL93882
augaagacuaucauugcuuugagcuacauucuaugucugguuuucgcucaaaaaccuccuggaaaugacaauagcacggcaacgcugugccuugggcaccaugcaguaccaaacggaacgauagugaaaacaaucacgaaugaccgaauugaaguuacuaaugcuacugagcugguucagaauuccucaauaggugaaauaugcgacaguccucaucagauccuugauggagaaaacugcacacuaauagaugcucuauugggagacccucagugugauggcuuucaaaauaagaaaugggaccuuuuuguugaacgaagcaaagccuacagcaacuguuacccuuaugaugugccggauuaugccucccuuaggucacuaguugccucauccggcacacuggaguuuaacaaugaaagcuucaauugggcuggagucacucaaaacggaacaaguucugcuugcauaaggggaucuaauaguaguuucuuuaguagauuaaauugguugacccacuuaaacuucaaauacccagcauugaacgugacuaugccaaacaaugaacaauuugacaaauuguacauuugggggguucaccacccggguacggacaaggaccaaaucuuccuguaugcucaaucaucaggaagaaucacaguaucuaccaaaagaagccaacaagcuguaaucccgaauaucggaucuagacccagaauaaggaauaucccuagcagaauaagcaucuauuggacaauaguaaaaccgggagacauacuuuugauuaacagcacagggaaucuaauugcuccuagggguuacuucaaaauacgaagugggaaaagcucaauaaugagaucagaugcacccauuggcaaaugcaagucugaaugcaucacuccaaauggaagcauucccaaugacaaaccauuccaaaauguaaacaggaucacauacggggccugucccagauauguuaagcaaagcacucugaaauuggcaacaggaaugcgaaauguaccagagaaacaaacuagaggcauauuuggcgcaauagcggguuucauagaaaaugguugggagggaaugguggaugguugguacgguuucaggcaucagaauucugagggaagaggacaagcagcagaucucaaaagcacucaagcagcaaucgaucaaaucaaugggaagcugaaucgauugaucgggaaaaccaacgagaaauuccaucagauugaaaaagaauucucagaaguagaagggagaauucaggaccuugagaaauauguugaggacacaaaaauagaucucuggucauacaacgcggagcuucuuguugcccuggagaaccaacauacaauugaucuaacugacucagaaaugaacaaacuguuugaaaaaacaaagaagcaacugagggaaaaugcugaggauaugggcaaugguuguuucaaaauauaccacaaaugugacaaugccugcauaggaucaaucagaaauggaacuuaugaccacgauguauacagggaugaagcauuaaacaaccgguuccagaucaagggaguugaguugaagucaggguacaaagauuggauccuauggauuuccuuugccauaucauguuuuuugcuuuguguugcuuuguugggguucaucaugugggccugccaaaagggcaacauuaggugcaacauuugcauuuga

SEQ ID NO: 44615 - RNA, 1701 nt, Artificial Sequence
  derived and/or modified CDS sequence (wt) from hemagglutinin__InfluenzaA__AIL93894
augaagacuaucauugcuuugagcuacauucuaugucugguuuucgcucaaaaacuuccuggaaaugacaauagcacggcaacgcugugccuugggcaccaugcaguaccaaacggaacgauagugaaaacaaucacgaaugaccgaauugaaguuacuaaugcuacugagcugguucagaauuccucaauaggugaaauaugcgacaguccucaucagauccuugauggagaaaacugcacacuaauagaugcucuauugggagacccucagugugauggcuuucaaaauaagaaaugggaccuuuuuguugaacgaagcaaagccuacagcaacuguuacccuuaugaugugccggauuaugccucccuuaggucacuaguugccucauccggcacacuggaguuuaacaaugaaagcuucaauugggcuggagucacucaaaacggaacaaguucugcuugcauaaggggaucuaauaguaguuucuuuaguagauuaaauugguugacccacuuaaacuucaaauacccagcauugaacgugacuaugccaaacaaugaacaauuugacaaauuguacauuugggggguucaccacccggguacggacaaggaccaaaucuuccuguaugcucaaucaucaggaagaaucacaguaucuaccaaaagaagccaacaagcuguaaucccgaauaucggaucuagacccagaauaaggaauaucccuagcagaauaagcaucuauuggacaauaguaaaaccgggagacauacuuuugauuaacagcacagggaaucuaauugcuccuagggguuacuucaaaauacgaagugggaaaagcucaauaaugagaucagaugcacccauuggcaaaugcaagucugaaugcaucacuccaaauggaagcauucccaaugacaaaccauuccaaaauguaaacaggaucacauacggggccugucccagauauguuaagcaaagcacucugaaauuggcaacaggaaugcgaaauguaccagagaaacaaacuagaggcauauuuggcgcaauagcggguuucauagaaaaugguugggagggaaugguggaugguugguacgguuucaggcaucaaaauucugagggaagaggacaagcagcagaucucaaaagcacucaagcagcaaucgaucaaaucaaugggaagcugaaucgauugaucgggaaaaccaacgagaaauuccaucagauugaaaaagaauucucagaaguagaagggagaauucaggaccuugagaaauauguugaggacacaaaaauagaucucuggucauacaacgcggagcuucuuguugcccuggagaaccaacauacaauugaucuaacugacucagaaaugaacaaacuguuugaaaaaacaaagaagcaacugagggaaaaugcugaggauaugggcaaugguuguuucaaaauauaccacaaaugugacaaugccugcauaggaucaaucagaaauggaacuuaugaccacgauguauacagggaugaggcauugaacaaccgguuccagaucaagggaguugaguugaagucaggguacaaagauuggauccuauggauuuccuuugccauaucauguuuuuugcuuuguguugcuuuguugggguucaucaugugggccugccaaaagggcaacauuaggugcaacauuugcauuuga

SEQ ID NO: 44616 - RNA, 1701 nt, Artificial Sequence
  derived and/or modified CDS sequence (wt) from hemagglutinin__InfluenzaA__AIL93906
augaaggcaauacuaguaguucugcuauacacauuugcaaccgcaaaugcagacacauuauguauagguuaucaugcgaacaauucaacagacacuguagacacaguacuagaaaagaauguaacaguaacacacucuauuaaccuucuagaagacaagcauaacgggaaacuaugcaaacuaagagggguagccccauugcauuuggguaaauguaacauugcuggcuggauccugggaaauccagagugugaaucacucuccacagcaaguucaugguccuacauuguggaaacaucuaguucagacaauggaacguguuacccgggagauuucaucaauuaugaggagcuaagagagcaauugagcucagugucgucauuugaaagguuugagauguuccccaagacaaguucauggcccaaucaugacucgaacaaagguguaacggcagcauguccucaugcuggagcaaaaagcuucuacaaaaauuuaauauggcuaguuaaaaaaggaaauucauacccaaagcucagcaaauccuacauuaaugauaaagggaaagaaguccucgugcuguggggcauucaccauccaucuacuacugcugaccaacaaagucucuaucagaaugcagaugcauauguuuuuguggggacaucaaaauacagcaagaaguucaagccggaaauagcaauaagacccaaagugagggaucaagaagggagaaugaacuauuacuggacacuaauagagccgggagacaaaauaacauucgaagcaacuggaaaucuagugguaccgagauaugcauucgcaauggaaagaaaugcuggaucugguauuaucauuucagauacaccaguccacgauugcaauacaacuugucagacacccgagggugcuauaaacaccagccucccauuucagaauauacauccgaucacaauuggaaaauguccaaaguauguaaaaagcacaaaauugagacuggccacaggauugaggaaugucccgucuauucaaucuagaggccuauucggggccauugccggcuucauugaagggggguggacagggaugguagauggaugguacgguuaucaccaucaaaaugagcaggggucaggauaugcagccgaccugaagagcacacaaaaugccauugacaagauuacuaacaaaguaaauucuguuauugaaaagaugaauacacaguucacagcaguggguaaagaguucaaucaccuggaaaaaagaauagagaauuuaaauaaaaaaguugaugaugguuuccuggacauuuggacuuacaaugccgaacuguugguucuauuggaaaaugaaagaacuuuggacuaccacgauucaaaugugaagaacuuguaugaaaagguaagaaaccaguuaaaaaacaaugccaaggaaauuggaaacggcugcuuugaauuuuaccacaaaugcgauaacacgugcauggaaagugucaaaaaugggacuuaugacuacccaaaauacucagaggaagcaaaauuaaacagagaaaaaauagaugggguaaagcuggaaucaacaaggauuuaccagauuuuggcgaucuauucaacugucgccaguucauugguacugguagucucccugggggcaaucaguuucuggaugugcucuaaugggucucuacaguguagaauauguauuuaa

SEQ ID NO: 44617 - RNA, 1701 nt, Artificial Sequence
  derived and/or modified CDS sequence (wt) from hemagglutinin__InfluenzaA__AIL93917
augaagacuaucauugcuuugagcuacauucuaugucugguuuucgcucaaaaacuuccuggaaaugacaauagcacggcaacgcugugccuugggcaccaugcaguaccaaacggaacgauagugaaaacaaucacgaaugaccgaauugaaguuacuaaugcuacugagcugguucagaauuccucaauaggugaaauaugcgacagaccucaucagauccuugauggagaaaacugcacacuaauagaugcucuauugggagacccucagugugauggcuuucaaaauaagaaaugggaccuuuuuguugaacgaagcaaagccuacagcaacuguuacccuuaugaugugccggauuaugccucccuuaggucacuaguugccucauccggcacacuggaguuuaacaaugaaagcuucaauugggcuggagucacucaaaacggaacaaguucugcuugcauaaggggaucuaauaguaguuucuuuaguagauuaaauugguugacccacuuaaacuucaaauacccagcauugaacgugacuaugccaaacaaugaacaauuugacaaauuguacauuugggggguucaccacccggguacggacaaggaccaaaucuuccuguaugcucaaucaucaggaagaaucacaguaucuaccaaaagaagccaacaagcuguaaucccgaauaucggaucuagacccagaauaaggaauaucccuagcagaauaagcaucuauuggacaauaguaaaaccgggagacauacuuuugauuaacagcacagggaaucuaauugcuccuagggguuacuucaaaauacgaagugggaaaagcucaauaaugagaucagaugcacccauuggcaaaugcaagucugaaugcaucacuccaaauggaagcauucccaaugacaaaccauuccaaaauguaaacaggaucacauacggggccugucccagauauguuaagcaaagcacucugaaauuggcaacaggaaugcgaaauguaccagagaaacaaacuagaggcauauuuggcgcaauagcggguuucauagaaaaugguugggagggaaugguggaugguugguacgguuucaggcaucaaaauucugagggaagaggacaagcagcagaucucaaaagcacucaagcagcaaucgaucaaaucaaugggaagcugaaucgauugaucgggaaaaccaacgagaaauuccaucagauugaaaaagaauucucagaaguagaagggagaauucaggaccuugagaaauauguugaggacacaaaaauagaucucuggucauacaacgcggagcuucuuguugcccuggagaaccaacauacaauugaucuaacugacucagaaaugaacaaacuguuugaaaaaacaaagaagcaaaugagggaaaaugcugaggauaugggcaaugguuguuucaaaauauaccacaaaugugacaaugccugcauaggaucaaucagaaauggaacuuaugaccacgauguauacagggaugaggcauugaacaaccgguuccagaucaagggaguugaguugaagucaggguacaaagauuggauccuauggauuuccuuugccauaucauguuuuuugcuuuguguugcuuuguugggguucaucaugugggccugccaaaagggcaacauuaggugcaacauuugcauuuga

SEQ ID NO: 44618 - RNA, 1701 nt, Artificial Sequence
  derived and/or modified CDS sequence (wt) from hemagglutinin__InfluenzaA__AIL93929
augaaggcaauacuaguaguucugcuauauacauuugcaaccgcaaaugcagacacauuauguauagguuaucaugcgaacaauucaacagacacuguagacacaguacuagaaaagaauguaacaguaacacacucuguuaaccuucuagaagacaagcauaacgggaaacuaugcaaacuaagagggguagccccauugcauuuggguaaauguaacauugcuggcuggauccugggaaauccagagugugaaucacucuccacagcaaguucaugguccuacauuguggaaacaucuaguucagacaauggaacguguuacccaggagauuucaucaauuaugaggagcuaagagagcaauugagcucagugucaucauuugaaagguuugagauauuccccaagacaaguucauggcccaaucaugacucgaacaaagguguaacggcagcauguccucacgcuggagcaaaaagcuucuacaaaaauuuaauauggcuaguuaaaaaaggaaauucauacccaaagcucagccaauccuacauuaaugauaaagggaaagaaguccucgugcuguggggcauucaccacccaucuacuacugcugaccaacaaagucucuaucagaaugcagaugcauauguuuuuguggggacaucaagauacagcaagaaguucaagccggaaauagcaauaagacccaaagugagggaucaagaagggagaaugaacuauuacuggacacuaguagagccgggagacaaaauaacauucgaagcaacuggaaaucuagugguaccgagauaugcauucacaauggaaagaaaugcuggaucugguauuaucauuucagauacaccaguccacgauugcaauacaacuugucagacacccgagggugcuauaaacaccagccucccauuucagaauauacauccgaucacaauuggaaaauguccaaaguauguaaaaagcacaaaauugagacuggccacaggauugaggaaugucccgucuauucaaucuagaggccuauucggggccauugccggcuucauugaaggaggguggacagggaugguagauggaugguacgguuaucaccaucaaaacgagcaggggucaggauaugcagccgaccugaagagcacacaaaaugccauugacaagauuacuaacaaaguaaauucuguuauugaaaagaugaauacacaguucacagcaguggguaaagaguucaaccaccuggaaaaaagaauagagaauuuaaauaaaaaaguugaugaugguuuccuggacauuuggacuuacaaugccgaacuguugguucuauuggaaaaugaaagaacuuuggacuaccacgauucaaaugugaagaacuuguaugaaaagguaagaaaccaguuaaaaaacaaugccaaggaaauuggaaacggcugcuuugaauuuuaccacaaaugcgauaacacgugcauggaaagugucaaaaaugggacuuaugacuacccgaaauacucagaggaagcaaaauuaaacagagaaaaaauagaugggguaaagcuggaaucaacaaggauuuaccagauuuuggcgaucuauucaacugucgccaguucauugguacugguagucucccugggggcaaucagcuucuggaugugcucuaaugggucucuacaguguagaauauguauuuaa

SEQ ID NO: 44619 - RNA, 1701 nt, Artificial Sequence
  derived and/or modified CDS sequence (wt) from hemagglutinin__InfluenzaA__AIL93940
augaaggcaauacuaguaguucugcuauauacauuugcaaccgcaaaugcagacacauuauguauagguuaucaugcgaacaauucaacagacacuguagacacaguacuagaaaagaauguaacaguaacacacucuguuaaccuucuagaagacaagcauaacgggaaacuaugcaaacuaagagggguauccccauugcauuuggguaaauguaacauugcuggcuggauccugggaaauccagagugugaaucacucuccacagcaaguucaugguccuacauuguggaaacaucuaguucagacaauggaacguguuacccaggagauuucaucaauuaugaggagcuaagagagcaauugagcucagugucaucauuugaaagguuugagauauuccccaagacaaguucauggcccaaucaugacucgaacaaagguguaacggcagcauguccucacgcuggagcaaaaagcuucuacaaaaauuuaauaugguuaguuaaaaaaggaaauucauacccaaagcucagccaauccuacauuaaugauaaagggaaagaaguccucgugcuguggggcauucaccaccccucuacuacugcugaccaacaaagucucuaucagaaugcagaugcauauguuuuuguggggacaucaagauacagcaagaaguucaagccggaaauagcaauaagacccaaagugagggaucaagaagggagaaugaacuauuacuggacacuaguagagccgggagacaaaauaacauucgaagcaacuggaaaucuagugguaccgagauaugcauucacaauggaaagaaaugcuggaucugguauuaucauuucagauacaccaguccacgauugcaauacaacuugucagacacccgagggugcuauaaacaccagccucccauuucagaauauacauccgaucacaauuggaaaauguccaaaguauguaaaaagcacaaaauugagacuggccacaggauugaggaaugucccgucuauucaaucuagaggccuauucggggccauugccggcuucauugaagggggguggacagggaugguagauggaugguacgguuaucaccaucaaaaugagcaggggucaggauaugcagccgaccugaagagcacacaaaaugccauugacaagauuacuaacaaaguaaauucuguuauugaaaagaugaauacacaguucacagcaguggguaaagaguucaaccaccuggaaaaaagaauagagaauuuaaauaaaaaaguugaugaugguuuccuggacauuuggacuuacaaugccgaacuguugguucuauuggaaaaugaaagaacuuuggacuaucacgauucaaaugugaagaacuuguaugaaaagguaagaaaccaguuaaaaaacaaugccaaggaaauuggaaacggcugcuuugaauuuuaccacaaaugcgauaacacgugcauggaaagugucaaaaaugggacuuaugacuacccaaaauacucagaggaagcaaaauuaaacagagaaaaaauagaugggguaaagcuggaaucaacaaggauuuaccagauuuuggcgaucuauucaacugucgccaguucauugguacugguagucucccugggggcaaucagcuucuggaugugcucuaaugggucucuacaguguagaauauguauuuaa

SEQ ID NO: 44620 - RNA, 1701 nt, Artificial Sequence; identical to SEQ ID NO: 44615
  derived and/or modified CDS sequence (wt) from hemagglutinin__InfluenzaA__AIL93951

SEQ ID NO: 44621 - RNA, 1701 nt, Artificial Sequence
  derived and/or modified CDS sequence (wt) from hemagglutinin__InfluenzaA__AIL93963
augaagacuaucauugcuuugagcuacauucuaugucugguuuucgcucaaaaacuuccuggaaaugacaauagcacggcaacgcugugccuugggcaccaugcaguaccaaacggaacgauagugaaaacaaucacgaaugaccgaauugaaguuacuaaugcuacugagcugguucagaauuccucaauaggugaaauaugcgacaguccucaucagauccuugauggagaaaacugcacacuaauagaugcucuauugggagacccucagugugauggcuuucaaaauaagaaaugggaccuuuuuguugaacgaagcaaagccuacagcaacuguuacccuuaugaugugccggauuaugccucccuuaggucacuaguugccucauccggcacacuggaguuuaacaaugaaagcuucaauugggcuggagucacucaaaacggaacaaguucugcuugcauaaggggaucuaauaguaguuucuuuaguagauuaaauugguugacccacuuaaacuucaaauacccagcauugaacgugacuaugccaaacaaugaacaauuugacaaauuguacauuugggggguccaccacccggguacggacaaggaccaaaucuuccuguaugcucaaucaucaggaagaaucacaguaucuaccaaaagaagccaacaagcuguaaucccgaauaucggaucuagacccagaauaaggaauaucccuagcagaauaagcaucuauuggacaauaguaaaaccgggagacauacuuuugauuaacagcacagggaaucuaauugcuccuagggguuacuucaaaauacgaagugggaaaagcucaauaaugagaucagaugcacccauuggcaaaugcaagucugaaugcaucacuccaaauggaagcauucccaaugacaaaccauuccaaaauguaaacaggaucacauacggggccugucccagauauguuaagcaaagcacucugaaauuggcaacaggaaugcgaaauguaccagagaaacaaacuagaggcauauuuggcgcaauagcggguuucauagaaaaugguugggagggaaugguggaugguugguacgguuucaggcaucaaaauucugagggaagaggacaagcagcagaucucaaaagcacucaagcagcaaucgaucaaaucaaugggaagcugaaucgauugaucgggaaaaccaacgagaaauuccaucagauugaaaaagaauucucagaaguagaagggagaauucaggaccuugagaaauauguugaggacacaaaaauagaucucuggucauacaacgcggagcuucuuguugcccuggagaaccaacauacaauugaucuaacugacucagaaaugaacaaacuguuugaaaaaacaaagaagcaacugagggaaaaugcugaggauaugggcaaugguuguuucaaaauauaccacaaaugugacaaugccugcauaggaucaaucagaaauggaacuuaugaccacgauguauacagggaugaggcauugaacaaccgguuccagaucaagggaguugaguugaaaucaggguacaaagauuggauccuauggauuuccuuugccauaucauguuuuuugcuuuguguugcuuuguugggguucaucaugugggccugccaaaagggcaacauuaggugcaacauuugcauuuga

SEQ ID NO: 44622 - RNA, 1701 nt, Artificial Sequence
  derived and/or modified CDS sequence (wt) from hemagglutinin__InfluenzaA__AIL93975
augaagacuaucauugcuuugagcuacauucuaugucugguuuucgcucaaaaacuuccuggaaaugacaauagcacggcaacgcugugccuugggcaccaugcaguaccaaacggaacgauagugaaaacaaucacgaaugaccgaauugaaguuacuaaugcuacugagcugguucagaauuccucaauaggugaaauaugcgacaguccucaucagauucuugauggagaaaacugcacacuaauagaugcucuauugggagacccucagugugauggcuuucaaaauaagaaaugggaccuuuuuguugaacgaagcaaagccuacagcaacuguuacccuuaugaugugccggauuaugccucccuuaggucacuaguugccucauccggcacacuggaguuuaacaaugaaagcuucaauuggacuggagucacucaaaacggaacaaguucugcuugcauaaggagaucuaauaguaguuucuuuaguagauuaaauugguugacccacuuaaacuucaaauacccagcauugaacgugacuaugccaaacaaugaacaauuugacaaauuguacauuugggggguucaccacccagguacggacaaggaccaaaucuuccuguaugcucaaucaucaggaagaaucacaguaucuaccaaaagaagccaacaagcugugaucccaaauaucggaucuagacccagaauaaggaauaucccuagcagaauaagcaucuauuggacaauaguaaaaccgggagacauacuuuugauuaacagcacagggaaucuaauugcuccuagggguuacuucaaaauacgaagugggaaaagcucaauaaugagaucagaugcacccauuggcaaaugcaagucugaaugcaucacuccaaauggaagcauucccaaugacaaaccauuccaaaauguaaacaggaucacauacggggccugucccagauauguuaagcaaagcacucugaaauuggcaacaggaaugcgaaauguaccagagaaacaaacuagaggcauauuuggcgcaauagcagguuucauagaaaaugguugggagggaaugguggaugguugguacgguuucaggcaucaaaauucugagggaagaggacaagcagcagaucucaaaagcacccaagcagcaaucgaucaaaucaaugggaagcugaaucgauugaucgggaaaaccaacgagaaauuccaucagauugaaaaagaauucucagaaguagaagggagaauucaggaccuugagaaauauguugaggacacuaaaauagaucucuggucauacaacgcggagcuucuuguugcccuggagaaccaacauacaauugaucuaacugacucagaaaugaacaaacuguuugaaaaaacaaagaagcaacugagggaaaaugcugaggauaugggcaaugguuguuucaaaauauaccacaaaugugacaaugccugcauaggaucaauaagaaauggaacuuaugaccacaauguguacagggaugaagcauuaaacaaccgguuccagaucaagggaguugagcugaagucaggguacaaagauuggauccuauggauuuccuuugccauaucauguuuuuugcuuuguguugcuuuguugggguucaucaugugggccugccaaaagggcaacauuaggugcaacauuugcauuuga

SEQ ID NO: 44623 - RNA, 1701 nt, Artificial Sequence
  derived and/or modified CDS sequence (wt) from hemagglutinin__InfluenzaA__AIL93987
augaaggcaauacuaguaguucuacuauauacauuugcaaccgcaaaugcagacacauuauguauagguuaucaugcgaacaauucaacagacacuguagacacaguacuagaaaagaauguaacaguaacacacucuguuaaccuucuagaagacaagcauaacgggaaacuaugcaaacuaagagggguagccccauugcauuuggguaaauguaacauugcuggcuggauccugggaaauccagagugugaaucacucuccacagcaaguucaugguccuacauuguggaaacaucuaguucagacaauggaacguguuacccaggagauuucaucaauuaugaggagcuaagagagcaauugagcucagugucaucauuugaaagguuugagauauuccccaagacaaguucauggcccaaucaugacucgaacaaagguguaacggcagcauguccucacgcuggagcaaaaagcuucuacaaaaauuuaauauggcuaguuaaaaaaggaaauucuuacccaaagcucagccaauccuacauuaaugauaaagggaaagaaguccucgugcuguggggcauccaccauccaucuacuacugcugaccaacaaagucucuaucagaaugcagaugcauauguuuuuguggggacaucaagauacagcaaaaaguucaagccggaaauagcaauaagacccaaagugagggaucaagaagggagaaugaacuauuacuggacacuaguagagccgggagacaaaauaacauucgaagcaacuggaaaucuagugguaccgagauaugcauucacaauggaaagaagugcuggaucugguauuaucauuucagauacaccaguccacgauugcaauacaacuugucagacacccgagggugcuauaaacaccagccucccauuucagaauauacauccgaucacaauuggaaaauguccaaaguauguaaaaagcacaaaauugagacuggccacaggauugaggaaugucccgucuauucaaucuagaggccuauucggggccauugccggcuucauugaagggggguggacagggaugguagacggaugguacgguuaucaccaccaaaaugagcaggggucaggauaugcagccgaccugaagagcacacaaaaugccauugacaagauuacuaacaaaguaaauucuguuauugaaaagaugaauacacaguucacagcaguggguaaagaguucaaccaccuggaaaaaagaauagagaauuugaauaaaaaaguugaugaugguuuccuggacauuuggacuuacaaugccgaacuguugguucuauuggaaaaugaaagaacuuuggacuaccacgauucaaaugugaagaacuuguaugaaaagguaagaaaccaguuaaaaaacaaugccaaggaaauuggaaacggcugcuuugaauuuuaccacaaaugcgauaacacgugcauggaaagugucaagaaugggacuuaugacuacccaaaauacucagaggaagcaaaauuaaacagagaaaaaauagaugggguaaagcuggaaucaacaaggauuuaccagauuuuggcgaucuauucaacugucgccaguucauugguacugguagucucccugggggcaaucagcuucuggaugugcucuaaugggucucuacaauguagaauauguauuuaa

SEQ ID NO: 44624 - RNA, 1701 nt, Artificial Sequence; identical to SEQ ID NO: 42155
  derived and/or modified CDS sequence (wt) from hemagglutinin__InfluenzaA__AIL93998

SEQ ID NO: 44625 - RNA, 1701 nt, Artificial Sequence; identical to SEQ ID NO: 44596
  derived and/or modified CDS sequence (wt) from hemagglutinin__InfluenzaA__AIL94010

SEQ ID NO: 44626 - RNA, 1701 nt, Artificial Sequence; identical to SEQ ID NO: 44612
  derived and/or modified CDS sequence (wt) from hemagglutinin__InfluenzaA__AIL94022

SEQ ID NO: 44627 - RNA, 1701 nt, Artificial Sequence
  derived and/or modified CDS sequence (wt) from hemagglutinin__InfluenzaA__AIL94046
augaagacuaucauugcuuugagcuacauucuaugucugguuuucgcucaaaaacuuccuggaaaugacaauagcacggcaacgcugugccuugggcaccaugcaguaccaaacggaacgauagugaaaacaaucacgaaugaccgaauugaaguuacuaaugcuacugagcugguucagaauuccucaauaggugaaauaugcgacagaccucaucagauucuugauggagaaaacugcacacuaauagaugcucuauugggagacccucagugugauggcuuucaaaauaagaaaugggaccuuuuuguugaacgaagcaaagccuacagcaacuguuacccuuaugaugugccggauuaugccucccuuaggucacuaguugccucauccggcacacuggaguuuaacaaugaaagcuucaauugggcuggagucacucaaaacggaacaaguucugcuugcauaaggggaucuaauaguaguuucuuuaguagauuaaauugguugacccacuuaaacuucaaauacccagcauugaacgugacuaugccaaacaaugaacaauuugacaaauuguacauuugggggguucaccacccggguacggacaaggaccaaaucuuccuguaugcucaaucaucaggaagaaucacaguaucuaccaaaagaagccaacaagcuguaaucccaaauaucggaucuagacccagaauaaggaauaucccuagcagaauaagcaucuauuggacaauaguaaaaccgggagacauacuuuugauuaacagcacagggaaucuaauugcuccuagggguuacuucaaaauacgaagugggaaaagcucaauaaugagaucagaugcacccauuggcaaaugcaagucugaaugcaucacuccaaauggaagcauucccaaugacaaaccauuccaaaauguaaacaggaucacauacggggccugucccagauauguuaagcaaagcacucugaaauuggcaacaggaaugcgaaauguaccagagaaacaaacuagaggcauauuuggcgcaauagcggguuucauagaaaaugguugggagggaaugguggaugguugguacgguuucaggcaucaaaauucugagggaagaggacaagcagcagaucucaaaagcacucaagcagcaaucgaucaaaucaaugggaagcugaaucgauugaucgggaaaaccaacgagaaauuccaucagauugaaaaagaauucucagaaguagaagggagaauucaggaccuugagaaauauguugaggacacaaaaauagaucucuggucauacaacgcggagcuucuuguugcccuggagaaccaacauacaauugaucuaacugacucagaaaugaacaaacuguuugaaaaaacaaagaagcaacugagggaaaaugcugaggauaugggcaaugguuguuucaaaauauaccacaaaugugacaaugccugcauaggaucaaucagaaauggaaccuaugaccacgauguauacagggaugaggcauugaacaaccgguuccagaucaagggaguugaguugaagucaggguacaaagauuggauccuauggauuuccuuugccauaucauguuuuuugcuuuguguugcuuuguugggguucaucaugugggccugccaaaagggcaacauuaggugcaacauuugcauuuga

SEQ ID NO: 44628 - RNA, 1701 nt, Artificial Sequence
  derived and/or modified CDS sequence (wt) from hemagglutinin__InfluenzaA__AIL94058
augaaggcaauacuaguaguucuacuauauacauuugcacccgcaaaugcagacacauuauguauagguuaucaugcgaacaauucaacagacacuguagacacaguacuagaaaagaauguaacaguaacacacucuguuaaccuucuagaagacaagcauaacgggaaacuaugcaaacuaagagggguagccccauugcauuuggguaaauguaacauugcuggcuggauccugggaaauccagagugugaaucacucuccacagcaaguucaugguccuacauuguggaaacaucuaguucagacaauggaacguguuacccaggagauuucaucaauuaugaggagcuaagagagcaauugagcucagugucaucauuugaaagguuugagauauuccccaagacaaguucauggcccaaucaugacucgaacaaagguguaacggcagcauguccucacgcuggagcaaaaagcuucuacaaaaauuuaauauggcuaguuaaaaaaggaaauucauacccaaagcucagccaauccuacauuaaugauaaagggaaagaaguccucgugcuguggggcauccaccauccaucuacuacugcugaccaacaaagucucuaucagaaugcagaugcauauguuuuuguggggacaucaagauacagcaaaaaguucaagccggaaauagcaauaagacccaaagugagggaucaagaagggagaaugaacuauuacuggacacuaguagagccgggagacaaaauaacauucgaagcaacuggaaaucuagugguaccgagauaugcauucacaauagaaagaagugcuggaucugguauuaucauuucagauacaccaguccacgauugcaauacaacuugucagacacccgagggugcuauaaacaccagccucccauuucagaauauacauccgaucacaauuggaaaauguccaaaguauguaaaaagcacaaaauugagacuggccacaggauuaaggaaugucccgucuauucaaucuagaggccuauucggggccauugccggcuucauugaagggggguggacagggaugguagauggaugguacgguuaucaccaccaaaaugagcaggggucaggauaugcagccgaccugaagagcacacaaaaugccauugacaagauuacuaacaaaguaaauucuguuauugaaaagaugaauacacaguucacagcaguggguaaagaguucaaccaccuggaaaaaagaauagagaauuuaaauaaaaaaguugaugaugguuuccuggacauuuggacuuacaaugccgaacuguugguucuauuggaaaaugaaagaacuuuggacuaccacgauucaaaugugaagaacuuguaugaaaagguaagaaaccaguuaaaaaacaaugccaaggaaauuggaaacggcugcuuugaauuuuaccacaaaugcgauaacacgugcauggaaagugucaagaaugggacuuaugacuacccaaaauacucagaggaagcaaaauuaaacagagaaaaaauagaugggguaaagcuggaaucaacaaggauuuaccagauuuuggcgaucuauucaacugucgccaguucauugguacugguagucucccugggggcaaucagcuucuggaugugcucuaaugggucucuacaauguagaauauguauuuaa

SEQ ID NO: 44629 - RNA, 1701 nt, Artificial Sequence; identical to SEQ ID NO: 44599
  derived and/or modified CDS sequence (wt) from hemagglutinin__InfluenzaA__AIL94069

SEQ ID NO: 44630 - RNA, 1701 nt, Artificial Sequence
  derived and/or modified CDS sequence (wt) from hemagglutinin__InfluenzaA__AIL94080
augaaggcaauacuaguaguucuacuauauacauuugcaaccgcaaaugcagacacauuauguauagguuaucaugcgaacaauucaacagacacuguagacacaguacuagaaaagaauguaacaguaacacacucuguuaaccuucuagaagacaagcauaacgggaaacuaugcaaacuaagagggguagccccauugcauuuggguaaauguaacauugcuggcuggauccugggaaauccagagugugaaucacucuccacagcaaguucaugguccuacauuguggaaacaucuaguucagacaauggaacguguuacccaggagauuucaucaauuaugaggagcuaagagagcaauugagcucagugucaucauuugaaagguuugagauauuccccaagacaaguucauggcccaaucaugacucgaacaaagguguaacggcagcauguccucacgcuggagcaaaaagcuucuacaaaaauuuaauauggcuaguuaaaaaaggaaauucauacccaaagcucagccaauccuacauuaaugauaaagggaaagaaguccucgugcuguggggcauccaccauccaucuacuacugcugaccaacaaagucucuaucagaaugcagaugcauauguuuuuguggggacaucaagauacagcaaaaaguucaagccggaaauagcaauaagacccaaagugagggaucaagaagggagaaugaacuauuacuggacacuaguagagccgggagacaaaauaacauucgaagcaacuggaaaucuagugguaccgagauaugcauucacaauggaaagaaaugcuggaucugguauuaucauuucagauacaccaguccacgauugcaauacaacuugucagacacccgagggugcuauaaacaccagccucccauuucagaauauacauccgaucacaauuggaaaauguccaaaguauguaaaaagcacaaaauugagacuggccacaggauugaggaaugucccgucuauucaaucuagaggccuauucggggccauugccggcuucauugaagggggguggacagggaugguagauggaugguacgguuaucaccaccaaaaugagcaggggucaggauaugcagccgaccugaagagcacacaaaaugccauugacaagauuacuaacaaaguaaauucuguuauugaaaagaugaauacacaguucacagcaguggguaaagaguucaaccaccuggaaaaaagaauagagaauuuaaauaaaaaaguugaugaugguuuccuggacauuuggacuuacaaugccgaacuguugguucuauuggaaaaugaaagaacuuuggacuaccacgauucaaaugugaagaacuuguaugaaaagguaagaaaccaguuaaaaaacaaugccaaggaaauuggaaacggcugcuuugaauuuuaccacaaaugcgauaacacgugcauggaaagugucaagaaugggacuuaugacuacccaaaauacucagaggaagcaaaauuaaacagagaaaaaauagaugggguaaagcuggaaucaacaaggauuuaccagauuuuggcgaucuauucaacugucgccaguucauugguacugguagucucccugggggcaaucagcuucuggaugugcucuaaugggucucuacaauguagaauauguauuuaa

SEQ ID NO: 44631 - RNA, 1701 nt, Artificial Sequence; identical to SEQ ID NO: 44596
  derived and/or modified CDS sequence (wt) from hemagglutinin__InfluenzaA__AIL94235

SEQ ID NO: 44632 - RNA, 1701 nt, Artificial Sequence; identical to SEQ ID NO: 42086
  derived and/or modified CDS sequence (wt) from hemagglutinin__InfluenzaA__AIL94247

SEQ ID NO: 44633 - RNA, 1701 nt, Artificial Sequence
  derived and/or modified CDS sequence (wt) from hemagglutinin__InfluenzaA__AIL94258
augaagacuaucauugcuuugagcuacauucuaugucugguuuucacucaaaaacuuccuggaaaugacaauagcacggcaacgcugugccuugggcaccaugcaguaccaaacggaacgauagugaaaacaaucacgaaugaccgaauugaaguuacuaaugcuacugagcugguucagaauuccucaauaggugaaauaugcgacaguccucaucagauccuugauggagaaaacugcacacuaauagaugcucuauugggagacccucagugugauggcuuucaaaauaagaaaugggaccuuuuuguugaacgaagcaaagccuacagcaacuguuacccuuaugaugugccggauuaugccucccuuaggucacuaguugccucauccggcacacuggaguuuaacaaugaaagcuucaauugggcuggagucacucaaaacggaacaaguucugcuugcauaaggggaucuaauaguaguuucuuuaguagauuaaauugguugacccacuuaaacuucaaauacccagcauugaacgugacuaugccaaacaaugaacaauuugacaaauuguacauuugggggguucaccacccggguacggacaaggaccaaaucuuccuguaugcucaaucaucaggaagaaucacaguaucuaccaaaagaagccaacaagcuguaaucccgaauaucggaucuagacccagaauaaggaauaucccuagcagaauaagcaucuauuggacaauaguaaaaccgggagacauacuuuugauuaacagcacagggaaucuaauugcuccuagggguuacuucaaaauacgaagugggaaaagcucaauaaugagaucagaugcacccauuggcaaaugcaagucugaaugcaucacuccaaauggaagcauucccaaugacaaaccauuccaaaauguaaacaggaucacauacggggccugucccagauauguuaagcaaagcacucugaaauuggcaacaggaaugcgaaauguaccagagaaacaaacuagaggcauauuuggcgcaauagcggguuucauagaaaaugguugggagggaaugguggaugguugguacgguuucaggcaucaaaauucugagggaagaggacaagcagcagaucucaaaagcacucaagcagcaaucgaucaaaucaaugggaagcugaaucgauugauugggaaaaccaacgagaaauuccaucagauugaaaaagaauucucagaaguagaagggagaauucaggaccuugagaaauauguugaggacacaaaaauagaucucuggucauacaacgcggagcuucuuguugcccuggagaaccaacauacaauugaucuaacugacucagaaaugaacaaacuguuugaaaaaacaaagaagcaacugagggaaaaugcugaggauaugggcaaugguuguuucaaaauauaccacaaaugugacaaugccugcauaggaucaaucagaaauggaacuuaugaccacgauguauacagggaugaagcauuaaacaaccgguuccagaucaagggaguugaguugaagucaggguacaaagauuggauccuauggauuuccuuugccauaucauguuuuuugcuuuguguugcuuuguugggguucaucaugugggccugccaaaagggcaacauuaggugcaacauuugcauuuga

SEQ ID NO: 44634 - RNA, 1701 nt, Artificial Sequence
  derived and/or modified CDS sequence (wt) from hemagglutinin__InfluenzaA__AIL94270
augaagacuaucauugcuuugagcuacauucuaugucugguuuucgcucaaaaacuuccuggaaaugacaauagcacggcaacgcugugccuugggcaccaugcaguaccaaacggaacgauagugaaaacaaucacgaaugaccgaauugaaguuacuaaugcuacugagcugguucagaauuccucaauaggugaaauaugcgacaguccucaucagauccuugauggagaaaacugcacacuaauagaugcucuauugggagacccucagugugauggcuuucaaaauaagaaaugggaccuuuuuguugaacgaagcaaagccuacagcaacuguuacccuuaugaugugccggauuaugccucccuuaggucacuaguugccucauccggcacacuggaguuuaacaaugaaagcuucaauugggcuggagucacucaaaacggaacaaguucugcuugcauaaggggaucuaauaguaguuucuuuaguagauuaaauugguugacccacuuaaacuucaaauacccagcauugaacgugacuaugccaaacaaugaacaauuugacaaauuguacauuugggggguucaccacccggguacggacaaggaccaaaucuuccuguaugcucaaucaucaggaagaaucacaguaucuaccaaaagaagucaacaagcuguaaucccgaauaucggaucuagacccagaauaaggaauaucccuagcagaauaagcaucuauuggacaauaguaaaaccgggagacauacuuuugauuaacagcacagggaaucuaauugcuccuagggguuacuucaaaauacgaagugggaaaagcucaauaaugagaucagaugcacccauuggcaaaugcaauucugaaugcaucacuccaaauggaagcauucccaaugacaaaccauuccaaaauguaaacaggaucacauacggggccugucccagauauguuaagcaaagcacucugaaauuggcaacaggaaugcgaaauguaccagagaaacaaacuagaggcauauuuggcgcaauagcggguuucauagaaaaugguugggagggaaugguggaugguugguacgguuucaggcaucaaaauucugagggaagaggacaagcagcagaucucaaaagcacucaagcagcaaucgaucaaaucaaugggaagcugaaucgauugaucgggaaaaccaacgagaaauuccaucagauugaaaaagaauucucagaaguagaagggagaauucaggaccuugagaaauauguugaggacacaaaaauagaucucuggucauacaacgcggagcuucuuguugcccuggagaaccaacauacaauugaucuaacugacucagaaaugaacaaacuguuugaaaaaacaaagaagcaacugagggaaaaugcugaggauaugggcaaugguuguuucaaaauauaccacaaaugugacaaugccugcauaggaucaaucagaaauggaacuuaugaccacgauguauacagggaugaagcauuaaacaaccgguuccagaucaagggaguugaguugaagucaggguacaaagauuggauccuauggauuuccuuugccauaucauguuuuuugcuuuguguugcuuuguugggguucaucaugugggccugccaaaagggcaacauuaggugcaacauuugcauuuga

SEQ ID NO: 44635 - RNA, 1701 nt, Artificial Sequence; identical to SEQ ID NO: 42155
  derived and/or modified CDS sequence (wt) from hemagglutinin__InfluenzaA__AIL94282

SEQ ID NO: 44636 - RNA, 1701 nt, Artificial Sequence; identical to SEQ ID NO: 44613
  derived and/or modified CDS sequence (wt) from hemagglutinin__InfluenzaA__AIL94294

SEQ ID NO: 44637 - RNA, 1701 nt, Artificial Sequence
  derived and/or modified CDS sequence (wt) from hemagglutinin__InfluenzaA__AIL94306
augaagaccaucacugcuuugagcuacauucuaugucuggcuuucgcccaaaaaccuccuggaaaugacaauagcacggcaacgcugugccuugggcaccaugcaguaccaaacggaacgauagugaaaacaaucacgaaugaccgaauugaaguuacuaaugcuacugagcugguucagaauuccucaauaggugaaauaugcgacaguccucaucagauccuugauggagaaaacugcacacuaauagaugcucuauugggagacccucagugugauggcuuucaaaauaagaaaugggaccuuuuuguugaacgaagcaaagccuacagcaacuguuacccuuaugaugugccggauuaugccucccuuaggucacuaguugccucauccggcacacuggaguuuaacaaugaaagcuucaauugggcuggagucacucaaaacggaacaaguucugcuugcauaaggggaucuaauaguaguuucuuuaguagauuaaauugguugacccacuuaaacuucaaauacccagcauugaacgugacuaugccaaacaaugaacaauuugacaaauuguacauuugggggguucaccacccggguacggacaaggaccaaaucuuccuguaugcucaaucaucaggaagaaucacaguaucuaccaaaagaagccaacaagcuguaaucccgaauaucggaucuagacccagaauaaggaauaucccuagcagaauaagcaucuauuggacaauaguaaaaccgggagacauacuuuugauuaacagcacagggaaucuaauugcuccuagggguuacuucaaaauacgaagugggaaaagcucaauaaugagaucagaugcacccauuggcaaaugcaagucugaaugcaucacuccgaauggaagcauucccaaugacaaaccauuccaaaauguaaacaggaucacauacggggccugucccagauauguuaagcaaagcacucugaaauuggcaacaggaaugcgaaauguaccagagaaacaaacuagaggcauauuuggcgcaauagcggguuucauagaaaaugguugggagggaaugguggaugguugguacgguuucaggcaucaaaauucugagggaagaggacaagcagcagaucucaaaagcacucaagcagcaaucgaucaaaucaaugggaagcugaaucgauugaucgggaaaaccaacgagaaauuccaucagauugaaaaagaauucucagaaguagaagggagaauucaggaccuugagaaauauguugaggacacaaaaauagaucucuggucauacaacgcggagcuucuuguugcccuggagaaccaacauacaauugaucuaacugacucagaaaugaacaaacuguuugaaaaaacaaagaagcaacugagggaaaaugcugaggauaugggcaaugguuguuucaaaauauaccacaaaugugacaaugccugcauaggaucaaucagaaauggaacuuaugaccacgauguauacagggaugaggcauugaacaaccgguuccagaucaagggaguugaguugaagucaggguacaaagauuggauccuauggauuuccuuugccauaucauguuuuuugcuuuguguugcuuuguugggguucaucaugugggccugccaaaagggcaacauuaggugcaacauuugcauuuga

SEQ ID NO: 44638 - RNA, 1701 nt, Artificial Sequence
  derived and/or modified CDS sequence (wt) from hemagglutinin__InfluenzaA__AIL94318
augaagacuaucauugcuuugagcuacauucuaugucugguuuucgcucaaaaacuuccuggaaaugacaauagcacggcaacacugugccuugggcaccaugcaguaccaaacggaacgauagugaaaacaaucacgaaugaccgaauugaaguuacuaaugcuacugagcugguucagaauuccucaauaggugaaauaugcgacaguccucaucagauucuugauggagaaaacugcacacuaauagaugcucuauugggagacccucagugugauggcuuucaaaauaagaaaugggaccuuuuuguugaacgaagcaaagccuacagcaacuguuacccuuaugaugugccggauuaugccucccuuaggucacuaguugccucauccggcacacuggaguuuaacaaugaaagcuucaauuggacuggagucacucaaaacggaacaaguucugcuugcauaaggagaucuaauaguaguuucuuuaguagauuaaauugguugacccacuuaaacuucaaauacccagcauugaacgugacuaugccaaacaaugaacaauuugacaaauuguacauuugggggguucaccacccagguacggacaaggaccaaaucuuccuguaugcucaaucaucaggaagaaucacaguaucuaccaaaagaagccaacaagcugugaucccaaauaucggaucuagacccagaauaaggaauaucccuagcagaauaagcaucuauuggacaauaguaaaaccgggagacauacuuuugauuaacagcacagggaaucuaauugcuccuagggguuacuucaaaauacgaagugggaaaagcucaauaaugagaucagaugcacccauuggcaaaugcaagucugaaugcaucacuccaaauggaagcauucccaaugacaaaccauuccaaaauguaaacaggaucacauacggggccugucccagauauguuaagcaaagcacucugaaauuggcaacaggaaugcgaaauguaccagagaaacaaacuagaggcauauuuggcgcaauagcagguuucauagaaaaugguugggagggaaugguggaugguugguacgguuucaggcaucuaaauucugagggaagaggacaagcagcagaucucaaaagcacccaagcagcaaucgaucaaaucaaugggaagcugaaucgauugaucgggaaaaccaacgagaaauuccaucagauugaaaaagaauucucagaaguagaagggagaauucaggaccuugagaaauauguugaggacacuaaaauagaucucuggucauacaacgcggagcuucuuguugcccuggagaaccaacauacaauugaucuaacugacucagaaaugaacaaacuguuugaaaaaacaaagaagcaacugagggaaaaugcugaggauaugggcaaugguuguuucaaaauauaccacaaaugugacaaugccugcauaggaucaauaagaaauggaacuuaugaccacaauguguacagggaugaagcauuaaacaaccgguuccagaucaagggaguugagcugaagucaggguacaaagauuggauccuauggauuuccuuugccauaucauguuuuuugcuuuguguugcuuuguugggguucaucaugugggccugccaaaagggcaacauuaggugcaacauuugcauuuga

SEQ ID NO: 44639 - RNA, 1701 nt, Artificial Sequence
  derived and/or modified CDS sequence (wt) from hemagglutinin__InfluenzaA__AIL94330
augaagacuaucauugcuuugagcuacauucuaugucugguuuucgcucaaaaacuuccuggaaaugacaauagcacggcaacgcugugccuugggcaccaugcaguaccaaacggaacgauagugaaaacaaucacgaaugaccgaauugaaguuacuaaugcuacugagcugguucagaauuccucaauaggugaaauaugcgacaguccucaucagauucuugauggagaaaacugcacacuaauagaugcucuauugggagacccucagugugauggcuuucaaaacaagaaaugggaccuuuuuguugaacgaagcaaagccuacagcaacuguuacccuuaugaugugccggauuaugccucccuuaggucacuaguugccucauccggcacacuggaguuuaacaaugaaagcuucaauuggacuggagucacucaaaacggaacaaguucugcuugcauaaggagaucuaauaguaguuucuuuaguagauuaaauugguugacccacuuaaacuucaaauacccagcauugaacgugacuaugccaaacaaugaacaauuugacaaauuguacauuugggggguucaccacccggguacggacaaggaccaaaucuuccuguaugcucaaucaucaggaagaaucacaguaucuaccaaaagaagccaacaagcuguaaucccaaauaucggaucuagacccagaauaaggaauauuccuagcagaauaagcaucuauuggacaauaguaaaaccgggagacauacuuuugauuaacagcacagggaaucuaauugcuccuagggguuacuucaaaauacgaagugggaaaagcucaauaaugagaucagaugcacccauuggcaaaugcaagucugaaugcaucacuccaaaugggagcauucccaaugacaaaccauuccaaaauguaaacaggaucacauacggggccugucccagauauguuaagcaaagcacucugaaauuggcaacaggaaugcgaaauguaccagagaaacaaacuagaggcauauuuggcgcaauagcagguuucauagaaaaugguugggaggggaugguggaugguugguacgguuucaggcaucaaaauucugagggaagaggacaagcagcagaucucaaaagcacccaagcagcaaucgaucaaaucaaugggaagcugaaucgauugaucgggaaaaccaacgagaaauuccaucagauugaaaaagaauucucagaaguagaagggagaauucaggaccuugagaaauauguugaggacacuaaaauagaucucuggucauacaacgcggagcuucuuguugcccuggagaaccaacauacaauugaucuaacugacucagaaaugaacaaacuguuugaaaaaacaaagaagcaacugagggaaaaugcugaggauaugggcaaugguuguuucaaaauauaccacaaaugugacaaugccugcauaggaucaauaagaaauggaacuuaugaccacaauguguacagggaugaagcauuaaacaaccgguuccagaucaagggaguugagcugaagucaggguacaaagauuggauccuauggauuuccuuugccauaucauguuuuuugcuuuguguugcuuuguugggguucaucaugugggccugccaaaagggcaacauuaggugcaacauuugcauuuga

SEQ ID NO: 44640 - RNA, 1701 nt, Artificial Sequence
  derived and/or modified CDS sequence (wt) from hemagglutinin__InfluenzaA__AIL94354
augaaggcaauacuaguaguucugcuauauacauuugcaaccgcaaaugcagacacauuauguauagguuaucaugcgaacaauucaacagacacuguagauacaguacuagaaaagaauguaacaguaacacacucuguuaaccuucuagaagacaagcauaacgggaaacuaugcaaacuaagagggguagccccauugcauuuggguaaauguaacauugcuggcuggauccugggaaauccagagugugaaucacucuccacagcaaguucaugguccuacauuguggaaacaucuaguucagacaauggaacguguuacccaggagauuucaucaauuaugaggagcuaagagagcaauugagcucagugucaucauuugaaagguuugagauauuccccaagacaaguucauggcccaaucaugacucgaacaaagguguaacggcagcauguccucacgcuggagcaaaaagcuucuacaaaaauuuaauauggcuaguuaaaaaaggaaauucauacccaaagcucagccaauccuacauuaaugauaaagggaaagaaguccucgugcuguggggcauccaccauccaucuacuacugcugaccaacaaagucucuaucagaaugcagaugcauauguuuuuguggggacaucaagauacagcaaaaaguucaagccggaaauagcaauaagacccaaagugagggaucaagaagggagaaugaacuauuacuggacacuaguagagccgggagacaaaauaacauucgaagcaacuggaaaucuagugguaccgagauaugcauucacaauggaaagaaaugcuggaucugguauuaucauuucagauacaccaguccacgauugcaauacaacuugucagacacccgagggugcuauaaacaccagccucccauuucagaauauacauccgaucacaauuggaaaauguccaaaguauguaaaaagcacaaaauugagacuggccacaggauugaggaaugucccgucuauucaaucuagaggccuauucggggccauugccggcuucauugaagggggguggacagggaugguagauggaugguacgguuaucaccaucaaaaugagcaggggucaggauaugcagccgaccugaagagcacacaaaaugccauugacaagauuacuaacaaaguaaauucuguuauugaaaagaugaauacacaguucacagcaguggguaaagaguucaaccaccuggaaaaaagaauagagaauuuaaauaaaaaaguugaugaugguuuccuggacauuuggacuuacaaugccgaacuguugguucuauuggaaaaugaaagaacuuuggacuaccacgauucaaaugugaagaacuuguaugaaaagguaagaaaccaguuaaaaaacaaugccaaggaaauuggaaacggcugcuuugaauuuuaccacaaaugcgauaacacgugcauggaaagugucaaaaaugggacuuaugacuacccaaaauacucagaggaagcaaaauuaaacagagaaaaaauagaugggguaaagcuggaaucaacaaggauuuaccagauuuuggcgaucuauucaacugucgccaguucauugguacugguagucucccugggggcaaucagcuucuggaugugcucuaaugggucucuacaauguagaauauguauuuaa

SEQ ID NO: 44641 - RNA, 1701 nt, Artificial Sequence
  derived and/or modified CDS sequence (wt) from hemagglutinin__InfluenzaA__AIL94365
augaagacuaucauugcuuugagcuacauucuaugucugguuuucgcucaaaaacucccuggaaaugacaauagcacggcaacgcugugccuugggcaccaugcaguaccaaacggaacgauagugaaaacaaucacgaaugaccgaauugaaguuacuaaugcuacugagcugguucagaauuccucaauaggugaaauaugcgacaguccucaucagauccuugauggagaaaacugcacacuaauagaugcucuauugggagacccucagugugauggcuuucaaaauaagaaaugggaccuuuuuguugaacgaagcaaagccuacagcaacuguuacccuuaugaugugccggauuaugccucccuuaggucacuaguugccucauccggcacacuggaguuuaacaaugaaagcuucaauugggcuggagucacucaaaacggaacaaguucugcuugcauaaggggaucuaauaguaguuucuuuaguagauuaaauugguugacccacuuaaacuucaaauacccagcauugaacgugacuaugccaaacaaugaacaauuugacaaauuguacauuugggggguucaccacccggguacggacaaggaccaaaucuuccuguaugcucaaucaucaggaagaaucacaguaucuaccaaaagaagccaacaagcuguaaucccgaauaucggaucuagacccagaauaaggaauaucccuagcagaauaagcaucuauuggacaauaguaaaaccgggagacauacuuuugauuaacagcacagggaaucuaauugcuccuagggguuacuucaaaauacgaagugggaaaagcucaauaaugagaucagaugcacccauuggcaaaugcaagucugaaugcaucacuccaaauggaagcauucccaaugacaaaccauuccaaaauguaaacaggaucacauacggggccugucccagauauguuaagcaaagcacucugaaauuggcaacaggaaugcgaaauguaccagagaaacaaacuagaggcauauuuggcgcaauagcggguuucauagaaaaugguugggagggaaugguggaugguugguacgguuucaggcaucaaaauucugagggaagaggacaagcagcagaucucaaaagcacucaagcagcaaucgaucaaaucaaugggaagcugaaucgauugaucgggaaaaccaacgagaaauuccaucagauugaaaaagaauucucagaaguagaagggagaauucaggaccuugagaaauauguugaggacacaaaaauagaucucuggucauacaacgcggagcuucuuguugcccuggagaaccaacauacaauugaucuaacugacucagaaaugaacaaacuguuugaaaaaacaaagaagcaacugagggaaaaugcugaggauaugggcaaugguuguuucaaaauauaccacaaaugugacaaugccugcauaggaucaaucagaaauggaacuuaugaccacgauguauacagggaugaagcauuaaacaaccgguuccagaucaagggaguugaguugaagucaggguacaaagauuggauccuauggauuuccuuugccauaucauguuuuuugcuuuguguugcuuuguugggguucaucaugugggccugccaaaagggcaacauuaggugcaacauuugcauuuga

SEQ ID NO: 44642 - RNA, 1701 nt, Artificial Sequence
  derived and/or modified CDS sequence (wt) from hemagglutinin__InfluenzaA__AIL94377
augaagacuaucauugcuuugagcuacauucuaugucugguuuucgcucaaaaacuuccuggaaaugacaauagcacggcaacgcugugccuugggcaccaugcaguaccaaacggaacgauagugaaaacaaucacgaaugaccgaauugaaguuacuaaugcuacugagcugguucagaauuccucaauaggugaaauaugcgacaguccucaucagauccuugauggagaaaacugcacacuaauagaugcucuauugggagacccucauugugauggcuuucaaaauaagaaaugggaccuuuuuguugagcgaagcaaagccuacagcaacuguuacccuuaugaugugccggauuaugccucccuuaggucacuaguugccucauccggcacacuggaguuuaacaaugaaagcuucaauugggcuggagucacucaaaacggaacaaguucugcuugcauaaggggaucuaauaguaguuucuuuaguagauuaaauugguugacccacuuaaacuucaaauacccagcauugaacgugacuaugccaaacaaugaacaauuugacaaauuguacauuugggggguucaccacccagguacggacaaggaccaaaucuuccuguaugcucaaucaucaggaagaaucacaguaucuaccaaaagaagccaacaagcuguaaucccgaauaucggaucuagacccagaauaaggaauaucccuagcagaauaagcaucuauuggacaauaguaaaaccgggagacauacuuuugauuaacagcacagggaaucuaauugcuccuagggguuacuucaaaauacgaagugggaaaagcucaauaaugagaucagaugcacccauuggcaaaugcaagucugaaugcaucacuccaaauggaagcauucccaaugacaaaccauuccaaaauguaaacaggaucacauacggggccugucccagauauguuaagcaaagcacucugaaauuggcaacaggaaugcgaaauguaccagagaaacaaacuagaggcauauuuggcgcaauagcggguuucauagaaaaugguugggagggaaugguggaugguugguacgguuucaggcaucaaaauucugagggaagaggacaagcagcagaucucaaaagcacucaagcagcaaucgaucaaaucaaugggaagcugaaucgauugaucgggaaaaccaacgagaaauuccaucagauugaaaaagaauucucagaaguagaagggagaauucaggaccuugagaaauauguugaggacacaaaaauagaucucuggucauacaacgcggagcuucuuguugcccuggagaaccaacauacaauugaucuaacugacucagaaaugaacaaacuguuugaaaaaacaaagaagcaacugagggaaaaugcugaggauaugggcaaugguuguuucaaaauauaccacaaaugugacaaugccugcauaggaucaaucagaaauggaacuuaugaccacgauguauacagggaugaggcauugaacaaccgguuccagaucaagggaguugaguugaagucaggguacaaagauuggauccuauggauuuccuuugccauaucauguuuuuugcuuuguguugcuuuguugggguucaucaugugggccugccaaaagggcaacauuaggugcaacauuugcauuuga

SEQ ID NO: 44643 - RNA, 1701 nt, Artificial Sequence
  derived and/or modified CDS sequence (wt) from hemagglutinin__InfluenzaA__AIL94389
augaaggcaauacuaguaguucugcuauauacauuugcaaccgcaaaugcagacacauuauguauagguuaucaugcgaacaauucaacagacacuguagauacaguacuagaaaagaauguaacaguaacacacucuguuaaccuucuagaagacaagcauaacgggaaacuaugcaaacuaagagggguagccccauugcauuuggguaaauguaacauugcuggcuggaucuugggaaauccagagugugaaucacucuccacagcaaguucaugguccuacauuguggaaacaucuaguucagacaauggaacguguuacccaggagauuucaucaauuaugaggagcuaagagagcaauugagcucagugucaucauuugaaagguuugagauauuccccaagacaaguucauggcccaaucaugacucgaacaaagguguaacggcagcauguccucacgcuggagcaaaaagcuucuacaaaaauuuaauauggcuaguuaaaaaaggaaauucauacccaaagcucagccaauccuacauuaaugauaaagggaaagaaguccucgugcuguggggcauccaccauccaucuacuacugcugaccaacaaagucucuaucagaaugcagaugcauauguuuuuguggggacaucaagauacagcaaaaaguucaagccggaaauagcaauaagacccaaagugagggaucaagaagggagaaugaacuauuacuggacacuaguagagccgggagacaaaauaacauucgaagcaacuggaaaucuagugguaccgagauaugcauucacaauggaaagaaaugcuggaucugguauuaucauuucagauacaccaguccacgauugcaauacaacuugucagacacccgagggugcuauaaacaccagccucccauuucagaauauacauccgaucacaauuggaaaauguccaaaguauguaaaaagcacaaaauugagacuggccacaggauugaggaaugucccgucuauucaaucuagaggccuauucggggccauugccggcuucauugaagggggguggacagggaugguagauggaugguacgguuaucaccaucaaaaugagcaggggucaggauaugcagccgaccugaagagcacacaaaaugccauugacaagauuacuaacaaaguaaauucuguuauugaaaagaugaauacacaguucacagcaguggguaaagaguucaaccaccuggaaaaaagaauagagaauuuaaauaaaaaaguugaugaugguuuccuggacauuuggacuuacaaugccgaacuguugauucuauuggaaaaugaaagaacuuuggacuaccaugauucaaaugugaagaacuuguaugaaaagguaagaaaccaguuaaaaaacaaugccaaggaaauuggaaacggcugcuuugaauuuuaccacaaaugcgauaacacgugcauggaaagugucaaaaaugggacuuaugacuacccaaaauacucagaggaagcaaaauuaaacagagaaaaaauagaugggguaaagcuggaaucaacaaggauuuaccagauuuuggcgaucuauucaacugucgccaguucauugguacugguagucucccugggggcaaucagcuucuggaugugcucuaaugggucucuacaauguagaauuuguauuuaa

SEQ ID NO: 44644 - RNA, 1701 nt, Artificial Sequence
  derived and/or modified CDS sequence (wt) from hemagglutinin__InfluenzaA__AIL94411
augaagacuaucauugcuuugagcuacauucuaugucugguuuucgcucaaaaacuuccuggaaaugacaauagcacggcaacgcugugccuugggcaccaugcaguaccaaacggaacgauagugaaaacaaucacgaaugaccgaauugaaguuacuaaugcuacugagcugguucagaauuccucaauaggugaaauaugcgacaguccucaucagauccuugauggagaaaacugcacacuaauagaugcucuauugggagacccucagugugauggcuuucaaaauaagaaaugggaccuuuuuguugaacgaagcaaagccuacagcaacuguuacccuuaugaugugccggauuaugccucccuuaggucacuaguugccucauccggcacacuggaguuuaacaaugaaagcuucaauugggcuggagucacucaaaacggaacaaguucugcuugcauaaggggaucuaauaguaguuucuuuaguagauuaaauugguugacccacuuaaacuucaaauacccagcauugaacgugacuaugccaaacaaugaacaauuugacaaauuguacauuugggggguucaccacccggguacggacaaggaccaaaucuuccuguaugcucaaucaucaggaagaaucacaguaucuaccaaaagaagccaacaagcuguaaucccgaauaucggaucuagacccagaauaaggaauaucccuagcagaauaagcaucuauuggacaauaguaaaaccgggagacauacuuuugauuaacagcacagggaaucuaauugcuccuagggguuacuucaaaauacgaagugggaaaagcucaauaaugagaucagaugcacccauuggcaaaugcaagucugaaugcaucacuccaaauggaagcauucccaaugacaaaccauuccaaaauguaaacaggaucacauacggggccugucccagauauguuaagcaaagcacucugaaauuggcaacaggaaugcgaaauguaccagagaaacaaacuagaggcauauuuggcgcaauagcaggcuucauagaaaaugguugggagggaaugguggaugguugguacgguuucaggcaucaaaauucugagggaagaggacaagcagcagaucucaaaagcacucaagcagcaaucgaucaaaucaaugggaagcugaaucgauugaucgggaaaaccaacgagaaauuccaucagauugaaaaagaauucucagaaguagaagggagaauucaggaccuugagaaauauguugaggacacaaaaauagaucucuggucauacaacgcggagcuucuuguugcccuggagaaccaacauacaauugaucuaacugacucagaaaugaacaaacuguuugaaaaaacaaagaagcaacugagggaaaaugcugaggauaugggcaaugguuguuucaaaauauaccacaaaugugacaaugccugcauaggaucaaucagaaauggaacuuaugaccacgauguauacagggaugaagcacuaaacaaccgguuccagaucaagggaguugaguugaagucaggguacaaagauuggauccuauggauuuccuuugccauaucauguuuuuugcuuuguguugcuuuguugggguucaucaugugggccugccaaaagggcaacaucaggugcaacauuugcauuuga

SEQ ID NO: 44645 - RNA, 1701 nt, Artificial Sequence; identical to SEQ ID NO: 42155
  derived and/or modified CDS sequence (wt) from hemagglutinin__InfluenzaA__AIL94423

SEQ ID NO: 44646 - RNA, 1701 nt, Artificial Sequence
  derived and/or modified CDS sequence (wt) from hemagglutinin__InfluenzaA__AIL94435
augaaggcaauacuaguaguucuacuauauacauuugcaaccgcaaaugcagacacauuauguauagguuaucaugcgaacaauucaacagacacuguagacacaguacuagaaaagaauguaacaguaacacacucuguuaaccuucuagaagacaagcauaacgggaaacuaugcaaacuaagagggguagccccauugcauuuggguaaauguaacauugcuggcuggauccugggaaauccagagugugaaucacucuccacagcaaguucaugguccuacauuguggaaacaucuaguucagacaauggaacguguuacccaggagauuucaucaauuaugaggagcuaagagagcaauugagcucagugucaucauuugaaagguuugagauauuccccaagacaaguucauggcccaaucaugacucgaacaaagguguaacggcagcauguccucacgcuggagcaaaaagcuucuacaaaaauuuaauauggcuaguuaaaaaaggaaauucauacccaaagcucagccaauccuacauuaaugauaaagggaaagaaguccucgugcuguggggcauccaccauccaucuacuacugcugaccaacaaagucucuaucagaaugcagaugcauauguuuuuguggggacaucaagauacagcaaaaaguucaagccggaaauagcaauaagacccaaagugagggaucaagaagggagaaugaacuauuacuggacacuaguagagccgggagacaaaauaacauucgaagcaacuggaaaucuagugguaccgagauaugcauucacaauggaaagaagugcuggaucugguauuaucauuucagauacaccaguccacgauugcaauacaacuugucagacacccgagggugcuauaaacaccagccucccauuucagaauauacauccgaucacaauuggaaaauguccaaaguacguaaaaagcacaaaauugagacuggccacaggauugaggaaugucccguccauucaaucuagaggccuauucggggccauugccggcuucauugaagggggguggacagggaugguagauggaugguacgguuaucaccaccaaaaugagcaggggucaggauaugcagccgaccugaagagcacacaaaaugccauugacaagauuacuaacaaaguaaauucuguuauugaaaagaugaauacacaguucacagcaguggguaaagaguucaaccaccuggaaaaaagaauagagaauuuaaauaaaaaaguugaugaugguuuccuggacauuuggacuuacaaugccgaacuguugguucuauuggaaaaugaaagaacuuuggacuaccacgauucaaaugugaagaacuuguaugaaaagguaagaaaccaguuaaaaaacaaugccaaggaaauuggaaacggcugcuuugaauuuuaccacaaaugcgauaacacgugcauggaaagugucaagaaugggacuuaugacuacccaaaauacucagaggaagcaaaauuaaacagagaaaaaauagaugggguaaagcuggaaucaacaaggauuuaccagauuuuggcgaucuauucaacugucgccaguucauugguacugguagucucccugggggcaaucagcuucuggaugugcucuaaugggucucuacaauguagaauauguauuuaa

SEQ ID NO: 44647 - RNA, 1701 nt, Artificial Sequence
  derived and/or modified CDS sequence (wt) from hemagglutinin__InfluenzaA__AIL94446
augaagacuaucauugcuuugagcuacauucuaugucugguuuucgcucaaaaacuuccuggaaaugacaauagcacggcaacgcugugccuugggcaccaugcaguaccaaacggaacgauagugaaaacaaucacgaaugaccgaauugaaguuacuaaugcuacugagcugguucagaauuccucaauaggugaaauaugcgacaguccucaucagauccuugauggagaaaacugcacacuaauagaugcucuauugggagacccucagugugauggcuuucaaaauaagaaaugggaccuuuuuguugaacgaagcaaagccuacagcaacuguuacccuuaugaugugccggauuaugccucccuuaggucacuaguugccucauccggcacacuggaguuuaacaaugaaagcuucaauugggcuggagucacucaaaacggaacaaguucugcuugcauaaggggaucuaauaguaguuucuuuaguagauuaaauugguugacccacuuaaacuucaaauacccagcauugaacgugacuaugccaaacaaugaacaauuugacaaauuguacauuugggggguucaccacccggguacggacaaggaccaaaucuuccuguaugcucaaucaucaggaagaaucacaguaucuaccaaaagaagccaacaagcuguaaucccgaauaucggaucuagacccagaauaaggaauaucccuagcagaauaagcaucuauuggacaauaguaaaaccgggagacauacuuuugauuaacagcacagggaauuuaauugcuccuagggguuacuucaaaauacgaagugggaaaagcucaauaaugagaucagaugcacccauuggcaaaugcaagucugaaugcaucacuccaaauggaagcauucccaaugacaaaccauuccaaaauguaaacaggaucacauacggggccugucccagauauguuaagcaaagcacucugaaauuggcaacaggaaugcgaaauguaccagagaaacaaacuagaggcauauuuggcgcaauagcggguuucauagaaaaugguugggagggaaugguggaugguugguacgguuucaggcaucaaaauucugagggaagaggacaagcagcagaucucaaaagcacucaagcagcaaucgaucaaaucaaugggaagcugaaucgauugaucgggaaaaccaacgagaaauuccaucagauugaaaaagaauucucagaaguagaagggagaauucaggaccuugagaaauauguugaggacacaaaaauagaucucuggucauacaacgcggagcuucuuguugcccuggagaaccaacauacaauugaucuaacugacucagaaaugaacaaacuguuugaaaaaacaaagaagcaacugagggaaaaugcugaggauaugggcaaugguuguuucaaaauauaccacaaaugugacaaugccugcauaggaucaaucagaaauggaacuuaugaccacgauguauacagggaugaagcauuaaacaaccgguuccagaucaagggaguugaguugaagucaggguacaaagauuggauccuauggauuuccuuugccauaucauguuuuuugcuuuguguugcuuuguugggguucaucaugugggccugccaaaagggcaacauuaggugcaacauuugcauuuga

SEQ ID NO: 44648 - RNA, 1701 nt, Artificial Sequence
  derived and/or modified CDS sequence (wt) from hemagglutinin__InfluenzaA__AIL94458
augaagacuaucauugcuuugagcuacauucuaugucugguuuucgcucaaaaacuuccuggaaaugacaauagcacggcaacgcugugccuugggcaccaugcaguaccaaacggaacgauagugaaaacaaucacgaaugaccgaauugaaguuacuaaugcuacugagcugguucagaauuccucaauaggugaaauaugcgacaguccucaucagauccuugauggagaaaacugcacacuaauagaugcucuauugggagacccucagugugauggcuuucaaaauaagaaaugggaccuuuuuguugaacgaagcaaagccuacagcaacuguuacccuuaugaugugccggacuaugccucccuuaggucacuaguugccucauccggcacacuggaguuuaacaaugaaagcuucaauugggcuggagucacucaaaacggaacaaguucugcuugcauaaggggaucuaauaguaguuucuuuaguagauuaaauugguugacccacuuaaacuucaaauacccagcauugaacgugacuaugccaaacaaugaacaauuugacaaauuguacauuugggggguucaccacccggguacggacaaggaccaaaucuuccuguaugcucaaucaucaggaagaaucacaguaucuaccaaaagaagccaacaagcuguaaucccgaauaucggaucuagacccagaauaaggaauaucccuagcagaauaagcaucuauuggacaauaguaaaaccgggagacauacuuuugauuaacagcacagggaaucuaauugcuccuagggguuacuucaaaauacgaagugggaaaagcucaauaaugagaucagaugcacccauuggcaaaugcaagucugaaugcaucacuccaaauggaagcauucccaaugacaaaccauuccaaaauguaaacaggaucacauacggggccugucccagauauguuaagcaaagcacucugaaauuggcaacaggaaugcgaaauguaccagagaaacaaacuagaggcauauuuggcgcaauagcggguuucauagaaaaugguugggagggaaugguggaugguugguacgguuucaggcaucaaaauucugagggaagaggacaagcagcagaucucaaaagcacucaagcagcaaucgaucaaaucaaugggaagcugaaucgauugaucgggaaaaccaacgagaaauuccaucagauugaaaaagaauucucagaaguagaagggagaauucaggaccuugagaaauauguugaggacacaaaaauagaucucuggucauacaacgcggagcuucuuguugcccuggagaaccaacauacaauugaucuaacugacucagaaaugaacaaacuguuugaaaaaacaaagaagcaacugagggaaaaugcugaggauaugggcaaugguuguuucaaaauauaccacaaaugugacaaugccugcauaggaucaaucagaaauggaacuuaugaccacgauguauacagggaugaggcauugaacaaccgguuccagaucaagggaguugaguugaagucaggguacaaagauuggauccuauggauuuccuuugccauaucauguuuuuugcuuuguguugcuuuguugggguucaucaugugggccugccaaaagggcaacauuaggugcaacauuugcauuuga

SEQ ID NO: 44649 - RNA, 1701 nt, Artificial Sequence
  derived and/or modified CDS sequence (wt) from hemagglutinin__InfluenzaA__AIL94470
augaaggcaauacuaguaguucugcuauauacauuugcaaccgcaaaugcagacacauuauguauagguuaucaugcgaacaauucaacagacacuguagacacaguacuagaaaagaauguaacaguaacacacucuguuaaccuucuagaagacaagcauaacgggaaacuaugcaaacuaagagggguagccccauugcauuuggguaaauguaacauugcuggcuggauccugggaaauccagagugugaaucacucuccacagcaaguucaugguccuacauuguggaaacaucuaguucagacaauggaacguguuacccaggagauuucaucaauuaugaggaacuaagagagcaauugagcucagugucaucauuugaaagguuugagauauuccccaagacaaguucauggcccaaucaugacucgaacaaagguguaacggcagcauguccucacgcuggagcaaaaagcuucuacaaaaauuuaauauggcuaguuaaaaaaggaaauucauacccaaagcucagccaauccuacauuaaugauaaagggaaagaaguccucgugcuguggggcauucaccacccaucuacuacugcugaccaacaaagucucuaucagaaugcagaugcauauguuuuuguggggacaucaagauacagcaagaaguucaagccggaaauagcaauaagacccaaagugagggaucaagaagggagaaugaacuauuacuggacacuaguagagccgggagacaaaauaacauucgaagcaacuggaaaucuagugguaccgagauaugcauucacaauggaaagaaaugcuggaucugguauuaucauuucagauacaccagcccacgauugcaauacaacuugucagacacccgagggugcuauaaacaccagccucccauuucagaauauacauccgaucacaauuggaaaauguccaaaguauguaaaaagcacaaaauugagacuggccacaggauugaggaaugucccgucuauucaaucuagaggccuauucggggccauugccggcuucauugaaggaggguggacagggaugguagauggaugguacgguuaucaccaucaaaaugagcaggggucaggauaugcagccgaccugaagagcacacaaaaugccauugacaagauuacuaacaaaguaaauucuguuauugaaaagaugaauacacaguucacagcaguggguaaagaguucaaccaccuggaaaaaagaauagagaauuuaaauaaaaaaguugaugaugguuuccuggacauuuggacuuacaaugccgaacuguugguucuauuggaaaaugaaagaacuuuggacuaccacgauucaaaugugaagaacuuguaugaaaagguaagaaaccaguuaaaaaacaaugccaaggaaauuggaaacggcugcuuugaauuuuaccacaaaugcgauaacacgugcauggaaagugucaaaaaugggacuuaugacuacccaaaauacucagaggaagcgaaauuaaacagagaaaaaauagaugggguaaagcuggaaucaacaaggauuuaccagauuuuggcgaucuauucaacugucgccaguucauugguacugguagucucccugggggcaaucagcuucuggaugugcucuaaugggucucuacaguguagaauauguauuuaa

SEQ ID NO: 44650 - RNA, 1701 nt, Artificial Sequence
  derived and/or modified CDS sequence (wt) from hemagglutinin__InfluenzaA__AIL94481
augaagacuaucauugcuuugagcuacauucuaugucugguuuucgcucaaaaacuuccuggaaaugacaauagcacggcaacgcugugccuugggcaccaugcaguaccaaacggaacgauagugaaaacaaucacgaaugaccgaauugaaguuacuaaugcuacugagcugguucagaauuccucaauaggugaaauaugcgacaguccucaucagauccuugauggagaaaacugcacacuaauagaugcucuauugggagacccucagugugauggcuuucaaaauaagaaaugggaccuuuuuguugaacgaagcaaagccuacagcaacuguuacccuuaugaugugccggauuaugccucccuuaggucacuaguugccucauccggcacacuggaguuuaacaaugaaagcuucaauugggcuggaguuacucaaaacggaacaaguucugcuugcauaaggggaucuaauaguaguuucuuuaguagauuaaauugguugacccacuuaaacuucaaauacccagcauugaacgugacuaugccaaacaaugaacaauuugacaaauuguacauuugggggguucaccacccggguacggacaaggaccaaaucuuccuguaugcucaaucaucaggaagaaucacaguaucuaccaaaagaagccaacaagcuguaaucccgaauaucggaucuagacccagaauaaggaauaucccuagcagaauaagcaucuauuggacaauaguaaaaccgggagacauacuuuugauuaacagcacagggaaucuaauugcuccuagggguuacuucaaaauacgaagugggaaaagcucaauaaugagaucagaugcacccauuggcaaaugcaagucugaaugcaucacuccaaauggaagcauucccaaugacaaaccauuccaaaauguaaacaggaucacauacggggccugucccagauauguuaagcaaagcacucugaaauuggcaacaggaaugcgaaauguaccagagaaacaaaccagaggcauauuuggcgcaauagcggguuucauagaaaaugguugggagggaaugguggaugguugguacgguuucaggcaucaaaauucugagggaagaggacaagcagcagaucucaaaagcacucaagcagcaaucgaucaaaucaaugggaagcugaaucgauugaucgggaaaaccaacgagaaauuccaucagauugaaaaagaauucucagaaguagaagggagaauucaggaccuugagaaauauguugaggacacaaaaauagaucucuggucauacaacgcggagcuucuuguugcccuggagaaccaacauacaauugaucuaacugacucagaaaugaacaaacuguuugaaaaaacaaagaagcaacugagggaaaaugcugaggauaugggcaaugguuguuucaaaauauaccacaaaugugacaaugccugcauaggaucaaucagaaauggaacuuaugaccacgauguauacagggaugaagcauuaaacaaccgguuccagaucaagggaguugaguugaagucaggguacaaagauuggaucauauggauuuccuuugccauaucauguuuuuugcuuuguguugcuuuguugggguucaucaugugggccugccaaaagggcaacauuaggugcaacauuugcauuuga

SEQ ID NO: 44651 - RNA, 1701 nt, Artificial Sequence
  derived and/or modified CDS sequence (wt) from hemagglutinin__InfluenzaA__AIL94493
augaaggcaauacuaguaguucugcuauauacauuugcaaccgcaaaugcagacacauuauguauagguuaucaugcgaacaauucaacagacacuguagacacaguacuagaaaagaauguaacaguaacacacucuguuaaccuucuagaagacaagcauaacgggaaacuaugcaaacuaagagggguagccccauugcauuuggguaaauguaacauugcuggcuggauccugggaaauccagagugugaaucacucuccacagcaaguucaugguccuacauuguggaaacaucuaguucagacaauggaacguguuacccaggagauuucaucaauuaugaggagcuaagagagcaauugagcucagugucaucauuugaaagguuugagauauuccccaagacaaguucauggcccaaucaugacucgaacaaagguguaacggcagcauguccucacgcuggagcaaaaagcuucuacaaaaauuuaauauggcuaguuaaaaaaggaaauucauacccaaagcucagccaauccuacauuaaugauaaagggaaagaaguccucgugcuguggggcauccaccauccaucuacuacugcugaccaacaaagucucuaucagaaugcagaugcauauguuuuuguggggacaucaagauacagcaaaaaguucaagccggaaauagcaauaagacccaaagugagggaucaagaagggagaaugaacuauuacuggacacuaguagagccgggagacaaaauaacauucgaagcaacuggaaaucuagugguaccgagauaugcauucacaauggaaaaaaaugcuggaucugguauuaucauuucagauacaccaguccacgauugcaauacaacuugucagacacccgagggugcuauaaacaccagcuucccauuucagaauauacauccgaucacaauuggaaaauguccaaaguauguaaaaagcacaaaauugagacuggccacaggauugaggaaugucccgucuauucaaucuagaggccuauucggggccauugccggcuucauugaagggggguggacagggaugguagauggaugguacgguuaucaccaucaaaaugagcaggggucaggauaugcagccgaccugaagagcacacaaaaugccauugacaagauuacuaacaaaguaaauucuguuauugaaaagaugaauacacaguucacagcaguggguaaagaguucaaccaccuggaaaaaagaauagagaauuuaaauaaaaaaguugaugaugguuuccuggacauuuggacuuacaaugccgaacuguugguucuauuggaaaaugaaagaacuuuggacuaccacgauucaaaugugaagaacuuguaugaaaagguaagaaaccaguuaaaaaacaaugccaaggaaauuggaaacggcugcuuugaauuuuaccacaaaugcgauaacacgugcauggaaagugucaaaaaugggacuuaugacuacccaaaauacucagaggaagcaaaauuaaacagagaaaaaauagaugggguaaagcuggaaucaacaaggauuuaccagauuuuggcgaucuauucaacugucgccaguucauugguacugguagucucccugggggcaaucagcuucuggaugugcucuaaugggucucuacaauguagaauauguauuuaa

SEQ ID NO: 44652 - RNA, 1701 nt, Artificial Sequence; identical to SEQ ID NO: 44599
  derived and/or modified CDS sequence (wt) from hemagglutinin__InfluenzaA__AIL94504

SEQ ID NO: 44653 - RNA, 1701 nt, Artificial Sequence
  derived and/or modified CDS sequence (wt) from hemagglutinin__InfluenzaA__AIL94515
augaagacuaucauugcuuugagcuacauucuaugucugguuuucgcucaaaaacuuccuggaaaugacaauagcacggcaacgcugugccuugggcaccaugcaguaccaaacggaacgauagugaaaacaaucacgaaugaccgaauugaaguuacuaaugcuacugagcugguucagaauuccucaauaggugaaauaugcgacaguccucaucagauccuugauggagaaaacugcacacuaauagaugcucuauugggagacccucagugugauggcuuucaaaauaagaaaugggaccuuuuuguugaacgaagcaaagccuacagcaacuguuacccuuaugaugugccggauuaugccucccuuaggucacuaguugccucauccggcacacuggaguuuaacaaugaaagcuucaauugggcuggagucacucaaaacggaacaaguucugcuugcauaaggggaucuaauaguaguuucuuuaguagauuaaauugguugacccacuuaaacuucaaauacccagcauugaacgugacuaugccaaacaaugaacaauuugacaaauuguacauuugggggguucaccacccggguacggacaaggaccaaaucuuccuguaugcucaaucaucaggaagaaucacaguaucuaccaaaagaagccaacaagcuguaaucccgaauaucggaucuagacccagaauaaggaauaucccuagcagaauaagcaucuauuggacaauaguaaaaccgggagacauacuuuugauuaacagcacagggaaucuaauugcuccuagggguuacuucaaaauacgaagugggaaaagcucaauaaugagaucagaugcacccauuggcaaaugcaagucugaaugcaucacuccaaauggaagcauucccaaugacaaaccauuccaaaauguaaacaggaucacauacggggccugucccagauauguuaagcaaagcacucugaaauuggcaacaggaaugcgaaauguaccagagaaacaaacuagaggcauauuuggagcaauagcggguuucauagaaaaugguugggagggaaugguggaugguugguacgguuucaggcaucaaaacucugagggaagaggacaagcagcagaucucaaaagcacucaagcagcaaucgaucaaaucaaugggaagcugaaucgauugaucgggaaaaccaacgagaaauuccaucagauugaaaaagaauucucagaaguagaagggagaauucaggaccuugagaaauauguugaggacacaaaaauagaucucuggucauacaacgcggagcuucuuguugcccuggagaaccaacauacaauugaucuaacugacucagaaaugaacaaacuguuugaaaaaacaaagaagcaacugagggaaaaugcugaggauaugggcaaugguuguuucaaaauauaccacaaaugugacaaugccugcauaggaucaaucagaaauggaacuuaugaccacgauguauacagggaugaagcauuaaacaaccgguuccagaucaagggaguugaguugaagucaggguacaaagauuggauccuauggauuuccuuugccauaucauguuuuuugcuuuguguugcuuuguugggguucaucaugugggccugccaaaagggcaacauuaggugcaacauuugcauuuga

SEQ ID NO: 44654 - RNA, 1701 nt, Artificial Sequence; identical to SEQ ID NO: 42155
  derived and/or modified CDS sequence (wt) from hemagglutinin__InfluenzaA__AIL94527

SEQ ID NO: 44655 - RNA, 1701 nt, Artificial Sequence
  derived and/or modified CDS sequence (wt) from hemagglutinin__InfluenzaA__AIL94539
augaaggcaauacuaguaguucugcuauauacauuugcaaccgcaaaugcagacacauuauguauagguuaucaugcgaacaauucaacagacacuguagacacaguacuagaaaagaauguaacaguaacacacucuguuaaccuucuagaagacaagcauaacgggaaacuaugcaaacuaagagggguagccccauugcauuuggguaaauguaacauugcuggcuggauccugggaaauccagagugugaaucacucuccacagcaaguucaugguccuacauuguggaaacaucuaguucagacaauggaacguguuacccaggagauuucaucaauuaugaggagcuaagagagcaauugagcucagugucaucauuugaaagguuugagauauuccccaagacaaguucauggcccaaucaugacucgaacaaagguguaacggcagcauguccucacgcuggagcaaaaagcuucuacaaaaauuuaauauggcuaguuaaaaaaggaaauucauacccaaagcucagccaauccuacauuaaugauaaagggaaagaaguccucgugcuguggggcauccaccauccaucuacuacugcugaccaacaaagucucuaucagaaugcagaugcauauguuuuuguggggacaucaagauacagcaaaaaguucaagccggaaauagcaauaagacccaaagugagggaucaagaagggagaaugaacuauuacuggacacuaguagagccgggagacaaaauaacauucgaagcaacuggaaaucuagugguaccgagauaugcauucacaauggaaagaaaugcuggaucugguauuaucauuucagauacaccagcccacgauugcaauacaacuugucagacacccgagggugcuauaaacaccagccucccauuucagaauauacauccgaucacaauuggaaaauguccaaaguauguaaaaagcacaaaauugagacuggccacaggauugaggaaugucccgucuauucaaucuagaggccuauucggggccauugccggcuucauugaagggggguggacagggaugguagauggaugguacgguuaucaccaucaaaaugagcaggggucaggauaugcagccgaccugaagagcacacaaaaugccauugacaagauuacuaacaaaguaaauucuguuauugaaaagaugaauacacaguucacagcaguggguaaagaguucaaccaccuggaaaaaagaauagagaauuuaaauaaaaaaguugaugaugguuuccuggacauuuggacuuacaaugccgaacuguugguucuauuggaaaaugaaagaacuuuggacuaccacgauucaaaugugaagaacuuguaugaaaagguaagaaaccaguuaaaaaacaaugccaaggaaguuggaaacggcugcuuugaauuuuaccacaaaugcgauaacacgugcauggaaagugucaaaaaugggacuuaugacuacccaaaauacucagaggaagcaaaauuaaacagagaaaaaauagaugggguaaagcuggaaucaacaaggauuuaccagauuuuggcgaucuauucaacugucgccaguucauugguacugguagucucccugggggcaaucagcuucuggaugugcucuaaugggucucuacaauguagaauauguauuuaa

SEQ ID NO: 44656 - RNA, 1701 nt, Artificial Sequence
  derived and/or modified CDS sequence (wt) from hemagglutinin__InfluenzaA__AIL94550
augaaggcaauacuaguaguucuacuauauacauuugcaaccgcaaaugcagacacauuauguauagguuaucaugcgaacaauucaacagacacuguagacacaguacuagaaaagaauguaacaguaacacacucuguuaaccuucuagaagacaagcauaacgggaaacuaugcaaacuaagagggguagccccauugcauuuggguaaauguaacauugcuggcuggauccugggaaauccagagugugaaucacucuccacagcaaguucaugguccuacauuguggaaacaucuaguucagacaauggaacguguuacccaggagauuucaucaauuaugaggagcuaagagagcaauugagcucagugucaucauuugaaagguuugagauauuccccaagacaaguucauggcccaaucaugacucgaacaaagguguaacggcagcauguccucacgcuggagcaaaaagcuucuacaaaaauuuaauauggcuaguuaaaaaaggaaauucauacccaaaacucagccaauccuacauuaaugauaaagggaaagaaguccucgugcuguggggcauccaccauccaucuacuacugcugaccaacaaagucucuaucagaaugcagaugcauauguuuuuguggggacaucaagauacagcaaaaaguucaagccggaaauagcaauaagacccaaagugagggaucaagaagggagaaugaacuauuacuggacacuaguagagccgggagacaaaauaacauucgaagcaacuggaaaucuagugguaccgagauaugcauucacaauggaaagaagugcuggaucugguauuaucauuucagauacaccaguccacgauugcaauacaacuugucagacacccgagggugcuauaaacaccagccucccauuucagaauauacauccgaucacaauuggaaaauguccaaaguauguaaaaagcacaaaauugagacuggccacaggauugaggaaugucccgucuauucaaucuagaggccuauucggggccauugccggcuucauugaagggggguggacagggaugguagauggaugguacgguuaucaccaccaaaaugagcaggggucaggauaugcagccgaccugaagagcacacaaaaugccauugacaagauuacuaacaaaguaaauucuguuauugaaaagaugaauacacaguucacagcaguggguaaagaguucaaccaccuggaaaaaagaauagagaauuuaaauaaaaaaguugaugaugguuuccuggacauuuggacuuacaaugccgaacuguugguucuauuggaaaaugaaagaacuuuggacuaccacgauucaaaugugaagaacuuguaugaaaagguaagaaaccaguuaaaaaacaaugccaaggaaauuggaaacggcugcuuugaauuuuaccacaaaugcgauaacacgugcauggaaagugucaagaaugggacuuaugacuacccaaaauacucagaggaagcaaaauuaaacagagaaaaaauagaugggguaaagcuggaaucaacaaggauuuaccagauuuuggcgaucuauucaacugucgccaguucauugguacugguagucucccugggggcaaucagcuucuggaugugcucuaaugggucucuacaauguagaauauguauuuaa

SEQ ID NO: 44657 - RNA, 1701 nt, Artificial Sequence
  derived and/or modified CDS sequence (wt) from hemagglutinin__InfluenzaA__AIL94561
augaagacuaucauugcuuugagcuacauucuaugucugguuuucgcucaaaaacuuccuggaaaugacaauagcacggcaacgcugugccuugggcaccaugcaguaccaaacggaacgauagugaaaacaaucacgaaugaccgaauugaaguuacuaaugcuacugagcugguucagaauuccucaauaggugaaauaugcgacaguccucaucagauccuugauggagaaaacugcacacuaauagaugcucuauugggagacccucagugugauggcuuucaaaauaagaaaugggaccuuuuuguugaacgaagcaaagccuacagcaacuguuacccuuaugaugugccggauuaugccucccuuaggucacuaguugccucauccggcacacuggaguuuaacaaugaaagcuucaauugggcuggagucacucaaaacggaacaaguucugcuugcauaaggggaucuaauaguaguuucuuuaguagauuaaauugguugacccacuuaaacuucaaauacccagcauugaacgugacuaugccaaacaaugaacaauuugacaaauuguacauuugggggguucaccacccggguacggacaaggaccaaaucuuccuguaugcucaaucaucaggaagaaucacaguaucuaccaaaagaagccaacaagcuguaaucccgaauaucggaucuagacccagaauaaggaauaucccuagcagaauaagcaucuauuggacaauaguaaaaccgggagacauacuuuugauuaacagcacagggaaucuaauugcuccuagggguuacuucaaaauacgaagugggaaaagcucaauaaugagaucagaugcacccauuggcaaaugcaagucugaaugcaucacuccaaauggaagcauucccaaugacaaaccauuccaaaauguaaacaggaucacauacggggccugucccagauauguuaagcaaagcacucugaaauuggcaacaggaaugcgaaauguaccagagaaacaaacuagaggcauauuuggcgcaauagcggguuucauagaaaaugguugggagggaaugguggaugguugguacgguuucaggcaucaaaauucugagggaagaggacaagcagcagaucucaaaagcacucaagcagcaaucgaucaaaucaaugggaagcugaaucgauugaucgggaaaaccaacgagaaauuccaucagauugaaaaagaauucucagaaguagaagggagaauucaggaccuugagaaauauguugaggacacaaaaauagaucucuggucauacaacgcggagcuucuuguugcccuggagaaccaacauacaauugaucuaacugacucagaaaugaacaaacuguuugaaaaaacaaagaagcaacugagggaaaaugcugaggauaugggcaaugguuguuucaaaauauaccacaaaugugacaaugccugcauaggaucaaucagaaauggaacuuaugaccacgauguauacagggaugaggcauugaacaaccgguuccagaucaagggaguugaguugaagucaggguacaaagauuggauccuauggauuuccuuugccauaucauguuuuuugcuuuguguugcuuuguugggguucaucaugugggccugccaaaggggcaacauuaggugcaacauuugcauuuga

SEQ ID NO: 44658 - RNA, 1701 nt, Artificial Sequence
  derived and/or modified CDS sequence (wt) from hemagglutinin__InfluenzaA__AIL94573
augaaggcaauacuaguaguucuacuauauacauuugcaaccgcaaaugcagacacauuauguauagguuaucaugcgaacaauucaacagacacuguagacacaguacuagaaaagaauguaauaguaacacacucuguuaaccuucuagaagacaagcauaacgggaaacuaugcaaacuaagagggguagccccauugcauuuggguaaauguaacauugcuggcuggauccugggaaauccagagugugaaucacucuccacagcaaguucaugguccuacauuguggaaacaucuaguucagacaauggaacguguuacccaggagauuucaucaauuaugaggagcuaagagagcaauugagcucagugucaucauuugaaagguuugagauauuccccaagacaaguucauggcccaaucaugacucgaacaaagguguaacggcagcauguccucacgcuggagcaaaaagcuucuacaaaaauuuaauauggcuaguuaaaaaaggaaauucauacccaaagcucagccaauccuacauuaaugauaaagggaaagaaguccucgugcuguggggcauccaccauccaucuacuacugcugaccaacaaagucucuaucagaaugcagaugcauauguuuuuguggggacaucaagauacagcaaaaaguucaagccggaaauagcaauaagacccaaagugagggaucaagaagggagaaugaacuauuacuggacacuaguagagccgggagacaaaauaacauucgaagcaacuggaaaucuagugguaccgagauaugcauucacaauggaaagaaaugcuggaucugguauuaucauuucagauacaccaguccacgauugcaauacaacuugucagacacccgagggugcuauaaacaccagccucccauuucagaauauacauccgaucacaauuggaaaauguccaaaguauguaaaaagcacaaaauugagacuggccacaggauugaggaaugucccgucuauucaaucuagaggccuauucggggccauugccggcuucauugaagggggguggacagggaugguagauggaugguacgguuaucaccaccaaaaugagcaggggucaggauaugcagccgaccugaagagcacacaaaaugccauugacaagauuacuaacaaaguaaauucuguuauugaaaagaugaauacacaguucacagcaguggguaaagaguucaaccaccuggaaaaaagaauagagaauuuaaauaaaaaaguugaugaugguuuccuggacauuuggacuuacaaugccgaacuguugguucuauuggaaaaugaaagaacuuuggacuaccacgauucaaaugugaagaacuuguaugaaaagguaagaaaccaguuaaaaaacaaugccaaggaaauuggaaacggcugcuuugaauuuuaccacaaaugcgauaacacgugcauggaaagugucaagaaugggacuuaugacuacccaaaauacucagaggaagcaaaauuaaacagagaaaaaauagaugggguaaagcuggaaucaacaaggguuuaccagauuuuggcgaucuauucaacugucgccaguucauugguacugguagucucccugggggcaaucagcuucuggaugugcucuaaugggucucuacaauguagaauauguauuuaa

SEQ ID NO: 44659 - RNA, 1701 nt, Artificial Sequence
  derived and/or modified CDS sequence (wt) from hemagglutinin__InfluenzaA__AIL94584
augaaggcaauacuaguaguucugcuauauacauuugcaaccgcaaaugcagacacauuauguauagguuaucaugcgaacaauucaacagacacuguagacacaguacuagaaaagaauauaacaguaacacacucuguuaaccuucuagaagacaagcauaacgggaaacuaugcaaacuaagagggguagccccauugcauuuggguaaauguaacauugcuggauggauccugggaaauccagagugugaaucacucuccacagcaaguucaugguccuacauuguggaaacaucuaguucagacaauggaacguguuacccaggagauuucaucaauuaugaggagcuaagagagcaauugagcucagugucaucauuugaaagguuugagauauuccccaagacaaguucauggcccaaucaugacucgaacaaagguguaacggcagcauguccucacgcuggagcaaaaagcuucuacaaaaauuuaauauggcuaguuaaaaaaggaaauucauacccaaagcucagccaauccuacauuaaugauaaagggaaagaaguccucgugcuguggggcauccaccauccaucuacuacugcugaccaacaaagucucuaucagaaugcagaugcauauguuuuuguggggacaucaagauacagcaaaaaguucaagccggaaauagcaauaagacccaaagugagggaucaagaagggagaaugaacuauuacuggacacuaguagagccgggagacaaaauaacauucgaagcaacuggaaaucuagugguaccgagauaugcauucacaauggaaagaaaugcuggaucugguauuaucauuucagauacaccaguccacgauugcaauacaacuugucagacacccgagggugcuauaaacaccagccucccauuucagaauauacauccgaucacaauuggaagauguccaaaguauguaaaaagcacaaaauugagacuggccacaggauugaggaaugucccgucuauucaaucuagaggucuauucggggccauugccggcuucauugaagggggguggacagggaugguagauggaugguacgguuaucaccaucaaaaugagcaggggucaggauaugcagccgaccugaagagcacacaaaaugccauugacaagauuacuaacaaaguaaauucuguuauugaaaagaugaauacacaguucacagcaguggguaaagaguucaaccaccuggaaaaaagaauagagaauuuaaauaaaaaaguugaugaugguuuccuggacauuuggacuuacaaugccgaacuguugguucuauuggaaaaugaaagaacuuuggacuaccacgauucaaaugugaagaacuuguaugaaaagguaagaaaccaguuaaaaaacaaugccaaggaaauuggaaacggcugcuuugaauuuuaccacaaaugcgauaacacgugcauggaaagugucaaaaaugggacuuaugacuacccaaaauacucagaggaagcaaaauuaaacagagaaaaaauagaugggguaaagcuggaaucaacaaggauuuaccagauuuuggcgaucuauucaacugucgccaguucauugguacugguagucucccugggggcaaucagcuucuggaugugcucuaaugggucucuacaauguagaauauguauuuaa

SEQ ID NO: 44660 - RNA, 1701 nt, Artificial Sequence
  derived and/or modified CDS sequence (wt) from hemagglutinin__InfluenzaA__AIL94595
augaaggcaauacuaguaguucugcuauauacauuugcaaccgcaaaugcagacacauuauguauagguuaucaugcgaacaauucaacagacacuguagacacaguacuagaaaagaauguaacaguaacacacucuguuaaccuucuagaagacaagcauaacgggaaacuaugcaaacuaagagggguagccccauugcauuuggguaaauguaacauugcuggcuggauccugggaaauccagagugugaaucacucuccacagcaaguucaugguccuacauuguggaaacaucuaguucagacaauggaacguguuacccaggagauuucaucaauuaugaggagcuaagagagcaauugagcucagugucaucauuugaaagguuugagauauuccccaagacaaguucauggcccaaucaugacucgaacaaagguguaacggcagcauguccucacgcuggagcaaaaagcuucuacaaaaauuuaauauggcuaguuaaaaaaggaaauucauacccaaagcucagccaauccuacauuaaugauaaagggaaagaaguccucgugcuguggggcauccaccauccaucuacuacuacugaccaacaaagucucuaucagaaugcagaugcauauguuuuuguggggacaucaagauacagcaaaaaguucaagccggaaauagcaauaagacccaaagugagggaucaagaagggagaaugaacuauuacuggacacuaguagagccgggagacaaaauaacauucgaagcaacuggaaaucuagugguaccgagauaugcauucacaauggaaagaaaugcuggaucugguauuaucauuucagauacaccaguccacgauugcaauacaacuugucagacacccgagggugcuauaaacaccagccucccauuucagaauauacauccgaucacaauuggaaaauguccaaaguauguaaaaagcacaaaauugagacuggccacaggauugaggaaugucccgucuauucaaucuagaggccuauucggggccauugccggcuucauugaagggggguggacagggaugguagauggaugguacgguuaucaccaucaaaaugagcaggggucaggauaugcagccgaccugaagagcacacaaaaugccauugacaagauuacuaacaaaguaaauucuguuauugaaaaaaugaauacacaguucacagcaguggguaaagaguucaaccaccuggaaaaaagaauagagaauuuaaauaaaaaaguugaugaugguuuccuggacauuuggacuuacaaugccgaacuguugguucuauuggaaaaugaaagaacuuuggacuaccacgauucaaaugugaagaacuuguaugaaaagguaagaaaccaguuaaaaaacaaugccaaggaaauuggaaacggcugcuuugaauuuuaccacaaaugcgauaacacgugcauggaaagugucaaaaaugggacuuaugacuacccaaaauacucagaggaagcaaaauuaaacagagaaaaaauagaugggguaaagcuggaaucaacaaggauuuaccagauuuuggcgaucuauucaacugucgccaguucauugguacugguagucucccugggggcaaucagcuucuggaugugcucuaaugggucucuacaauguagaauauguauuuaa

SEQ ID NO: 44661 - RNA, 1701 nt, Artificial Sequence; identical to SEQ ID NO: 42155
  derived and/or modified CDS sequence (wt) from hemagglutinin__InfluenzaA__AIL94606

SEQ ID NO: 44662 - RNA, 1701 nt, Artificial Sequence; identical to SEQ ID NO: 44640
  derived and/or modified CDS sequence (wt) from hemagglutinin__InfluenzaA__AIL94618

SEQ ID NO: 44663 - RNA, 1701 nt, Artificial Sequence
  derived and/or modified CDS sequence (wt) from hemagglutinin__InfluenzaA__AIL94629
augaaggcaauacuaguaguucuacuauauacauuugcaaccgcaaaugcagacacauuauguauagguuaucaugcgaacaauucaacagacacuguagacacaguacuagaaaagaauguaacaguaacacacucuguuaaccuucuagaagacaagcauaacgggaaacuaugcaaacuaagagggguagccccauugcauuuggguaaauguaacauugcuggcuggauccugggaaauccagagugugaaucacucuccacagcaaguucaugguccuacauuguggaaacaucuaguucagacaauggaacguguuacccaggagauuucaucaauuaugaagagcuaagagagcaauugagcucagugucaucauuugaaagguuugagauauuccccaagacaaguucauggcccaaucaugacucgaacaaagguguaacggcagcauguccucacgcuggagcaaaaagcuucuacaaaaauuuaauauggcuaguuaaaaaaggaaauucauacccaaagcucagccaauccuacauuaaugauaaagggaaagaaguccucgugcuguggggcauccaccauccaucuacuacugcugaccaacaaagucucuaucagaaugcagaugcauauguuuuuguggggacaucaagauacagcaaaaaguucaagccggaaauagcaauaagacccaaagugagggaucaagaagggagaaugaacuauuacuggacacuaguagagccgggagacaaaauaacauucgaagcaacuggaaaucuagugguaccgagauaugcauucacaauggaaagaagugcuggaucugguauuaucauuucagauacaccaguccacgauugcaauacaacuugucagacacccgagggugcuauaaacaccagccucccauuucagaauauacauccgaucacaauuggaaaauguccaaaguauguaaaaagcacaaaauugagacuggccacaggauugaggaaugucccgucuauucaaucuagaggccuauucggggccauugccggcuucauugaagggggguggacagggaugguagauggaugguacgguuaucaccaccaaaaugagcaggggucaggauaugcagccgaccugaagagcacacaaaaugccauugacaagauuacuaacaaaguaaauucuguuauugaaaagaugaauacacaguucacagcaguggguaaagaguucaaccaccuggaaaaaagaauagagaauuuaaauaaaaaaguugaugaugguuuccuggacauuuggacuuacaaugccgaacuguugguucuauuggaaaaugaaagaacuuuggacuaccacgauucaaaugugaagaacuuguaugaaaagguaagaaaccaguuaaaaaacaaugccaaggaaauuggaaacggcugcuuugaauuuuaccacaaaugcgauaacacgugcauggaaagugucaagaaugggacuuaugacuacccaaaauacucagaggaagcaaaauuaaacagagaaaaaauagaugggguaaagcuggaaucaacaaggauuuaccagauuuuggcgaucuauucaacugucgccaguucauugguacugguagucucccugggggcaaucagcuucuggaugugcucuaaugggucucuacaauguagaauauguauuuaa

SEQ ID NO: 44664 - RNA, 1701 nt, Artificial Sequence; identical to SEQ ID NO: 42155
  derived and/or modified CDS sequence (wt) from hemagglutinin__InfluenzaA__AIL94640

SEQ ID NO: 44665 - RNA, 1701 nt, Artificial Sequence
  derived and/or modified CDS sequence (wt) from hemagglutinin__InfluenzaA__AIL94652
augaaggcaauacuaguaguucugcuauacacauuugcaaccgcaaaugcagacacauuauguauagguuaucaugcgaacaauucaacagacacuguagacacaguacuagaaaagaauguaacaguaacacacucuauuaaccuucuagaagacaagcauaacgggaaacuaugcaaacuaagagggguagccccauugcauuuggguaaauguaacauugcuggcuggauccugggaaauccagagugugaaucacucuccacagcaaguucaugguccuacauuguggaaacaucuaguucagacaauggaacguguuacccaggagauuucaucaauuaugaggagcuaagagagcaauugagcucagugucaucauuugaaagguuugagauguuccccaagacaaguucauggcccaaucaugacucgaacaaagguguaacggcagcauguccucaugcuggagcaaaaagcuucuacaaaaauuuaauauggcuaguuaaaaaaggaaauucauacccaaagcucagcaaauccuacauuaaugauaaagggaaagaaguccucgugcuguggggcauucaccauccaucuacuacugcugaccaacaaagucucuaucagaaugcagaugcauauguuuuuguggggacaucaaaauacagcaagaaguucaagccggaaauagcaauaagacccaaagugagggaucaagaagggagaaugaacuauuacuggacacuaauagagccgggagacaaaauaacauucgaagcaacuggaaaucuagugguaccgagauaugcauucgcaauggaaagaaaugcuggaucugguauuaucauuucagauacaccaguccacgauugcaauacaacuugucagacacccgagggugcuauaaacaccagccucccauuucagaauauacauccgaucacaauuggaaaauguccaaaguauguaaaaagcacaaaauugagacuggccacaggauugaggaaugucccgucuauucaaucuagaggccuauucggggccauugccggcuucauugaagggggguggacagggaugguagauggaugguacgguuaucaccaucaaaaugagcaggggucaggauaugcagccgaccugaagagcacacaaaaugccauugacaagauuacuaacaaaguaaauucuguuauugaaaagaugaauacacaguucacagcaguggguaaagaguucaaucaccuggaaaaaagaauagagaauuuaaauaaaaaaguugaugaugguuuccuggacauuuggacuuacaaugccgaacuguugguucuauuggaaaaugaaagaacuuuggacuaccacgauucaaaugugaagaacuuguaugaaaagguaagaaaccaguuaaaaaacaaugccaaggaaauuggaaacggcugcuuugaauuuuaccacaaaugcgauaacacgugcauggaaagugucaaaaaugggacuuaugacuacccaaaauacucagaggaagcaaaauuagacagagaaaaaauagaugggguaaagcuggaaucaacaaggauuuaccagauuuuggcgaucuauucaacugucgccaguucauugguacugguagucucccugggggcaaucaguuucuggaugugcucuaaugggucucuacaguguagaauauguauuuaa

SEQ ID NO: 44666 - RNA, 1701 nt, Artificial Sequence; identical to SEQ ID NO: 44640
  derived and/or modified CDS sequence (wt) from hemagglutinin__InfluenzaA__AIL94663

SEQ ID NO: 44667 - RNA, 1701 nt, Artificial Sequence; identical to SEQ ID NO: 44640
  derived and/or modified CDS sequence (wt) from hemagglutinin__InfluenzaA__AIL94674

SEQ ID NO: 44668 - RNA, 1701 nt, Artificial Sequence
  derived and/or modified CDS sequence (wt) from hemagglutinin__InfluenzaA__AIL94697
augaagacuaucauugcuuugagcuacauucuaugucugguuuucgcucaaaaacuuccuggaaaugacaauagcacggcaacgcugugccuugggcaccaugcaguaccaaacggaacgauagugaaaacaaucacgaaugaccgaauugaaguuacuaaugcuacugagcugguucagaauuccucaauaggugaaauaugcgacaguccucaucagauccuugauggagaaaacugcacacuaauagaugcucuauugggagacccucagugugauggcuuucaaaauaagaaaugggaccuuuuuguugaacgaagcaaagccuacagcaacuguuacccuuaugaugugccggauuaugccucccuuaggucacuaguugccucauccggcacacuggaguuuaacaaugaaagcuucaauugggcuggagucacucaaaacggaacaaguucugcuugcauaaggggaucuaauaguaguuucuuuaguagauuaaauugguugacccacuuaaacuucaaauacccagcauugaacgugacuaugccaaacaaugaacaauuugacaaauuguacauuugggggguucaccacccggguacggacaaggaccaaaucuuccuguaugcucaaucaucaggaagaaucacaguaucuaccaaaagaagccaacaagcuguaaucccgaauaucggaucuagacccagaauaaggaauaucccuagcagaauaagcaucuauuggacaauaguaaaaccgggagacauacuuuugauuaacagcacagggaaucuaauugcuccuagggguuacuucaaaauacgaagugggaaaagcucaauaaugagaucagaugcacccauuggcaaaugcaagucugaaugcaucacuccaaauggaagcauucccaaugacaaaccauuccaaaauguaaacaggaucacauacggggccugucccagauauguuaagcaaagcacucugaaauuggcaacaggaaugcgaaauguaccagagaaacaaacuagaggcauauuuggcgcaauagcaggcuucauagaaaaugguugggagggaaugguggaugguugguacgguuucagacaucaaaauucugagggaagaggacaagcagcagaucucaaaagcacucaagcagcaaucgaucaaaucaaugggaagcugaaucgauugaucgggaaaaccaacgagaaauuccaucagauugaaaaagaauucucagaaguagaagggagaauucaggaccuugagaaauauguugaggacacaaaaauagaucucuggucauacaacgcggagcuucuuguugcccuggagaaccaacauacaauugaucuaacugacucagaaaugaacaaacuguuugaaaaaacaaagaagcaacugagggaaaaugcugaggauaugggcaaugguuguuucaaaauauaccacaaaugugacaaugccugcauaggaucaaucagaaauggaacuuaugaccacgauguauacagggaugaagcacuaaacaaccgguuccagaucaagggaguugaguugaagucaggguacaaagauuggauccuauggauuuccuuugccauaucauguuuuuugcuuuguguugcuuuguugggguucaucaugugggccugccaaaagggcaacaucaggugcaacauuugcauuuga

SEQ ID NO: 44669 - RNA, 1701 nt, Artificial Sequence; identical to SEQ ID NO: 44630
  derived and/or modified CDS sequence (wt) from hemagglutinin__InfluenzaA__AIL94709

SEQ ID NO: 44670 - RNA, 1701 nt, Artificial Sequence
  derived and/or modified CDS sequence (wt) from hemagglutinin__InfluenzaA__AIL94720
augaaggcaauacuaguaguucugcuauauacauuugcaaccgcaaaugcagacacauuauguauagguuaucaugcgaacaauucaacagacacuguagacacaguacuagaaaagaauguaacaguaacacacucuguuaaccuucuagaagacaagcauaacgggaaacuaugcaaacuaagagggguagccccauugcauuuggguaaauguaacauugcuggcuggauccugggaaauccagagugugaaucacucuccacagcaaguucaugguccuacauuguggaaacaucuaguucagacaauggaacguguuacccaggagauuucaucaauuaugaggagcuaagagagcaauugagcucagugucaucauuugaaagguuugagauauuccccaagacaaguucauggcccaaucaugacucgaacaaagguguaacggcagcauguccucacgcuggagcaaaaagcuucuacaaaaauuuaauauggcuaguuaaaaaaggaaauucauacccaaagcucagccaauccuacauuaaugauaaagggaaagaaguccucgugcuguggggcauccaccauccaucuacuacugcugaccaacaaagucucuaucagaaugcagaugcauauguuuuuguggggacaucaagauacagcaaaaaguucaagccggaaauagcaauaagacccaaagugagggaucaagaagggagaaugaacuauuacuggacacuaguagagccgggagacaaaauaacauucgaagcaacuggaaaucuagugguaccgagauaugcauucacaauggaaagaaaugcuggaucugguauuaucauuucagauacaccaguccacgauugcaauacaacuugucagacacccgagggugcuauaaacaccagccucccauuucagaauauacauccgaucacaauuggaaaauguccaaaguauguaaaaagcacaaaauugagacuggccacaggauugaggaaugucccgucuauucaaucuagaggccuauucggggccauugccggcuucauugaagggggguggacagggaugguagauggaugguacgguuaucaccaucaaaaugagcaggggucaggauaugcagccgaccugaagagcacacaaaaugccauugacaagauuacuaacaaaguaaauucuguuauugaaaagaugaauacacaguucacagcaguggguaaagaguucaaccaccuggaaaaaagaauagagaauuuaaauaaaaaaguugaugaugguuuccuggacauuuggacuuacaaugccgaacuguugguucuauuggaaaaugaaagaacuuuggacuaccacgauucaaaugugaagaacuuguaugaaaagguaagaaaccaguuaaaaaacaaugccaaggaaauuggaaacggcugcuuugaauuuuaccacaaaugcgauaacacgugcauggaaagugucaaaaaugggacuuaugacuacccaaaauacucagaggaagcaaaacuaaacagagaaaaaauagaugggguaaagcuggaaucaacaaggauuuaccagauuuuggcgaucuauucaacugucgccaguucauugguacugguagucucccugggggcaaucagcuucuggaugugcucuaaugggucucuacaauguagaauauguauuuaa

SEQ ID NO: 44671 - RNA, 1701 nt, Artificial Sequence; identical to SEQ ID NO: 44644
  derived and/or modified CDS sequence (wt) from hemagglutinin__InfluenzaA__AIL94731

SEQ ID NO: 44672 - RNA, 1701 nt, Artificial Sequence
  derived and/or modified CDS sequence (wt) from hemagglutinin__InfluenzaA__AIL94743
augaaggcaauacuaguaguucuacuauauacauuugcaaccgcaaaugcagacacauuauguauagguuaucaugcgaacaauucaacagacacuguagacacaguacuagaaaagaauguaacaguaacacacucuguuaaccuucuagaagacaagcauaacgggaaacuaugcaaacuaagagggguagccccauugcauuuggguaaauguaacauugcuggcuggauccugggaaauccagagugugaaucacucuccacagcaaguucaugguccuacauuguagaaacaucuaguucagacaauggaacguguuacccaggagauuucaucaauuaugaagaguuaagagagcaauugagcucagugucaucauuugaaagguuugagauauuccccaagacaaguucauggcccaaucaugacucgaacaaagguguaacggcagcauguccucacgcuggagcaaaaagcuucuacaaaaauuuaauauggcuaguuaaaaaaggaaauucauacccaaagcucagccaauccuacauuaaugauaaagggaaagaaguccucgugcuguggggcauccaccauccaucuacuacugcugaccaacaaagucucuaucagaaugcagaugcauauguuuuuguggggacaucaagauacagcaaaaaguucaagccggaaauagcaauaagacccaaagugagggaucaagaagggagaaugaacuauuacuggacacuaguagagccgggagacaaaauaacauucgaagcaacuggaaaucuagugguaccgagauaugcauucacaauggaaagaagugcuggaucugguauuaucauuucagauacaccaguccacgauugcaauacaacuugucagacacccgagggugcuauaaacaccagccucccauuucagaauauacauccgaucacaauuggaaaauguccaaaguauguaaaaagcacaaaauugagacuggccacaggauugaggaaugucccgucuauucaaucuagaggccuauucggggccauugccggcuucauugaagggggguggacagggaugguagauggaugguacgguuaucaccaccaaaaugagcaggggucaggauaugcagccgaccugaagagcacacaaaaugccauugacaagauuacuaacaaaguaaauucuguuauugaaaagaugaauacacaguucacagcaguggguaaagaguucaaccaccuggaaaaaagaauagagaauuuaaauaaaaaaguugaugaugguuuccuggacauuuggacuuacaaugccgaacuguugguucuauuggaaaaugaaagaacuuuggacuaccacgauucaaaugugaagaacuuguaugaaaagguaagaaaccaguuaaaaaacaaugccaaggaaauuggaaacggcugcuuugaguuuuaccacaaaugcgauaacacgugcauggaaagugucaagaaugggacuuaugacuacccaaaauacucagaggaagcaaaauuaaacagagaaaaaauagaugggguaaagcuggaaucaacaaggauuuaccagauuuuggcgaucuauucaacugucgccaguucauugguacugguagucucccugggggcaaucagcuucuggaugugcucuaaugggucucuacaauguagaauauguauuuaa

SEQ ID NO: 44673 - RNA, 1701 nt, Artificial Sequence
  derived and/or modified CDS sequence (wt) from hemagglutinin__InfluenzaA__AIL94754
augaaggcaauacuaguaguucugcuauauacauuugcaaccgcaaaugcagacacauuauguauagguuaucaugcgaacaauucaacagacacuguagauacaguacuagaaaagaauguaacaguaacacacucuguuaaccuucuagaagacaagcauaacgggaaacuaugcaaacuaagagggguagccccauugcauuuggguaaauguaacauugcuggcuggauccugggaaauccagagugugaaucacucuccacagcaaguucaugguccuacauuguggaaacaucuaguucagacaauggaacguguuacccaggagauuucaucaauuaugaggagcuaagagagcaauugagcucagugucaucauuugaaagguuugagauauuccccaagacaaguucauggcccaaucaugacucgaacaaagguguaacggcagcauguccucacgcuggagcaaaaagcuucuacaaaaauuuaauauggcuaguuaaaaaaggaaauucauacccaaagcucagccaauccuacauuaaugauaaagggaaagaaguccucgugcuguggggcauccaccauccaucuacuacugcugaccaacaaagucucuaucagaaugcagaugcauauguuuuuguggggacaucaagauacagcaaaaaguucaagccggaaauagcaauaagacccaaagugagggaucaagaagggagaaugaacuauuacuggacacuaguagagccgggagacaaaauaacauucgaagcaacuggaaaucuagugguaccgagauaugcauucacaauggaaagaaaugcuggaucugguauuaucauuucagauacaccaguccacgauugcaauacaacuugucagacacccgagggugcuauaaacaccagccucccauuucagaauauacauccgaucacaauuggaaaauguccaaaguauguaaaaagcacaaaauugagacuggccacaggauugaggaaugucccgucuauucaaucuagaggccuauucggggccauugccggcuucauugaagggggguggacagggaugguagauggaugguacgguuaucaccaucaaaaugagcaggggucaggauaugcagccgaccugaagagcacacaaaaugccauugacaagauuacuaacaaaguaaauucuguuauugaaaagaugaauacacaguucacagcaguggguaaagaguucaaccaccuggaaaaaagaauagagaauuuaaauaaaaaaguugaugaugguuuccuggacauuuggacuuacaaugccgaacuguugauucuauuggaaaaugaaagaacuuuggacuaccacgauucaaaugugaagaacuuguaugaaaagguaagaaaccaguuaaaaaacaaugccaaggaaauuggaaacggcugcuuugaauuuuaccacaaaugcgauaacacgugcauggaaagugccaaaaaugggacuuaugacuacccaaaauacucagaggaagcaaaauuaaacagagaaaaaauagaugggguaaagcuggaaucaacaaggauuuaccagauuuuggcgaucuauucaacugucgccaguucauugguacugguagucucccugggggcaaucagcuucuggaugugcucuaaugggucucuacaauguagaauauguauuuaa

SEQ ID NO: 44674 - RNA, 1701 nt, Artificial Sequence
  derived and/or modified CDS sequence (wt) from hemagglutinin__InfluenzaA__AIL94765
augaagacuaucauugcuuugagcuacauucuaugucugguuuucgcucaaaaacuuccuggaaaugacaauagcacggcaacgcugugccuugggcaccaugcaguaccaaacggaacgauagugaaaacaaucacgaaugaccgaauugaaguuacuaaugcuacugagcugguucagaauuccucaauaggugaaauaugcgacagaccucaucagauccuugauggagaaaacugcacacuaauagaugcucuauugggagacccucagugugauggcuuucaaaauaagaaaugggaccuuuuuguugaacgaagcaaagccuacagcaacuguuacccuuaugaugugccggauuaugccucccuuaggucacuaguugccucauccggcacacuggaguuuaacaaugaaagcuucaauugggcuggagucacucaaaacggaacaaguucugcuugcauaaggggaucuaauaguaguuucuuuaguagauuaaauugguugacccacuuaaacuucaaauacccagcauugaacgugacuaugccaaacaaugaacaauuugacaaauuguacauuugggggguucaccacccggguacggacaaggaccaaaucuuccuguaugcucaaucaucaggaagaaucacaguaucuaccaaaagaagccaacaagcuguaaucccgaauaucggaucuagacccagaauaaggaauaucccuagcagaauaagcaucuauuggacaauaguaaaaccgggagacauacuuuugauuaacagcacagggaaucuaauugcuccuagggguuacuucaaaauacgaagugggaaaagcucaauaaugagaucagaugcacccauuggcaaaugcaagucugaaugcaucacuccaaauggaagcauucccaaugacaaaccauuccaaaauguaaacaggaucacauacggggccugucccagauauguuaagcaaagcacucugaaauuggcaacaggaaugcgaaauguaccagagaaacaaacuagaggcauauuuggcgcaauagcggguuucauagaaaaugguugggagggaaugguggaugguugguacgguuucaggcaucaaaauucugagggaagaggacaagcagcagaucucaaaagcacucaagcagcaaucgaucaaaucaaugggaagcugaaucgauugaucgggaaaaccaacgagaaauuccaucagauugaaaaagaauucucagaaguagaagggagaauucaggaccuugagaaauauguugaggacacaaaaauagaucucuggucauacaacgcggagcuucuuguugcccuggagaaccaacauacaauugaucuaacugacucagaaaugaacaaacuguuugaaaaaacaaagaagcaacugagggaaaaugcugaggauaugggcaaugguuguuucaaaauauaccacaaaugugacaaugccugcauaggaucaaucagaaauggaacuuaugaccacgauguauacagggaugaggcauugaacaaccgguuccagaucaagggaguugaguugaagucaggguacaaagauuggauccuauggauuuccuuugccauaucauguuuuuugcuuuguguugcuuuguugggguucaucaugugggccugccaaaagggcaacauuaggugcaacauuugcauuuga

SEQ ID NO: 44675 - RNA, 1701 nt, Artificial Sequence; identical to SEQ ID NO: 42155
  derived and/or modified CDS sequence (wt) from hemagglutinin__InfluenzaA__AIL94777

SEQ ID NO: 44676 - RNA, 1701 nt, Artificial Sequence
  derived and/or modified CDS sequence (wt) from hemagglutinin__InfluenzaA__AIL94789
augaaggcaauacuaguaguucugcuauauacauuugcaaccgcaaaugcagacacauuauguauagguuaucaugcgaacaauucaacagacacuguagacacaguacuagaaaagaauguaacaguaacacacucuguuaaccuucuagaagacaagcauaacgggaaacuaugcaaacuaagagggguagccccauugcauuuggguaaauguaacauugcuggcuggauccugggaaauccagagugugaaucacucuccacagcaaguucaugguccuacauuguggaaacaucuaguucagacaauggaacguguuacccaggagauuucaucaauuaugaggagcuaagagagcaauugagcucagugucaucauuugaaagguuugagauauuccccaagacaaguucauggcccaaucaugacucgaacaaagguguaacggcagcauguccucacgcuggagcaaaaagcuucuacaaaaauuuaauauggcuaguuaaaaaaggaaauucauacccaaagcucagccaauccuacauuaaugauaaagggaaagaaguccucgugcuguggggcauccaccauccaucuacuacugcugaccaacaaagucucuaucagaaugcagaugcauauguuuuuguggggacaucaagauacagcaaaaaguucaagccggaaauagcaauaagacccaaagugagggaucaagaagggagaaugaacuauuacuggacacuaguagagccgggagacaaaauaacauucgaagcaacuggaaaucuagugguaccgagauaugcauucacaauggaaagaaaugcuggaucugguauuaucauuucagauacaccaguccacgauugcaauacaacuugucagacacccgagggugcuauaaacaccagccucccauuucagaauauacauccgaucacaauuggaaaauguccaaaguauguaaaaagcacaaaauugagacuggccacaggauugaggaauaucccgucuauucaaucuagaggccuauucggggccauugccggcuucauugaagggggguggacagggaugguagauggaugguacgguuaucaccaucaaaaugagcaggggucaggauaugcagccgaccugaagagcacacaaaaugccauugacaagauuacuaacaaaguaaauucuguuauugaaaagaugaauacacaguucacagcaguggguaaagaguucaaccaccuggaaaaaagaauagagaauuuaaauaaaaaaguugaugaugguuuccuggacauuuggacuuacaaugccgaacuguugguucuauuggaaaaugaaagaacuuuggacuaccacgauucaaaugugaagaacuuguaugaaaagguaagaaaccaguuaaaaaacaaugccaaggaaauuggaaacggcugcuuugaauuuuaccacaaaugcgauaacacgugcauggaaagugucaaaaaugggacuuaugacuacccaaaauacucagaggaagcaaaauuaaacagagaaaaaauagaugggguaaagcuggaaucaacaaggauuuaccagauuuuggcgaucuauucaacugucgccaguucauugguacugguagucucccugggggcaaucagcuucuggaugugcucuaaugggucucuacaauguagaauauguauuuaa

SEQ ID NO: 44677 - RNA, 1701 nt, Artificial Sequence
  derived and/or modified CDS sequence (wt) from hemagglutinin__InfluenzaA__AIL94800
augaaggcaauacuaguaguucugcuauauacauuugcaaccgcaaaugcagacacauuauguauagguuaucaugcgaacaauucaacagacacuguagauacaguacuagaaaagaauguaacaguaacacacucuguuaaccuucuagaagacaagcauaacgggaaacuaugcaaacuaagagggguagccccauugcauuuggguaaauguaacauugcuggcuggauccugggaaauccagagugugaaucacucuccacagcaaguucaugguccuacauuguggaaacaucuaguucagacaauggaacguguuacccaggagauuucaucaauuaugaggagcuaagagagcaauugagcucagugucaucauuugaaagguuugagauauuccccaagacaaguucauggcccaaucaugacucgaacaaagguguaacggcagcauguccucacgcuggagcaaaaagcuucuacaaaaauuuaauauggcuaguuaaaaaaggaaauucauacccaaagcucagccaauccuacauuaaugauaaagggaaagaaguccucgugcuguggggcauccaccauccaucuacuacugcugaccaacaaagucucuaucagaaugcagaugcauauguuuuuguggggacaucaagauacagcaaaaaguucaagccggaaauagcaauaagacccaaagugagggaucaagaagggagaaugaacuauuacuggacacuaguagagccgggagacaaaauaacauucgaagcaacuggaaaucuagugguaccgagauaugcauucacaauggaaagaaaugcuggaucugguauuaucauuucagauacaccaguccacgauugcaauacaacuugucagacacccgagggugcuauaaacaccagccucccauuucagaauauacauccgaucacaauuggaaaauguccaaaguaugugaaaagcacaaaauugagacuggccacaggauugaggaaugucccgucuauucaaucuagaggccuauucggggccauugccggcuucauugaagggggguggacagggaugguagauggaugguacgguuaucaccaucaaaaugagcaggggucaggauaugcagccgaccugaagagcacacaaaaugccauugacaagauuacuaacaaaguaaauucuguuauugaaaagaugaauacacaguucacagcaguggguaaagaguucaaccaccuggaaaaaagaauagagaauuuaaauaaaaaaguugaugaugguuuccuggacauuuggacuuacaaugccgaacuguugguucuauuggaaaaugaaagaacuuuggacuaccacgauucaaaugugaagaacuuguaugaaaagguaagaaaccaguuaaaaaacaaugccaaggaaauuggaaacggcugcuuugaauuuuaccacaaaugcgauaacacgugcauggaaagugucaaaaaugggacuuaugacuacccaaaauacucagaggaagcaaaauuaaacagagaaaaaauagaugggguaaagcuggaaucaacaaggauuuaccagauuuuggcgaucuauucaacugucgccaguucauugguacugguagucucccugggggcaaucagcuucuggaugugcucuaaugggucucuacaauguagaauauguauuuaa

SEQ ID NO: 44678 - RNA, 1701 nt, Artificial Sequence
  derived and/or modified CDS sequence (wt) from hemagglutinin__InfluenzaA__AIL94811
augaagacuaucauugcuuugagcuacauucuaugucugguuuucgcucaaaaacuuccuggaaaugacaauagcacggcaacgcugugccuugggcaccaugcaguaccaaacggaacgauagugaaaacaaucacgaaugaccgaauugaaguuacuaaugcuacugagcugguucagaauuccucaauaggugaaauaugcgacaguccucaucagauucuugauggagaaaacugcacacuaauagaugcucuauugggagacccucagugugauggcuuucaaaauaagaaaugggaccuuuuuguugaacgaagcaaagccuacagcaacuguuacccuuaugaugugccggauuaugccucccuuaggucacuaguugccucauccggcacacuggaguuuaacaaugaaagcuucaauuggacuggagucacucaaaacggaacaaguucugcuugcauaaggagaucuaauaguaguuucuuuaguagauuaaauugguugacccacuuaaacuucaaauacccagcauugaacgugacuaugccaaacaaugaacaauuugacaaauuguacauuugggggguucaccacccagguacggacaaggaccaaaucuuccuguaugcucaaucaucaggaagaaucacaguaucuaccaaaagaagccaacaagcugugaucccaaauaucggaucuagacccagaauaaggaauaucccuagcagaauaagcaucuauuggacaauaguaaaaccgggagacauacuuuugauuaacagcacagggaaucuaauugcuccuagggguuacuucaaaauacgaagugggaaaagcucaauaaugagaucagaugcacccauuggcaaaugcaagucugaaugcaucacuccaaauggaagcauucccaaugacaaaccauuccaaaauguaaacaggaucacauacggggccugucccagauauguuaagcaaaacacucugaaauuggcaacaggaaugcgaaauguaccagagaaacaaacuagaggcauauuuggcgcaauagcagguuucauagaaaaugguugggagggaaugguggaugguugguacgguuucaggcaucaaaauucugagggaagaggacaagcagcagaucucaaaagcacccaagcagcaaucgaucaaaucaaugggaagcugaaucgauugaucgggaaaaccaacgagaaauuccaucagauugaaaaagaauucucagaaguagaagggagaauucaggaccuugagaaauauguugaggacacuaaaauagaucucuggucauacaacgcggagcuucuuguugcccuggagaaccaacauacaauugaucuaacugacucagaaaugaacaaacuguuugaaaaaacaaagaagcaacugagggaaaaugcugaggauaugggcaaugguuguuucaaaauauaccacaaaugugacaaugccugcauaggaucaauaagaaauggaacuuaugaccacaauguguacagggaugaagcauuaaacaaccgguuccagaucaagggaguugagcugaagucaggguacaaagauuggauccuauggauuuccuuugccauaucauguuuuuugcuuuguguugcuuuguugggguucaucaugugggccugccaaaagggcaacauuaggugcaacauuugcauuuga

SEQ ID NO: 44679 - RNA, 1701 nt, Artificial Sequence
  derived and/or modified CDS sequence (wt) from hemagglutinin__InfluenzaA__AIL94823
augaagacuaucauugcuuugagcuacauucuaugucugguuuucgcucaaaaacuuccuggaaaugacaauagcacggcaacgcugugccuugggcaccaugcaguaccaaacggaacgauagugaaaacaaucacgaaugaccgaauugaaguuacuaaugcuacugagcugguucagaauuccucaauaggugaaauaugcgacaguccucaucagauucuugauggagaaaacugcacacuaauagaugcucuauugggagacccucagugugauggcuuucaaaacaagaaaugggaccuuuuuguugaacgaagcaaagccuacagcaacuguuacccuuaugaugugccggauuaugccucccuuaggucacuaguugccucauccggcacacuggaguuuaacaaugaaagcuucaauuggacuggagucacucaaaacggaacaaguucugcuugcauaaggagaucuaauaguaguuucuuuaguagauuaaauugguugacccacuuaaacuucaaauacccagcauugaacgugacuaugccaaacaaugaacaauuugacaaauuguacauuugggggguucaccacccggguacggacaaggaccaaaucuuccuguaugcucaaucaucaggaagaaucacaguaucuaccaaaagaagccaacaagcuguaaucccaaauaucggaucuagacccagaauaaggaauauuccuagcagaauaagcaucuauuggacaauaguaaaaccgggagacauacuuuugauuaacagcacagggaaucuaauugcuccuagggguuacuucaaaauacgaagugggaaaagcucaauaaugagaucagaugcacccauuggcaaaugcaagucugaaugcaucacuccaaauggaagcauucccaaugacaaaccauuccaaaauguaaacaggaucacauacggggccugucccagauauguuaagcaaagcacucugaaauuggcaacaggaaugcgaaauguaccagagaaacaaacuagaggcauauuuggcgcaauagcagguuucauagaaaaugguugggaggggaugguggaugguugguacgguuucaggcaucaaaauucugagggaagaggacaagcagcagaucucaaaagcacccaagcagcaaucgaucaaaucaaugggaagcugaaucgauugaucgggaaaaccaacgagaaauuccaucagauugaaaaagaauucucagaaguagaagggagaauucaggaccuugagaaauauguugaggacacuaaaauagaucucuggucauacaacgcggagcuucuuguugcccuggagaaccaacauacaauugaucuaacugacucagaaaugaacaaacuguuugaaaaaacaaagaagcaacugagggaaaaugcugaggauaugggcaaugguuguuucaaaauauaccacaaaugugacaaugccugcauaggaucaauaagaaauggaacuuaugaccacaauguguacagggaugaagcauuaaacaaccgguuccagaucaagggaguugagcugaagucaggguacaaagauuggauccuauggauuuccuuugccauaucauguuuuuugcuuuguguugcuuuguugggguucaucaugugggccugccaaaagggcaacauuaggugcaacauuugcauuuga

SEQ ID NO: 44680 - RNA, 1701 nt, Artificial Sequence
  derived and/or modified CDS sequence (wt) from hemagglutinin__InfluenzaA__AIL94835
augaagacuaucauugcuuugagcuacauucuaugucugguuuucgcucaaaaacuuccuggaaaugacaauagcacggcaacgcugugccuugggcaccaugcaguaccaaacggaacgauagugaaaacaaucacgaaugaccgaauugaaguuacuaaugcuacugagcugguucagaauuacucaauaggugaaauaugcgacaguccucaucagauccuugauggagagaacugcacacuaauagaugcucuauugggagacccucagugugauggcuuucaaaauaagaaaugggaccuuuuuguugaacgaagcaaagccuacagcaacuguuacccuuaugaugugccggauuaugccucccuuaggucacuaguugccucauccggcacacuggaguuuaacaaugaaagcuucaauugggcuggagucacucaaaacggaacaaguucugcuugcauaaggggaucuaauaguaguuucuuuaguagauuaaauugguugacccacuuaaacuucaaauacccagcauugaacgugacuaugccaaacaaugaacaauuugacaaauuguacauuugggggguucaccacccggguacggacaaggaccaaaucuuccuguaugcucaaucaucaggaagaaucacaguaucuaccaaaagaagccaacaagcuguaaucccgaauaucggaucuagacccagaauaaggaauaucccuagcagaauaagcaucuauuggacaauaguaaaaccgggagacauacuuuugauuaacagcacagggaaucuaauugcuccuagggguuacuucaaaauacgaagugggaaaagcucaauaaugagaucagaugcacccauuggcaaaugcaagucugaaugcaucacuccaaauggaagcauucccaaugacaaaccauuccaaaauguaaacaggaucacauacggggccugucccagauauguuaagcaaagcacucugaaauuggcaacaggaaugcgaaauguaccagagaaacaaacuagaggcauauuuggcgcaauagcggguuucauagaaaaugguugggagggaaugguggaugguugguacgguuucaggcaucaaaauucugagggaagaggacaagcagcagaucucaaaagcacucaagcagcaaucgaucaaaucaaugggaagcugaaucgauugaucgggaaaaccaacgagaaauuccaucagauugaaaaagaauucucagaaguagaagggagaauucaggaccuugagaaauauguugaggacacaaaaauagaucucuggucauacaacgcggagcuucuuguugcccuggagaaccaacauacaauugaucuaacugacucagaaaugaacaaacuguuugaaaaaacaaagaagcaacugagggaaaaugcugaggauaugggcaaugguuguuucaaaauauaccacaaaugugacaaugccugcauaggaucaaucagaaauggaacuuaugaccacgauguauacagggaugaggcauugaacaaccgguuccagaucaagggaguugaguugaagucaggguacaaagauuggauccuauggauuuccuuugccauaucauguuuuuugcuuuguguugcuuuguugggguucaucaugugggccugccaaaagggcaacauuaggugcaacauuugcauuuga

SEQ ID NO: 44681 - RNA, 1701 nt, Artificial Sequence
  derived and/or modified CDS sequence (wt) from hemagglutinin__InfluenzaA__AIL94847
augaagacuaucauugcuuugagcuacauucuaugucugguuuucgcucaaaaacuucccggaaaugacaacagcacggcaacgcugugccuugggcaccaugcaguaccaaacggaacgauagugaaaacaaucacgaaugaccaaauugaaguuacuaaugcuacugagcugguucagaguuccucaacaggugaaauaugcgacaguccucaucagauccuugauggagaaaacugcacacuaauagaugcucuauugggagacccucagugugauggcuuccaaaauaagaaaugggaccuuuuuguugaacgcagcaaagccuacagcaacuguuacccuuaugaugugccggauuaugccucccuuaggucacuaguugccucauccggcacacuggaguuuaacaaugaaagcuucaauuggacuggagucacucaaaacggaacaagcucugcuugcauaaggagaucuaauaacaguuucuuuaguagauugaauugguugacccacuuaaaauucaaauacccagcauugaacgugacuaugccaaacgaugaaaaauuugacaaauuguacauuugggggguucaccacccggguacggacaaugaccaaaucuuccuguaugcucaagcaucaggaagaaucacagucucuaccaaaagaagccaacaaacuguaaucccgaauaucggaucuagacccagaguaaggaauauccccagcagaauaagcaucuauuggacaauaguaaaaccgggagacauacuuuugauuaacagcacagggaaucuaauugcuccuagggguuacuucaaaauacgaagugggaaaagcucaauaaugagaucagaugcacccauuggcaaaugcaauucugaaugcaucacuccaaauggaagcauucccaaugacaaaccauuccaaaauguaaacaggaucacauacggggccugucccagauauguuaagcaaaacacucugaaauuggcaacagggaugcgaaauguaccagagaaacaaacuagaggcauauuuggcgcaaucgcggguuucauagaaaaugguugggagggaaugguggaugguugguacgguuucaggcaucaaaauucugagggaauaggacaagcagcagaucucaaaagcacucaagcagcaaucgaucaaaucaaugggaagcugaauagguugaucgggaaaaccaacgagaaauuccaucaaauugaaaaagaauucucagaagucgaagggagaauucaggaccuugagaaauauguugaggacaccaaaauagaucucuggucauacaacgcggagcuucuuguugcccuggagaaccaacauacaauugaucuaacugacucagaaaugaacaaacuguuugaaaaaacaaagaagcaacugagggaaaaugcugaggauaugggcaaugguuguuucaaaauauaccacaaaugugacaaugccugcauaggaucaaucagaaauggaacuuaugaccacgauguauacagagaugaagcauuaaacaaccgguuccagaucaagggcguugagcugaagucaggauacaaagauuggauccuauggauuuccuuugccauaucauguuuuuugcuuuguguugcuuuguugggguucaucaugugggccugccaaaaaggcaacauuaggugcaacauuugcauuuga

SEQ ID NO: 44682 - RNA, 1701 nt, Artificial Sequence; identical to SEQ ID NO: 37545
  derived and/or modified CDS sequence (wt) from hemagglutinin__InfluenzaA__AIL94859

SEQ ID NO: 44683 - RNA, 1701 nt, Artificial Sequence
  derived and/or modified CDS sequence (wt) from hemagglutinin__InfluenzaA__AIL94871
augaagacuaucauugcuuugagcuacauucuaugucugguuuucgcucaaaaacuuccuggaaaugacaacagcacggcaacgcugugccuugggcaccaugcaguaccaaacggaacgauagugaaaacaaucacgaaugaccaaauugaaguuacuaaugcuacugagcugguucagaguuccucaacaggugaaauaugcgacaguccucaucagauccuugauggagaaaacugcacacuaauagaugcucuauugggagacccucagugugauggcuuccaaaauaagaaaugggaccuuuuuguugaacgaagcaaagccuacagcaacuguuacccuuaugaugugccggauuaugccucccuuaggucacuaguugccucauccggcacacuggaguuuaacaaugaaagcuucaauuggacuggagucacucaaaacggaacaagcucugcuugcauaaggagaucuaauaauaguuucuuuaguagauugaauugguugacccacuuaaacuucaaauacccagcauugaacgugacuaugccaaacaaugaacaauuugacaaauuguacauuugggggguucaccacccggguacggacaaggaccaaaucuuccuguaugcucaagcaucaggaagaaucacaguaucuaccaaaagaagccaacaagcuguaaucccgaauaucggaucuagacccagaguaaggaauaucccuagcagaauaagcaucuauuggacaauaguaaaaccgggagacauacuuuugauuaacagcacagggaaucuaauugcuccuagggguuacuucaaaauacgaaguggaaaaagcucaauaaugagaucagaugcacccauuggcaaaugcaauucugaaugcaucacuccaaauggaagcauucccaaugacaaaccauuccaaaauguaaacaggaucacauacggggccugucccagauauguuaagcaaagcacucugaaauuggcaacaggaaugcgaaauguaccagagaaacaaacuagaggcauauuuggcgcaauagcggguuucauagaaaaugguugggagggaaugguggaugguugguacgguuucaggcaucaaaauucugagggaagaggacaagcagcagaucucaaaagcacucaagcagcaaucgaucaaaucaaugggaagcugaauagauugaucgggaaaaccaacgagaaauuccaucagauugaaaaagaauucucagaagucgaagggagaauucaggaccuugagaaauauguugaggacacuaaaauagaucucuggucauacaacgcggagcuucuuguugcccuggagaaccaacauacaauugaucuaacugacucagaaaugaacaaacuguuugaaaaaacaaagaagcaacugagggaaaaugcugaggauaugggcaaugguuguuucacaauauaccacaaaugugacaaugccugcauaggaucaaucagaaauggaacuuaugaccacaauguauacagagaugaagcauuaaacaaccgguuccagaucaagggaauugagcugaagucaggguacaaagauuggauccuauggauuuccuuugccauaucauguuuuuugcuuuguguugcuuuguugggguucaucaugugggccugccaaaaaggcaacauuaggugcaacauuugcauuuga

SEQ ID NO: 44684 - RNA, 1701 nt, Artificial Sequence; identical to SEQ ID NO: 44093
  derived and/or modified CDS sequence (wt) from hemagglutinin__InfluenzaA__AIL94883

SEQ ID NO: 44685 - RNA, 1701 nt, Artificial Sequence; identical to SEQ ID NO: 44077
  derived and/or modified CDS sequence (wt) from hemagglutinin__InfluenzaA__AIL94894

SEQ ID NO: 44686 - RNA, 1701 nt, Artificial Sequence; identical to SEQ ID NO: 44679
  derived and/or modified CDS sequence (wt) from hemagglutinin__InfluenzaA__AIL94906

SEQ ID NO: 44687 - RNA, 1701 nt, Artificial Sequence; identical to SEQ ID NO: 42155
  derived and/or modified CDS sequence (wt) from hemagglutinin__InfluenzaA__AIL94918

SEQ ID NO: 44688 - RNA, 1701 nt, Artificial Sequence
  derived and/or modified CDS sequence (wt) from hemagglutinin__InfluenzaA__AIL94930
augaagacuaucauugcuuugagcuacauucuaugucugguuuucgcucaaaaacuuccuggaaaugacaauagcacggcaacgcugugccuugggcaccaugcaguaccaaacggaacgauagugaaaacaaucacgaaugaccgaauugaaguuacuaaugcuacugagcugguucagaauuccucaauaggugaaauaugcgacaguccucaucagauccuugauggagaaaacugcacacuaauagaugcucuauugggagacccucagugugauggcuuucaaaauaagaaaugggaccuuuuuguugaacgaagcaaagccuacagcaacuguuacccuuaugaugugccggauuaugccucccuuaggucacuaguugccucauccggcacacuggaguuuaacaaugaaagcuucaauugggcuggagucacucaaaacggaacaaguucugcuugcauaaggggaucuaauaguaguuucuuuaguagauuaaauugguugacccacuuaaacuucaaauacccagcauugaacgugacuaugccaaacaaugaacaauuugacaaauuguacauuugggggguucaccacccggguacggacaaggaccaaaucuuccuguaugcucaaucaucaggaagaaucacaguaucuaccaaaagaagucaacaagcuguaaucccgaauaucggaucuagacccagaauaaggaauaucccuagcagaauaagcaucuauuggacaauaguaaaaccgggagacauacuuuugauuaacagcacagggaaucuaauugcuccuagggguuacuucaaaauacgaagugggaaaagcucaauaaugagaucagaugcacccauuggcaaaugcaagucugaaugcaucacuccaaauggaagcauucccaaugacaaaccauuccaaaauguaaacaggaucacauacggggccugucccagauauguuaagcaaagcacucugaaauuggcaacaggaaugcgaaauguaccagagaaacaaacuagaggcauauuuggcgcaauagcggguuucauagaaaaugguugggagggaaugguggaugguugguacgguuucaggcaucaaaauucugagggaagaggacaagcagcagaucucaaaagcacucaagcagcaaucgaucaaaucaaugggaagcugaaucgauugaucgggaaaaccaacgagaaauuccaucagauugaaaaagaauucucagaaguagaagggagaauucaggaccuugagaaauauguugaggacacaaaaauagaucucuggucauacaacgcggagcuucuuguugcccuggagaaccaacauacaauugaucuaacugacucagaaaugaacaaacuguuugaaaaaacaaagaagcaacugagggaaaaugcugaggauaugggcaaugguuguuucaaaauauaccacaaaugugacaaugccugcauaggaucaaucagaaauggaacuuaugaccacgauguauacagggaugaagcauuaaacaaccgguuccagaucaagggaguugaguugaagucaggguacaaagauuggauccuauggauuuccuuugccauaucauguuuuuugcuuuguguugcuuuguugggguucaucaugugggccugccaaaagggcaacauuaggugcaacauuugcauuuga

SEQ ID NO: 44689 - RNA, 1701 nt, Artificial Sequence
  derived and/or modified CDS sequence (wt) from hemagglutinin__InfluenzaA__AIL94942
augaagacuaucauugcuuugagcuacauucuaugucugguuuucgcucaaaaacuuccuggaaaugacaauagcacggcaacgcugugccuugggcaccaugcaguaccaaacggaacgauagugaaaacaaucacgaaugaccgaauugaaguuacuaaugcuacugagcugguucagaauuccucaauaggugaaauaugcgacaguccucaucagauccuugauggagaaaacugcacacuaauagaugcucuauuaggagacccucagugugauggcuuucaaaauaagaaaugggaccuuuuuguugaacgaagcaaagccuacagcaacuguuacccuuaugaugugccggauuaugccucccuuaggucacuaguugccucauccggcacacuggaguuuaacaaugaaagcuucaauugggcuggagucacucaaaacggaacaaguucugcuugcauaaggggaucuaauaguaguuucuuuaguagauuaaauugguugacccacuuaaacuucaaauacccagcauugaacgugacuaugccaaacaaugaacaauuugacaaauuguacauuugggggguucaccacccggguacggacaaggaccaaaucuuccuguaugcucaaucaucaggaagaaucacaguaucuaccaaaagaagccaacaagcuguaaucccgaauaucggaucuagacccagaauaaggaauaucccuagcagaauaagcaucuauuggacaauaguaaaaccgggagacauacuuuugauuaacagcacggggaaucuaauugcuccuagggguuacuucaaaauacgaaguggaaaaagcucaauaaugagaucagaugcacccauuggcaaaugcaagucugaaugcaucacuccaaauggaagcauucccaaugacaaaccauuccaaaauguaaacaggaucacauacggggccugucccagauauguuaagcaaaguacucugaaauuggcaacaggaaugcgaaauguaccagagaaacaaacuagaggcauauuuggcgcaauagcggguuucauagaaaaugguugggagggaaugguggaugguugguacgguuucaggcaucaaaauucugagggaagaggacaagcagcagaucucaaaagcacucaagcagcaaucgaucaaaucaaugggaagcugaaucgauugaucgggaaaaccaacgagaaauuccaucagauugaaaaagaauucucagaaguagaagggagaauucaggaccuugagaaauauguugaggacacaaaaauagaucucuggucauacaacgcggagcuucuuguugcccuggagaaccaacauacaauugaucuaacugacucagaaaugaacaaacuguuugaaaaaacaaagaagcaacugagggaaaaugcugaggauaugggcaaugguuguuucaaaauauaccacaaaugugacaaugccugcauaggaucaaucagaaauggaacuuaugaccacgauguauacagggaugaggcauugaacaaccgguuccagaucaagggaguugaguugaagucaggguacaaagauuggauccuauggauuuccuuugccauaucauguuuuuugcuuuguguugcuuuguugggguucaucaugugggccugccaaaagggcaacauuaggugcaacauuugcauuuga

SEQ ID NO: 44690 - RNA, 1701 nt, Artificial Sequence
  derived and/or modified CDS sequence (wt) from hemagglutinin__InfluenzaA__AIL94954
augaaggcaauacuaguaguucugcuauauacauuugcaaccgcaaaugcagacacauuauguauagguuaucaugcgaacaauucaacagacacuguagacacaguacuagaaaagaauguaacaguaacacacucuguuaaccuucuagaagacaagcauaacgggaaacuaugcaaacuaagagggguagccccauugcauuuggguaaauguaacauugcuggauggauccugggaaauccagagugugaaucacucuccacagcaaguucaugguccuacauuguggaaacaucuaguucagacaauggaacguguuacccaggagauuucaucaauuaugaggagcuaagagagcaauugagcucagugucaucauuugaaagguuugagauauuccccaagacaaguucauggcccaaucaugacucgaacaaagguguaacggcagcauguccucacgcuggagcaaaaagcuucuacaaaaauuuaauauggcuaguuaaaaaaggaaauucauacccaaagcucagccaauccuacauuaaugauaaagggaaagaaguccucgugcuguggggcauccaccauccaucuacuacugcugaccaacaaagucucuaucagaaugcagaugcauauguuuuuguggggacaucaagauacagcaaaaaguucaagccggaaauagcaauaagacccaaagugagggaucaagaagggagaaugaacuauuacuggacacuaguagagccgggagacaaaauaacauucgaagcaacuggaaaucuagugguaccgagauaugcauucacaauggaaagaaaugcuggaucugguauuaucauuucagauacaccaguccacgauugcaauacaacuugucagacacccgagggugcuauaaacaccagccucccauuucagaauauacauccgaucacaauuggaaaauguccaaaguauguaaaaagcacaaaauugagacuggccacaggauugaggaaugucccgucuauucaaucuagaggccuauucggggccauugccggcuucauugaagggggguggacagggaugguagauggaugguacgguuaucaccaucaaaaugagcaggggucaggauaugcagccgaccugaagagcacacaaaaugccauugacaagauuacuaacaaaguaaauucuguuauugaaaagaugaauacacaguucacagcaguggguaaagaguucaaccaccuggaaaaaagaauagagaauuuaaauaaaaaaguugaugaugguuuccuggacauuuggacuuacaaugccgaacuguugguucuauuggaaaaugaaagaacuuuggacuaccacgauucaaaugugaagaacuuguaugaaaagguaagaaaccaguuaaaaaacaaugccaaggaaauuggaaacggcugcuuugaauuuuaccacaaaugcgauaacacgugcauggaaagugucaaaaaugggacuuaugacuacccaaaauacucagaggaagcaaaauuaaacagagaaaaaauagaugggguaaagcuggaaucaacaaggauuuaccagauuuuggcgaucuauucaacugucgccaguucauugguacugguagucucccugggggcaaucagcuucuggaugugcucuaaugggucucuacaauguagaauauguauuuaa

SEQ ID NO: 44691 - RNA, 1701 nt, Artificial Sequence; identical to SEQ ID NO: 44679
  derived and/or modified CDS sequence (wt) from hemagglutinin__InfluenzaA__AIL94965

SEQ ID NO: 44692 - RNA, 1701 nt, Artificial Sequence
  derived and/or modified CDS sequence (wt) from hemagglutinin__InfluenzaA__AIM55837
augaaggcaauacuaguaguucugcuauauacauuugcaaccgcaacugcagacacauuauguauagguuaucaugcaaacaauucaacagacacuguagacacaguacuagaaaagaauguaacaguaacacacucuguuaaccuucuagaagacaagcauaacgggaaacuaugcaaacuaagagggguagccccauugcauuuggguaaauguaacauugcuggcuggauccugggaaauccagagugugaaucacucuccacagcaaguucaugguccuacauuguggaaacaucuaguucagacaauggaacguguuacccaggagauuucaucaauuaugaggagcuaagagagcaauugagcucagugucaucauuugaaagguuugagauauuccccaaaacaaguucauggcccaaucaugacucgaacaaagguguaacggcagcauguccucacgcuggagcaaaaagcuucuacaaaaauuuaauauggcuaguuaaaaaaggaaauucauacccaaagcucagccaauccuacauuaaugauaaagggaaagaaguccucgugcuguggggcauucaccauccaucuacuacugcugaccaacaaagucucuaucagaaugcagaugcauauguuuuuguggggacaucaagauacagcaagaaguucaagccggaaauagcaauaagacccaaagugagggaucaagaagggagaaugaacuauuacuggacacuaguagagccgggagacaaaauaacauucgaagcaacuggaaaucuagugguaccgagauaugcauucacaauggaaagaaaugcuggaucugguauuaucauuucagauacaccaguccacgauugcaauacaacuugucagacacccgagggugcuauaaacaccagccucccauuucagaauauacauccgaucacaauuggaaaauguccaaaguauguaaaaagcacaaaauugagucuggccacaggauugaggaaugucccgucuauucaaucuagaggccuauucggggccauugccggcuucauugaagggggauggacagggaugguagauggaugguacgguuaucaccaucaaaaugagcaggggucaggauaugcagccgaccugaagagcacacaaaaugccauugacaagauuacuaacaaaguaaacucuguuauugaaaagaugaauacacaguucacagcaguggguaaagaguucaaccaccuggaaaaaagaauagagaauuuaaauaaaaaaguugaugaugguuuccuggacauuuggacuuacaaugccgaacuguugguucuauuggaaaaugaaagaacuuuggacuaccacgauucaaaugugaagaacuuguaugaaaagguaagaaaccaguuaaaaaacaaugccaaggaaauuggaaacggcugcuuugaauuuuaccacaaaugugauaacacgugcauggaaagugucaaaaaugggacuuaugacuacccaaaauacucagaggaagcaaaauuaaacagagaaaaaauagaugggguaaagcuggaaucaacaaggauuuaccagauuuuggcgaucuauucaacugucgccaguucauugguacugguagucucccugggggcaaucagcuucuggaugugcucuaaugggucucuacaguguagaauauguauuuaa

SEQ ID NO: 44693 - RNA, 1701 nt, Artificial Sequence
  derived and/or modified CDS sequence (wt) from hemagglutinin__InfluenzaA__AIM55848
augaaggcaauacuaguaguucugcuauauacauuugcaaccgcaaaugcagacacuuuauguauagguuaucaugcgaacaauucaacagacacuguagacacaguacuagaaaagaauguaacaguaacacacucuguuaaccuucuagaagacaagcauaacgguaaacuaugcaaacuaagagggguagccccauugcauuuggguaaauguaacauugcuggcuggauccugggaaauccagagugugaaucacucuccacagcaaguucaugguccuacauuguggaaacaucuaguucagacaauggaacguguuacccaggagauuucaucaauuaugaggagcuaagagagcaauugagcucagugucaucauuugaaagguuugagauauuccccaagacaaguucauggcccaaucaugacucgaacaaagguguaacggcagcauguccucacgcuggagcaaaaagcuucuacaaaaauuuaauauggcuaguuaaaaaaggaaauucauacccaaagcucagucaauccuacauuaaugauaaagggaaagaaguccucgugcuguggggcauucaccauccaucuacuacugcugaccaacaaagucucuaucagaaugcagaugcauauguuuuuguggggacaucaagauacagcaagaaguucaagccggaaauagcaauaagacccaaagugagggaucaagaagggagaaugaacuauuacuggacacuaguagagccgggagacaaaauaacauucgaagcaacuggaaaucuagugguaccgagauaugcauucacaauggaaagaaaugcuggaucugguauuaucauuucagauacaccaguccacgauugcaauacaacuugucagacacccgagggugcuauaaacaccagccucccauuucagaauauacauccgaucacaauuggaaaauguccaaaguauguaaaaagcacaaaauugagacuggcaacaggauugaggaauaucccgucuauucaaucuagaggccuauucggggccauugccggcuucauugaagggggguggacagggaugguagauggaugguacgguuaucaccaucaaaaugagcaggggucaggauaugcagccgaccugaagagcacacaaaaugccauugacaagauuacuaacaaaguaaacucuguuauugaaaagaugaauacacaguucacagcaguggguaaagaguucaaccaccuggaaaaaagaauagagaauuuaaauaaaaaaguugaugaugguuuccuggacauuuggacuuacaauaccgaacuguugguucuauuggaaaaugaaagaacuuuggacuaccacgauucaaaugugaagaacuuguaugaaaagguaagaaaccaguuaaaaaacaaugccaaggaaauuggaaacggcugcuuugaauuuuaccacaaaugcgauaacacgugcauggaaagugucaaaaaugggacuuaugacuacccaaaauacucagaggaagcaaaauuaaacagagaaaaaauagaugggguaaagcuggaaucaacaaggauuuaccagauuuuggcgaucuauucaacugucgccaguucauugguacugguagucucccugggggcaaucagcuucuggaugugcucuaaugggucucuacaguguagaauauguauuuaa

SEQ ID NO: 44694 - RNA, 1701 nt, Artificial Sequence; identical to SEQ ID NO: 43005
  derived and/or modified CDS sequence (wt) from hemagglutinin__InfluenzaA__AIM55859

SEQ ID NO: 44695 - RNA, 1701 nt, Artificial Sequence
  derived and/or modified CDS sequence (wt) from hemagglutinin__InfluenzaA__AIM55870
augaaggcaauacuaguaguucugcuauauacauuugcaaccgcaaaugcagacacauuauguauagguuaucaugcgaacaauucaacagacacuguagacacaguacuagaaaagaauguaacaguaacacacucuguuaaccuucuagaagacaagcauaacgggaaauuaugcaaacuaagagggguagccccauugcauuuggguaaauguaacauugcuggcuggauccugggaaauccagagugugaaucacucuccacagcaaguucaugguccuacauuguggaaacaucuaguucagacaauggaacguguuacccaggagauuucaucaauuaugaagagcuaagagagcaauugagcucagugucaucauuugaaagguuugagauauuccccaagacaaguucauggcccaaucaugacucgaacaaagguguaacggcagcauguccucacgcuggagcaaaaagcuucuacaaaaauuuaauauggcuaguuaaaaaaggaaauucauacccaaagcucagccaauccuacauuaaugauaaagggaaagaaguccucgugcuguggggcauucaccacccaucuacuacugcugaccaacaaagucucuaucagaaugcagaugcauauguuuuuguggggacaucaagauacagcaagaaguucaagccggaaauagcaauaagacccaaagugagggaucaagaagggagaaugaacuacuacuggacacuaguagagccgggagacaaaauaacauucgaagcaacuggaaaucuagugguaccgagauaugcauucacaauggaaagaaaugcuggaucugguauuaucauuucagauacaccaguccacgauugcaauacaacuugucagacacccgagggugcuauaaacaccagccucccauuucagaauauacauccgaucacaauuggaaaauguccaaaguauguaaaaagcacaaaauugagacuggccacaggauugaggaaugucccgucuauucaaucuagaggccuauucggggccauugccggcuucauugaagggggguggacagggaugguagauggaugguacgguuaucaccaucaaaaugagcaggggucaggauaugcagccgaccugaagagcacacaaaaugccauugacaagauuacuaacaaaguaaauucuguuauugaaaagaugaauacacaguucacagcaguggguaaagaguucaaccaccuggaaaaaagaauagagaauuuaaauaaaaaaguugaugaugguuuccuggacauuuggacuuacaaugccgaacuguugguucuauuggaaaaugaaagaacuuuggacuaccacgauucaaaugugaagaacuuguaugaaaagguaagaaaccaguuaaaaaacaaugccaaggaaauuggaaacggcugcuuugaauuuuaccacaaaugcgauaacacgugcauggaaagugucaaaaaugggacuuaugacuacccaaaauacucagaggaagcaaaauuaaacagagaaaaaauagaugggguaaaacuggaaucaacaaggauuuaccagauuuuggcgaucuauucaacugucgccaguucauugguacugguagucucccugggggcaaucagcuucuggaugugcucuaaugggucucuacaguguagaauauguauuuaa

SEQ ID NO: 44696 - RNA, 1701 nt, Artificial Sequence; identical to SEQ ID NO: 44695
  derived and/or modified CDS sequence (wt) from hemagglutinin__InfluenzaA__AIM55881

SEQ ID NO: 44697 - RNA, 1701 nt, Artificial Sequence
  derived and/or modified CDS sequence (wt) from hemagglutinin__InfluenzaA__AIM55893
augaaggcaauacuaguaguucugcuauauacauuugcaaccgcaaaugcagacacuuuauguauagguuaucaugcgaacaauucaacagacacuguagacacaguacuagaaaagaauguaacaguaacacacucuguuaaccuucuagaagacaagcauaacgguaaacuaugcaaacuaagagggguagccccauugcauuuggguaaauguaacauugcuggcuggauccugggaaauccagagugugaaucacucuccacagcaaguucaugguccuacauuguggaaacaucuaguucagacaauggaacguguuacccaggagauuucaucaauuaugaggagcuaagagagcaauugagcucagugucaucauuugaaagguuugagauauuccccaagacaaguucauggcccaaucaugacucgaacaaagguguaacggcagcauguccucacgcuggagcaaaaagcuucuacaaaaauuuaauauggcuaguuaaaaaaggaaauucauacccaaagcucagucaauccuacauuaaugauaaagggaaagaaguccucgugcuguggggcauucaccauccaucuacuacugcugaccaacaaagucucuaucagaaugcagaugcauauguuuuuguggggacaucaagauacagcaagaaguucaagccggaaauagcaauaagacccaaagugagggaucaagaagggagaaugaacuauuacuggacacuaguagagccaggagacaaaauaacauucgaagcaacuggaaaucuagugguaccgagauaugcauucacaauggaaagaaaugcuggaucugguauuaucauuucagauacaccaguccacgauugcaauacaacuugucagacacccgagggugcuauaaacaccagccucccauuucagaauauacauccgaucacaauuggaaaauguccaaaguauguaaaaagcacaaaauugagacuggcaacaggauugaggaauaucccgucuauucaaucuagaggccuauucggggccauugccggcuucauugaagggggguggacagggaugguagauggaugguacgguuaucaccaucaaaaugagcaggggucaggauaugcagccgaccugaagagcacacaaaaugccauugacaagauuacuaacaaaguaaacucuguuauugaaaagaugaauacacaguucacagcaguggguaaagaguucaaccaccuggaaaaaagaauugagaauuuaaauaaaaaaguugaugaugguuuccuggacauuuggacuuacaaugccgaacuguugguucuauuggaaaaugaaagaacuuuggacuaccacgauucaaaugugaagaacuuguaugaaaagguaagaaaccaguuaaaaaacaaugccaaggaaauuggaaacggcugcuuugaauuuuaccacaaaugcgauaacacgugcauggaaagugucaaaaaugggacuuaugacuacccaaaauacucagaggaagcaaaauuaaacagagaaaaaauagaugggguaaagcuggaaucaacaaggauuuaccagauuuuggcgaucuauucaacugucgccaguucauugguacugguagucucccugggggcaaucagcuucuggaugugcucuaaugggucucuacaguguagaauauguauuuaa

SEQ ID NO: 44698 - RNA, 1701 nt, Artificial Sequence
  derived and/or modified CDS sequence (wt) from hemagglutinin__InfluenzaA__AIM55904
augaaggcaauacuaguaguucugcuauauacauuugcaaccacaaaugcagacacauuauguauagguuaucaugcgaacaauucaacagacacuguagacacaguacuagaaaagaauguaacaguaacacacucuguuaaccuucuagaagacaagcauaacgggaaacuaugcaaacuaagagggguagccccauugcauuuggguaaauguaacauugcuggcuggauccugggaaauccagagugugaaucacucuccacagcaaguucaugguccuacauuguggaaacaucuaguucagacaauggaacguguuacccaggagauuucaucaauuaugaggagcuaagagagcaauugagcucagugucaucauuugaaagguuugagauauuccccaagacaaguucauggcccaaucaugacucgaacaaagguguaacggcagcauguccucacgcuggagcaaaaagcuucuacaaaaauuuaauauggcuaguuaaaaaaggaaauucauacccaaagcucagccaauccuacauuaaugauaaagggaaagaaguccucgugcuguggggcauucaccauccaucuacuacugcugaccaacaaagucucuaucagaaugcagaugcauauguuuuuguggggacaucaagauacagcaagaaguucaagccggaaauagcaauaagacccaaagugagggaucaagaagggagaaugaacuauuacuggacacuaguagagccgggagacaaaauaacauucgaagcaacuggaaaucuagugguaccgagauaugcauucacaauggaaagaaaugcuggaucugguaucaucauuucagauacaccaguccacgauugcaauacaacuugucagacacccgagggugcuauaaacaccagccucccauuucagaauauacauccgaucacaauuggaaaauguccaaaguauguaaaaagcacaaaauugagacuggccacaggauugaggaaugucccgucuauucaaucuagaggccuauucggggccauugccggcuucauugaagggggguggacagggaugguagauggaugguacgguuaucaccaucaaaaugagcaggggucaggauaugcagccgaccugaagagcacacaaaaugccauugacaagauuacuaacaaaguaaauucuguuauugaaaagaugaauacacaguucacagcaguggguaaagaguucaaccaccuggaaaaaagaauagagaauuuaaauaaaaaaguugaugaugguuuccuggacauuuggacuuacaaugccgaacuguugguucuauuggaaaaugaaagaacuuuggacuaccacgauucaaaugugaagaacuuguaugaaaagguaagaaaccaguuaaaaaacaaugcaaaggaaauuggaaacggaugcuuugaauuuuaccacaaaugcgauaacacgugcauggaaagugucaaaaaugggacuuaugacuacccaaaauacucagaggaagcaaaauuaaacagagaaaaaauagaugggguaaagcuggaaucaacaaggauuuaccagauuuuggcgaucuauucaacugucgccaguucauugguacugguagucucccugggggcaaucagcuucuggaugugcucuaaugggucucuacaguguagaauauguauuuaa

SEQ ID NO: 44699 - RNA, 1701 nt, Artificial Sequence
  derived and/or modified CDS sequence (wt) from hemagglutinin__InfluenzaA__AIM55915
augaaggcaauacuaguaguucugcuauauacauuugcaaccgcaaaugcagacacauuauguauagguuaucaugcgaacaauucaacagacacuguagacacaguacuagaaaagaauguaacaguaacacacucuguuaaccuucuagaagacaagcauaacgggaaacuaugcaaacuaagagggguagccccauugcauuuggguaaauguaacauugcuggcuggauccugggaaauccagagugugaaucacucuccacagcaaguucaugguccuacauuguggaaacauccaguucagacaauggaacguguuacccaggagauuucaucaauuaugaggagcuaagagagcaauugagcucagugucaucauuugaaagguuugagauauuccccaagacaaguucauggcccaaucaugacucgaacaaagguguaacggcagcauguccucacgcuggagcaaaaagcuucuacaaaaauuuaauauggcuaguuaaaaaaggaaauucauacccaaagcucagccaauccuacauuaaugauaaagggaaagaaguccucgugcuguggggcauucaccacccaucuacuacugcugaccaacaaagucucuaucagaaugcagaugcauauguuuuuguggggacaucaagauacagcaagaaguucaagccggaaauagcaauaagacccaaagugagggaucaagaagggagaaugaacuauuacuggacacuaguagagccgggagacaaaauaacauucgaagcaacuggaaaucuagugguaccgagauaugcauucacaauggaaagaaaugcuggaucugguauuaucauuucagauacaccaguccacgauugcaauacaacuugucagacacccgagggugcuauaaacaccagccucccauuucagaauauacauccgaucacaauuggaaaauguccaaaguauguaaaaagcacaaaauugagacuggccacaggauugaggaaugucccgucuauucaaucuagaggccuauucggggccauugccggcuucauugaaggaggguggacaggaaugguagauggaugguacgguuaucaccaucaaaacgagcaggggucaggauaugcagccgaccugaagagcacacaaaaugccauugacaagauuacuaacaaaguaaauucuguuauugaaaagaugaauacacaguucacagcaguggguaaagaguucaaccaccuggaaaaaagaauagagaauuuaaauaaaaaaguugaugaugguuuccuggacauuuggacuuacaaugccgaacuguugguucuauuggaaaaugaaagaacuuuggacuaccacgauucaaaugugaagaacuuguaugaaaagguaagaaaccaguuaaaaaacaaugccaaggaaauuggaaacgguugcuuugaauuuuaccacaaaugcgauaacacgugcauggaaagugucaaaaaugggacuuaugacuacccaaaauacucagaggaagcaaaauuaaacagagaaaaaauagaugggguaaagcuggaaucaacaaggauuuaccagauuuuggcgaucuauucaacugucgccaguucauugguacugguagucucccugggggcaaucagcuucuggaugugcucuaaugggucucuacaguguagaauauguauuuaa

SEQ ID NO: 44700 - RNA, 1710 nt, Artificial Sequence
  derived and/or modified CDS sequence (wt) from hemagglutinin__InfluenzaA__AIM55926
augaaggcaauacuaguaguucugcuauauacauuugcaaccacaaaugcagacacauuauguauagguuaucaugcgaacaauucaacagacacuguagacacaguacuagaaaagaauguaacaguaacacacucuguuaaccuucuagaagacaagcauaacgggaaacuaugcaaacuaagagggguagccccauugcauuuggguaaauguaacauugcuggcuggauccugggaaauccagagugugaaucacucuccacagcaaguucaugguccuacauuguggaaacaucuaguucagacaauggaacguguuacccaggagauuucaucaauuaugaggagcuaagagagcaauugagcucagugucaucauuugaaagguuugagauauuccccaagacaaguucauggcccaaucaugacucgaacaaagguguaacggcagcauguccucacgcuggagcaaaaagcuucuacaaaaauuuaauauggcuaguuaaaaaaggaaauucauacccaaagcucagccaauccuacauuaaugauaaagggaaagaaguccucgugcuguggggcauucaccauccaucuacuacugcugaccaacaaagucucuaucagaaugcagaugcauauguuuuuguggggacaucaagauacagcaagaaguucaagccggaaauagcaauaagacccaaagugagggaucaagaagggagaaugaacuauuacuggacacuaguagagccgggagacaaaauaacauucgaagcaacuggaaaucuagugguaccgagauaugcauucacaauggaaagaaaugcuggaucugguaucaucauuucagauacaccaguccacgauugcaauacaacuugucagacacccgagggugcuauaaacaccagccucaccagccucccauuucagaauauacauccgaucacaauuggaaaauguccaaaguauguaaaaagcacaaaauugagacuggccacaggauugaggaaugucccgucuauucaaucuagaggccuauucggggccauugccggcuucauugaagggggguggacagggaugguagauggaugguacgguuaucaccaucaaaaugagcaggggucaggauaugcagccgaccugaagagcacacaaaaugccauugacaagauuacuaacaaaguaaauucuguuauugaaaagaugaauacacaguucacagcaguggguaaagaguucaaccaccuggaaaaaagaauagagaauuuaaauaaaaaaguugaugaugguuuccuggacauuuggacuuacaaugccgaacuguugguucuauuggaaaaugaaagaacuuuggacuaccacgauucaaaugugaagaacuuguaugaaaagguaagaaaccaguuaaaaaacaaugcaaaggaaauuggaaacggaugcuuugaauuuuaccacaaaugcgauaacacgugcauggaaagugucaaaaaugggacuuaugacuacccaaaauacucagaggaagcaaaauuaaacagagaaaaaauagaugggguaaagcuggaaucaacaaggauuuaccagauuuuggcgaucuauucaacugucgccaguucauugguacugguagucucccugggggcaaucagcuucuggaugugcucuaaugggucucuacaguguagaauauguauuuaa

SEQ ID NO: 44701 - RNA, 1701 nt, Artificial Sequence; identical to SEQ ID NO: 43005
  derived and/or modified CDS sequence (wt) from hemagglutinin__InfluenzaA__AIM55937

SEQ ID NO: 44702 - RNA, 1701 nt, Artificial Sequence; identical to SEQ ID NO: 43033
  derived and/or modified CDS sequence (wt) from hemagglutinin__InfluenzaA__AIM55948

SEQ ID NO: 44703 - RNA, 1701 nt, Artificial Sequence; identical to SEQ ID NO: 43015
  derived and/or modified CDS sequence (wt) from hemagglutinin__InfluenzaA__AIM55962

SEQ ID NO: 44704 - RNA, 1701 nt, Artificial Sequence; identical to SEQ ID NO: 44698
  derived and/or modified CDS sequence (wt) from hemagglutinin__InfluenzaA__AIM55984

SEQ ID NO: 44705 - RNA, 1701 nt, Artificial Sequence; identical to SEQ ID NO: 44697
  derived and/or modified CDS sequence (wt) from hemagglutinin__InfluenzaA__AIM55995

SEQ ID NO: 44706 - RNA, 1701 nt, Artificial Sequence
  derived and/or modified CDS sequence (wt) from hemagglutinin__InfluenzaA__AIM56017
augaaggcaauacuaguaguucugcuauauacauuugcaaccacaaaugcagacacauuauguauagguuaucaugcgaacaauucaacagacacuguagacacaguacuagaaaagaauguaacaguaacacacucuguuaaccuucuagaagacaagcauaacgggaaacuaugcaaacuaagagggguagccccauugcauuuggguaaauguaacauugcuggcuggauccugggaaauccagagugugaaucacucuccacagcaaguucaugguccuacauuguggaaacaucuaguucagacaauggaacguguuacccaggagauuucaucaauuaugaggagcuaagagagcaauugagcucagugucaucauuugaaagguuugagauauuccccaagacaaguucauggcccaaucaugacucgaacaaagguguaacggcagcauguccucacgcuggagcaaaaagcuucuacaaaaauuuaauauggcuaguuaaaaaaggacauucauacccaaagcucagccaauccuacauuaaugauaaagggaaagaaguccucgugcuguggggcauucaccauccaucuacuacugcugaccaacaaagucucuaucagaaugcagaugcauauguuuuuguggggacaucaagauacagcaagaaguucaagccggaaauagcaauaagacccaaagugagggaucaagaagggagaaugaacuauuacuggacacuaguagagccgggagacaaaauaacauucgaagcaacuggaaaucuagugguaccgagauaugcauucacaauggaaagaaaugcuggaucugguauuaucauuucagauacaccaguccacgauugcaauacaacuugucagacacccgagggugcuauaaacaccagccucccauuucagaauauacauccgaucacaauuggaaaauguccaaaguauguaaaaagcacgaaauugagacuggccacaggauugaggaaugucccgucuauucaaucuagaggccuauucggggccauugccggcuucauugaagggggguggacagggaugguagauggaugguacgguuaucaccaucaaaaugagcaggggucaggauaugcagccgaccugaagagcacacaaaaugccauugacaagauuacuaacaaaguaaauucuguuauugaaaagaugaauacacaguucacagcaguggguaaagaguucaaccaccuggaaaaaagaauagagaauuuaaauaaaaaaguugaugaugguuuccuggacauuuggacuuacaaugccgaacuguugguucuauuggaaaaugaaagaacuuuggacuaccacgauucaaaugugaagaacuuguaugaaaagguaagaaaccaguuaaaaaacaaugcaaaggaaauuggaaacggcugcuuugaauuuuaccacaaaugcgauaacacgugcauggaaagugucaaaaaugggacuuaugacuacccaaaauacucagaggaagcaaaauuaaacagagaaaaaauagaugggguaaagcuggaaucaacaaggauuuaccagauuuuggcgaucuauucaacugucgccaguucauugguacugguagucucccugggggcaaucagcuucuggaugugcucuaaugggucucuacaguguagaauauguauuuaa

SEQ ID NO: 44707 - RNA, 1701 nt, Artificial Sequence; identical to SEQ ID NO: 44706
  derived and/or modified CDS sequence (wt) from hemagglutinin__InfluenzaA__AIM56028

SEQ ID NO: 44708 - RNA, 1701 nt, Artificial Sequence
  derived and/or modified CDS sequence (wt) from hemagglutinin__InfluenzaA__AIM56039
augaaggcaauacuaguaguucugcuauauccauuugcaaccgcaaaugcagacacauuauguauagguuaucaugcgaacaauucaacagacacuguagacacaguacuagaaaagaauguaacaguaacacacucuguuaaccuucuagaagacaagcauaacgggaaacuaugcaaacuaagagggguagccccauugcauuuggguaaauguaacauugcuggcuggauccugggaaauccagagugugaaucacucuccacagcaaguucaugguccuacauuguagaagcaucuaguucagacaauggaacguguuacccaggagauuucaucaauuaugaggagcuaagagagcaauugagcucagugucaucauuugaaagguuugagauauuccccaagacaaguucauggcccaaucaugacucgaacaaagguguaacggcagcauguccucacgcuggagcaaaaagcuucuacaaaaauuuaauauggcuaguuaaaaaaggaaauucauacccaaagcucagccaauccuacauuaaugauaaagggaaagaaguccucgugcuguggggcauucaccacccaucuacuacugcugaccaacaaagucucuaucagaaugcagaugcauauguuuuuguggggacaucaagauacagcaagaaguucaagccggaaauagcaauaagacccaaagugagggaucaagaagggagaaugaacuauuacuggacacuaguagagccgggagacaaaauaacauucgaagcaacuggaaaucuagugguaccgagauaugcauucacaauggaaagaaaugcuggaucugguauuaucauuucagauacaccaguccacgauugcaauacaacuugucagacacccgagggugcuauaaacaccagccucccauuucagaauauacauccgaucacaauuggaaaauguccaaaguauguaaaaagcacaaaauugagacuggccacaggauugaggaaugucccgucuauucaaucuagaggccuauucggggccauugccggcuucauugaaggaggguggacagggaugguagauggaugguacgguuaucaccaucaaaacgagcaggggucaggauaugcagccgaccugaagagcacacaaaaugccauugacaagauuacuaacaaaguaaauucuguuauugaaaagaugaauacacaguucacagcaguggguaaagaguucaaccaccuggaaaaaagaauagagaauuuaaauaaaaaaguugaugaugguuuccuggacauuuggacuuacaaugccgaacuguugguucuauuggaaaaugaaagaacuuuggacuaccacgauucaaaugugaagaacuuguaugaaaagguaagaaaccaguuaaaaaacaaugccaaggaaauuggaaacggcugcuuugaauuuuaccacaaaugcgauaacacgugcauggaaagugucaaaaaugggacuuaugacuacccaaaauacucagaggaagcaaaauuaaacagagaaaaaauagaugggguaaagcuggaaucaacaaggauuuaccagauuuuggcgaucuauucaacugucgccaguucauugguacugguagucucccugggggcaaucagcuucuggaugugcucuaaugggucucuacaguguagaauauguauuuaa

SEQ ID NO: 44709 - RNA, 1701 nt, Artificial Sequence
  derived and/or modified CDS sequence (wt) from hemagglutinin__InfluenzaA__AIM56050
augaaggcaauacuaguaguucugcuauauacauuugcaaccacaaaugcagacacauuauguauagguuaucaugcgaacaauucaacagacacuguagacacaguacuagaaaagaauguaacaguaacacacucuguuaaccuucuagaagacaagcauaacgggaaacuaugcaaacuaagagggguagccccauugcauuuggguaaauguaacauugcuggcuggauccugggaaauccagagugugaaucacucuccacagcaaguucaugguccuacauuguggaaacaucuaguucagacaauggaacguguuacccaggagauuucaucaauuaugaggagcuaagagagcaauugagcucagugucaucauuugaaagguuugagauauuccccaagacaaguucauggcccaaucaugacucgaacaaagguguaacggcagcauguccucacgcuggagcaaaaagcuucuacaaaaauuuaauauggcuaguuaaaaaaggaaauucauacccaaagcucagccaauccuacauuaaugauaaagggaaagaaguccucgugcuguggggcauucaccauccaucuacuacugcugaccaacaaagucucuaucagaaugcagaugcauauguuuuuguggggacaucaagauacagcaagaaguucaagccggaaauagcaauaagacccaaagugagggaucaagaagggagaaugaacuauuacuggacacuaguagagccgggagacaaaauaacauucgaagcaacuggaaaucuagugguaccgagauaugcauucacaauggaaagaaaugcuggaucugguaucaucauuucagauacaccaguccacgauugcaauacaacuugucagacacccgagggugcuauaaacaccagccucccauuucagaauauacauccgaucacaauuggaaaauguccaaaguauguaaaaagcacaaaauugagacuggccacaggauugaggaaugucccgucuauucaaucuagaggccuauucggggccauugccggcuucauugaagggggguggacagggaugguagauggaugguacgguuaucaccaucaaaaugagcaggggucaggauaugcagccgaccugaagagcacacaaaaugccauugacaagauuacuaacaaaguaaauucuguuauugaaaagaugaauacacaguucacagcaguggguaaagaguucaaccaccuggaaaaaagaauagagaauuuaaauaaaaaaguugaugaugguuuccuggacauuuggacuuacaaugccgaacuguugguucuauuggaaaaugaaagaacuuuggacuaccacgauucaaaugugaagaacuuguaugaaaagguaagaaaccaguuaaaaaacaaugcaaaggaaauuggaaacggcugcuuugaauuuuaccacaaaugcgauaacacgugcauggaaagugucaaaaaugggacuuaugacuacccaaaauacucagaggaagcaaaauuaaacagaggaaaaauagaugggguaaagcuggaaucaacaaggauuuaccagauuuuggcgaucuauucaacugucgccaguucauugguacugguagucucccugggggcaaucagcuucuggaugugcucuaaugggucucuacaguguagaauauguauuuaa

SEQ ID NO: 44710 - RNA, 1701 nt, Artificial Sequence; identical to SEQ ID NO: 43026
  derived and/or modified CDS sequence (wt) from hemagglutinin__InfluenzaA__AIM56061

SEQ ID NO: 44711 - RNA, 1701 nt, Artificial Sequence; identical to SEQ ID NO: 43913
  derived and/or modified CDS sequence (wt) from hemagglutinin__InfluenzaA__AIM56072

SEQ ID NO: 44712 - RNA, 1701 nt, Artificial Sequence; identical to SEQ ID NO: 43905
  derived and/or modified CDS sequence (wt) from hemagglutinin__InfluenzaA__AIM56083

SEQ ID NO: 44713 - RNA, 1701 nt, Artificial Sequence; identical to SEQ ID NO: 43034
  derived and/or modified CDS sequence (wt) from hemagglutinin__InfluenzaA__AIM56105

SEQ ID NO: 44714 - RNA, 1701 nt, Artificial Sequence
  derived and/or modified CDS sequence (wt) from hemagglutinin__InfluenzaA__AIM56116
augaaggcaauacuaguaguucugcuauacacauuugcaaccgcaaaugcagacacauuauguauagguuaucaugcgaacaauucaacagacacuguagacacaguacuagaaaagaauguaacaguaacacacucuguuaaccuucuagaagacaagcauaacgggaaacuaugcaaacuaagagggguagccccauugcauuuggguaaauguaacauugcuggcuggauccugggaaauccagagugugaaucacucuccacagcaaguucaugguccuacauuguggaaacaucuaguucagacaauggaacguguuacccaggagauuucaucaauuaugaggagcuaagagagcaauugagcucagugucaucauuugaaagauuugagauauuccccaagacaaguucauggcccaaucaugacucgaacaaagguguaacggcagcauguccucacgcuggagcaaaaagcuucuacaaaaauuuaauauggcuaguuaaaaaaggaaauucauacccaaagcucagccaauccuacauuaaugauaaagggaaagaaguccucgugcuguggggcauucaccauccaucuacuacugcugaccaacaaagucucuaucagaaugcagaugcauauguuuucguggggacaucaagauacagcaagaaguucaagccggaaauagcaauaagacccaaagugagggaucaagaagggagaaugaacuauuacuggacacuaguagagccgggagacaaaauaacauucgaagcaacuggaaaucuagugguaccgagauaugcauucacaauggaaagaaaugcuggaucugguauuaucauuucagauacaccaguccacgauugcaauacaacuugucagacacccgagggugcuauaaacaccagccucccauuucagaauauacauccgaucacaauuggaaaauguccaaaguauguaaaaagcacaaaauugagacuggccacaggauugaggaaugucccaucuauucaaucuagaggccuauucggggccauugccggcuucauugaagggggguggacagggaugguagauggaugguacgguuaucaccaucaaaaugagcaggggucaggauaugcagccgaccugaagagcacacaaaaugccauugacaaaauuacuaacaaaguaaauucuguuauugaaaagaugaauacacaguucacagcaguggguaaagaguucaaccacuuggaaaaaagaauagagaauuuaaauaaaaagguugaugaugguuuccuggacauuuggacuuacaaugccgaacugcugguucuauuggaaaaugaaagaacuuuggacuaccacgauucaaaugugaagaacuuguaugaaaagguaagaaaccaguuaaaaaacaaugccaaggaaauuggaaacggcugcuuugaauuuuaccacaaaugcgauaacacgugcauggaaagugucaaaaaugggacuuaugacuacccaaaauacucagaggaagcaaaauuaaacagagaaaaaauagaugggguaaagcuggaaucaacaaggauuuaccagauuuuggcgaucuauucaacugucgccaguucauugguacugguagucucccugggggcaaucagcuucuggaugugcucuaaugggucucuacaguguagaauauguauuuaa

SEQ ID NO: 44715 - RNA, 1701 nt, Artificial Sequence
  derived and/or modified CDS sequence (wt) from hemagglutinin__InfluenzaA__AIM56127
augaaggcaauacuaguaguucugcuauauacauuugcaaccgcaaaugcagacacuuuauguauagguuaucaugcgaacaauucaacagacacuguagacacaguacuagaaaagaauguaacaguaacacacucuguuaaccuucuagaagacaagcauaacgguaaacuaugcaaacuaagagggguagccccauugcauuuggguaaauguaacauugcuggcuggauccugggaaauccagagugugaaucacucuccacagcaaguucaugguccuacauuguggaaacaucuaguucagacaauggaacguguuacccaggagauuucaucaauuaugaggagcuaagagagcaauugagcucagugucaucauuugaaagguuugagauauuccccaaggcaaguucauggcccaaucaugacucgaacaaagguguaacggcagcauguccucacgcuggagcaaaaagcuucuacaaaaauuuaauauggcuaguuaaaaaaggaaauucauacccaaagcucagucaauccuacauuaaugauaaagggaaagaaguccucgugcuguggggcauucaccauccaucuacuacugcugaccaacaaagucucuaucagaaugcagaugcauauguuuuuguggggacaucaagauacagcaagaaguucaagccggaaauagcaauaagacccaaagugagggaucaagaagggagaaugaacuauuacuggacacuaguagagccgggagacaaaauaacauucgaagcaacuggaaaucuagugguaccgagauaugcauucacaauggaaagaaaugcuggaucugguauuaucauuucagauacaccaguccacgauugcaauacaacuugucagacacccgagggugcuauaaacaccagccucccauuucagaauauacauccgaucacaauuggaaaauguccaaaguauguaaaaagcacaaaauugagacuggcaacaggauugaggaauaucccgucuauucaaucuagaggccuauucggggccauugccggcuucauugaagggggguggacagggaugguagauggaugguacgguuaucaccaucaaaaugagcaggggucaggauaugcagccgaccugaaaagcacacaaaaugccauugacaagauuacuaacaaaguaaacucuguuauugaaaagaugaauacacaguucacagcaguggguaaagaguucaaccaccuggaaaaaagaauagagaauuuaaauaaaaaaguugaugaugguuuccuggacauuuggacuuacaaugccgaacuguugguucuauuggaaaaugaaagaacuuuggacuaccacgauucaaaugugaagaacuuguaugaaaagguaagaaaccaguuaaaaaacaaugccaaggaaauuggaaacggcugcuuugaauuuuaccacaaaugcgauaacacgugcauggaaagugucaaaaaugggacuuaugacuacccaaaauacucagaggaagcaaaauuaaacagagaaaaaauagaugggguaaagcuggaaucaacaaggauuuaccagauuuuggcgaucuauucaacugucgccaguucauugguacugguagucucccugggggcaaucagcuucuggaugugcucuaaugggucucuacaguguagaauauguauuuaa

SEQ ID NO: 44716 - RNA, 1701 nt, Artificial Sequence
  derived and/or modified CDS sequence (wt) from hemagglutinin__InfluenzaA__AIM56138
augaaggcaauacuaguaguucugcuauauacauuugcaaccgcaaaugcagacacauuauguauagguuaucaugcgaacaauucaacagacacuguagacacaguacuagaaaagaauguaacaguaacacacucuguuaaccuucuagaagacaagcauaacgggaaacuaugcaaacuaagagggguagccccauugcauuuggguaaauguaacauugcuggcuggauccugggaaauccagagugugaaucacucuccacagcaaguucaugguccuacauuguggaaacaucuaguucagacaauggaacguguuacccaggagauuucaucaauuaugaggagcuaagagagcaauugagcucagugucaucauuugaaagguuugagauauuccccaagacaaguucauggcccaaucaugacucgaacaaagguguaacggcagcauguccucacgcuggagcaaaaagcuucuacaaaaauuuaauauggcuaguuaaaaaaggaaauucauacccaaagcucagccaauccuacauuaaugauaaagggaaagaaguccucgugcuguggggcauucaccauccaucuacuacugcugaccaacaaagucucuaucagaaugcagaugcauauguuuuuguggggacaucaagauacagcaagaaguucaagccggaaauagcaauaagacccaaagugagggaucaagaagggagaaugaacuauuacuggacacuaguagagccgggagacaaaauaacauucgaagcaacuggaaaucuagugguaccgagauaugcauucacaauggaaagaaaugcuggaucugguauuaucauuucagauacaccaguccacgauugcaauacaacuugucagacacccgagggugcuauaaacaccagccucccauuucagaauauacauccgaucacaauuggaaaauguccaaaguauguaaaaagcacaaaauugagacuggccacaggauugaggaaugucccgucuauucaaucuagaggccuauucggggccauugccggcuucauugaagggggguggacagggaugguagauggaugguacgguuaucaccaucaaaaugagcaggggucaggauaugcagccgaccugaagagcacacaaaaugccauugacaagauuacuaacaaaguaaauucuguuauugaaaagaugaauacacaguucacagcaguggguaaagaguucaaccaccuggaaaaaagaauagagaauuuaaauaaaaaaguugaugaugguuuccuggacauuuggacuuacaaugccgaacuguugguucuauuggaaaaugaaagaacuuuggacuaccaugauucaaaugugaaaaacuuguaugaaaagguaagaaaccaguuaaaaaacaaugccaaggaaauuggaaacggcugcuuugaauuuuaccacaaaugcgauaacacgugcauggaaagugucaaaaaugggacuuaugacuacccaaaauacucagaggaagcaaaauuaaacagagaaaaaauagaugggguaaagcuggaaucaacaaggauuuaccagauuuuggcgaucuauucaacugucgccaguucauugguacugguagucucccugggggcaaucagcuucuggaugugcucuaaugggucucuacaguguagaauauguauuuaa

SEQ ID NO: 44717 - RNA, 1701 nt, Artificial Sequence
  derived and/or modified CDS sequence (wt) from hemagglutinin__InfluenzaA__AIM56149
augaaggcaauacuaguaguucugcuauauacauuugcaaccgcaaaugcagacacauuauguauagguuaucaugcgaacaauucaacagacacuguagacacaguacuagaaaagaauguaacaguaacacacucuguuaaccuucuagaagacaagcauaacgggaaacuaugcaaacuaagagggguagccccauugcauuuggguaaauguaacauugcuggcuggauccugggaaauccagagugugaaucacucuccacagcaaguucaugguccuacauuguggaaacaucuaguucagacaauggaacguguuacccaggagacuucaucaauuaugaggagcuaagagagcaauugagcucagugucaucauuugaaagguuugagauauuccccaagacaaguucauggcccaaucaugacucgaacaaagguguaacggcagcauguccucacgcuggagcaaaaagcuucuacaaaaauuuaauauggcuaguuaaaaaaggaaauucauacccaaagcucagccaauccuacauuaaugauaaagggaaagaaguccucgugcuguggggcauucaccacccaucuacuacugcugaccaacaaagucucuaucagaaugcagaugcauauguuuuuguggggacaucaagauacagcaagaaguucaagccggaaauagcaauaagacccaaagugagggaucaagaagggagaaugaacuauuacuggacacuaguagagccgggagacaaaauaacauucgaagcaacuggaaaucuagugguaccgagauaugcauucacaauggaaagaaaugcuggaucugguauuaucauuucagauacaccaguccacgauugcaauacaacuugucagacacccgagggugcuauaaacaccagccucccauuucagaauauacauccgaucacaauuggaaaauguccaaaguauguaaaaagcacaaaauugagacuggccacaggauugaggaaugucccgucuauucaaucuagaggccuauucggggccauugccggcuucauugaaggaggguggacagggaugguagauggaugguacgguuaucaccaucaaaaugagcaggggucaggauaugcagccgaccugaagagcacacaaaaugccauugacaagauuacuaacaaaguaaauucuguuauugaaaagaugaauacacaguucacagcaguggguaaagaguucaaccaccuggaaaaaagaauagagaauuuaaauaaaaaaguugaugaugguuuccuggacauuuggacuuacaaugccgaacuguugguucuauuggaaaaugaaagaacuuuggacuaccacgauucaaaugugaagaacuuguaugaaaagguaagaaaccaguuaaaaaacaaugccaaggaaauuggaaacggcugcuuugaauuuuaccacaaaugcgauaacacgugcauggaaagugucaaaaaugggacuuaugacuacccaaaauacucagaggaagcaaaauuaaacagagaaaaaauagaugggguaaagcuggaaucaacaaggauuuaccagauuuuggcgaucuauucaacugucgccaguucauugguacugguagucucccugggggcaaucagcuucuggaugugcucuaaugggucucuacaguguagaauauguauuuaa

SEQ ID NO: 44718 - RNA, 1701 nt, Artificial Sequence
  derived and/or modified CDS sequence (wt) from hemagglutinin__InfluenzaA__AIM56160
augaaggcaauacuaguaguucugcuauauacauuugcaaccgcaaaugcagacacauuauguauagguuaucaugcgaacaauucaacagacacuguagacacaguacuagaaaagaauguaacaguaacacacucuguuaaccuucuagaagacaagcacaacgggaaacuaugcaaacuaagagggguagccccauugcauuuggguaaauguaacauugcuggcuggauccugggaaauccagagugugaaucacucuccacagcaaguucaugguccuacauuguggaaacaucuaguucagacaauggaacguguuacccaggagauuucaucaauuaugaggagcuaagagagcaauugagcucagugucaucauuugaaagguuugagauauuccccaagacaaguucauggcccaaucaugacucgaacaaagguguaacggcagcauguccucacgcuggagcaaaaagcuucuacaaaaauuuaauauggcuaguuaaaaaaggaaauucauacccaaagcucagccaauccuacauuaaugauaaagggaaagaaguccucgugcuguggggcauucaccacccaucuacuacugcugaccaacaaagucucuaucagaaugcagaugcauauguuuuuguggggacaucaagauacagcaagaaguucaagccggaaauagcaauaagacccaaagugagggaucaagaagggagaaugaacuauuacuggacacuaguagagccgggagacaaaauaacauucgaagcaacuggaaaucuagugguaccgagauaugcauucacaauggaaagaaaugcuggaucugguauuaucauuucagauacaccaguccacgauugcaauacaacuugucagacacccgagggugccauaaacaccagccucccauuucagaauauacauccgaucacaauuggaaaauguccaaaguauguaaaaagcacaaaauugagacuggccacaggauugaggaaugucccgucuauucaaucuagaggccuauucggggccauugccggcuucauugaaggaggguggacagggaugguagauggaugguacgguuaucaccaucaaaaugagcaggggucaggauaugcagccgaccugaagagcacacaaaaugccauugacaagauuacuaacaaaguaaauucuguuauugaaaagaugaauacacaguucacagcaguggguaaagaguucaaccaccuggaaaaaagaauagagaauuuaaauaaaaaaguugaugaugguuuccuggacauuuggacuuacaaugccgaacuguugguucuauuggaaaaugaaagaacuuuggacuaccacgauucaaaugugaagaacuuguaugaaaagguaagaaaccaguuaaaaaccaaugccaaggaaauuggaaacggcugcuuugaauuuuaccacaaaugcgauaacacgugcauggaaagugucaaaaaugggaccuaugacuacccaaaauacucagaggaagcaaaauuaaacagagaaaaaauagaugggguaaagcuggaaucaacaaggauuuaccagauuuuggcgaucuauucaacugucgccaguucauugguacugguagucucccugggggcaaucagcuucuggaugugcucuaaugggucucuacaguguagaauauguauuuaa

SEQ ID NO: 44719 - RNA, 1701 nt, Artificial Sequence
  derived and/or modified CDS sequence (wt) from hemagglutinin__InfluenzaA__AIM56171
augaaggcaauacuaguaguucugcuauauacauuugcaaccgcaaaugcagacacauuauguauagguuaucaugcgaacaauucaacagacacuguagacacaguacuagaaaagaauguaacaguaacacacucuguuaaccuucuagaagacaagcauaacgggaaacuaugcaaacuaagagggguagccccauugcauuuggguaaauguaacauugcuggcuggauccugggaaauccagagugugaaucacucuccacagcaaguucaugguccuacauuguggaaacaucuaguucagacaauggaacguguuacccaggagauuucaucaauuaugaggagcuaagagagcaauugagcucagugucaucauuugaaagguuugagauauuccccaagacaaguucauggcccaaucaugacucgaacaaagguguaacggcagcauguccucacgcuggagcaaaaagcuucuacaaaaauuuaauauggcuaguuaaaaaagggaauucauacccaaagcucagccaauccuacauuaaugauaaagggaaagaaguccucgugcuguggggcauucaucacccaucuacuacugcugaccaacaaagucucuaucagaaugcagaugcauauguuuuuguggggacaucaagauacagcaagaaguucaagccggaaauagcaauaagacccaaagugagggaucaagaagggagaaugaacuauuacuggacacuaguagagccgggagacaaaauaacauucgaagcaacuggaaaucuagugguaccgagauaugcauucacaauggaaagaaaugcuggaucugguauuaucauuucagauacaccaguccacgauugcaauacaacuugucagacacccgagggugcuauaaacaccagccucccauuucagaauauacauccgaucacaauuggaaaauguccaaaguauguaaaaagcacaaaauugagacuggccacaggauugaggaaugucccgucuauucaaucuagaggccuauucggggccauugccggcuucauugaagggggguggacagggaugguagauggaugguacgguuaucaccaucaaaaugagcaggggucaggauaugcagccgaccugaagagcacacaaaaugccauugacaagauuacuaacaaaguaaauucuguuauugaaaagaugaauacacaguucacagcaguggguaaagaguucaaccaccuggaaaaaagaauagagaauuuaaauaaaaaaguugaugaugguuuccuggacauuuggacuuacaaugccgaacuguugguucuauuggaaaaugaaagaacuuuggacuaccacgauucaaaugugaagaacuuguaugaaaagguaagaaaccaguuaaaaaacaaugccaaggaaauuggaaacggcugcuuugaauuuuaccacaaaugcgauaacacgugcauggaaagugucaaaaaugggacuuaugacuacccaaaauacucagaggaagcaaaauuaaacagagaaaaaauagauggaguaaaacuggaaucaacaaggauuuaccagauuuuggcgaucuauucaacugucgccaguucauugguacugguagucucccugggggcaaucagcuucuggauguguucuaaugggucucuacaguguagaauauguauuuaa

SEQ ID NO: 44720 - RNA, 1701 nt, Artificial Sequence
  derived and/or modified CDS sequence (wt) from hemagglutinin__InfluenzaA__AIM56182
augaaggcaauacuaguaguucugcuauauacauuugcaaccgcaaaugcagacacuuuauguauagguuaucaugcgaacaauucaacagacacuguagacacaguacuagaaaagaauguaacaguaacacacucuguuaaccuucuagaagacaagcauaacgguaaacuaugcaaacuaagagggguagccccauugcauuuggguaaauguaacauugcuggcuggauccugggaaauccagagugugaaucacucuccacagcaaguucaugguccuacauuguggaaacaucuaguucagacaauggaacguguuacccaggagauuucaucaauuaugaggagcuaagagagcaauugagcucagugucaucauuugaaagguuugagauauuccccaaggcaaguucauggcccaaucaugacucgaacaaagguguaacggcagcauguccucacgcuggagcaaaaagcuucuacaaaaauuuaauauggcuaguuaaaaaaggaaauucauacccaaagcucagucaauccuacauuaaugauaaagggaaagaaguccucgugcuguggggcauucaccauccaucuacuacugcugaccaacaaagucucuaucagaaugcagaugcauauguuuuuguggggacaucaagauacagcaagaaguucaagccggaaauagcaauaagacccaaagugagggaucaagaagggagaaugaacuauuacuggacacuaguagagccgggagacaaaauaacauucgaagcaacuggaaaucuagugguaccgagauaugcauucacaauggaaagaaaugcuggaucugguauuaucauuucagauacaccaguccacgauugcaauacaacuugucagacacccgagggugcuauaaacaccagccucccauuucagaauauacauccgaucacaauuggaaaauguccaaaguauguaaaaagcacaaaauugagacuggcaacaggauugaggaauaucccgucuauucaaucuagaggccuauucggggccauugccggcuucauugaagggggguggacagggaugguagauggaugguacgguuaucaccaucaaaaugagcaggggucaggauaugcagccgaccugaaaagcacacaaaaugccauugacaagauuacuaacaaaguaaacucuguuauugaaaagaugaauacacaguucacagcaguggguaaagaguucaaccaccuggaaaaaagaauagagaauuuaaauaaaaaaguugaugaugguuuccuggacauuuggacuuacaaugccgaacuguugguucuauuggaaaaugaaagaacuuuggacuaccacgauucaaaugugaagaacuuguaugaaaagguaagaaaccaguuaaaaaacaaugccaaggaaauuggaaacggcugcuuugaauuuuaccacaaaugcgauaacacgugcauggaaagugucaaaaaugggacuuaugacuacccaaaauacucagaggaagcaaaauuaaacaaagaaaaaauagaugggguaaagcuggaaucaacaaggauuuaccagauuuuggcgaucuauucaacugucgccaguucauugguacugguagucucccugggggcaaucagcuucuggaugugcucuaaugggucucuacaguguagaauauguauuuaa

SEQ ID NO: 44721 - RNA, 1701 nt, Artificial Sequence
  derived and/or modified CDS sequence (wt) from hemagglutinin__InfluenzaA__AIM56193
augaaggcaauacuaguaguucugcuauacacauuugcaaccgcaaaugcagacacauuauguauagguuaucaugcgaacaauucaacagacacuguagacacaguacuagaaaagaauguaacaguaacacacucuguuaaccuucuagaagacaagcauaacgggaaacuaugcaaacuaagagggguagccccauugcauuuggguaaauguaacauugcuggcuggauccugggaaauccagagugugaaucacucuccacagcaaguucaugguccuacauuguggaaacaucuaguucagacaauggaacguguuacccaggagauuucaucaauuaugaggagcuaagagagcaauugagcucagugucaucauuugaaagauuugagauauuccccaagacaaguucauggcccaaucaugacucgaacaaagguguaacggcagcauguccucacgcuggagcaaaaagcuucuacaaaaauuuaauauggcuaguuaaaaaaggaaauucauacccaaagcucagccaauccuacauuaaugauaaagggaaagaaguccucgugcuguggggcauucaccauccaucuacuacugcugaccaacaaagucucuaucagaaugcagaugcauauguuuucguggggacaucaagauacagcaagaaguucaagccggaaauagcaauaagacccaaagugagggaucaagaagggagaaugaacuauuacuggacacuaguagagccgggagacaaaguaacauucgaagcaacuggaaaucuagugguaccgagauaugcauucacaauggaaagaaaugcuggaucugguauuaucauuucagauacaccaguccacgauugcaauacaacuugucagacacccgagggugcuauaaacaccagccucccauuucagaauauacauccgaucacaauuggaaaauguccaaaguauguaaaaagcacaaaauugagacuggccacaggauugaggaaugucccaucuauucaaucuagaggccuauucggggccauugccggcuucauugaagggggguggacagggaugguagauggaugguacgguuaucaccaucaaaaugagcaggggucaggauaugcagccgaccugaagagcacacaaaaugccauugacaaaauuacuaacaaaguaaauucuguuauugaaaagaugaauacacaguucacagcaguggguaaagaguucaaccacuuggaaaaaagaauagagaauuuaaauaaaaaaguugaugaugguuuccuggacauuuggacuuacaaugccgaacugcugguucuauuggaaaaugaaagaacuuuggacuaccacgauucaaaugugaagaacuuguaugaaaagguaagaaaccaguuaaaaaacaaugccaaggaaauuggaaacggcugcuuugaauuuuaccacaaaugcgauaacacgugcauggaaagugucaaaaaugggacuuaugacuacccaaaauacucagaggaagcaaaauuaaacagagaaaaaauagaugggguaaagcuggaaucaacaaggauuuaccagauuuuggcgaucuauucaacugucgccaguucauugguacugguagucucccugggggcaaucagcuucuggaugugcucuaaugggucucuacaguguagaauauguauuuaa

SEQ ID NO: 44722 - RNA, 1701 nt, Artificial Sequence; identical to SEQ ID NO: 43034
  derived and/or modified CDS sequence (wt) from hemagglutinin__InfluenzaA__AIM56204

SEQ ID NO: 44723 - RNA, 1701 nt, Artificial Sequence; identical to SEQ ID NO: 43005
  derived and/or modified CDS sequence (wt) from hemagglutinin__InfluenzaA__AIM56215

SEQ ID NO: 44724 - RNA, 1701 nt, Artificial Sequence
  derived and/or modified CDS sequence (wt) from hemagglutinin__InfluenzaA__AIM56226
augaaggcaauacuaguaguucugcuauacacguuugcaaccgcaaaugcagacacauuauguauagguuaucaugcgaacaauucaacagacacuguagacacaguacuagaaaagaauguaacaguaacacacucuguuaaccuucuagaagacaagcauaacgggaaacuaugcaaacuaagagggguagccccauugcauuuggguaaauguaacauugcuggcuggauccugggaaauccagagugugaaucacucuccacagcaaguucaugguccuacauuguggaaacaucuaguucagacaauggaacauguuacccaggagauuucaucaauuaugaggagcuaagagagcaauugagcucagugucaucauuugaaagauuugagauauuccccaagacaaguucauggcccaaucaugacucgaacaaagguguaacggcagcauguccucacgcuggagcaaaaagcuucuacaaaaauuuaauauggcuaguuaaaaaaggaaauucauacccaaagcucagccaauccuacauuaaugauaaagggaaagaaguccucgugcuguggggcauucaccauccaucuacuacugcugaccaacaaagucucuaucagaaugcagaugcauauguuuuuguggggacaucaagauacagcaagaaguucaagccggaaauagcaauaagacccaaagugagggaucaagaagggagaaugaacuauuacuggacacuaguagagccgggagacaaaauaacauucgaagcaacuggaaaucuagugguaccgagauaugcauucacaauggaaagaaaugcuggaucugguauuaucauuucagauacaccaguccacgauugcaauacaacuugucagacacccgagggugcuauaaacaccagccucccauuucagaauauacauccgaucacaauuggaaaauguccaaaguauguaaaaagcacaaaauugagacuggccacaggauugaggaaugucccaucuauucaaucuagaggccuauucggggccauugccggcuucauugaagggggguggacagggaugguagauggaugguacgguuaucaccaucaaaaugagcaggggucaggauaugcagccgaccugaagagcacacaaaaugccauugacaaaauuacuaacaaaguaaauucuguuauugaaaagaugaauacacaguucacagcaguggguaaagaguucaaccacuuggaaaaaagaauagagaauuuaaauaaaaaaguugaugaugguuuccuggacauuuggacuuacaaugccgaacugcugguucuauuggaaaaugaaagaacuuuggacuaccacgauucaaaugugaagaacuuguaugaaaagguaagaaaccaguuaaaaaacaaugccaaggaaauuggaaacggcugcuuugaauuuuaccacaaaugcgauaacacgugcauggaaagugucaaaaaugggacuuaugacuacccaaaauacucagaggaagcaaaauuaaacagagaaaaaauagaugggguaaagcuggaaucaacaaggauuuaccagauuuuggcgaucuauucaacugucgccaguucauugguacugguagucucccugggggcaaucagcuucuggaugugcucuaaugggucucuacaguguagaauauguauuuaa

SEQ ID NO: 44725 - RNA, 1701 nt, Artificial Sequence
  derived and/or modified CDS sequence (wt) from hemagglutinin__InfluenzaA__AIM56237
augaaggcaauacuaguaguucugcuauauacauuugcaaccgcaaaugcagacacauuauguauagguuaucaugcaaacaauucaacagacacuguagacacaguacuagaaaagaauguaacaguaacacacucuguuaaccuucuagaagacaagcauaacgggaaacuaugcaaacuaagagggguagccccauugcauuuggguaaauguaacauugcuggcuggauccugggaaauccagagugugaaucacucuccacagcaaguucaugguccuacauuguggaaacaucuaguucagacaauggaacguguuacccaggagauuucaucaauuaugaggaguuaagagagcaauugagcucagugucaucauuugaaagguuugagauauuccccaaaacaaguucauggcccaaucaugacucgaacaaagguguaacggcagcauguccucacgcuggagcaaaaagcuucuacaaaaauuuaauauggcuaguuaaaaaaggaaauucauacccaaagcucagccaauccuacauuaaugauaaagggaaagaaguccucgugcuguggggcauucaccauccaucuacuacugcugaccaacaaagucucuaucagaaugcagaugcauauguuuuuguggggacaucaagauacagcaagaaguucaagccggaaauagcaauaagacccaaagugagggaucaagaagggagaaugaacuauuacuggacacuaguagagccgggagacaaaauaacauucgaagcaacuggaaaucuagugguaccgagauaugcauucacaauggaaagaaaugcuggaucugguauuaucauuucagauacaccaguccacgauugcaauacaacuugucagacacccgagggugcuauaaacaccagccucccauuucagaauauacauccgaucacaauuggaaaauguccaaaguauguaaaaagcacaaaauugagacuggccacaggauugaggaaugucccgucuauucaaucuagaggccuauucggggccauugccggcuucauugaagggggguggacagggaugguagauggaugguacgguuaucaccaucaaaaugagcaggggucaggauaugcagccgaccugaagagcacacaaaaugccauugacaagauuacuaacaaaguaaacucuguuauugaaaagaugaauacacaguucacagcaguggguaaagaguucaaccaccuggaaaaaagaauagagaauuuaaauaaaaaaguugaugaugguuuccuggacauuuggacuuacaaugccgaacuguugguucuauuggaaaaugaaagaacuuuggacuaccacgauucaaaugugaagaacuuguaugaaaagguaagaaaccaguuaaaaaacaaugccaaggaaauuggaaacgguugcuuugaauuuuaccacaaaugcgauaacacgugcauggaaagugucaaaaaugggacuuaugacuacccaaaauacucagaggaagcaaaauuaaacagagaaaaaauagaugggguaaagcuggaaucaacaaggauuuaccagauuuuggcgaucuauucaacugccgccaguucauugguacugguagucucccugggggcaaucagcuucuggaugugcucuaaugggucucuacaguguagaauauguauuuaa

SEQ ID NO: 44726 - RNA, 1701 nt, Artificial Sequence
  derived and/or modified CDS sequence (wt) from hemagglutinin__InfluenzaA__AIM56259
augaaggcaauacuaguaguucugcuauauacauuugcaaccgcaaaugcagacacauuauguauagguuaucaugcgaacaauucaacagacacuguagacacaguacuagaaaagaauguaacaguaacacacucuguuaaccuucuagaagacaagcauaacgggaaacuaugcaaacuaagagggguagccccauugcauuuggguaaauguaacauugcuggcuggauccugggaaauccagagugugaaucacucuccacagcaaguucaugguccuacauuguggaaacaucuaguucagacaauggaacguguuacccaggagauuucaucaauuaugaggagcuaagagagcaauugagcucagugucaucauuugaaagguuugagauauuccccaagacaaguucauggcccaaucaugacucgaacaaagguguaacggcagcauguccucacgcuggagcaaaaagcuucuacaaaaauuuaauauggcuaguuaaaaaaggaaauucauacccaaagcucagccaauccuacauuaaugauaaagggaaagaaguccucgugcuguggggcauucaccacccaucuacuacugcugaccaacaaagucucuaucagaaugcagaugcauauguuuuuguggggacaucaagauacagcaagaaguucaagccggaaauagcaauaagacccaaagugagggaucaagaagggagaaugaacuauuacuggacacuaguagagccgggagacaaaauaacauucgaagcaacuggaaaucuagugguaccgagauaugcauucacaauggaaagaaaugcuggaucugguauuaucauuucagauacaccaguccacgauugcaauacaacuugucagacacccgagggugcuauaaacaccagccucccauuucagaauauacauccgaucacaauuggaaaauguccaaaguauguaaaaagcacaaaauugagacuggccacaggauugaggaaugucccgucuauucaaucuagaggccuauucggggccauugccggcuucauugaaggaggguggacagggaugguagauggaugguacgguuaucaccaucaaaaugagcaggggucaggauaugcagccgaccugaagagcacacaaaaugccauugacaagauuacuaacaaaguaaauucuguuauugaaaagaugaauacacaguucacagcaguggguaaagaguucaaccaccuggaaaaaagaauagagaauuuaaauaaaaaaguugaugaugguuuccuggacauuuggacuuacaaugccgaacuguugguucuauuggaaaaugaaagaacuuuggacuaccacgauucaaaugugaagaacuuguaugaaaagguaagaaaccaguuaaaaaacaaugccaaggaaauuggaaacggcugcuuugaauuuuaccacaaaugcgauaacacgugcauggaaagugucaaaaaugggacuuaugauuacccaaaauacucagaggaagcaaaauuaaacagagaaaaaauagaugggguaaagcuggaaucaacaaggauuuaccagauuuuggcgaucuauucaacugucgccaguucauugguacugguagucucccugggggcaaucagcuucuggaugugcucuaaugggucucuacaguguagaauauguauuuaa

SEQ ID NO: 44727 - RNA, 1701 nt, Artificial Sequence
  derived and/or modified CDS sequence (wt) from hemagglutinin__InfluenzaA__AIM56270
augaaggcaauacuaguaguucugcuauauacauuugcaaccgcaaaugcagacacauuauguauagguuaucaugcgaacaauucaacagacacuguagacacaguacuagaaaagaauguaacaguaacacacucuguuaaccuucuagaagacaagcauaacgggaaacuaugcaaacuaagagggguagccccauugcauuuggguaaauguaacauugcuggcuggauccugggaaauccagagugugaaucacucuccacagcaaguucaugguccuacauuguggaaacaucuaguucagacaauggaacguguuacccaggagauuucaucaauuaugaggagcuaagagagcaauugagcucagugucaucauuugaaagguuugagauauuccccaagacaaguucauggcccaaucaugacucgaacaaagguguaacggcagcauguccucacgcuggagcaaaaagcuucuacaaaaauuuaauauggcuaguuaaaaaaggaaauucauacccaaagcucagccaauccuacauuaaugauaaagggaaagaaguccucgugcuguggggcauucaccacccaucuacuacugcugaccaacaaagucucuaucagaaugcagaugcauauguuuuuguggggacaucaagauacagcaagaaguucaagccggaaauagcaauaagacccaaagugagggaucaagaagggagaaugaacuauuacuggacacuaguagagccgggagacaaaauaacauucgaagcaacuggaaaucuagugguaccgagauaugcauucacaauggaaagaaaugcuggaucugguauuaucauuucagauacaccaguccacgauugcaauacaacuugucagacacccgagggugcuguaaacaccagccucccauuucagaauauacauccgaucacaauuggaaaauguccaaaguauguaaaaagcacaaaauugagacuggccacaggauugaggaaugucccgucuauucaaucuagaggccuauucggggccauugccggcuucauugaaggaggguggacagggaugguagauggaugguacgguuaucaccaucaaaacgagcaggggucaggauaugcagccgaccugaagagcacacaaaaugccauugacaagauuacuaacaaaguaaauucuguuauugaaaagaugaauacacaguucacagcaguggguaaagaguucaaccaccuggaaaaaagaauagagaauuuaaauaaaaaaguugaugaugguuuccuggacauuuggacuuacaaugccgaacuguugguucuauuggaaaaugaaagaacuuuggacuaccacgauucaaaugugaagaacuuguaugaaaagguaagaaaccaguuaaaaaacaaugccaaggaaauuggaaacggcugcuuugaauuuuaccacaaaugcgauaacacgugcauggaaagugucaaaaaugggacuuaugacuacccaaaauacucagaggaagcaaaauuaaacagagaaaaaauagaugggguaaagcuggaaucaacaaggauuuaccagauuuuggcgaucuauucaacugucgccaguucauugguacugguagucucccugggggcaaucagcuucuggaugugcucuaaugggucucuacaguguagaauauguauuuaa

SEQ ID NO: 44728 - RNA, 1701 nt, Artificial Sequence
  derived and/or modified CDS sequence (wt) from hemagglutinin__InfluenzaA__AIM56281
augaaggcaauacuaguaguucugcuauacacauuugcaaccgcaaaugcagacacauuauguauagguuaucaugcgaacaauucaacagacacuguagacacaguacuagaaaagaauguaacaguaacacacucuguuaaccuucuagaagacaagcauaacgggaaacuaugcaaacuaagagggguagccccauugcauuuggguaaauguaacauugcuggcuggauccugggaaauccagagugugaaucacucuccacagcaaguucaugguccuacauuguggaaacaucuaguucagacaauggaacguguuacccaggagauuucaucaauuaugaggagcuaagagagcaauugagcucagugucaucauuugaaagauuugagauauuccccaagacaaguucauggcccaaucaugacucgaacaaagguguaacggcagcauguccucacgcuggagcaaaaagcuucuacaaaaauuuaauauggcuaguuaaaaaaggaaauucauacccaaagcucagccaauccuacauuaaugauaaagggaaagaaguccucgugcuguggggcauucaccauccaucuacuacugcugaccaacaaagucucuaucagaaugcagaugcauauguuuuuguggggacaucaagauacagcaagaaguucaagccggaaauagcaauaagacccaaagugagggaucaagaagggagaaugaacuauuacuggacacuaguagagccgggagacaaaauaacauucgaagcaacuggaaaucuagugguaccgagauaugcauucacaauggaaagaaaugcuggaucugguauuaucauuucagauacaccaguccacgauugcaauacaacuugucagacacccgagggugcuauaaacaccagccucccauuucagaauauacauccgaucacaauuggaaaauguccaaaguauguaaaaagcacaaaauugagacuggccacaggauugagaaaugucccaucuauucaaucuagaggccuauucggggccauugccggcuucauugaagggggguggacagggaugguagauggaugguacgguuaucaccaucaaaaugagcaggggucaggauaugcagccgaccugaagagcacacaaaaugccauugacaaaauuacuaacaaaguaaauucuguuauugaaaagaugaauacacaguucacagcaguggguaaagaguucaaccacuuggaaaaaagaauagagaauuuaaauaaaaaaguugaugaugguuuccuggacauuuggacuuacaaugccgaacugcugguucuauuggaaaaugaaagaacuuuggacuaccacgauucaaaugugaagaacuuguaugaaaagguaagaaaccaguuaaaaaacaaugccaaggaaauuggaaacggcugcuuugaauuuuaccacaaaugcgauaacacgugcauggaaagugucaaaaaugggacuuaugacuacccaaaauacucagaggaagcaaaauuaaacagagaaaaaauagaugggguaaagcuggaaucaacaaggauuuaccagauuuuggcgaucuauucaacugucgccaguucauugguacugguagucucccugggggcaaucagcuucuggaugugcucuaaugggucucuacaguguagaauauguauuuaa

SEQ ID NO: 44729 - RNA, 1701 nt, Artificial Sequence
  derived and/or modified CDS sequence (wt) from hemagglutinin__InfluenzaA__AIM56292
augaaggcaauacuaguaguucugcuauauacacuugcaaccgcaaaugcagacacauuauguauagguuaucaugcgaacaauucaacagacacuguagacacaguacuagaaaagaauguaacaguaacacacucuguuaaccuucuagaagacaagcauaacgggaaacuaugcaaacuaagagggguagccccauugcauuuggguaaauguaacauugcuggcuggauccugggaaauccagagugugaaucacucuccacggcaaguucaugguccuacauuguggaaacaucuaguucagacaauggaacguguuacccaggagauuucaucaauuaugaggagcuaagagagcaauugagcucagugucaucauuugaaagguuugagauauuccccaagacaaguucauggcccaaucaugacucgaacaaagguguaacggcagcauguccucacgcuggagcaaaaagcuucuacaaaaauuuaauauggcuaguuaaaaaaggaaauucauacccaaagcucagccaauccuacauuaaugauaaagggaaagaaauccucgugcuguggggcauucaccacccaucuacuacugcugaccaacaaagucucuaucagaaugcagaugcauauguuuuuguggggacaucaagauacagcaagaaguucaagccggaaauagcaauaagacccaaagugagggaucaagaagggagaaugaacuacuacuggacacuaguagagccgggagacaaaauaacauucgaagcaacuggaaaucuagugguaccgagauaugcauucacaauggaaagaaaugcuggaucugguauuaucauuucagauacaccaguccacgauugcaauacaacuugucagacacccgagggugcuauaaacaccagccucccauuucagaauauacauccgaucacaauuggaaaauguccaaaguauguaaaaagcacaaaauugagacuggccacaggauugaggaaugucccgucuauucaaucuagaggccuauucggggccauugccggcuucauugaagggggguggacagggaugguagauggaugguacgguuaucaccaucaaaaugagcaggggucaggauaugcagccgaccugaagagcacacaaaaugccauugacaagauuacuaacaaaguaaauucuguuauugaaaagaugaauacacaguucacagcaguggguaaagaguucaaccaccuggaaaaaagaauagagaauuuaaauaaaaaaguugaugaugguuuccuggacauuuggacuuacaaugccgaacuguugguucuauuggaaaaugaaagaacuuuggacuaccacgauucaaaugugaagaacuuguaugaaaagguaagaaaccaguuaaaaaacaaugccaaggaaauuggaaacggcugcuuugaauuuuaccacaaaugcgauaacacgugcauggaaagugucaaaaaugggacuuaugacuacccaaaauacucagaggaagcaaaauuaaacagagaaaaaauagaugggguaaaacuggaaucaacaaggauuuaccagauuuuggcgaucuauucaacugucgccaguucauugguacugguagucucccugggggcaaucagcuucuggaugugcucuaaugggucucuacaguguagaauauguauuuaa

SEQ ID NO: 44730 - RNA, 1701 nt, Artificial Sequence
  derived and/or modified CDS sequence (wt) from hemagglutinin__InfluenzaA__AIM56303
augaaggcaauacuaguaguucugcuauauacacuugcaaccgcaaaugcagacacauuauguauagguuaucaugcgaacaauucaacagacacuguagacacaguacuagaaaagaauguaacaguaacacacucuguuaaccuucuagaagacaagcauaacgggaaacuaugcaaacuaagagggguagccccauugcauuuggguaaauguaacauugcuggcuggauccugggaaauccagagugugaaucacucuccacagcaaguucaugguccuacauuguggaaacaucuaguucagacaauggaacguguuacccaggagauuucaucaauuaugaggagcuaagagagcaauugagcucagugucaucauuugaaagguuugagauauuccccaagacaaguucauggcccaaucaugacucgaacaaagguguaacggcagcauguccucacgcuggagcaaaaagcuucuacaaaaauuuaauauggcuaguuaaaaaaggaaauucauacccaaagcucagccaauccuacauuaaugauaaagggaaagaaguccucgugcuguggggcauucaccacccaucuacuacugcugaccaacaaagucucuaucagaaugcagaugcauauguuuuuguggggacaucaagauacagcaagaaguucaagccggaaauagcaauaagacccaaagugagggaucaagaagggagaaugaacuacuacuggacacuaguagagccgggagacaaaauaacauucgaagcaacuggaaaucuagugguaccgagauaugcauucacaauggaaagaaaugcuggaucugguauuaucauuucagauacacaaguccacgauugcaauacaacuugucagacacccgagggugcuauaaacaccagccucccauuucagaauauacauccgaucacaauuggaaaauguccaaaguauguaaaaagcacaaaauugagacuggccacaggauugaggaaugucccgucuauucaaucuagaggccuauucggggccauugccggcuucauugaagggggguggacagggaugguagauggaugguacgguuaucaccaucaaaaugagcaggggucaggauaugcagccgaccugaagagcacacaaaaugccauugacaagauuacuaacaaaguaaauucuguuauugaaaagaugaauacacaguucacagcaguggguaaagaguucaaccaccuggaaaaaagaauagagaauuuaaauaaaaaaguugaugaugguuuccuggacauuuggacuuacaaugccgaacuguugguucuauuggaaaaugaaagaacuuuggacuaccacgauucaaaugugaagaacuuguaugaaaagguaagaaaccaguuaaaaaacaaugccaaggaaauuggaaacggcugcuuugaauuuuaccacaaaugcgauaacacgugcauggaaagugucaaaaaugggacuuaugacuacccaaaauacucagaggaagcaaaauuaaacagagaaaaaauagaugggguaaaacuggaaucaacaaggauuuaccagauuuuggcgaucuauucaacugucgccaguucauugguacugguagucucccugggggcaaucagcuucuggaugugcucuaaugggucucuacaguguagaauauguauuuaa

SEQ ID NO: 44731 - RNA, 1701 nt, Artificial Sequence
  derived and/or modified CDS sequence (wt) from hemagglutinin__InfluenzaA__AIM56314
augaaggcaauacuaguaguucugcuauauacauuugcaaccgcaaaugcagacacauuauguauagguuaucaugcgaacaauucaacagacacuguagacacaguacuagaaaagaauguaacaguaacacacucuguuaaccuucuagaagacaagcauaacgggaaacuaugcaaacuaagagggguagccccauugcauuuggguaaauguaacauugcuggcuggauccugggaaauccagagugugaaucacucuccacagcaaguucaugguccuacauuguggaaacauccaguucagacaauggaacguguuacccaggagauuucaucaauuaugaggagcuaagagagcaauugagcucagugucaucauuugaaagguuugagauauuccccaagacaaguucauggcccaaucaugacucgaacaaagguguaacggcagcauguccucacgcuggagcaaaaagcuucuacaaaaauuuaauauggcuaguuaaaaaaggaaauucauacccaaagcucagccaauccuacauuaaugauaaagggaaagaaguccucgugcuguggggcauucaccacccaucuacuacugcugaccaacaaagucucuaucagaaugcagaugcauauguuuuuguggggacaucaagauacagcaagaaguucaagccggaaauagcaauaagacccaaagugagggaucaagaagggagaaugaacuauuacuggacacuaguagagccgggagacaaaauaacauucgaagcaacuggaaaucuagugguaccgagauaugcauucacaauggaaagaaaugcuggaucugguauuaucauuucagauacaccaguccacgauugcaauacaacuugucagacacccgagggugcuauaaacaccagccucccauuucagaauauacauccgaucacaauuggaaaauguccaaaguauguaaaaagcacaaaauugagacuggccacaggauugaggaaugucccgucuauucaaucuagaggccuauucggggccauugccggcuucauugaaggaggguggacagggaugguagauggaugguacgguuaucaccaucaaaacgagcaggggucaggauaugcagccgaccugaagagcacacaaaaugccauugacaagauuacuaacaaaguaaauucuguuauugaaaagaugaauacacaguucacagcaguggguaaagaguucaaccaccuggaaaaaagaauagagaauuuaaauaaaaaaguugaugaugguuuccuggacauuuggacuuacaaugccgaacuguugguucuauuggaaaaugaaagaacuuuggacuaccacgauucaaaugugaagaaauuguaugaaaagguaagaaaccaguuaaaaaacaaugccaaggaaauuggaaacggcugcuuugaauuuuaccacaaaugcgauaacacgugcauggaaagugucaaaaaugggacuuaugacuacccaaaauacucagaggaagcaaaauuaaacagagaaaaaauagaugggguaaagcuggaaucaacaaggauuuaccagauuuuggcgaucuauucaacugucgccaguucauugguacugguagucucccugggggcaaucagcuucuggaugugcucuaaugggucucuacaguguagaauauguauuuaa

SEQ ID NO: 44732 - RNA, 1701 nt, Artificial Sequence
  derived and/or modified CDS sequence (wt) from hemagglutinin__InfluenzaA__AIM56325
augaaggcaauacuaguaguucugcuauacacauuugcaaccgcaaaugcagacacauuauguauagguuaucaugcgaacaauucaacagacacuguagacacaguacuagaaaagaauguaacaguaacacacucuguuaaccuucuagaagacaagcauaacgggaaacuaugcaaacuaagagggguagccccauugcauuugggcaaauguaacauugcuggcuggauccugggaaauccagagugugaaucacucuccacagcaaguucaugguccuacauuguggaaacaucuaguucagacaauggaacguguuacccaggagauuucaucaauuaugaggagcuaagagagcaauugagcucagugucaucauuugaaagauuugagauauuccccaagacaaguucauggcccaaucaugacucgaacaaagguguaacggcagcauguccucacgcuggagcaaaaagcuucuacaaaaauuuaauauggcuaguuaaaaaaggaaauucauacccaaagcucagccaauccuacauuaaugauaaagggaaagaaguccucgugcuguggggcauucaccauccaucuacuacugcugaccaacaaagucucuaucagaaugcagaugcauauguuuucguggggacaucaagauacagcaagaaguucaagccggaaauagcaauaagacccaaagugagggaucaagaagggagaaugaacuauuacuggacacuaguagagccgggagacaaaauaacauucgaagcaacuggaaaucuagugguaccgagauaugcauucacaauggaaagaaaugcuggaucugguauuaucauuucagauacaccaguccacgauugcaauacaacuugucagacacccgagggugcuauaaacaccagccucccauuucagaauauacauccgaucacaauuggaaaauguccaaaguauguaaaaagcacaaaauugagacuggccacaggauugaggaaugucccaucuauucaaucuagaggccuauucggggccauugccggcuucauugaagggggguggacagggaugguagauggaugguacgguuaucaccaucaaaaugagcaggggucaggauaugcagccgaccugaagagcacacaaaaugccauugacaaaauuacuaacaaaguaaauucuguuauugaaaagaugaauacacaguucacagcaguggguaaagaguucaaccacuuggaaaaaagaauagagaauuuaaauaaaaaaguugaugaugguuuccuggacauuuggacuuacaaugccgaacugcugguucuauuggaaaaugaaagaacuuuggacuaccacgauucaaaugugaagaacuuguaugaaaagguaagaaaccaguuaaaaaacaaugccaaggaaauuggaaacggcugcuuugaauuuuaccacaaaugcgauaacacgugcauggaaagugucaaaaaugggacuuaugacuacccaaaauacucagaggaagcaaaauuaaacagagaaaaaauagaugggguaaagcuggaaucaacaaggauuuaccagauuuuggcgaucuauucaacugucgccaguucauugguacugguagucucccugggggcaaucagcuucuggaugugcucuaaugggucucuacaguguagaauauguauuuaa

SEQ ID NO: 44733 - RNA, 1701 nt, Artificial Sequence
  derived and/or modified CDS sequence (wt) from hemagglutinin__InfluenzaA__AIM56336
augaaggcaauacuaguaguucugcuauauacauuugcaaccgcaaaugcagacacuuuauguauagguuaucaugcgaacaauucaacagacacuguagacacaguacuagaaaagaauguaacaguaacacacucuguuaaccuucuagaagacaagcauaacgguaaacuaugcaaacuaagagggguagccccauugcauuuggguaaauguaacauugcuggcuggauccugggaaauccagagugugaaucacucuccacagcaaguucaugguccuacauuguggaaacaucuaguucagacaauggaacguguuacccaggagauuucaucaauuaugaggagcuaagagagcaauugagcucagugucaucauuugaaagguuugagauauuccccaagacaaguucauggcccaaucaugacucgaacaaagguguaacggcagcauguccucacgcuggagcaaaaagcuucuacaaaaauuuaauauggcuaguuaaaaaaggaaauucauacccaaagcucagucaauccuacauuaaugauaaagggaaagaaguccucgugcuguggggcauucaccauccaucuacuacugcugaccaacaaagucucuaucagaaugcagaugcauauguuuuuguggggacaucaagauacagcaagaaguucaagccggaaauagcaauaagacccaaagugagggaucaagaagggagaaugaacuauuacuggacacuaguagagccgggagacaaaauaacauucgaagcaacuggaaaucuagugguaccgagauaugcauucacaauggaaagaaaugcuggaucugguauuaucauuucagauacaccaguccacgauugcaauacaacuugucagacacccgagggugcuauaaacaccagccucccauuucagaauauacauccgaucacaauuggaaaauguccaaaguauguaaaaagcacaaaauugagacuggcaacaggauugaggaauaucccgucuauucaaucuagaggccuauucggggccauugccggcuucauugaagggggguggacagggaugguagauggaugguacgguuaucaccaucaaaaugagcaggggucaggauaugcagccgaccugaagagcacacaaaaugccauugacaagauuacuaacaaaguaaacucuguuauugaaaagaugaauacacaguucacagcaguggguaaagaguucaaccaccuggaaaaaagaauagagaauuuaaauaaaaaaguugaugaugguuuccuggacauuuggacuuacaaugccgaacuguugguucuauuggaaaaugaaagaacuuuggacuaccacgauucaaaugugaagaacuuguaugaaaagauaagaaaccaguuaaaaaacaaugccaaggaaauuggaaacggcugcuuugaauuuuaccacaaaugcgauaacaugugcauggaaagugucaaaaaugggacuuaugacuacccaaaauacucagaggaagcaaaauuaaacagagaaaaaauagaugggguaaagcuggaaucaacaaggauuuaccagauuuuggcgaucuacucaacugucgccaguucauugguacugguagucucccugggggcaaucagcuucuggaugugcucuaaugggucucuacaauguagaauauguauuuaa

SEQ ID NO: 44734 - RNA, 1701 nt, Artificial Sequence
  derived and/or modified CDS sequence (wt) from hemagglutinin__InfluenzaA__AIM56347
augaaggcaauacuaguaguucugcuauauacauuugcaaccgcaaaugcagacacauuauguauagguuaucaugcgaacaauucaacagacacuguagacacaguacuagaaaagaauguaacaguaacacacucuguuaaccuucuagaagacaagcauaacgggaaauuaugcaaacuaagagggguagccccauugcauuuggguaaauguaacauugcuggcuggauccugggaaauccagagugugaaucacucuccacaacaaguucaugguccuacauuguggaaacaucuaguucagacaauggaacguguuacccaggagauuucaucaauuaugaagagcuaagagagcaauugagcucagugucaucauuugaaagguuugagauauuccccaagacaaguucauggcccaaucaugacucgaacaaagguguaacggcagcauguccucacgcuggagcaaaaagcuucuacaaaaauuuaauauggcuaguuaaaaaaggaaauucauacccaaagcucagccaauccuacauuaaugauaaagggaaagaaguccucgugcuguggggcauucaccacccaucuacuacugcugaccaacaaagucucuaucagaaugcagaugcauauguuuuuguggggacaucaagauacagcaagaaguucaagccagaaauagcaauaagacccaaagugagggaucaagaagggagaaugaacuacuacuggacacuaguagagccgggagacaaaauaacauucgaagcaacuggaaaucuagugguaccgagauaugcauucacaauggaaagaaaugcuggaucugguauuaucauuucagauacaccaguccacgauugcaauacaacuugucagacacccgagggugcuauaaacaccagccucccauuucagaauauacauccgaucacaauuggaaaauguccaaaguauguaaaaagcacaaaauugagacuggccacaggauugaggaaugucccgucuauucaaucuagaggccuauucggggccauugccggcuucauugaagggggguggacagggaugguagauggaugguacgguuaucaccaucaaaaugagcaggggucaggauaugcagccgaccugaagagcacacaaaaugccauugacaagauuacuaacaaaguaaauucuguuauugaaaagaugaauacacaguucacagcaguggguaaagaguucaaccaccuggaaaaaagaauagagaauuuaaauaaaaaaguugaugaugguuuccuggacauuuggacuuacaaugccgaacuguugguucuauuggaaaaugaaagaacuuuggacuaccacgauucaaaugugaagaacuuguaugaaaagguaagaaaccaguuaaaaaacaaugccaaggaaauuggaaacggcugcuuugaauuuuaccacaaaugcgauaacacgugcauggaaagugucaaaaaugggacuuaugacuacccaaaauacucagaggaagcaaaauuaaacagagaaaaaauagaugggguaaaacuggaaucaacaaggauuuaccagauuuuggcgaucuauucaacugucgccaguucauugguacugguagucucccugggggcaaucagcuucuggaugugcucuaaugggucucuacaguguagaauauguauuuaa

SEQ ID NO: 44735 - RNA, 1701 nt, Artificial Sequence
  derived and/or modified CDS sequence (wt) from hemagglutinin__InfluenzaA__AIM56358
augaaggcaauacuaguaguucugcuauauacauuugcaaccgcaaaugcagacacauuauguauagguuaucaugcgaacaauucaacagacacuguagacacaguacuagaaaagaauguaacaguaacacacucuguuaaccuucuagaagacaagcauaacgggaaacuaugcaaacuaagagggguagccccauugcauuuggguaaauguaacauugcuggcuggauccugggaaauccagagugugaaucacucuccacagcaaguucaugguccuacauuguggaaacaucuaguucagacaauggaacguguuacccaggagauuucaucaauuaugaggagcuaagagagcaauugagcucagugucaucauuugaaagguuugagauauuccccaagacaaguucauggcccaaucaugacucgaacaaagguguaacggcagcauguccucacgcuggagcaaaaagcuucuacaaaaauuuaauauggcuaguuaaaaaaggaaauucauacccaaagcucagccaauccuacauuaaugauaaagggaaagaaguccucgugcuguggggcauucaccacccaucuacuacugcugaccaacaaagucucuaucagaaugcagaugcauauguuuuuguggggacaucaagauacagcaagaaguucaagccggaaauagcaauaagacccaaagugagggaucaagaagggagaaugaacuauuacuggacacuaguaaagccgggagacaaaauaacauucgaagcaacuggaaaucuagugguaccgagauaugcauucacaauggaaagaaaugcuggaucugguauuaucauuucagauacaccaguccacgauugcaauacaacuugucagacacccgagggugcuauaaacaccagccucccauuucagaauauacauccgaucacaauuggaaaauguccaaaguauguaaaaagcacaaaauugagacuggccacaggauugaggaaugucccgucuauucaaucuagaggccuauucggggccauugccggcuucauugaaggaggguggacagggaugguagauggaugguacgguuaucaccaucaaaaugagcaggggucaggauaugcagccgaccugaagagcacacaaaaugccauugacaagauuacuaacaaaguaaauucuguuauugaaaagaugaauacacaguucacagcaguggguaaagaguucaaccaccuggaaaaaagaauagagaauuuaaauaaaaaaguugaugaugguuuccuggacauuuggacuuacaaugccgaacuguugguucuauuggaaaaugaaagaacuuuggacuaccacgauucaaaugugaagaacuuguaugaaaagguaagaaaccaguuaaaaaacaaugccaaggaaauuggaaacggcugcuuugaauuuuaccacaaaugcgauaacacgugcauggaaagugucaaaaaugggacuuaugauuacccaaaauacucagaggaagcaaaauuaaacagagaaaaaauagaugggguaaagcuggaaucaacaaggauuuaccagauuuuggcgaucuauucaacugucgccaguucauugguacugguagucucccugggggcaaucagcuucuggaugugcucuaaugggucucuacaguguagaauauguauuuaa

SEQ ID NO: 44736 - RNA, 1701 nt, Artificial Sequence; identical to SEQ ID NO: 44410
  derived and/or modified CDS sequence (wt) from hemagglutinin__InfluenzaA__AIM56369

SEQ ID NO: 44737 - RNA, 1701 nt, Artificial Sequence
  derived and/or modified CDS sequence (wt) from hemagglutinin__InfluenzaA__AIM56380
augaaggcaauacuaguaguucugcuauauacauuugcaaccgcaaaugcagacacauuauguauagguuaucaugcgaacaauucaacagacacuguagacacaguacuagaaaagaauguaacaguaacacacucuguuaaccuucuagaagacaagcauaacgggaaacuaugcaaacuaagagggguagccccauugcauuuggguaaauguaacauugcuggcuggauccugggaaauccagagugugaaucacucuccacagcaaguucaugguccuacauuguggaaacaucuaguucagacaauggaacguguuacccaggagauuucaucaauuaugaggagcuaagagagcaauugagcucagugucaucauuugaaagguuugaaauauuccccaagacaaguucauggcccaaucaugacucgaacaaagguguaacggcagcauguccucacgcuggagcaaaaagcuucuacaaaaauuuaauauggcuaguuaaaaaaggaaauucauacccaaagcucagccaauccuacauuaaugauaaagggaaagaaguccucgugcuguggggcauucaccacccaucuacuacugcugaccaacaaagucucuaucagaaugcagaugcauauguuuuuguggggacaucaagauacagcaagaaguucaagccggaaauagcaauaagacccaaagugagggaucaagaagggagaaugaacuauuacuggacacuaguagagccgggagacaaaauaacauucgaagcaacuggaaaucuagugguaccgagauaugcauucacaauggaaagaaaugcuggaucugguauuaucauuucagauacaccaguccacgauugcaauacaacuugucagacacccgagggugcuauaaacaccagccucccauuucagaauauacauccgaucacaauuggaaaauguccaaaguauguaaaaagcacaaaauugagacuggccacaggauugaggaaugucccgucuauucaaucuagaggccuauucggggccauugccggcuucauugaaggaggguggacagggaugguagauggaugguacgguuaucaccaucaaaaugagcaggggucaggauaugcagccgaccugaagagcacacaaaaugccauugacaagauuacuaacaaaguaaauucuguuauugaaaagaugaauacacaguucacagcaguggguaaagaguucaaccaccuggaaaaaagaauagagaauuuaaauaaaaaaguugaugaugguuuccuggacauuuggacuuacaaugccgaacuguugguucuauuggaaaaugaaagaacuuuggacuaccacgauucaaaugugaagaacuuguaugaaaagguaagaaaccaguuaaaaaacaaugccaaggaaauuggaaacggcugcuuugaauuuuaccacaaaugcgauaacacgugcauggaaagugucaaaaaugggacuuaugacuacccaaaauacucagaggaagcaaaauuaagcagagaaaaaauagaugggguaaagcuggaaucaacaaggauuuaccagauuuuggcgaucuauucaacugucgccaguucauugguacugguagucucccugggggcaaucagcuucuggaugugcucuaaugggucucuacaguguagaauauguauuuaa

SEQ ID NO: 44738 - RNA, 1701 nt, Artificial Sequence; identical to SEQ ID NO: 43913
  derived and/or modified CDS sequence (wt) from hemagglutinin__InfluenzaA__AIM56391

SEQ ID NO: 44739 - RNA, 1701 nt, Artificial Sequence; identical to SEQ ID NO: 44714
  derived and/or modified CDS sequence (wt) from hemagglutinin__InfluenzaA__AIM56402

SEQ ID NO: 44740 - RNA, 1701 nt, Artificial Sequence
  derived and/or modified CDS sequence (wt) from hemagglutinin__InfluenzaA__AIM56413
augaaggcaauacuaguaguucugcuauauacauuugcaaccgcaaaugcagacacauuauguauagguuaucaugcgaacaauucaacagacacuguagacacaguacuagaaaagaauguaacaguaacacacucuguuaaccuucuagaagacaagcauaacgggaaacuaugcaaacuaagagggguagccccauugcauuuggguaaauguaacauugcuggcuggauccugggaaauccagagugugaaucacucuccacagcaaguucaugguccuauauuguggaaacaucuaguucagacaauggaacguguuacccaggagauuucaucaauuaugaggagcuaagagagcaauugagcucagugucaucauuugaaagguuugagauauuccccaagacaaguucauggcccaaucaugacucgaacaaagguguaacggcagcauguccucacgcuggagcaaaaagcuucuacaaaaauuuaauauggcuaguuaaaaaaggaaauucauacccaaagcucagccaauccuacauuaaugauaaagggaaagaaguccucgugcuguggggcauucaccacccaucuacuacugcugaccaacaaagucucuaucagaaugcagaugcauauguuuuuguggggacaucaagauacagcaagaaguucaagccggaaauagcaauaagacccaaagugagggaucaagaagggagaaugaacuauuacuggacacuaguagagccgggagacaaaauaacauucgaagcaacuggaaaucuagugguaccgagauaugcauucacaauggaaagaaaugcuggaucugguauuaucauuucagauacaccaguccacgauugcaauacaacuugucagacacccgagggugcuauaaacaccagccucccauuucagaauauacauccgaucacaauuggaaaauguccaaaguauguaaaaagcacaaaauugagacuggccacaggauugaggaaugucccgucuauucaaucuagaggccuauucggggccauugccggcuucauugaaggaggguggacagggaugguugauggaugguaugguuaucaccaucaaaaugagcaggggucaggauaugcagccgaccugaagagcacacaaaaugccauugacaagauuacuaacaaaguaaauucuguuauugaaaagaugaauacacaguucacagcaguggguaaagaguucaaccaccuggaaaaaagaauagagaauuuaaauaaaaaaguugaugaugguuuccuggacauuuggacuuacaaugccgaacuguugguucuauuggaaaaugaaagaacuuuggacuaccacgauucaaaugugaagaacuuguaugaaaagguaagaaaccaguuaaaaaccaaugccaaggaaauuggaaacggcugcuuugaauuuuaccacaaaugcgauaacacgugcauggaaagugucaaaaaugggacuuaugacuacccaaaauacucagaggaagcaaaauuaaacagagaaaaaauagaugggguaaagcuggaaucaacaaggauuuaccagauuuuggcgaucuauucaacugucgccaguucauugguacugguagucucccugggggcaaucagcuucuggaugugcucuaaugggucucuacaguguagaauauguauuuaa

SEQ ID NO: 44741 - RNA, 1701 nt, Artificial Sequence; identical to SEQ ID NO: 44714
  derived and/or modified CDS sequence (wt) from hemagglutinin__InfluenzaA__AIM56425

SEQ ID NO: 44742 - RNA, 1701 nt, Artificial Sequence
  derived and/or modified CDS sequence (wt) from hemagglutinin__InfluenzaA__AIM56436
augaaggcaauacuaguaguucugcuauauacauuugcaaccgcaaaugcagacacauuauguauagguuaucaugcgaacaauucaacagacacuguagacacaguacuagaaaagaauguaacaguaacacacucuguuaaccuucuagaagacaagcauaacgggaaauuaugcaaacuaagagggguagccccauugcauuuggguaaauguaacauugcuggcuggauccugggaaauccagagugugaaucacucuccacagcaaguucaugguccuacauuguggaaacaucuaguucagacaauggaacguguuacccaggagauuucaucaauuaugaagagcuaagagagcaauugagcucagugucaucauuugaaagguuugagauauuccccaagacaaguucauggcccaaucaugacucgaacaaagguguaacggcagcauguccucacgcuggagcaaaaagcuucuacaaaaauuuaauauggcuaguuaaaaaaggaaauucauacccaaagcucagccaauccuacauuaaugauaaagggaaagaaguccucgugcuguggggcauucaccacccaucuacuacugcugaccaacaaagucucuaucagaaugcagaugcauauguuuuuguggggacaucaagauacagcaagaaguucaagccagaaauagcaauaagacccaaagugagggaucaagaagggagaaugaacuacuacuggacacuaguagagccgggagacaaaauaacauucgaagcaacuggaaaucuagugguaccgagauaugcauucacaauggaaagaaaugcuggaucugguauuaucauuucagauacaccaguccacgauugcaauacaacuugucagacacccgagggugcuauaaacaccagccucccauuucagaauauacauccgaucacaauuggaaaauguccaaaguauguaaaaagcacaaaauugagacuggccacaggauugaggaaugucccgucuauucaaucuagaggccuauucggggccauugccggcuucauugaagggggguggacagggaugguagauggaugguacgguuaucaccaucaaaaugagcaggggucaggguaugcagccgaccugaagagcacacaaaaugccauugacaagauuacuaacaaaguaaauucuguuauugaaaagaugaauacacaguucacagcaguggguaaagaguucaaccaccuggaaaaaagaauagagaauuuaaauaaaaaaguugaugaugguuuccuggacauuuggacuuacaaugccgaacuguugguucuauuggaaaaugaaagaacuuuggacuaccacgauucaaaugugaagaacuuguaugaaaagguaagaaaccaguuaaaaaacaaugccaaggaaauuggaaacggcugcuuugaauuuuaccacaaaugcgauaacacguguauggaaagugucaaaaaugggacuuaugacuacccaaaauacucagaggaagcaaaauuaaacagagaaaaaauagaugggguaaaacuggaaucaacaaggauuuaccagauuuuggcgaucuauucaacugucgccaguucauugguacugguagucucccugggggcaaucagcuucuggaugugcucuaaugggucucuacaguguagaauauguauuuaa

SEQ ID NO: 44743 - RNA, 1701 nt, Artificial Sequence
  derived and/or modified CDS sequence (wt) from hemagglutinin__InfluenzaA__AIM56447
augaaggcaauacuaguaguucugcuauauacauuugcaaccgcaaaugcagacacauuauguauagguuaucaugcaaacaauucaacagacacuguagacacaguacuagaaaagaauguaacaguaacacacucuguuaaccuucuagaagacaaacauaacgggaaacuaugcaagcuaagagggguagccccauugcauuuggguaaauguaacauugcuggcuggauccugggaaauccagagugugaaucacucuccacagcaaguucaugguccuacauuguggaaacaucuaguucagacaauggaacguguuacccaggagauuucaucaauuaugaggagcuaagagagcaauugagcucagugucaucauuugaaagguuugagauauuccccaaaacaaguucauggcccaaucaugacucgaacaaagguguaacggcagcauguccucacgcuggagcaaaaagcuucuacaaaaauuuaauauggcuaguuaaaaaaggaaauucauacccaaagcucagccaauccuacauuaaugauaaagggaaagaaguccucgugcuguggggcauucaccauccaucuacuacugcugaccaacaaagucucuaucagaaugcagaugcauauguuuuuguggggacaucaagauacagcaagaaguucaagccggaaauagcaauaagacccaaagugagggaucaagaagggagaaugaacuauuacuggacacuaguagagccgggagacaaaauaacauucgaagcaacuggaaaucuagugguaccgagauaugcauucacaauggaaagaaaugcuggaucugguauuaucauuucagauacaccaguccacgauugcaauacaacuugucagacacccgagggugcuauaaacaccagccucccauuucagaauauacauccgaucacaauuggaaaauguccaaaguauguaaaaagcacaaaauugagacuggccacaggauugaggaaugucccgucuauucaaucuagaggccuauucggggccauugccggcuucauugaagggggguggacagggaugguagauggaugguacgguuaucaccaucaaaaugagcaggggucaggauaugcagccgaccugaagagcacacaaaaugccauugacaagauuacuaacaaaguaaacucuguuauugaaaagaugaauacacaguucacagcaguggguaaagaguucaaccaccuggaaaaaagaauagagaauuuaaauaaaaaaguugaugaugguuuccuggacauuuggacuuacaaugccgaacuguugguucuauuggaaaaugaaagaacuuuggacuaccacgauucaaaugugaagaacuuguaugaaaagguaagaaaccaguuaaaaaacaaugccaaggaaauuggaaacggcugcuuugaauuuuaccacaaaugcgauaacacgugcauggaaagugucaaaaaugggacuuaugacuacccaaaauacucagaggaagcaaaauuaaacagagaaaaaauagaugggguaaagcuggaaucaacaaggauuuaccagauuuuggcgaucuauucaacugucgccaguucauugguacugguagucucccugggggcaaucagcuucuggaugugcucuaaugggucucuacaguguagaauauguauuuaa

SEQ ID NO: 44744 - RNA, 1701 nt, Artificial Sequence
  derived and/or modified CDS sequence (wt) from hemagglutinin__InfluenzaA__AIM56469
augaaggcaauacuaguaguucugcuauacacauuugcaaccgcaaaugcagacacauuauguauagguuaucaugcgaacaauucaacagacacuguagacacaguacuagaaaagaauguaacaguaacacacucuguuaaccuucuagaagacaagcauaacgggaaacuaugcaaacuaagagggguagccccauugcauuuggguaaauguaacauugcuggcuggauccugggaaauccagagugugaaucacucuccacagcaaguucaugguccuacauuguggaaacaucuaguucagacaauggaacguguuacccaggagauuucaucaauuaugaggagcuaagagagcaauugagcucagugucaucauuugaaagauuugagauauuccccaagacaaguucauggcccaaucaugacucgaacaaagguguaacggcagcauguccucacgcuggagcaaaaagcuucuacaaaaauuuaauauggcuaguuaaaaaaggaaauucauacccaaagcucagccaauccuacauuaaugauaaagggaaagaaguccuagugcuguggggcauucaccauccaucuacuacugcugaccaacaaagucucuaucagaaugcagaugcauauguuuucguggggacaucaagauacagcaagaaguucaagccggaaauagcaauaagacccaaagugagggaucaagaagggagaaugaacuauuacuggacacuaguagagccgggagacaaaauaacauucgaagcaacuggaaaucuagugguaccgagauaugcauucacaauggaaagaaaugcuggaucugguauuaucauuucagauacaccaguccacgauugcaauacaacuugucagacacccgagggugcuauaaacaccagccucccauuucagaauauacauccgaucacaauuggaaaauguccaaaguauguaaaaagcacaaaauugagacuggccacaggauugaggaaugucccaucuauucaaucuagaggccuauucggggccauugccggcuucauugaagggggguggacagggaugguagauggaugguacgguuaucaccaucaaaaugagcaggggucaggauaugcagccgaccugaagagcacacaaaaugccauugacaaaauuacuaacaaaguaaauucuguuauugaaaagaugaauacacaguucacagcaguggguaaagaguucaaccacuuggaaaaaagaauagagaauuuaaauaaaaaaguugaugaugguuuccuggacauuuggacuuacaaugccgaacugcugguucuauuggaaaaugaaagaacuuuggacuaccacgauucaaaugugaagaacuuguaugaaaagguaagaaaccaguuaaaaaacaaugccaaggaaauuggaaacggcugcuuugaauuuuaccacaaaugcgauaacacgugcauggaaagugucaaaaaugggacuuaugacuacccaaaauacucagaggaagcaaaauuaaacagagaaaaaauagaugggguaaagcuggaaucaacaaggauuuaccagauuuuggcgaucuauucaacugucgccaguucauugguacugguagucucccugggggcaaucagcuucuggaugugcucuaaugggucucuacaguguagaauauguauuuaa

SEQ ID NO: 44745 - RNA, 1701 nt, Artificial Sequence
  derived and/or modified CDS sequence (wt) from hemagglutinin__InfluenzaA__AIM56480
augaaggcaauacuaguaguucugcuauauacauuugcaaccacaaaugcagacacauuauguauagguuaucaugcgaacaauucaacagacacuguagacacaguacuagaaaagaauguaacaguaacacacucuguuaaccuucuagaagacaagcauaacgggaaacuaugcaaacuaagagggguagccccauugcauuuggguaaauguaacauugcuggcuggauccugggaaauccagagugugaaucacucuccacagcaaguucaugguccuacauuguggaaacaucuaguucagacaauggaacguguuacccaggagauuucaucaauuaugaggagcuaagagagcaauugagcucagugucaucauuugaaagguuugagauauuccccaagacaaguucauggcccaaucaugacucgaacaaagguguaacggcagcauguccucacgcuggagcaaaaagcuucuacaaaaauuuaauauggcuaguuaaaaaaggaaauucauacccaaagcucagccaauccuacauuaaugauaaagggaaagaaguccucgugcuguggggcauucaccauccaucuacuacugcugaccaacaaagucucuaucagaaugcagaugcauauguuuuuguggggacaucaagauacagcaagaaguucaagccggaaauagcaauaagacccaaagugagggaucaagaagggagaaugaacuauuacuggacacuaguagagccgggagacaaaauaacauucgaagcaacuggaaaucuagugguaccgagauaugcauucacaauggaaagaaaugcuggaucugguaucaucauuucagauacaccaguccacgauugcaauacaacuugucagacacccgagggugcuauaaacaccagccucccauuucagaauauacauccgaucacacuuggaaaauguccaaaguauguaaaaagcacaaaauugagacuggccacaggauugaggaaugucccgucuauucaaucuagaggccuauucggggccauugccggcuucauugaagggggguggacagggaugguagauggaugguacgguuaucaccaucaaaaugagcaggggucaggauaugcagccgaccugaagagcacacaaaaugccauugacaagauuacuaacaaaguaaauucuguuauugaaaagaugaauacacaguucacagcaguggguaaagaguucaaccaccuggaaaaaagaauagagaauuuaaauaaaaaaguugaugaugguuuccuggacauuuggacuuacaaugccgaacuguugguucuauuggaaaaugaaagaacuuuggacuaccacgauucaaaugugaagaacuuguaugaaaagguaagaaaccaguuaaaaaacaaugcaaaggaaauuggaaacggcugcuuugaauuuuaccacaaaugcgauaacacgugcauggaaagugucaaaaaugggacuuaugacuacccaaaauacucagaggaagcaaaauuaaacagagaaaaaauagaugggguaaagcuggaaucaacaaggauuuaccagauuuuggcgaucuauucaacugucgccaguucauugguacugguagucucccugggggcaaucagcuucuggaugugcucuaaugggucucuacaguguagaauauguauuuaa

SEQ ID NO: 44746 - RNA, 1701 nt, Artificial Sequence; identical to SEQ ID NO: 44726
  derived and/or modified CDS sequence (wt) from hemagglutinin__InfluenzaA__AIM56491

SEQ ID NO: 44747 - RNA, 1710 nt, Artificial Sequence
  derived and/or modified CDS sequence (wt) from hemagglutinin__InfluenzaA__AIM56502
augaaggcaauacuaguaguucugcuauauacauuugcaaccgcaaaugcagacacuuuauguauagguuaucaugcgaacaauucaacagacacuguagacacaguacuagaaaagaauguaacaguaacacacucuguuaaccuucuagaagacaagcauaacgguaaacuaugcaaacuaagagggguagccccauugcauuuggguaaauguaacauugcuggcuggauccugggaaauccagagugugaaucacucuccacagcaaguucaugguccuacauuguggaaacaucuaguucagacaauggaacguguuacccaggagauuucaucaauuaugaggagcuaagagagcaauugagcucagugucaucauuugaaagguuugagauauuccccaaggcaaguucauggcccaaucaugacucgaacaaagguguaacggcagcauguccucacgcuggagcaaaaagcuucuacaaaaauuuaauauggcuaguuaaaaaaggaaauucauacccaaagcucagucaauccuacauuaaugauaaagggaaagaaguccucgugcuguggggcauucaccauccaucuacuacugcugaccaacaaagucucuaucagaaugcagaugcauauguuuuuguggggacaucaagauacagcaagaaguucaagccggaaauagcaauaagacccaaagugagggaucaagaagggagaaugaacuauuacuggacacuaguagagccgggagacaaaauaacauucgaagcaacuggaaaucuagugguaccgagauaugcauucacaauggaaagaaaugcuggaucugguauuaucauuucagauacaccaguccacgauugcaauacaacuugucagacacccgagggugcuauaaacaccagccucaccagccucccauuucagaauauacauccgaucacaauuggaaaauguccaaaguauguaaaaagcacaaaauugagacuggcaacaggauugaggaauaucccgucuauucaaucuagaggccuauucggggccauugccggcuucauugaagggggguggacagggaugguagauggaugguacgguuaucaccaucaaaaugagcaggggucaggauaugcagccgaccugaaaagcacacaaaaugccauugacaagauuacuaacaaaguaaacucuguuauugaaaagaugaauacacaguucacagcaguggguaaagaguucaaccaccuggaaaaaagaauagagaauuuaaauaaaaaaguugaugaugguuuccuggacauuuggacuuacaaugccgaacuguugguucuauuggaaaaugaaagaacuuuggacuaccacgauucaaaugugaagaacuuguaugaaaagguaagaaaccaguuaaaaaacaaugccaaggaaauuggaaacggcugcuuugaauuuuaccacaaaugcgauaacacgugcauggaaagugucaaaaaugggacuuaugacuacccaaaauacucagaggaagcaaaauuaaacagagaaaaaauagaugggguaaagcuggaaucaacaaggauuuaccagauuuuggcgaucuauucaacugucgccaguucauugguacugguagucucccugggggcaaucagcuucuggaugugcucuaaugggucucuacaguguagaauauguauuuaa

SEQ ID NO: 44748 - RNA, 1701 nt, Artificial Sequence; identical to SEQ ID NO: 44714
  derived and/or modified CDS sequence (wt) from hemagglutinin__InfluenzaA__AIM56513

SEQ ID NO: 44749 - RNA, 1701 nt, Artificial Sequence
  derived and/or modified CDS sequence (wt) from hemagglutinin__InfluenzaA__AIM56524
augaaggcaauacuaguaguucugcuauauacauuugcaaccgcaaaugcagacacauuauguauagguuaucaugcgaacaauucaacagacacuguagacacaguacuagaaaagaauguaacaguaacacacucuguuaaccuucuagaagacaaacauaacgggaaacuaugcaaacuaagagggguggccccauugcauuuggguaaauguaacauugcuggcuggauccugggaaauccagagugugaaucacucuccacagcaaguucaugguccuacauuguggaaacaucuaguucagacaauggaacguguuacccaggagauuucaucaauuaugaggagcuaagagagcaauugagcucagugucaucauuugaaagguuugagauauuccccaagacaaguucauggcccaaucaugacucgaacaaagguguaacggcagcauguccucacgcuggagcaaaaagcuucuacaaaaauuuaauauggcuaguuaaaaaaggaaauucauacccaaagcucagccaauccuacauuaaugauaaagggaaagaaguccucgugcuguggggcauucaccauccaucuacuacugcugaccaacaaagucucuaucagaaugcagaugcauauguuuuuguggggacaucaagauacagcaagaaguucaagccggaaauagcaauaagacccaaagugagggaucaagaagggagaaugaacuauuacuggacacuaguagagccgggagacaaaauaacauucgaagcaacuggaaaucuagugguaccgagauaugcauucacaauggaaagaaaugcuggaucugguauuaucauuucagauacaccaauccacgauugcaauacaacuugucagacacccgagggugcuauaaacaccagccucccauuucagaauauacauccgaucacaauuggaaaauguccaaaguauguaaaaagcacaaaauugagacuggccacaggauugaggaaugucccgucuauucaaucuagaggccuauucggggccauugccggcuucauugaagggggguggacagggaugguagauggaugguacgguuaucaccaucaaaaugagcaggggucaggauacgcagccgaccugaagagcacacaaaaugccauugacaagauuacuaacaaaguaaauucuguuauugaaaagaugaauacacaguucacagcaguggguaaagaguucaaccaccuggaaaaaagaauagagaauuuaaauaaaaaaguugaugaugguuuccuggacauuuggacuuacaaugccgaacuguugguucuauuggaaaaugaaagaacuuuggacuaccaugauucaaaugugaagaacuuguaugaaaagguaagaaaccaguuaaaaaacaaugccaaggaaauuggaaacggcugcuuugaauuuuaccacaaaugcgaugacacgugcauggaaagugucaaaaaugggacuuaugacuacccaaaauacucagaagaagcaaaauuaaacagagaaaaaauagaugggguaaagcuggaaucaacaaggauuuaccagauuuuggcgaucuauucaacugucgccaguucauugguacugguagucucccugggggcaaucagcuucuggaugugcucuaaugggucucuacaguguagaauauguauuuaa

SEQ ID NO: 44750 - RNA, 1701 nt, Artificial Sequence; identical to SEQ ID NO: 43034
  derived and/or modified CDS sequence (wt) from hemagglutinin__InfluenzaA__AIM56535

SEQ ID NO: 44751 - RNA, 1701 nt, Artificial Sequence; identical to SEQ ID NO: 43913
  derived and/or modified CDS sequence (wt) from hemagglutinin__InfluenzaA__AIM56546

SEQ ID NO: 44752 - RNA, 1701 nt, Artificial Sequence
  derived and/or modified CDS sequence (wt) from hemagglutinin__InfluenzaA__AIM56557
augaaggcaauacuaguaguucugcuauauacauuugcaaccgcaaaugcagacacauuauguauagguuaucaugcgaacaauucaacagacacuguagacacaguacuagaaaagaauguaacaguaacacacucuguuaaccuucuagaagacaagcacaacgggaaacuaugcaaacuaagagggguagccccauugcauuuggguaaauguaacauugcuggcuggauccugggaaauccagagugugaaucacucuccacagcaaguucaugguccuacauuguggaaacaucuaguucagacaauggaacguguuacccaggagauuucaucaauuaugaggagcuaagagagcaauugagcucagugucaucauuugaaagguuugagauauuccccaagacaaguucauggcccaaucaugacucgaacaaagguguaacggcagcauguccucacgcuggagcaaaaagcuucuacaaaaauuuaauauggcuaguuaaaaaaggaaauucauacccaaagcucagccaauccuacauuaaugauaaagggaaagaaguccucgugcuguggggcauucaccacccaucuacuacugcugaccaacaaagucucuaucagaaugcagaugcauauguuuuuguggggacaucaagauacagcaagaaguucaagccggaaauagcaauaagacccaaagugagggaucaagaagggagaaugaacuauuacuggacacuaguagagccgggagacaaaauaacauucgaagcaacuggaaaucuagugguaccgagauaugcauucacaauggaaagaaaugcuggaucugguauuaucauuucagauacaccaguccacgauugcaauacaacuugucagacacccgagggugccauaaacaccagccucccauuucagaauauacauccgaucacaauuggaaaauguccaaaguauguaaaaagcacaaaauugagacuggccacaggauugaggaaugucccgucuauucaaucuagaggccuauucggggccauugccggcuucauugaaggaggguggacagggaugguagauggaugguacgguuaucaccaucaaaaugagcaggggucaggauaugcagccgaccugaagagcacacaaaaugccauugacaagauuacuaacaaaguaaauucuguuauugaaaagaugaauacacaguucacagcaguggguaaagaguucaaccaccuggaaaaaagaauagagaauuuaaauaaaaaaguugaugaugguuuccuggacauuuggacuuacaaugccgaacuguugguucuauuggaaaaugaaagaacuuuggacuaccacgauucaaaugugaagaacuuguaugaaaagguaagaaaccaguuaaaaaccaaugccaaggaaauuggaaacggcugcuuugaauuuuaccacaaaugcgauaacacgugcauggaaagugucaaaaaugggacuuaugacuacccaaaauacucagaggaagcaaaauuaaacagagaaaaaauagaugggguaaagcuggaaucaacaaggauuuaccagauuuuggcgaucuauucaacugucgccaguucauugguacugguagucucccugggggcaaucagcuucuggaugugcucuaaugggucucuacaguguagaauauguauuuaa

SEQ ID NO: 44753 - RNA, 1701 nt, Artificial Sequence
  derived and/or modified CDS sequence (wt) from hemagglutinin__InfluenzaA__AIM56568
augaaggcaauacuaguaguucugcuauauacauuugcaaccgcaaaugcagacacauuauguauagguuaucaugcgaacaauucaacagacacuguagacacaguacuagaaaagaauguaacaguaacacacucuguuaaccuucuagaagacaagcauaacgggaaacuaugcaaacuaagagggguagccccauugcauuuggguaaauguaacauugcuggcuggauccugggaaauccagagugugaaucacucuccacagcaaguucaugguccuacauuguggaaacaucuaguucagacaauggaacguguuacccaggagauuucaucaauuaugaggagcuaagagagcaauugagcucagugucaucauuugaaagguuugagauauucuccaagacaaguucauggcccaaucaugacucgaacaaagguguaacggcagcauguccucacgcuggagcaaaaagcuucuacaaaaauuuaauauggcuaguuaaaaaaggaaauucauacccaaagcucagccaauccuacauuaaugauaaagggaaagaaguccucgugcuguggggcauucaccauccaucuacuacugcugaccaacaaagucucuaucagaaugcagaugcauauguuuuuguggggacaucaagauacagcaagaaguucaagccggaaauagcaauaagacccaaagugagggaucaagaagggagaaugaacuauuacuggacacuaguagagccgggagacaaaauaacauucgaagcaacuggaaaucuagugguaccgagauaugcauucacaauggaaagaaaugcuggaucugguauuaucauuucagauacaccaguccacgauugcaauacaacuugucagacacccgagggugcuauaaacaccagccucccauuucagaauauacauccgaucacaauuggaaaauguccaaaguauguaaaaagcacaaaauugagacuggccacaggauugaggaaugucccgucuauucaaucuagaggccuauucggggccauugccggcuucauugaagggggguggacagggaugguagauggaugguacgguuaucaccaucaaaaugagcaggggucaggauaugcagccgaccugaagagcacacaaaaugccauugacaagauuacuaacaaaguaaauucuguuauugaaaagaugaauacacaguucacagcaguggguaaagaguucaaccaccuggaaaaaagaauagagaauuuaaauaaaaaaguugaugaugguuuccuggacauuuggacuuacaaugccgaacuguugguucuauuggaaaaugaaagaacuuuggacuaccacgauucaaaugugaagaacuuguaugaaaagguaagaaaccaguuaaaaaacaaugccaaggaaauuggaaacggcugcuuugaauuuuaccacaaaugcgauaacacgugcauggaaagugucaaaaaugggacuuaugacuacccaaaauacucagaggaagcaaaauuaaacagagaaaaaauagaugggguaaagcuggaaucaacaaggauuuaccagauuuuggcgaucuauucaacugucgccaguucauugguacugguagucucccugggggcaaucagcuucuggaugugcucuaaugggucucuacaguguagaauauguauuuaa

SEQ ID NO: 44754 - RNA, 1701 nt, Artificial Sequence
  derived and/or modified CDS sequence (wt) from hemagglutinin__InfluenzaA__AIM56579
augaaggcaauacuaguaguucugcuauauacauuugcaaccacaaaugcagacacauuauguauagguuaucaugcgaacaauucaacagacacuguagacacaguacuagaaaagaauguaacaguaacacacucuguuaaccuucuagaagacgagcauaacgggaaacuaugcaaacuaagagggguagccccauugcauuuggguaaauguaacauugcuggcuggauccugggaaauccagagugugaaucacucuccacagcaaguucaugguccuacauuguggaaacaucuaguucagacaauggaacguguuacccaggagauuucaucaauuaugaggagcuaagagagcaauugagcucagugucaucauuugaaagguuugagauauuccccaagacaaguucauggcccaaucaugacucgaacaaagguguaacggcagcauguccucacgcuggagcaaaaagcuucuacaaaaauuuaauauggcuaguuaaaaaaggaaauucauacccaaagcucagccaauccuacauuaaugauaaagggaaagaaguccucgugcuguggggcauucaccauccaucuacuacugcugaccaacaaagucucuaucagaauacagaugcauauguuuuuguggggacaucaagauacagcaagaaguucaagccggaaauagcaauaagacccaaagugagggaucaagaagggagaaugagcuauuacuggacacuaguagagccgggagacaaaauaacauucgaagcaacuggaaaucuagugguaccgagauaugcauucacaauggaaagaaaugcuggaucugguauuaucauuucagacacaccaguccacgauugcaauacaacuugucagacacccgagggugcuauaaacaccagccucccauuucagaauauacauccgaucacaauuggaaaauguccaaaguauguaaaaagcacaaaauugagacuggccacaggauugaggaaugucccgucuauucaaucuagaggccuauucggggccauugccggcuucauugaagggggguggacagggaugguagauggaugguacgguuaucaccaucaaaaugagcaggggucaggauaugcagccgaccugaagagcacacaaaaugccauugacaagauuacuaacaaaguaaauucuguuauugaaaagaugaauacacaguucacagcaguggguaaagaguucaaccaccuggaaaaaagaauagagaauuuaaauaaaaaaguugaugaugguuuccuggacauuuggacuuacaaugccgaacuguugguucuauuggaaaaugaaagaacuuuggacuaccacgauucaaaugugaagaacuuguaugaaaagguaagaaaccaguuaaaaaacaaugcaaaggaaauuggaaacggcugcuuugaauuuuaccacaaaugcgauaacacgugcauggaaagugucaaaaaugggacuuaugacuacccaaaauacucagaggaagcaaaauuaaacagagaaaaaauagaugggguaaagcuggaaucaacaaggauuuaccagauuuuggcgaucuauucaacugucgccaguucauugguacugguagucucccugggggcaaucagcuucuggaugugcucuaaugggucucuacaguguagaauauguauuuaa

SEQ ID NO: 44755 - RNA, 1710 nt, Artificial Sequence
  derived and/or modified CDS sequence (wt) from hemagglutinin__InfluenzaA__AIM56590
augaaggcaauacuaguaguucugcuauauacauuugcaaccgcaaaugcagacacauuauguauagguuaucaugcgaacaauucaacagacacuguagacacaguacuagaaaagaauguaacaguaacacacucuguuaaccuucuagaagacaagcauaacgggaaacuaugcaaacuaagagggguggccccauugcauuuggguaaauguaacauugcuggcuggauccugggaaauccagagugugaaucacucuccacagcaaguucaugguccuacauuguggaaacaucuaguucagacaauggaacguguuacccaggagauuucaucaauuaugaggagcuaagagagcaauugagcucagugucaucauuugaaagguuugagauauuccccaagacaaguucauggcccaaucaugacucgaacaaagguguaacggcagcauguccucacgcuggagcaaaaagcuucuacaaaaauuuaauauggcuaguuaaaaaaggaaauucauacccaaagcucagccaauccuacauuaaugauaaagggaaagaaguccucgugcuguggggcauucaccauccaucuacuacugcugaccaacaaagucucuaucagaaugcagaugcauauguuuuuguggggacaucaagauacagcaagaaguucaagccggaaauagcaauaagacccaaagugagggaucaagaagggagaaugaacuauuacuggacacuaguagagccgggagacaaaauaacauucgaagcaacuggaaaucuagugguaccgagauaugcauucacaauggaaagaaaugcuggaucugguauuaucauuucagauacaccaguccacgauugcaauacaacuugucagacacccgagggugcuauaaacaccagccucaccagccucccauuucagaauauacauccgaucacaauuggaaaauguccaaaguauguaaaaagcacaaaauugagacuggccacaggauugaggaaugucccgucuauucaaucuagaggccuauucggggccauugccggcuucauugaagggggguggacagggaugguagauggaugguacgguuaucaccaucaaaaugagcaggggucaggauacgcagccgaccugaagagcacacaaaaugccauugacaagauuacuaacaaaguaaauucuguuauugaaaagaugaauacacaguucacagcaguggguaaagaguucaaccaccuggaaaaaagaauagagaauuuaaauaagaaaguugaugaugguuuccuggacauuuggacuuacaaugccgaacuguugguucuauuggaaaaugaaagaacuuuggacuaccacgauucaaaugugaagaacuuguaugaaaagguaagaaaccaguuaaaaaacaaugccaaggaaauuggaaacggcugcuuugaauuuuaccacaaaugcgaugacacgugcauggaaagugucaaaaaugggacuuaugacuacccaaaauacucagaagaagcaaaauuaaacagagaaaaaauagaugggguaaagcuggaaucaacaaggauuuaccagauuuuggcgaucuauucaacugucgccaguucauugguacugguagucucccugggggcaaucagcuucuggaugugcucuaaugggucucuacaguguagaauauguauuuaa

SEQ ID NO: 44756 - RNA, 1710 nt, Artificial Sequence
  derived and/or modified CDS sequence (wt) from hemagglutinin__InfluenzaA__AIM56601
augaaggcaauacuaguaguucugcuauacacauuugcaaccgcaaaugcagacacauuauguauagguuaucaugcgaacaauucaacagacacuguagacacaguacuagaaaagaauguaacaguaacacacucuguuaaccuucuagaagacaagcauaacgggaaacuaugcaaacuaagagggguagccccauugcauuuggguaaauguaacauugcuggcuggauccugggaaauccagagugugaaucacucuccacagcaaguucaugguccuacauuguggaaacaucuaguucagacaauggaacguguuacccaggagauuucaucaauuaugaggagcuaagagagcaauugagcucagugucaucauuugaaagauuugagauauuccccaagacaaguucauggcccaaucaugacucgaacaaagguguaacggcagcauguccucacgcuggagcaaaaagcuucuacaaaaauuuaauauggcuaguuaaaaaaggaaauucauacccaaagcucagccaauccuacauuaaugauaaagggaaagaaguccucgugcuguggggcauucaccauccaucuacuacugcugaccaacaaagucucuaucagaaugcagaugcauauguuuucguggggacaucaagauacagcaagaaguucaagccggaaauagcaauaagacccaaagugagggaucaagaagggagaaugaacuauuacuggacacuaguagagccgggagacaaaauaacauucgaagcaacuggaaaucuagugguaccgagauaugcauucacaauggaaagaaaugcuggaucugguauuaucauuucagauacaccaguccacgauugcaauacaacuugucagacacccgagggugcuauaaacaccagccucaccagccucccauuucagaauauacauccgaucacaauuggaaaauguccaaaguauguaaaaagcacaaaauugagacuggccacaggguugaggaaugucccaucuauucaaucuagaggccuauucggggccauugccggcuucauugaagggggguggacagggaugguagauggaugguacgguuaucaccaucaaaaugagcaggggucaggauaugcagccgaccugaagagcacacaaaaugccauugacaaaauuacuaacaaaguaaauucuguuauugaaaagaugaauacacaguucacagcaguggguaaagaguucaaccacuuggaaaaaagaauagagaauuuaaauaaaaaaguugaugaugguuuccuggacauuuggacuuacaaugccgaacugcugguucuauuggaaaaugaaagaacuuuggacuaccacgauucaaaugugaagaacuuguaugaaaagguaagaaaccaguuaaaaaacaaugccaaggaaauuggaaacggcugcuuugaauuuuaccacaaaugcgauaacacgugcauggaaagugucaaaaaugggacuuaugacuacccaaaauacucagaggaagcaaaauuaaacagagaaaaaauagaugggguaaagcuggaaucaacaaggauuuaccagauuuuggcgaucuauucaacugucgccaguucauugguacugguagucucccugggggcaaucagcuucuggaugugcucuaaugggucucuacaguguagaauauguauuuaa

SEQ ID NO: 44757 - RNA, 1710 nt, Artificial Sequence
  derived and/or modified CDS sequence (wt) from hemagglutinin__InfluenzaA__AIM56612
augaaggcaauacuaguaguucugcuauacacauuugcaaccgcaaaugcagacacauuauguauagguuaucaugcgaacaauucaacagacacuguagacacaguacuagaaaagaauguaacaguaacacacucuguuaaccuucuagaagacaagcauaacgggaaacuaugcaaacuaagagggguagccccauugcauuuggguaaauguaacauugcuggcuggauccugggaaauccagagugugaaucacucuccacagcaaguucaugguccuacauuguggaaacaucuaguucagacaauggaacguguuacccaggagauuucaucaauuaugaggagcuaagagagcaauugagcucagugucaucauuugaaagauuugagauauuccccaagacaaguucauggcccaaucaugacucgaacaaagguguaacggcagcauguccucacgcuggagcaaaaagcuucuacaaaaauuuaauauggcuaguuaaaaaaggaaauucauacccaaagcucagccaauccuacauuaaugauaaagggaaagaaguccucgugcuguggggcauucaccauccaucuacuacugcugaccaacaaagucucuaucagaaugcagaugcauauguuuucguggggacaucaagauacagcaagaaguucaagccggaaauagcaauaagacccaaagugagggaucaagaagggagaaugaacuauuacuggacacuaguagagccgggagacaaaauaacauucgaagcaacuggaaaucuagugguaccgagauaugcauucacaauggaaagaaauacuggaucugguauuaucauuucagauacaccaguccacgauugcaauacaacuugucagacacccgagggugcuauaaacaccagccucaccagccucccauuucagaauauacauccgaucacaauuggaaaauguccaaaguauguaaaaagcacaaaauugagacuggccacaggauugaggaaugucccaucuauucaaucuagaggccuauucggggccauugccggcuucauugaagggggguggacagggaugguagauggaugguacgguuaucaccaucaaaaugagcaggggucaggauaugcagccgaccugaagagcacacaaaaugccauugacaaaauuacuaacaaaguaaauucuguuauugaaaagaugaauacacaguucacagcaguggguaaagaguucaaccacuuggaaaaaagaauagagaauuuaaauaaaaaaguugaugaugguuuccuggacauuuggacuuacaaugccgaacugcugguucuauuggaaaaugaaagaacuuuggacuaccacgauucaaaugugaagaacuuguaugaaaagguaagaaaccaguuaaaaaacaaugccaaggaaauuggaaacggcugcuuugaauuuuaccacaaaugcgauaacacgugcauggaaagugucaaaaaugggacuuaugacuacccaaaauacucagaggaagcaaaauuaaacagagaaaaaauagaugggguaaagcuggaaucaacaaggauuuaccagauuuuggcgaucuauucaacugucgccaguucauugguacugguagucucccugggggcaaucagcuucuggaugugcucuaaugggucucuacaguguagaauauguauuuaa

SEQ ID NO: 44758 - RNA, 1701 nt, Artificial Sequence
  derived and/or modified CDS sequence (wt) from hemagglutinin__InfluenzaA__AIM56623
augaaggcaauacuaguaguucugcuauacacauuugcaaccgcaaaugcagacacauuauguauagguuaucaugcgaacaauucaacagacacuguagacacaguacuagaaaagaauguaacaguaacacacucuguuaaccuucuagaagacaagcauaacgggaaacuaugcaaacuaagagggguagccccauugcauuuggguaaauguaacauugcuggcuggauccugggaaauccagagugugaaucacucuccacagcaaguucaugguccuacauuguggaaacaucuaguucagacaauggaacguguuacccaggagauuucaucaauuaugaggagcuaagagagcaauugagcucagugucaucauuugaaagauuugagauauuccccaagacaaguucauggcccaaucaugacucgaacaaagguguaacggcagcauguccucacgcuggagcaaaaagcuucuacaaaaauuuaacauggcuaguuaaaaaaggaaauucauacccaaagcucagccaauccuacauuaaugauaaagggaaagaaguccucgugcuguggggcauucaccauccaucuacuacugcugaccaacaaagucucuaucagaaugcagaugcauauguuuucguggggacaucaagauacagcaagaaguucaagccggaaauagcaauaagacccaaagugagggaucaagaagggagaaugaacuauuacuggacacuaguagagccgggagacaaaauaacauucgaagcaacuggaaaucuagugguaccgagauaugcauucacaauggaaagaaaugcuggaucugguauuaucauuucagauacaccaguccacgauugcaauacaacuugucagacacccgagggugcuauaaacaccagccucccauuucagaauauacauccgaucacaauuggaaaauguccaaaguauguaaaaagcacaaaauugagacuggccacaggauugaggaaugucccaucuauucaaucuagaggccuauucggggccauugccggcuucauugaagggggguggacagggaugguagauggaugguacgguuaucaccaucaaaaugagcaggggucaggauaugcagccgaccugaagagcacacaaaaugccauugacaaaauuacuaacaaaguaaauucuguuauugaaaagaugaauacacaguucacagcaguggguaaagaguucaaccacuuggaaaaaagaauagagaauuuaaauaaaaaaguugaugaugguuuccuggacauuuggacuuacaaugccgaacugcugguucuauuggaaaaugaaagaacuuuggacuaccacgauucaaaugugaagaacuuguaugaaaagguaagaaaccaguuaaaaaacaaugccaaggaaauuggaaacggcugcuuugaauuuuaccacaaaugcgauaacacgugcauggaaagugucaaaaaugggacuuaugacuacccaaaauacucagaggaagcaaaauuaaacagagaaaaaauagaugggguaaagcuggaaucaacaaggauuuaccagauuuuggcgaucuauucaacugucgccaguucauugguacugguagucucccugggggcaaucagcuucuggaugugcucuaaugggucucuacaguguagaauauguauuuaa

SEQ ID NO: 44759 - RNA, 1701 nt, Artificial Sequence
  derived and/or modified CDS sequence (wt) from hemagglutinin__InfluenzaA__AIM56634
augaaggcaauacuaguaguucugcuauauacauuugcaaccgcaaaugcagacacauuauguauagguuaucaugcgaacaauucaacagacacuguagacacaguacuagaaaagaauguaacaguaacacacucuguuaaccuucuagaagacaagcauaacgggaaacuaugcaaacuaagagggguagccccauugcauuuggguaaauguaacauugcuggcuggauccugggaaauccagagugugaaucacucuccacagcaaauucaugguccuacauuguggaaacaucuaguucagacaauggaacguguuacccaggagauuucaucaauuaugaggagcuaagagagcaauugagcucagugucaucauuugaaagguuugagauauuccccaagacaaguucauggcccaaucaugacucgaacaaagguguaacggcagcauguccucacgcuggagcaaaaagcuucuacaaaaauuuaauauggcuaguuaaaaaaggaaauucauacccaaagcucagccaauccuacauuaaugauaaagggaaagaaguccucgugcuguggggcauucaccacccaucuacuacugcugaccaacaaagucucuaucagaaugcagaugcauauguuuuuguggggacaucaagauacagcaagaaguucaagccggaaauagcaauaagacccaaagugagggaucaagaagggagaaugaacuacuacuggacacuaguagagccgggagacaaaauaacauucgaagcaacuggaaaucuagugguaccgagauaugcauucacaauggaaagaaaugcuggaucugguauuaucauuucagauacaccaguccacgauugcaauacaacuugucagacacccgagggugcuauaaacaccagccucccauuucagaauauacauccgaucacaauuggaaaauguccaaaguauguaaaaagcacaaaauugagacuggccacaggauugaggaaugucccgucuauucaaucuagaggccuauucggggccauugccggcuucauugaagggggguggacagggaugguagauggaugguacgguuaucaccaucaaaaugagcaggggucaggauaugcagccgaccugaagagcacacaaaaugccauugacaagauuacuaacaaaguaaauucuguuauugaaaagaugaauacacaguucacagcaguggguaaagaguucaaccaccuggaaaaaagaauagagaauuuaaauaaaaaaguugaugaugguuuccuggacauuuggacuuacaaugccgaacuguugguucuauuggaaaaugaaagaacuuuggacuaccacgauucaaaugugaagaacuuguaugaaaagguaagaaaccaguuaaaaaacaaugccaaggaaauuggaaacggcugcuuugaauuuuaccacaaaugcgauaacacgugcauggaaagugucaaaaaugggacuuaugacuacccaaaauacucagaggaggcaaaauuaaacagagaaaaaauagaugggguaaaacuggaaucaacaaggauuuaccagauuuuggcgaucuauucaacugucgccaguucguugguacugguagucucccugggggcaaucagcuucuggaugugcucuaaugggucucuacaguguagaauauguauuuaa

SEQ ID NO: 44760 - RNA, 1710 nt, Artificial Sequence
  derived and/or modified CDS sequence (wt) from hemagglutinin__InfluenzaA__AIM56645
augaaggcaauacuaguaguucugcuauauacauuugcaaccgcaaaugcagacacauuauguauagguuaucaugcgaacaauucaacagacacuguagacacaguacuagaaaagaauguaacaguaacacacucuguuaaccuucuagaagacaagcauaacgggaaacuaugcaaacuaagagggguagccccauugcauuuggguaaauguaacauugcuggcuggauccugggaaauccagagugugaaucacucuccacagcaaguucaugguccuacauuguggaaacaucuaguucagacaauggaacguguuacccaggagauuucaucaauuaugaggagcuaagagagcaauugagcucagugucaucauuugaaagguuugagauauuccccaagacaaguucauggcccaaucaugacucgaacaaagguguaacggcagcauguccucacgcuggagcaaaaagcuucuacaaaaauuuaauauggcuaguuaaaaaaggaaauucauacccaaagcucagccaauccuacauuaaugauaaagggaaagaaguccucgugcuguggggcauucaccauccaucuacuacugcugaccaacaaagucucuaucagaaugcagaugcauauguuuuuguggggacaucaagauacagcaagaaguucaagccggaaauagcaauaagacccaaagugagggaucaagaagggagaaugaacuauuacuggacacuaguagagccgggagacaaaauaacauucgaagcaacuggaaaucuagugguaccgagauaugcauucacaauggaaagaaaugcuggaucugguauuaucauuucagauacaccaguccacgauugcaauacaacuugucagacacccgagggugcuauaaacaccagccucaccagccucccauuucagaauauacauccgaucacaauuggaaaauguccaaaguauguaaaaagcacaaaauugagacuggccacaggauugaggaaugucccgucuauucaaucuagaggccuauucggggccauugccggcuucauugaagggggguggacagggaugguagauggaugguacgguuaucaccaucaaaaugagcaggggucaggauaugcagccgaccagaagagcacacaaaaugccauugacaagauuacuaacaaaguaaacucuguuauugaaaagaugaauacacaguucacagcaguggguaaagaguucaaccaccuggaaaaaagaauagagaauuuaaauaaaaaaguugaugaugguuuccuggacauuuggacuuacaaugccgaacuguugguucuauuggaaaaugaaagaacuuuggacuaccacgauucaaaugugaagaacuuguaugaaaagguaagaaaccaguuaaaaaacaaugccaaggaaauuggaaacggcugcuuugaauuuuaccacaaaugcgauaacacgugcauggaaagugucaaaaaugggacuuaugacuacccaaaauacucagaggaagcaaaauuaaacagagaaaaaauagaugggguaaagcuggaaucaacaaggauuuaccagauuuuggcgaucuauucaacugucgccaguucauugguacugguagucucccugggggcaaucagcuucuggaugugcucuaaugggucucuacaguguagaauauguauuuaa

SEQ ID NO: 44761 - RNA, 1701 nt, Artificial Sequence
  derived and/or modified CDS sequence (wt) from hemagglutinin__InfluenzaA__AIM56656
augaaggcaauacuaguaguucugcuauauacauuugcaaccgcaaaugcagacacauuauguauagguuaucaugcgaacaauucaacagacacuguagacacaguacuagaaaagaauguaacaguaacacacucuguuaaccuucuagaagacaagcauaacgggaaacuaugcaaacuaagagggguagccccauugcauuuggguaaauguaacauugcuggcuggauccugggaaauccagagugugaaucacucuccacagcaaguucaugguccuacauuguggaaacaucuaguucagacaauggaacguguuacccaggagauuucaucaauuaugaggagcuaagagagcaauugagcucagugucaucauuugaaagguuugagauauuccccaagacaaauucauggcccaaucaugacucgaacaaagguguaacagcagcauguccucacgcuggagcaaaaagcuucuacaaaaauuuaauauggcuaguuaaaaaaggaaauucauacccaaagcucagccaauccuacauuaaugauaaagggaaagaaguccucgugcuguggggcauucaccacccaucuacuacugcugaccaacaaagucucuaucagaaugcagaugcauauguuuuuguggggacaucaagauacagcaagaaguucaagccggaaauagcaauaagacccaaagugagggaucaagaagggagaaugaacuauuacuggacauuaguagagccgggagacaaaauaacauucgaagcaacuggaaauauagugguaccgagauaugcauucacaauggaaagaaaugcuggaucugguauuaucauuucagauacaccaguccacgauugcaauacaacuugccagacacccgagggugcuauaaacaccagccucccauuucagaauauacauccgaucacaauuggaaaauguccaaaguauguaaaaagcacaaaauugagacuggccacaggauugaggaaugucccgucuauucaaucuagaggccuauucggggccauugccggcuucauugaaggaggguggacagggaugguagauggaugguacgguuaucaccaucaaaaugagcaggggucaggauaugcagccgaccugaagagcacacaaaaugccauugacaagauuacuaacaaaguaaauucuguuauugaaaagaugaauacacaguucacagcaguggguaaagaguucaaccaccuggaaaaaagaauagagaauuuaaauaaaaaaguugaugaugguuuccuggacauuuggacuuacaaugccgaacuguugguucuauuggaaaaugaaagaacuuuggacuaccacgauucaaaugugaagaacuuguaugaaaagguaagaaaccaguuaaaaaacaaugccaaggaaauuggaaacggcugcuuugaauuuuaccacaaaugcgauaacacgugcauggaaagugucaaaaaugggacuuaugacuacccaaaauacucagaggaagcaaaauuaaacagagaaaaaauagaugggguaaagcuggaaucaacaaggauuuaccagauuuuggcgaucuauucaacugucgccaguucauugguacugguagucucccugggggcaaucagcuucuggaugugcucuaaugggucucuacaguguagaauauguauuuaa

SEQ ID NO: 44762 - RNA, 1701 nt, Artificial Sequence
  derived and/or modified CDS sequence (wt) from hemagglutinin__InfluenzaA__AIM56667
augaaggcaauacuaguaguucugcuauacacauuugcaaccgcaaaugcagacacauuauguauagguuaucaugcgaacaauucaacagacacuguagacacaguacuagaaaagaauguaacaguaacacacucuguuaaccuucuagaagacaagcauaacgggaaacuaugcaaacuaagagggguagccccauugcauuuggguaaauguaacauugcuggcuggauccugggaaauccagagugugaaucacucuccacagcaaguucaugguccuacauuguggaaacaucuaguucagacaauggaacguguuacccaggagauuucaucaauuaugaggagcuaagagagcaauugagcucagugucaucauuugaaagauuugagauauuccccaagacaaguucauggcccaaucaugacucgaacaaagguguaacggcagcauguccucacgcuggagcaaaaagcuucuacaaaaauuuaauauggcuaguuaaaaaaggaaauucauacccaaagcucagccaauccuacauuaaugauaaagggaaagaaguccucgugcuguggggcauucaccauccaucuacuacugcugaccaacaaagucucuaucagaaugcagaugcauauguuuucguggggacaucaagauacagcaagaaguucaagccggaaauagcaauaagacccaaagugagggaucaagaagggagaaugaacuauuacuggacacuaguagagccgggagacaaaauaacauucgaagcaacuggaaaucuggugguaccgagauaugcauucacaauggaaagaaaugcuggaucugguauuaucauuucagauacaccaguccacgauugcaauacaacuugucagacacccgagggugcuauaaacaccagccucccauuucagaauauacauccgaucacaauuggaaaauguccaaaguauguaaaaagcacaaaauugagacuggccacaggauugaggaaugucccaucuauucaaucuagaggccuauucggggccauugccggcuucauugaagggggguggacagggaugguagauggaugguacgguuaucaccaucaaaaugagcaggggucaggauaugcagccgaccugaagagcacacaaaaugccauugacaaaauuacuaacaaaguaaauucuguuauugaaaagaugaauacacaguucacagcaguggguaaagaguucaaccacuuggaaaaaagaauagagaauuuaaauaaaaaaguugaugaugguuuccuggacauuuggacuuacaaugccgaacugcugguucuauuggaaaaugaaagaacuuuggacuaccacgauucaaaugugaagaacuuguaugaaaagguaagaaaccaguuaaaaaacaaugccaaggaaauuggaaacggcugcuuugaauuuuaccacaaaugcgauaacacgugcauggaaagugucaaaaaugggacuuaugacuacccaaaauacucagaggaagcaaaauuaaacagagaaaaaauagaugggguaaagcuggaaucaacaaggauuuaccagauuuuggcgaucuauucaacugucgccaguucauugguacugguagucucccugggggcaaucagcuucuggaugugcucuaaugggucucuacaguguagaauauguauuuaa

SEQ ID NO: 44763 - RNA, 1701 nt, Artificial Sequence
  derived and/or modified CDS sequence (wt) from hemagglutinin__InfluenzaA__AIM56678
augaaggcaauacuaguaguucugcuauacacauuugcaaccgcaaaugcagacacauuauguauagguuaucaugcgaacaauucaacagacacuguagacacaguacuagaaaagaauguaacaguaacacacucuguuaaccuucuagaagacaagcauaacgggaaacuaugcaaacuaagagggguacccccauugcauuuggguaaauguaacauugcuggcuggauccugggaaauccagagugugaaucacucuccacagcaaguucaugguccuacauuguggaaacaucuaguucagacaauggaacguguuacccaggagauuucaucaauuaugaggagcuaagagagcaauugagcucagugucaucauuugaaagauuugagauauuccccaagacaaguucauggcccaaucaugacucgaacaaagguguaacggcagcauguccucacgcuggagcaaaaagcuucuacaaaaauuuaauauggcuaguuaaaaaaggaaauucauacccaaagcucagccaauccuacauuaaugauaaagggaaagaaguccucgugcuguggggcauucaccauccaucuacuacugcugaccaacaaagucucuaucagaaugcagaugcauauguuuuuguggggacaucaagauacagcaagaaguucaagccggaaauagcaauaagacccaaagugagggaucaagaagggagaaugaacuauuacuggacacuaguagagccgggagacaaaauaacauucgaagcaacuggaaaucuagugguaccgagauaugcauucacaauggaaagaaaugcuggaucuggcauuaucauuucagauacaccaguccacgauugcaauacaacuugucagacacccgagggugcuauaaacaccagccucccauuucagaauauacauccgaucacaauuggaaaauguccaaaguauguaaaaagcacaaaauugagacuggccacaggauugaggaaugucccaucuauucaaucuagaggccuauucggggccauugccggcuucauugaagggggguggacagggaugguagauggaugguacgguuaucaccaucaaaaugagcaggggucaggauaugcagccgaccugaagagcacacaaaaugccauugacaaaauuacuaacaaaguaaauucuguuauugaaaagaugaauacacaguucacagcaguggguaaagaguucaaccacuuggaaaaaagaauagagaauuuaaauaaaaaaguugaugaugguuuccuggacauuuggacuuacaaugccgaacugcugguucuauuggaaaaugaaagaacuuuggacuaccacgauucaaaugugaagaacuuguaugaaaagguaagaaaccaguuaaaaaacaaugccaaggaaauuggaaacggcugcuuugaauuuuaccacaaaugcgauaacacgugcauggaaagugucaaaaaugggacuuaugacuacccaaaauacucagaggaagcaaaauuaaacagagaaaaaauagaugggguaaagcuggaaucaacaaggauuuaccagauuuuggcgaucuauucaacugucgccaguucauugguacugguagucucccugggggcaaucagcuucuggaugugcucuaaugggucucuacaguguagaauauguauuuaa

SEQ ID NO: 44764 - RNA, 1701 nt, Artificial Sequence; identical to SEQ ID NO: 44400
  derived and/or modified CDS sequence (wt) from hemagglutinin__InfluenzaA__AIM56689

SEQ ID NO: 44765 - RNA, 1701 nt, Artificial Sequence
  derived and/or modified CDS sequence (wt) from hemagglutinin__InfluenzaA__AIM56700
augaaggcaauacuaguaguucugcuauacacauuugcaaccgcaaaugcagacacauuauguauagguuaucaugcgaacaauucaacagacacuguagacacaguacuagaaaagaauguaacaguaacacacucuguuaaccuucuagaagacaagcauaacgggaaacuaugcaaacuaagagggguagccccauugcauuuggguaaauguaacauugcuggcuggauccugggaaauccagagugugaaucacucuccacagcaaguucaugguccuacauuguggaaacaucuaguucagacaauggaacguguuacccaggagauuucaucaauuaugaggagcuaagagagcaauugagcucagugucaucauuugaaagauuugagauauuccccaagacaaguucauggcccaaucaugacucgaacaaagguguaacggcagcauguccucacgcuggagcaaaaagcuucuacaaaaauuuaauauggcuaguuaaaaaaggaaauucauacccaaagcucagccaaucuuacauuaaugauaaagggaaagaaguccucgugcuguggggcauucaccauccaucuacuacugcugaccaacaaagucucuaucagaaugcagaugcauauguuuucguggggacaucaagauacagcaagaaguucaagccggaaauagcaauaagacccaaagugagggaucaagaagggagaaugaacuauuacuggacacuaguagagccgggagacaaaauaacauucgaagcaacuggaaaucuagugguaccgagauaugcauucacaauggaaagaaaugcuggaucugguauuaucauuucagauacaccaguccacgauugcaauacaacuugucagacacccgagggugcuauaaacaccagccucccauuucagaauauacauccgaucacaauuggaaaauguccaaaguauguaaaaagcacaaaauugagacuggccacaggauugaggaaugucccaucuauucaaucuagaggccuauucggggccauugccggcuucauugaagggggguggacagggaugguagauggaugguacgguuaucaccaucaaaaugagcaggggucaggauaugcagccgaccugaagagcacacaaaaugccauugacaaaauuacuaacaaaguaaauucuguuauugaaaagaugaauacacaguucacagcaguggguaaagaguucaaccacuuggaaaaaagaauagagaauuuaaauaaaaagguugaugaugguuuccuggacauuuggacuuacaaugccgaacugcugguucuauuggaaaaugaaagaacuuuggacuaccacgauucaaaugugaagaacuuguaugaaaagguaagaaaccaguuaaaaaacaaugccaaggaaauuggaaacggcugcuuugaauuuuaccacaaaugcgauaacacgugcauggaaagugucaaaaaugggacuuaugacuacccaaaauacucagaggaagcaaaauuaaacagagaaaaaauagaugggguaaagcuggaaucaacaaggauuuaccagauuuuggcgaucuauucaacugucgccaguucauugguacugguagucucccugggggcaaucagcuucuggaugugcucuaaugggucucuacaguguagaauauguauuuaa

SEQ ID NO: 44766 - RNA, 1710 nt, Artificial Sequence
  derived and/or modified CDS sequence (wt) from hemagglutinin__InfluenzaA__AIM56711
augaaggcaauacuaguaguucugcuauacacauuugcaaccgcaaaugcagacacauuauguauagguuaucaugcgaacaauucaacagacacuguagacacaguacuagaaaagaauguaacaguaacacacucuguuaaccuucuagaagacaagcauaacgggaaacuaugcaaacuaagagggguacccccauugcauuuggguaaauguaacauugcuggcuggauccugggaaauccagagugugaaucacucuccacagcaaguucaugguccuacauuguggaaacaucuaguucagacaauggaacguguuacccaggagauuucaucaauuaugaggagcuaagagagcaauugagcucagugucaucauuugaaagauuugagauauuccccaagacaaguucauggcccaaucaugacucgaacaaagguguaacggcagcauguccucacgcuggagcaaaaagcuucuacaaaaauuuaauauggcuaguuaaaaaaggaaauucauacccaaagcucagccaauccuacauuaaugauaaagggaaagaaguccucgugcuguggggcauucaccauccaucuacuacugcugaccaacaaagucucuaucagaaugcagaugcauauguuuuuguggggacaucaagauacagcaagaaguucaagccggaaauagcaauaagacccaaagugagggaucaagaagggagaaugaacuauuacuggacacuaguagagccgggagacaaaauaacauucgaagcaacuggaaaucuagugguaccgagauaugcauucacaauggaaagaaaugcuggaucuggcauuaucauuucagauacaccaguccacgauugcaauacaacuugucagacacccgagggugcuauaaacaccagccucaccagccucccauuucagaauauacauccgaucacaauuggaaaauguccaaaguauguaaaaagcacaaaauugagacuggccacaggauugaggaaugucccaucuauucaaucuagaggccuauucggggccauugccggcuucauugaagggggguggacagggaugguagauggaugguacgguuaucaccaucaaaaugagcaggggucaggauaugcagccgaccugaagagcacacaaaaugccauugacaaaauuacuaacaaaguaaauucuguuauugaaaagaugaauacacaguucacagcaguggguaaagaguucaaccacuuggaaaaaagaauagagaauuuaaauaaaaaaguugaugaugguuuccuggacauuuggacuuacaaugccgaacugcugguucuauuggaaaaugaaagaacuuuggacuaccacgauucaaaugugaagaacuuguaugaaaagguaagaaaccaguuaaaaaacaaugccaaggaaauuggaaacggcugcuuugaauuuuaccacaaaugcgauaacacgugcauggaaagugucaaaaaugggacuuaugacuacccaaaauacucagaggaagcaaaauuaaacagagaaaaaauagaugggguaaagcuggaaucaacaaggauuuaccagauuuuggcgaucuauucaacugucgccaguucauugguacugguagucucccugggggcaaucagcuucuggaugugcucuaaugggucucuacaguguagaauauguauuuaa

SEQ ID NO: 44767 - RNA, 1701 nt, Artificial Sequence; identical to SEQ ID NO: 44400
  derived and/or modified CDS sequence (wt) from hemagglutinin__InfluenzaA__AIM56722

SEQ ID NO: 44768 - RNA, 1701 nt, Artificial Sequence; identical to SEQ ID NO: 44765
  derived and/or modified CDS sequence (wt) from hemagglutinin__InfluenzaA__AIM56733

SEQ ID NO: 44769 - RNA, 1701 nt, Artificial Sequence
  derived and/or modified CDS sequence (wt) from hemagglutinin__InfluenzaA__AIM56744
augaaggcaauacuaguaguucugcuauacacauuugcaaccgcaaaugcagacacauuauguauagguuaucaugcgaacaauucaacagacacuguagacacaguacuagaaaagaauguaacaguaacacacucuguuaaccuucuagaagacaagcauaacgggaaacuaugcaaacuaagagggguagccccauugcauuuggguaaauguaacauugcuggcuggauccugggaaauccagagugugaaucacucuccacagcaaguucaugguccuacauuguggaaacaucuaguucagacaauggaacguguuacccaggagauuucaucaauuaugaggagcuaagagagcaauugagcucagugucaucauuugaaagauuugagauauuccccaagacaaguucauggcccaaucaugacucgaacaaagguguaacggcagcauguccucacgcuggagcaaaaagcuucuacaaaaauuuaauauggcuaguuaaaaaaggaaauucauacccaaagcucagccaauccuacauuaaugauaaagggaaagaaguccucgugcuguggggcauucaccauccaucuacuacugcugaccaacaaagucucuaucagaaugcagaugcauauguuuucguggggacaucaagauacagcaagaaguucaagccggaaauagcaauaagacccaaagugagggaucaagaagggagaaugaacuauuacuggacacuaguagagccgggagacaaaauaacauucgaagcaacuggaaaucuagugguaccgagauaugcauucacaauggaaagaaaugcuggaucugguauuaucauuucagauacaccaguccacgauugcaauacaacuugucagacacccgagggugcuauaaacaccagccucccauuucagaauauacauccgaucacaauuggaaaauguccaaaguauguaaaaagcacaaaauugagacuggccacaggauugaggaaugucccaucuauucaaucuagaggccuauucggggccauugccggcuucauugaagggggguggacagggaugguagauggaugguacgguuaucaccaucaaaaugagcaggggucaggauaugcagccgaccugaagagcacacaaaaugccauugacaaaauuacuaacaaaguaaauucuguuauugaaaagaugaauacacaguucacagcaguggguaaagaguucaaccacuuggaaaaaagaauagagaauuuaaauaaaaaaguugaugaugguuuccuggacauuuggacuuacaaugccgaacugcugguucuauuggaaaaugaaagaacuuuggacuaccacgauucaaaugugaagaacuuguaugaaaagguaagaaaccaguuaaaaaacaaugccaaggaaauuggaaacggcugcuuugaauuuuaccacaaaugcgacaacacgugcauggaaagugucaaaaaugggacuuaugacuacccaaaauacucagaggaagcaaaauuaaacagagaaaaaauagaugggguaaagcuggaaucaacaaggauuuaccagauuuuggcgaucuauucaacugucgcaaguucauugguacugguagucucccugggggcaaucagcuucuggaugugcucuaaugggucucuacaguguagaauauguauuuaa

SEQ ID NO: 44770 - RNA, 1701 nt, Artificial Sequence
  derived and/or modified CDS sequence (wt) from hemagglutinin__InfluenzaA__AIM56755
augaaggcaauacuaguaguucugcuauacacauuugcaaccgcaaaugcagacacauuauguauagguuaucaugcgaacaauucaacagacacuguagacacaguacuagaaaagaauguaacaguaacacacucuguuaaccuucuagaagacaagcauaacgggaaacuaugcaaacuaagagggguagccccauugcauuuggguaaauguaacauugcuggcuggauccugggaaauccagagugugaaucacucuccacagcaaguucaugguccuacauuguggaaacaucuaguucagacaauggaacguguuacccaggagauuucaucaauuaugaggagcuaagagagcaauugagcucagugucaucauuugaaagauuugagauauuccccaagacaaguucauggcccagucaugacucgaacaaaggugugacggcagcauguccucacgcuggagcaaaaagcuucuacaaaaauuuaauauggcuaguuaaaaaaggaaauucauacccaaagcucagccaauccuacauuaaugauaaagggaaagaaguccucgugcuguggggcauucaccauccaucuacuacugcugaccaacaaagucucuaucagaaugcagaugcauauguuuucguggggacaucaagauacagcaagaaguucaagccggaaauagcaauaagacccaaagugagggaucaagaagggagaaugaacuauuacuggacacuaguagagccgggagacaaaauaacauucgaagcaacuggaaaucuagugguaccgagauaugcauucacaauggaaagaaaugcuggaucugguauuaucauuucagauacaccaguccacgauugcaauacaacuugucagacacccgagggugcuauaaacaccagccucccauuucagaauauacauccgaucacaauuggaaaauguccaaaguauguaaaaagcacaaaauugagacuggccacaggauugaggaaugucccaucuauucaaucuagaggccuauucggggccauugccggcuucauugaagggggguggacagggaugguagauggaugguacgguuaucaccaucaaaaugagcaggggucaggauaugcagccgaccugaagagcacacaaaaugccauugacaaaauuacuaacaaaguaaauucuguuauugaaaagaugaauacacaguucacagcaguggguaaagaguucaaccacuuggaaaaaagaauagagaauuuaaauaaaaaaguugaugaugguuuccuggacauuuggacuuacaaugccgaacugcugguucuauuggaaaaugaaagaacuuuggacuaccacgauucaaaugugaagaacuuguaugaaaagguaagaaaccaguuaaaaaacaaugccaaggaaauuggaaacggcugcuuugaauuuuaccacaaaugcgauaacacgugcauggaaagugucaaaaaugggacuuaugacuacccaaaauacucagaggaagcaaaauuaaacagagaaaaaauagaugggguaaagcuggaaucaacaaggauuuaccagauuuuggcgaucuauucaacugucgccaguucauugguacugguagucucccugggggcaaucagcuucuggaugugcucuaaugggucucuacaguguagaauauguauuuga

SEQ ID NO: 44771 - RNA, 1710 nt, Artificial Sequence
  derived and/or modified CDS sequence (wt) from hemagglutinin__InfluenzaA__AIM56766
augaaggcaauacuaguaguucugcuauacacauuugcaaccgcaaaugcagacacauuauguauagguuaucaugcgaacaauucaacagacacuguagacacaguacuagaaaagaauguaacaguaacacacucuguuaaccuucuagaagacaagcauaacgggaaacuaugcaaacuaagagggguagccccauugcauuuggguaaauguaacauugcuggcuggauccugggaaauccagagugugaaucacucuccacagcaaguucaugguccuacauuguggaaacaucuaguucagacaauggaacguguuacccaggagauuucaucaauuaugaggagcuaagagagcaauugagcucagugucaucauuugaaagauuugagauauuccccaagacaaguucauggcccaaucaugacucgaacaaagguguaacggcagcauguccucacgcuggagcaaaaagcuucuacaaaaauuuaauauggcuaguuaaaaaaggaaauucauacccaaagcucagccaauccuacauuaaugauaaagggaaagaaguccucgugcuguggggcauucaccauccaucuacuacugcugaccagcaaagucucuaucagaaugcagaugcauauguuuucguggggacaucaagauacagcaagaaguucaagccggaaauagcaauaagacccaaagugagggaucaagaagggagaaugaacuauuacuggacacuaguagagccgggagacaaaauaacauucgaagcaacuggaaaucuagugguaccgagauaugcauucacaauggaaagaaaugcuggaucugguauuaucauuucagauacaccaguccacgauugcaauacaacuugucagacacccgagggugcuauaaacaccagccucaccagccucccauuucagaauauacauccgaucacaauuggaaaauguccaaaguauguaaaaagcacaaaauugagacuggccacaggauugaggaaugucccaucuauucaaucuagaggccuauucggggccauugccggcuucauugaagggggguggacagggaugguagauggaugguacgguuaucaccaucaaaaugagcaggggucaggauaugcagccgaccugaagagcacacaaaaugccauugacaaaauuacuaacaaaguaaauucuguuauugaaaagaugaauacacaguucacagcaguggguaaagaguucaaccacuuggaaaaaagaauagagaauuuaaauaaaaagguugaugaugguuuccuggacauuuggacuuacaaugccgaacugcugguucuauuggaaaaugaaagaacuuuggacuaccacgauucaaaugugaagaacuuguaugaaaagguaagaaaccaguuaaaaaacaaugccaaggaaauuggaaacggcugcuuugaauuuuaccacaaaugcgauaacacgugcauggaaagugucaaaaaugggacuuaugacuacccaaaauacucagaggaagcaaaauuaaacagagaaaaaauagaugggguaaagcuggaaucaacaaggauuuaccagauuuuggcgaucuauucaacugucgccaguucauugguacugguagucucccugggggcaaucagcuucuggaugugcucuaaugggucucuacaguguagaauauguauuuaa

SEQ ID NO: 44772 - RNA, 1701 nt, Artificial Sequence
  derived and/or modified CDS sequence (wt) from hemagglutinin__InfluenzaA__AIM56777
augaaggcaauacuaguaguucugcuauauacauuugcaaccgcaaaugcagacacauuauguauagguuaucaugcgaacaauucaacagauacuguagacacaguacuagaaaagaauguaacaguaacacacucuguuaaccuucuagaaggcaagcauaacgggaaacuaugcaaacuaagagggguagccccauugcauuuggguaaauguaacauugcuggcuggauccugggaaauccagagugugaaucacucuccacagcaaguucaugguccuacauuguggaaacaucuaguucagacaauggaacauguuacccaggagauuucaucaauuaugaggagcuaagagagcaauugagcucagugucaucauuugaaagguuugagauauuccccaagacgaguucauggcccaaucaugacucgaacaaagguguaacggcagcauguccucacgcuggagcaaaaagcuucuacaaaaauuuaauauggcuaguuaaaaagggaaauucauacccaaagcucagccaauccuacauuaaugauaaagggaaagaaguccucgugcuguggggcauucaccauccaucuacuacugcugaccaacaaagucucuaucagaaugcagaugcauauguuuuuguggggacaucaagauacagcaagaaguucaagccggaaauagcaauaagacccaaagugagggaucaagaagggagaaugaacuauuacuggacacuaguagagccgggagacaaaauaacauucgaagcaacuggaaaucuagugguaccgagauaugcauucacaauggaaagaaaugcuggaucugguauuaucauuucagauacaccaguccacgauugcaauacaacuugucagacacccgaaggugcuauaaacaccagccucccauaucagaauauacauccgaucacaauuggaaaauguccaaaguauguaaaaagcacaaaauugagacuggccacaggauugaggaaugucccgucuauucaaucuagaggccuauucggggccauugccggcuucauugaagggggguggacagggaugguagauggaugguacgguuaucaccaucaaaaugagcaggggucaggauaugcagccgaccugaagagcacacaaaaugccauugacaagauuacuaacaaaguaaauucuguuauugaaaagaugaauacacaguucacagcaguggguaaagaguucaaccaccuggaaaaaagaauagagaauuuaaauaaaaaaguugaugaugguuuccuggacauuuggacuuacaaugccgaacuguugguucuauuggaaaaugaaagaacuuuggacuaccaugauucaaaugugaagaacuuguaugaaaagguaagaaaccaguuaaaaaacaaugccaaggaaauuggaaacggcugcuuugaauuuuaccacaaaugcgauaacacgugcauggaaagugucaaaaaugggacuuaugacuacccaaaauacucagaggaagcaaaauuaaacagagaaaaaauagaugggguaaagcuggaaucaacaaggauuuaccagauuuuggcgaucuauucaacugucgccaguucauugguacugguagucucccugggggcaaucagcuucuggaugugcucuaaugggucucuacaguguagaauauguauuuaa

SEQ ID NO: 44773 - RNA, 1701 nt, Artificial Sequence; identical to SEQ ID NO: 43032
  derived and/or modified CDS sequence (wt) from hemagglutinin__InfluenzaA__AIM56788

SEQ ID NO: 44774 - RNA, 1701 nt, Artificial Sequence; identical to SEQ ID NO: 43913
  derived and/or modified CDS sequence (wt) from hemagglutinin__InfluenzaA__AIM56799

SEQ ID NO: 44775 - RNA, 1701 nt, Artificial Sequence; identical to SEQ ID NO: 43913
  derived and/or modified CDS sequence (wt) from hemagglutinin__InfluenzaA__AIM56810

SEQ ID NO: 44776 - RNA, 1701 nt, Artificial Sequence; identical to SEQ ID NO: 43002
  derived and/or modified CDS sequence (wt) from hemagglutinin__InfluenzaA__AIM56821

SEQ ID NO: 44777 - RNA, 1683 nt, Artificial Sequence
  derived and/or modified CDS sequence (wt) from hemagglutinin__InfluenzaA__AIN76383
augaacacucaaauccugguauucgcucugauugcgaucguuccaacaaaugcagacaaaaucugccucggacaucaugccgugucaaacggaaccaaaguaaacacauuaacugaaagaggaguggaagucgucaaugcaacugaaacaguggaacgaacaaacauccccaggaucugcucaaaagggaaaaagacaguugaccuuggucaauguggacuacuggggacaaucacuggaccaccucaaugugaccaauuccuagaauuuucagccgauuuaauuauugagaggcgagaaggaagugaugucuguuauccuggaaaauucgugaaugaagaagcucugaggcaaauucucagagaaucaggcggaauugacaaggaagcaaugggauucacauacaguggaauaagaacuaauggaacaaccagugcauguaggagaucaggaucuucauucuaugcagaaaugaaauggcuccugucaaacacagauaaugcugcauucccgcagaugacuaagucauauaaaaauacaagaaaaagcccagcucuaauaguaugggggauccaucauuccguaucaacugcagagcaaaccaagcuauaugggaguggaaacaaacuggugacaguugggaguucuaauuaucaacaaucuuuuguaccgaguccaggagcgagaccacaaguuaauggucuaucuggaagaauugacuuucauuggcuaaugcuaaaucccaaugauacagucacuuucaguuucaauggggcuuucauagcuccagaccgugcaagcuuccugagaggaaaaucuaugggaauccagaguggaguacagguugaugccaauugugaaggggacugcuaucauaguggagggacaauaauaaguaacuugccauuucagaacauagauagcagggcaguuggaaaauguccgagauauguuaagcaaaagagucugcugcuagcaacagggaugaagaauguuccugagauuccaaagggaagaggccuauuuggugcuauagcagguuucauugaaaauggaugggaaggccuaauugaugguugguaugguuucagacaccagaaugcacagggagagggaacugcugcagauuacaaaagcacucaaucggcaauugaucaaauaacagggaaauuaaaccggcuuauagaaaaaaccaaccaacaauuugaguugauagacaaugaauucaaugagguagagaagcaaaucgguaaugugauaaauuggaccagagauucuauaacagaaguguggucauacaaugcugaacucuugguagcaauggagaaccagcauacaauugaucuggcugauucagaaauggacaaacuguacgaacgagugaaaagacagcugagagagaaugcugaagaagauggcacugguugcuuugaaauauuucacaagugugaugaugacuguauggccaguauuagaaauaacaccuaugaucacagcaaguacagggaagaggcaaugcaaaauagaauacagauugacccagucaaacuaagcagcggcuacaaagaugugauacuuugguuuagcuucggggcaucauguuucauacuucuagccauuguaaugggccuugucuucauauguguaaagaauggaaacaugcggugcacuauuuguauauaa

SEQ ID NO: 44778 - RNA, 1689 nt, Artificial Sequence
  derived and/or modified CDS sequence (wt) from hemagglutinin__InfluenzaA__AIP93103
auggccaucauuuaucucauacuccuguucacagcagugaggggggaccagauaugcauuggauaccaugccaauaauuccacagaaaaggucgacacaauucuagagcggaaugucacugugacucaugccaaggacauccuugagaagacccauaacggaaagcuaugcaaacuaaacggaauuccuccacuugaacuaggggauuguagcauugccggauggcuccuuggaaauccagaaugugauaggcuucuaagggugccagaaugguccuauauaauggagaaagaaaacccgagauacaguuuguguuauccaggcagcuucaaugacuaugaagaauugaaacaucuccucaguagcguaaaacacuucgagaaaguaaagauucugccaaaagauggauggacacagcaugagacagauggagguucaaaggccugcgcagugucagguaaaccaucauucuucaggaacauggucuggcugacaaagaaaggaccuaauuauccgguugccaaaagaucguacaacaauacgagcggagagcaaaugcuaauaauuuggggagugcaccauccuaaugaugaggcagaacaaagagcauuguaccagaacgugggaaccuauguuuccgcaagcacaucaacauugaacaaaaggucaaccccagaaauagcagcaaggccuaaagugaguggacuaggaaguagaauggaauucucuuggacccucuuggaugugugggacaccauaaguuuugagagcacugguaaucuaguugcaccagaguauggauucaaaauaucgaaaagagguaguucagggaucaugaagacagaaggaacacuugggaacugugagaccaaaugccaaacuccuuugggagcaauaaauacaacacuaccuuuucacaauguccauccacugacaauaggugaaugccccaaauauguaaaaucggagaaauuggucuuagcaacaggaccaaggaauguuccccagauugaaucaagaggauuguuuggggcaauagcuggcuuuauagaaggaggauggcaaggaaugguugauggcugguauggauaccaucacagcaaugaccagggaucaggguaugcagcagacaaagaauccacucaaaaggcauuugacagaaucaccaacaagguaaauucugugauugaaaagaugaacacccaauuugaagcuguugggaaagaauucaguaacuuagagaaaagacuggaaaacuugaacaaaaagauggaagauggguuucuagauguguggacauacaaugcugagcuucuaguucugauggaaaaugagaggacacuugacuuucaugauucuaaugucaagaaccuguaugauaaagucagaaugcagcugagagacaacgucaaagaacuaggaaauggauguuuugaauuuuaucauaaaugugacgaugaaugcaugaauagugugaaaaaugggacguaugauuaucccaaguaugaagaagaaucuaaacuaaagagaaaugaaaucaaaggggugaaauugagcagcauggggguuuaccaaauucuugccauuuaugcuacaguugcagguucucugucacuggcaaucaugauagcugggaucucuuucuggaugugcuccaacgggucucugcagugcagaaucugcauauga

SEQ ID NO: 44779 - RNA, 1689 nt, Artificial Sequence
  derived and/or modified CDS sequence (wt) from hemagglutinin__InfluenzaA__AIP93115
auggccaucauuuaucucauucuccuguucacagcagugagaggggaccagauaugcauuggauaccaugccaauaauuccacagagaaggucgacacaauucuagagcggaacgucacugugacucaugccaaggacauucuugagaagacccauaacggaaaguuaugcaaacuaaacggaaucccuccacuugaacuaggggacuguagcauugccggauggcuccuuggaaauccagaaugugauaggcuucuaagugugccagaaugguccuauauaauggagaaagaaaacccgagagacgguuuguguuauccaggcagcuucaaugauuaugaagaauugaaacaucuccucagcagcgugaaacauuucgagaaaguaaagauucugcccaaagauagauggacacagcauacaacaacuggagguucacgggccugcgcggugucugguaauccaucauucuucaggaacauggucuggcugacaaagaaaggaucaaauuauccgguugccaaaggaucguacaacaauacaagcggagaacaaaugcuaauaauuuggggggugcaccaucccaaugaugagacagaacaaagaacauuguaccagaaugugggaaccuauguuuccguaggcacaucaacauugaacaaaaggucaaccccagaaauagcaacaaggccuaaagugaauggacuaggagguagaauggaauucucuuggacccucuuggauaugugggacaccauaaauuuugagaguacugguaaucuaauugcaccagaguauggauucaaaauaucgaaaagagguaguucagggaucaugaaaacagaaggaacacuugagaacugugagaccaaaugccaaacuccuuugggagcaauaaauacaacauugccuuuucacaauguccacccacugacaauaggugagugccccaaauauguaaaaucggagaaguuggucuuagcaacaggacuaaggaauguuccccagauugaaucaagaggauuguuuggggcaauagcugguuuuauagaaggaggauggcaaggaaugguugaugguugguauggauaccaucacagcaaugaccagggaucaggguaugcagcagacaaagaauccacucaaaaggcauuugauggaaucaccaacaagguaaauucugugauugaaaagaugaacacccaauuugaagcuguugggaaagaauucaguaacuuagagagaagacuggagaacuugaacaaaaagauggaagacggguuucuagauguguggacauacaaugcugagcuucuaguucugauggaaaaugagaggacacuugacuuucaugauucuaaugucaagaaucuguaugauaaagucagaaugcagcugagagacaacgucaaagaacuaggaaauggauguuuugaauuuuaucacaaaugugaugaugaaugcaugaauagugugaaaaacgggacguaugauuaucccaaguaugaagaagagucuaaacuaaauagaaaugaaaucaaagggguaaaauugagcagcauggggguuuaucaaauccuugccauuuaugcuacaguagcagguucucugucacuggcaaucaugauggcugggaucucuuucuggaugugcuccaacgggucucugcagugcaggaucugcaucuga

SEQ ID NO: 44780 - RNA, 1701 nt, Artificial Sequence
  derived and/or modified CDS sequence (wt) from hemagglutinin__InfluenzaA__AIR93971
augaaggcaauacuaguaguucugcuauauacauuugcaaccacaaaugcagacauauuauguauagguuaucaugcgaacaauucaacagacacuguagacacaguacuagaaaagaauguaacaguaacacacucuguuaaccuucuagaagacaagcauaacgggaaacuaugcaaacuaagagggguagccccauugcauuuggguaaauguaacauugcuggcuggauccugggaaauccagagugugaaucacucuccacagcaagcucaugguccuacauuguggaaacaucuaguucagacaauggaacguguuacccaggagauuucaucgauuaugaggagcuaagagagcaauugagcucagugucaucauuugaaagguuugagauauuccccaagacaaguucauggcccaaucaugacucgaacaaagguguaacggcagcauguccucaugcuggagcaagaagcuucuacaaaaauuuaauauggcuaguuaaaaagggaaauucauacccaaagcucagcaaauccuacauuaaugauaaagggaaagaaguccucgugcuauggggcauucaccauccaucuacuagugcugaccaacaaagucucuaucagaaugcagaugcauauguuuuuguggggacaucaagauacagcaagaaguucaagccagaaauagcaauaagacccaaagugagggaucgagaagggagaaugaacuauuacuggacacuaguagagccgggagacaaaauaacauucgaagcaacuggaaaucuagugguaccgagauaugcauucgcaauggaaagaaaugcuggaucugguauuaucacuucagauacaccaguccacgauugcaauacaacuugucagacacccaagggugcuauaaacaccagccucccauuucagaauauacauccgaucacaauuggaaaauguccaaaauauguaaaaagcacaaaauugagacuggccacaggauugaggaauguuccgucuauucaaucuaggggccuauuuggggccauugccgguuucauugaagggggguggacagggaugguagauggaugguacgguuaucaccaucaaaaugagcaggggucaggguaugcagccgaccugaagagcacacagaaugccauugacgagauuacuaacaaaguaaauucuguuauugaaaagaugaauacacaguucacagcaguagguaaagaguucaaccaccuggagaaaagaauagagaauuuaaauaaaaagguugaugaugguuuccuggacauuuggacuuacaaugccgaacuguugguucuguuagaaaaugaaagaacuuuggacuaccacgauucaaaugugaagaacuuauaugaaaaggugagaagccaguuaaaaaacaaugccaaggaaauuggaaacggcugcuuugaauuuuaccacaaaugcgauaacacgugcauggaaagugucaaaaaugggacuuaugacuacccaaaauacucagaggaagcaaaauuaaacagagaagaaauagaugggguaaagcuggaaucaacaaggauuuaccagauuuuggcgaucuauucaacugucgccaguucauugguacugguagucucccugggggcaaucaguuucuggaugugcucuaaugggucucuacaguguagaauauguauuuaa

SEQ ID NO: 44781 - RNA, 1701 nt, Artificial Sequence
  derived and/or modified CDS sequence (wt) from hemagglutinin__InfluenzaA__AIR93982
augaaggcaauacuaguaguucugcuauacacaauugcaaccgcaaaugcagacacauuauguauagguuaucaugcgaacaauucaacagacacuguagacacgguacuagaaaagaauguaacaguaacacacucuguuaaccuucuagaagacaagcauaaugggaaacuaugcaaacuaagagggguagccccauugcauuuggguaaauguaacauugcuggcuggauccuaggaaauccagagugugaaucacucuccacagcaagcucaugguccuacauuguggaaacaucuaguucagacaauggaacguguuacccaggagauuucaucgauuaugaagagcuaagagagcaauugagcucagugucaucauuugaaagguuugagauauuccccaagacaaguucauggcccaaucaugacucgaacaaagguguaacggcagcauguccucaugcuggagcaagaagcuucuacaaaaauuuaauauggcuaguuaaaaaaggaaauucauacccaaagcucagcaaauccuacauuaaugauaaagggaaagaaguccuagugcuauggggcauucaccauccaucuacuagugcugaccaacaaagucucuaucagaaugcagaugcauauguuuuuguggggacaucaagauacagcaagaaguucaagccggaaauagcaauaagacccaaagugagggaucgagaagggagaaugaacuauuacuggacacuaguagagccgggagacaaaauaacauucgaagcaacuggaaaucuagugguaccgagauaugcauucacaauggaaagaaaugcuggaucugguauuaucauuucagauacaccaguucacgauugcaauacaacuugucagacacccaagggugcuauaaacaccagccucccauuucagaauauacauccgaucacaauuggaaaauguccaaaauauguaaaaagcacaaaauugagacuggccacaggauugaggaaugucccgucuauucaaucuagaggccuauuuggggccauugccgguuucauugaagggggguggacagggaugguagauggaugguacgguuaucaccaucaaaaugagcaggggucaggauaugcagccgaccugaagagcacacagaaugccauugacgagauuacuaacaaaguaaauucuguuauugaaaagaugaauacacaguucacagcaguagguaaagaguucaaccaucuggaaaaaagaauagagaauuuaaauaaaaaaguugaugaugguuuccuggacauuuggacuuacaaugccgaacuguugguucuauuggaaaaugaaagaacuuuggacuaccacgauucaaaugugaagaacuuauaugaaaagguaagaagccaauuaaaaaccaaugccaaggaaauuggaaacggcugcuuugaauuuuaccacaaaugcgauaacacgugcauggaaagugucaaaaaugggacuuaugacuaccccaaauacucagaggaagcaaaauuaaacagagaagaaauagaugggguaaagcuggaaucaacaaggauuuaccagauuuuggcgaucuauucaacugucgccaguucauugguacugguagucucccugggggcaaucaguuucuggaugugcucuaaugggucucuacaguguagaauauguauuuaa

SEQ ID NO: 44782 - RNA, 1701 nt, Artificial Sequence
  derived and/or modified CDS sequence (wt) from hemagglutinin__InfluenzaA__AIR93993
augaaggcaauacuaguaguucugcuguauacauuugcaacugcaaaugcagacacauuauguauagguuaucaugcaaacaauucaacagacacuguagacacaguacuagaaaagaauguaacaguaacacacucuguuaaccuucuagaagacaagcauaacgggaaacuaugcaaacuaaaagggguagccccauugcauuuggguaaauguaacauugcuggcuggauccugggaaauccagaguguggaucacucuccacagcaagcucaugguccuacauuguggaaacaucuaguucagacaauggaacguguuacccaggagauuucaucgauuaugaggagcuaagagagcaauugaguucagugucaucauuugaaagguuugagauauuccccaagacaaguucauggcccaaucaugacucgaacaaagguguaacggcagcaugcccuaaugcuggaucaaaaagcuucuacaaaaauuuaauauggcuaguuaaaaaaggaaauucauacccaaagcucagcaaauccuacaucaaugauaaagggaaagaaguccucgugcuauggggcauucaccauccaucuacuagugcugaccaacaaagucucuaucagaaugcagaugcauauguuuuuguggggacaucaagauacagcaagaaguucaagccggaaauagcaauaagacccaaagugaggggucaagaaggaagaauggauuauuacuggacacuaguagagccgggagauaaaauaacauucgaagcaacuggaaaucuagugguaccaagauaugcauucgcaauggaaagaaauacuggaucugguauuaucauuucagauacaccaguccacgauugcaacacaauuugucaaacacccaagggagcuauaaauaccagccucccauuucagaauauacauccgaucacaauuggaaaauguccaaaauauguaaaaagcacaaaauugagacuggccacaggauugaggaaugucccgucuauucaaucuagaggccuauuuggggccauugccgguuucauugaaggaggguggacaggaaugguagauggaugguacgguuaucaccaucaaaaugagcaagggucaggauaugcagccgaccugaagagcacacagaaugccauugacgagauuacuaacaaaguaaauucgguuauugaaaagaugaauacacaguucacagcaguagguaaagaguucaaccaucuggaaaaaagaauagagaauuuaaauaaaaaaguugaugaugguuuccuggacauuuggacuuacaaugccgaacuguugguucuauuggaaaaugaaagaacuuuggacuaccacgauucaaaugugaagaacuuauaugaaaagguaagaagucaauuaaaaaacaaugccaaggaaauuggaaaaggcugcuuugaauuuuaccacaaaugcgauaccaugugcauggaaagugucaaaaaugggacuuaugacuacccaaaauacucagaggaagcaaaauuaaacagagaagaaauagaugggguaaagcuggaaucaacaaggauuuaccagauuuuggcgaucuauucaacugucgcuaguucauugguacugguagucucccugggggcaaucaguuucuggaugugcucuaaugggucucuacaguguagaauauguauuuaa

SEQ ID NO: 44783 - RNA, 1701 nt, Artificial Sequence
  derived and/or modified CDS sequence (wt) from hemagglutinin__InfluenzaA__AIR94000
augaaggcaauacuaguaguucugcuauauacauuugcaaccgcaaaugcagacacauuauguauagguuaucaugcgaacaauucaacagacacuguagacacaguacuagaaaagaauguaacaguaacacacucuguuaaccuucuagaagacaagcauaacgggaaacuaugcaaacuaagagggguagccccauugcauuuggguaaauguaacauugcuggcuggauccugggaaauccagagugugaaucacucuccacagcaagcucaugguccuacauuguggaaacaucuaguucagacaauggaacguguuacccaggagauuucaucgauuaugaggagcuaagagagcaauugagcucagugucaucauuugaaagguuugagauauuccccaagacaaguucauggcccaaucaugacucgaacaaagguguaacggcagcauguccucaugcuggagcaaaaagcuucuacaaaaauuuaauauggcuaguuaaaaaaggaaauucauacccaaagcucagcaaauccuacauuaaugauaaagggaaagaaguccucgugcuauggggcauucaccauccaucuacuagugcugaccaacaaagucucuaucagaaugcagaugcauauguuuuuguggggacaucaagauacagcaagaaguucaagccggaaauagcaauaagacccaaagugagggaucaagaagggagaaugaacuauuacuggacacuaguagagccgggagacaaaauaacauucgaagcaacuggaaaucuagugguaccgagauaugcauucgcaauggaaagaaaugcuggaucugguauuaucauuucagauacaccaguccacgauugcaauacaacuugucagacacccaagggugcuauaaacaccagcuucccauuucagaauauacauccgaucacaauuggaaaauguccaaaauauguaaaaagcacaaaauugagacuggccacaggauugaggaaugucccgucuauucaaucuagaggccuauuuggggccauugccgguuucauugaagggggguggacagggaugguagauggaugguacgguuaucaccaucaaaaugagcaggggucaggauaugcagccgaccugaagagcacacagaaugcuauugacgagauuacuaacaaaguaaauucuguuauugaaaagaugaauacacaguucacagcaguagguaaagaguucaaccaccuggaaaaaagaauagagaauuuaaauaaaaaaguugaugaugguuuccuggacauuuggacuuacaaugccgaauuguugguucuauuggaaaaugaaagaacuuuggacuaccacgauucaaaugugaagaacuuauaugaaaagguaagaagccaguuaaaaaccaaugccaaggaaauuggaaacggcugcuuugaauuuuaccacaaaugcgauaacacgugcauggaaagugucaaaaaugggacuuaugacuacccaaaauacucagaggaagcaaaauuaaacagagaagaaauagaugggguaaagcuggaaucaacaaggauuuaccagauuuuggcgaucuauucaacugucgccaguucauugguacugguagucucccugggggcaaucaguuucuggaugugcucuaaugggucucuacaguguagaauauguauuuaa

SEQ ID NO: 44784 - RNA, 1683 nt, Artificial Sequence
  derived and/or modified CDS sequence (wt) from hemagglutinin__InfluenzaA__AIR94116
auggagacagcaucacugauaacuauacuacuaguaguaacaguaagcaaugcagauaagaucugcaucggcuaucaaucaacaaacuccacagaaacuguagacacacuaacagaaaacaaugucccugugacacaugccaaagaacugcuccacacagagcauaaugggaugcugugugcaacaagcuugggacacccucuuauucuagacaccuguaccauugaaggauuaaucuauggcaauccuucuugugaucuauuguugggaggaagagaaugguccuauauugucgagagaccaucagcuguuaacggauuguguuaucccgggaauguagaaaaucuagaagagcuaagaucacuuuuuaguucugcuaggucuuaucaaaggauccagauuuucccagacacaaucuggaaugugucuuacagugggacaagcaaagcauguucagauucauucuacagaagcaugagaugguugacucaaaaggacaacgcuuacccuauucaagacgcccaauacacaaauaaucaaggaaagaacauucuuuucauguggggcauaaaucacccacccacugauacugcgcagacaaaucuguacacaagaacugacacaacaacgaguguggcaacagaagagauaaauaggacuuucaaaccauugauaggaccaaggccucuugucaacgguuugaugggaagaauuaauuauuauuggucgguauuaaaaccggggcaaacacugcgaauaaaaucuaaugggaauuuaauagcuccaugguaugggcacauucuuucaggagagagccauggaagaauccugaagacugauuuaaaaagggguagcugcacagugcaaugucagacagagaaggguggcuuaaacacaacauugccauuccaaaaugugaguaaguaugcauuuggaaacugcucaaaauacauuggcauaaagagucucaaacuugcaguuggucugaggaaugugccuucuagaucuaguagaggacuauucggggccauagcaggauuuauagagggagguuggucaggacuaguugcugguugguauggauuccagcauucaaaugaccaagggguugguauggcagcagauagagacucaacccaaaaggcaauugauaaaauaacauccaaagugaauaacauagucgacaaaaugaacaagcaguaugaaauuauagaucaugaauucaaugagguugaaacuagacuuaacaugaucaauaauaagauugaugaucaaauccaagauauaugggcauauaaugcagaauugcuaguucugcuugagaaccagaaaacacucgaugagcaugaugcaaacguaaacaaucuauauaauaaagugaagagggcauuggguuccaaugcgguggaagaugggaaaggauguuucgagcuauaccacaaaugugaugaccaaugcauggagacaauucggaacgggaccuacaauagaaggaaauaucaagaggagucaaaauuagaaagacagaagauagagggggucaagcuggaaucugaaggaacuuacaaaauccucaccauuuauucgacugucgccucaucucuugugauugcaaugggguuugcugccuucuuguucugggccauguccaaugggucuugcagaugcaacauuuguauauaa

SEQ ID NO: 44785 - RNA, 1701 nt, Artificial Sequence
  derived and/or modified CDS sequence (wt) from hemagglutinin__InfluenzaA__AIT38333
augaagacuaucauuacuuugagcuacauuuuaugccauguuuucgcucaaaaaauccacggaagugacagcagcacggcaacauugugccugggacaccaugcagugccaaacggaacgcuagugaaaacaaucacaaaugaccaaauugaagugacuaaugccacugagcugguucagaguuccucaacagguagaauaugcgacaauccucaccgaauccuugaugggaaaaacugcacauugauagaugcucuauuaggagacccucauugcgacgaauuccaaaauaaggaaugggaccuuuuuguugaacgcagcaaugcuuacagcgacuguuacccuuauuaugugccggauuaugccucucuuaggucacuaguugccucauccggcacguuggaguuuaacaaugaaagcuucaauuggacuggaaucucucaggauggaacaagcucuuccugcagaaggggaucuguuaaaaguuucuuuaguagauugaauugguugcacggguuagaauacaaauacccagcacaaaaugugacuaugcuaaacaaugacgaauuugacaaauuguauauuugggggguucaccauccgaguacggacagugaccaaaccagccuauauguucaaacaucagggagagucacagucucuaccaaaagaagccaacaaacuguaaucccgaauaucggaucuagacccuggguaagggguaucuccagcagaauaagcauccauuggacaauaguaaaaccuggagauauacuuuugauuaacagcacagggaaucuaauugccccuagggguuacuuuaaaauacgaggugggaaaagcucaauaaugaggucagaugcacccauugacaacugcgauucugaaugcgucacuccaaaugggaauauucccaaugacaaaccauuucaaaaugugaacaggaucacauaugggcccugucccagauauauuaagcaaaacacccugaaauuggcaacagggaugcggaauguaccagagaaacaaacuagaggcguauugggcgcuaucgcagguuucauagaaaaugguugggagggaaugguagaugguugguacgguuucaggcaucagaauucagagggcacaggacaagcagcagaucuuaaaagcacucaagcagcaaucgaccaaaucaaugggaaacugaauagguuaaucgggaaaacgaacgagaaguuccaucaaauagaaaaagaauucucagagauagaagggagaguucaggaccucgagaaguauguugaagacacuaaaauagaucucuggucguacaacgcagagcuucuuguuguccuggagaaccaacauacaauugaucuaacugacucagaaaugaacaaacuguuugaaagaacaaggaggcaacugagggaaaaugcugaagacaugggcaaugguugcuucaaaauauaccacaaaugugacaaugccugcauagggucaaucagaaauggaacuuauguacaugauguauacagagacgaagcauuaaacaaccgguuccagaucaaagguguugagcuuaagucaggauacaaagauuggauccuauggauuuccuuugccauaucauguuuuuugcuuugugcuguuuugcugggguucaucacgugggccugccaaaaaggcaacauuaggugcaacauuugcauuuaa

SEQ ID NO: 44786 - RNA, 1698 nt, Artificial Sequence
  derived and/or modified CDS sequence (wt) from hemagglutinin__InfluenzaA__AIT38344
augaaaauaaaacuacuaauccuguuauguacauuuacagcuacauaugcagacacaauauguauaggcuaccaugccaacaacucaaccgacacuguugacacagugcuugagaagaaugugacagugacacacucugucaaccuacuugaagacagccacaauggaaaacuaugucuacuaagaggaauagccccccuacaauuggguaauugcagcguugccggauggaucuuaggaaacccagaaugcgaaucacugauuuccaaggaaucaugguccuacauuguagaaaaaccaaauccugaaaaugggacauguuacccaggguauuucgccgacuaugaggagcuaagggagcaauugaguucaguaucuucauuugagagguucgaaauauuccccaaagagaguucauggcccaaccacaccguaaccggaguaucagcaucaugcuccuauaaugggaaaggaaauuuuuacaaaaauuugcuauggcugacgaggaagaauggguuguacccaaaccugagcaagucauauacaaacaacaaagagaaagaaguccuuauacuaugggguguucaucacccgucaaacauaaaggaccaaaggacucucuaucauacagaaaaugcuuaugucucuguagugucuucacauuauagcagaagauucaccccagaaauaaccaaaaggcccaaaguaagagaucaggaaggaagaaucaacuacuacuggacucugcuggaacccggugauacaauaauauuugaggcaaacggaaaucuaauagcgccaugguaugcuuucgcauugaguagaggcuuuggaucaggaaucaucaccucaaaugcaccaauggaugaaugugaagcaaaaugucaaacaccucggggagcuauaaacagcagucuuccuuuccagaauguacacccagucacaauaggagaguguccaaaguaugucaggagugcaaaauuaaggaugguuacaggacuaaggaacaucccuuccauccaauccagagguuuguuuggagccauugccgguuucauugaaggggguuggacuggaaugauagauggaugguaugguuaccaccaucagaaugagcaaggaucugguuaugcugcagauaaagaaagcacacaaaacgccauuaacgggauuacaaacaaggugaauucuguaauugagaaaaugaacacucaauucacaacugugggcaaagaauucaacaaauuggaaagaaggauggaaaacuuaaacaaaaaaguugaugauggguuucuagacauuuggacauauaaugcagaauuguugguucuacuggaaaaugaaaggacuuuagauuuccacgacucuaauguaaaaauucuguaugagaaaguaaagagccaauuaaagaauaaugccaaagaaauuggaaauggguguuuugaauucuaccacaaguguaacaaugaaugcauggagagugugaaaaauggaacuuaugacuacccaaaauauucugaagaaucaaaguuaaacagggaaaaaaucgauggaguaaaauuggaaucaaugggagucuaucagauucuggcgaucuauucaacugucgccaguucccugguucuuuuggucucccugggggcaaucagcuucuggauguguuccaaugggucuuugcaguguagaauaugcaucuga

SEQ ID NO: 44787 - RNA, 1698 nt, Artificial Sequence
  derived and/or modified CDS sequence (wt) from hemagglutinin__InfluenzaA__AIT38360
augaaaauaaaacuacuaauccuguuauguacauuuacagcuacauaugcagacacaauauguauaggcuaccaugccaacaacucaaccgacacuguugacacagugcuugagaagaaugugacagugacacacucugucaaccuacuugaagacagucacaauggaaaacuaugucuacuaaaaggaauagccccccuacaauuggguaauugcagcguugccggauggaucuuaggaaacccagaaugcgaaucacugauuuccaaggaaucaugguccuacauuguagaaaaaccaaauccugaaaaugggacauguuacccaggauauuucgccgauuaugaggagcuaagggagcaauugaguucaguaucuucauuugagagguucgaaauauuccccaaagagagcucauggcccaaccacaccguaaccggaguaucagcaucaugcuccuauaaugggaaaggaaauuuuuacaaaaauuugcuauggcugacgaggaagaauggguuguacccaaaccugagcaagucauauacaaacaacaaagagaaagaaguccuuauacuaugggguguucaucacccgucaaacauagaggaccaaaggacucucuaucauacagaaaaugcuuaugucucuguagugucuucacauuauagcagaagauucaccccagaaauaaccaaaaggcccaaaguaagaggucaggaaggaagaaucaacuacuacuggacucugcuggaacccggugauacaauaauauuugaggcaaacggaaaucuaauagcgccaugguaugcuuucgcauugaguagaggcuuaggaucaggaaucaucaccucaaaugcaccaauggaugaaugugaagcaaaaugucaaacaccucggggagcuauaaacagcagucuuccuuuccagaauguacacccagucacaauaggagaguguccaaaguaugucaggagugcaaaauuaaggaugguuacaggacuaaggaacauccccucuauccaauccagagguuuguuuggagccauugccgguuucauugaaggggguuggacuggaaugauagauggaugguaugguuaccaccaucagaaugagcaaggaucugguuaugcugcagauaaagaaagcacacaaaacgccauuaacgggauuacaaacaaggugaauucuguaauugagaaaaugaacacucaauucacaacugugggcaaagaauucaacaaauuggaaagaaggauggaaaacuuaaacaaaaaaguugaugauggguuucuagacauuuggacauauaaugcagaauuguugguucuacuggaaaaugaaaggacuuuagauuuccacgacucuaauguaaaaaaucuguaugagaaaguaaagagccaauuaaagaauaaugccaaagaaauuggaaauggguguuuugaauucuaccacaaguguaacaaugaaugcauggagagugugaaaaauggaacuuaugacuacccaaaauauucugaagaaucaaaguuaaacagggaaaaaaucgauggaguaaaauuggaaucaaugggagucuaucagauucuggcgaucuauucaacugucgccaguucccugguucuuuuggucucccugggggcaaucagcuucuggauguguuccaaugggucuuugcaguguagaauaugcaucuga

SEQ ID NO: 44788 - RNA, 1701 nt, Artificial Sequence
  derived and/or modified CDS sequence (wt) from hemagglutinin__InfluenzaA__AIT93147
augaaggcaauacuaguaguucugcuauauacauuugcaaccgcaaaugcagacacauuauguauagguuaucaugcgaacaauucaacagauacuguagacacaguacuagaaaagaauguaacaguaacacacucuguuaaccuucuagaagacaagcauaacgggaaacuaugcaaacuaagagggguagccccauugcauuuggguaaauguaacauugcuggcuggauccugggaaauccagagugugaaucacucuccacagcaaguucaugguccuacauuguggaaacaucuaguucagacaauggaacauguuacccaggagauuucaucaauuaugaggagcuaagagagcaauugagcucagugucaucauuugaaagguuugagauauuccccaagacgaguucauggcccaaucaugacucgaacaaagguguaacggcagcauguccucacgcuggagcaaaaagcuucuacaaaaauuuaauauggcuaguuaaaaaaggaaauucauacccaaagcucagccaauccuacauuaaugauaaagggaaagaaguccucgugcuguggggcauucaccauccaucuacuacugcugaccaacaaagucucuaucagaaugcagaugcauauguuuuuguggggacaucaagauacagcaagaaguucaagccggaaauagcaauaagacccaaagugagggaucaagaagggagaaugaacuauuacuggacacuaguagagccgggagacaaaauaacauucgaagcaacuggaaaucuagugguaccgagauaugcauucacaauggaaagaaaugcuggaucugguauuaucauuucagauacaccaguccacgauugcaauacaacuugucagacacccgaaggugcuauaaacaccagccucccauuucagaauauacauccgaucacaauuggaaaauguccaaaguauguaaaaagcacaaaauugagacuggccacaggauugaggaaugucccgucuauucaaucuagaggccuauucggggccauugccggcuucauugaagggggguggacagggaugguagauggaugguacgguuaucaccaucaaaaugagcaggggucaggauaugcagccgaccugaagagcacacaaaaugccauugacaagauuacuaacaaaguaaauucuguuauugaaaagaugaauacacaguucacagcaguggguaaagaguucaaccaccuggaaaaaagaauagagaauuuaaauaaaaaaguugaugaugguuuccuggacauuuggacuuacaaugccgaacuguugguucuauuggaaaaugaaagaacuuuggacuaccacgauucaaaugugaagaacuuguaugaaaagguaagaaaccaguuaaaaaacaaugccaaggaaauuggaaacggcugcuuugaauuuuaccacaaaugcgauaacacgugcauggaaaguguuaaaaaugggacuuaugacuacccaaaauacucagaggaagcaaaauuaaacagagaaaaaauagaugggguaaagcuggaaucaacaaggauuuaccagauuuuggcgaucuauucaacugucgccaguucauugguacugguagucucccugggggcaaucagcuucuggaugugcucuaaugggucucuacaguguagaauauguauuuaa

SEQ ID NO: 44789 - RNA, 1701 nt, Artificial Sequence
  derived and/or modified CDS sequence (wt) from hemagglutinin__InfluenzaA__AIU39700
augaaggcaauacuaguaguucugcuauauacauuugcaaccgcaaaugcagacacauuauguauagguuaucaugcgaacaauucaacagacacuguagacacaguacuagaaaagaauguaacaguaacacacucuguuaaccuucuagaagacaagcauaacgggaaacuaugcaaacuaagagggguagccccauugcauuuggguaaauguaacauugcuggcuggauccugggaaauccagagugugaaucacucuccacagcaagcucaugguccuacauuguggaaacaucuaguucagacaauggaacguguuacccaggagauuucaucgauuaugaggagcuaagagagcaauugagcucagugucaucauuugaaagguuugagauauuccccaagacaaguucauggcccaaucaugacucgaacaaagguguaacggcagcaugcccucaugcuggagcaaaaagcuucuacaaaaauuuaauauggcuaguuaaaaaaggaaauucauacccaaagcucagcaaauccuacauuaaugauaaagggaaagaaguccucgugcuauggggcauucaccauccaucuacuagugcugaccaacaaagucucuaucagaaugcagaugcauauguuuuuguggggacaucaagauacagcaagaaguucaagccggaaauagcaauaagacccaaagugagggaucaagaagggagaaugaacuauuacuggacacuaguagagccgggagacaaaauaacauucgaagcaacuggaaaucuagugguaccgagauaugcauucgcaauggaaagaaaugcuggaucugguauuaucauuucagauacaccaguccacgauugcaauacaacuugucagacacccaagggugcuauaaacaccagccucccauuucagaauauacauccgaucacaauuggaaaauguccaaaauauguaaaaagcacaaaauugagacuggccacaggauugaggaaugucccgucuauucaaucuagaggccuauuuggggccauugccgguuuuauugaagggggguggacagggaugguagauggaugguacgguuaucaccaucaaaaugagcaggggucaggauaugcagccgaccugaagagcacacagaaugccauugacgagauuacuaacaaaguaaauucuguuauugaaaagaugaauacacaguucacagcaguagguaaagaguucaaccaccuggaaaaaagaauagagaauuuaaauaaaaaaguugaugaugguuuccuggacauuuggacuuacaaugccgaacuguugguucuauuggaaaaugaaagaacuuuggacuaccacgauucaaaugugaagaacuuauaugaaaagguaagaagccaguuaaaaaacaaugccaaggaaauuggaaacggcugcuuugaauuuuaccacaaaugcgauaacacgugcauggaaagugucaaaaaugggacuuaugacuacccaaaauacucagaggaagcaaaauuaaacagagaagaaauagaugggguaaagcuggaaucaacaaggauuuaccagauuuuggcgaucuauucaacugucgccaguucauugguacugguagucucccugggggcaaucaguuucuggaugugcucuaaugggucucuacaguguagaauauguauuuaa

SEQ ID NO: 44790 - RNA, 1701 nt, Artificial Sequence
  derived and/or modified CDS sequence (wt) from hemagglutinin__InfluenzaA__AIU39702
augaaggcaauacuaguaguucugcuauauacauuugcaaccgcaaaugcagacacauuauguauagguuaucaugcgaacaauucaacagacacuguagacacaguacuagaaaagaauguaacaguaacacacucuguuaaccuucuagaagacaagcauaacgggaaacuaugcaaacuaagagggguagccccauugcauuuggguaaauguaacauugcuggcuggauccugggaaauccagagugugaaucacucuccacagcaagcucaugguccuacauuguggaaacaucuaguucagacaauggaacguguuacccaggagauuucaucgauuaugaggagcuaagagagcaauugagcucagugucaucauuugaaagguuugagauauuccccaagacaaguucauggcccaaucaugacucgaacaaagguguaacggcagcauguccucaugcuggagcaaaaagcuucuacaaaaauuuaauauggcuaguuaaaaaaggaaauucauacccaaagcucagcaaauccuacauuaaugauaaagggaaagaaguccuagugcuauggggcauucaccauccaucuacuagugcugaccaacaaagucucuaucagaaugcagaugcauauguuuuuguggggacaucaagauacagcaagaaguucaagccggaaauagcaauaagacccaaagugagggaucaagaagggagaaugaacuauuacuggacacuaguagagccgggagacaaaauaacauucgaagcaacuggaaaucuagugguaccgagauaugcauucgcaauggaaagaaaugcuggaucugguauuaucauuucagauacaccaguccacgauugcaauacaacuugucagacacccaagggugcuauaaacaccagcuucccauuucagaauauacauccgaucacaauuggaaaauguccaaaauauguaaaaagcacaaaauugagacuggccacaggauugaggaauaucccgucuauucaaucuagaggccuauuuggggccauugccgguuucauugaagggggguggacagggaugguagauggaugguacgguuaucaccaucaaaaugagcaggggucaggauaugcagccgaccugaagagcacacagaaugccauugacgagauuacuaacaaaguaaauucuguuauugaaaagaugaauacacaguucacagcaguagguaaagaguucaaccaccuggaaaaaagaauagagaauuuaaauaaaaagguugaugaugguuuccuggacauuuggacuuacaaugccgaacuguugguucuauuggaaaaugaaagaacuuuggacuaccacgauucaaaugugaagaacuuauaugaaaagguaagaagccaguuaaaaaacaaugccaaggaaauuggaaacggcugcuuugaauuuuaccacaaaugcgauaacacgugcauggaaagugucaaaaaugggacuuaugacuacccaaaauacucagaggaagcaaaauuaaacagagaagaaauagaugggguaaagcuggaaucaacaaggauuuaccagauuuuggcgaucuauucaacugucgccaguucauugguacugguagucucccugggggcaaucaguuucuggaugugcucuaaugggucucuacaguguagaauauguauuuaa

SEQ ID NO: 44791 - RNA, 1701 nt, Artificial Sequence
  derived and/or modified CDS sequence (wt) from hemagglutinin__InfluenzaA__AIU39704
augaaggcaauacuaguaguucugcuauauacauuugcaaccgcaaaugcagacacauuauguauagguuaucaugcgaacaauucaacagacacuguagacacaguacuagaaaagaauguaacaguaacacacucuguuaaccuucuagaagacaagcauaacgggaaacuaugcaaacuaagagggguagccccauugcauuuggguaaauguaacauugcuggcuggauccugggaaauccagagugugaaucacucucuacagcaagcucaugguccuacauuguggaaacaucuaguucagacaauggaacguguuacccaggagauuucaucgauuaugaggagcuaagagagcaauugagcucagugucaucauuugaaagguuugagauauuccccaagacaaguucauggcccaaucaugacucgaacaaaggcguaacgacagcauguccucaugcuggagcaaaaagcuucuacaaaaauuuaauauggcuaguuaaaaaaggaaauucauacccaaagcucagcaaauccuacauuaaugauaaagggaaagaaguccucgugcuauggggcauucaccauccaccuacuagugcugaccaacaaagucucuaucagaaugcagaugcauauguuuuuguggggacaucaagauacagcaagaaguucaagccggaaauagcaauaagacccaaagugagggaucaagaagggagaaugaacuauuacuggacacuaguagagccgggagacaaaauaacauucgaagcaacuggaaaucuagugguaccgagauaugcauucgcaauggaaagaaaugcuggaucugguauuaucauuucagauacaccaguccacgauugcaauacaacuugucagacacccaagggugcuauaaacaccagccucccauuucagaauauacauccgaucacaauuggaaaauguccaaaauauguaaaaagcacaaaauugagacuggccacaggauugaggaaugucccgucuauucaaucuagaggccuauuuggggccauugccgguuucauugaagggggguggacagggaugguagauggaugguacgguuaucaucaucaaaaugagcaggggucaggauaugcagccgaccugaagagcacacagaaugccauugacgagauuacuaacaaaguaaauucuguuauugaaaagaugaauacacaguucacagcaguagguaaagaguucaaccaccuggaaaaaagaauagagaauuuaaauaaaaagguugaugaugguuuccuggacauuuggacuuacaaugccgaacuguugguucuauuggaaaaugaaagaacuuuggacuaccacgauucaaaugugaagaacuuauaugaaaagguaagaagccaguuaaaaaacaaugccaaggaaauuggaaacggcugcuuugaauuuuaccacaaaugcgauaacacgugcauggaaagugucaaaaaugggacuuaugacuacccaaaauacucagaggaagcaaaauuaaacagagaagaaauagaugggguaaagcuggaaucaacaaggauuuaccagauuuuggcgaucuauucaacugucgccaguucauugguauugguagucucccugggggcaaucaguuucuggaugugcucuaaugggucucuacaguguagaauauguauuuaa

SEQ ID NO: 44792 - RNA, 1704 nt, Artificial Sequence
  derived and/or modified CDS sequence (wt) from hemagglutinin__InfluenzaA__AIU46609
auggagaaaauagugcuucuucuugcaauagucagccuuguuaaaagugaucagauuugcauugguuaccaugcaaacaacucgacggagcagguugacacgauaauggaaaagaacgucacuguuacacaugcccaagacauacuggaaaagacacacaaugggaagcucugcgauuuaaauggagugaagccucuaauuuuaaaggauuguaguguagcuggauggcuucucggaaacccaaugugcgacgaauucaucagggugccggaauggucuuacauaguagaaagggcuaacccagccaaugaccucuguuacccagggaaccucaaugauuaugaagaacugaaacaccuauugagcagaauaaaucauuuugagaaaauucugaucauccccaagaguucuuggaccaaucaugaaacaucauuaggggugagcgcagcaugcccauaccagggaacgcccuccuuuuucagaaaugugguauggcuuaucaaaaagaacgaugcauaccccacaauaaaaauaagcuacaauaauaccaaucaggaagaucuguugauacugugggggauucaccauuccaacaaugcagcagagcagacgaaccucuauaaaaacccaaccaccuacauuuccguugggacaucaacauuaaaccagagauugguaccaaaaauagcuacuagaucccaagugaauggacagcguggaagaauggauuucuucuggacaauucuaaaaccgaaugaugcaauccauuucgagaguaauggaaauuucauugcuccagaauaugcauacaaaauugucaagaaaggggacucaacaauuaugaaaagugaaguggaauauggccacugcaacaccaaaugucaaacuccaauaggggcgauaaacucuaguaugccauuucacaauauacacccucucaccaucggggaaugccccaaauacgugaaaucaaacaaauuaguccuugcgacugggcucagaaauaguccucuaagagaaaagagaagaaaaagaggacuauuuggagcuauagcaggguuuauagagggaggauggcagggaaugguagauggcugguauggguaccaccauagcaaugagcaggggaguggguacgcugcagacaaagaauccacccaaaaggcuauagauggaguuaccaauaaggucaacucgauuauugacaaaaugaacacucaauuugaggccguuggaagggaauuuaauaacuuagaaaggagaauagagaauuuaaacaagaaaauggaagacggauuccuagaugucuggacuuauaaugcugaacuucuaguucucauggaaaaugagagaacucuagauuuccaugacucaaaugucaagaaccuuuacgauaaaguccgacuacagcuuagggacaaugcaaaggagcuggguaaugguuguuuugaguucuaucacaaaugugauaaugaauguauggaaaguguaagaaaugggacauaugacuacccgcaauauucagaagaagcaagauuaaaaagagaagaaauaagcggagugaaauuagagucaauaggaacuuaccaaauacugucaauuuauucaacaguggcgaguucccuagcacuggcaaucauaguggcugguuuaucuuuauggaugugcuccaaugggucguugcagugcagaauuugcauuuaa

SEQ ID NO: 44793 - RNA, 1689 nt, Artificial Sequence
  derived and/or modified CDS sequence (wt) from hemagglutinin__InfluenzaA__AIU46714
auggccaucauuuaucucauacuccuguucacagcagugaggggggaccagauaugcauuggauaccaugccaauaauuccacagaaaaggucgacacaauucuagagcggaaugucacugugacucaugccaaggacauccuugagaagacccauaacggaaagcuaugcaaacuaaacggaauuccuccacuugaacuaggggauuguagcauugccggauggcuccuuggaaauccagaaugugauaggcuucuaagggugccagaaugguccuauauaauggaaaaagaaaacccgaaauacaguuuguguuauccaggaagcuucaaugacuaugaagaauuaaaacaucuccucaguagcguaaaacacuucgagaaaguaaagauucugccaaaagauggauggacacagcauaagacagauggagguucaaaggccugcgcaguuucagguaaacaaucauucuucaggaacauggucuggcugacaaagaaaggacaaaauuauccgguugccaaaagaucguacaacaauacgagcggagagcaaaugcuaauaauuuggggagugcaccauccuaaugaugaggaggaacaaagagcauuguaccagaaagugggaaccuauguuuccgcaagcacaucaacauugaacaaaaggucaaccccagaaauagcagcaaggccugaagugaauggacuaggaaguagaauggaauucucuuggacccucuuggaugugugggacaccauaaauuuugagagcacugguaaucuaguugcaccagaguauggauucaaaauaucgaaaagagguaguucagggaucauaaagacagaaggaacacuugggaacugugagaccaaaugccaaacuccuuugggagcaauaaauacaacacuaccuuuucacaauguccacccacugacaauaggugaaugccccaaauauguaaaaucggagaaauuggucuuagcaacaggacuaaggaauguuccucagauugaaucaagaggauuguucggggcaauagcuggcuuuauagaaggaggauggcaaggaaugguugaugguugguauggauaccaucacagcaaugaccagggaucaggguaugcagcagacaaagaauccacucaaaaggcauuugacagaaucaccaacaagguaaauucugugauugaaaagaugaacacccaauuugaagcuguugggaaagaauucagcaacuuagagagaagacuggaaaacuugaacaaaaagauggaagacggguuucuagauguguggacauacaaugcugaacuucuaguucugauggaaaaugagaggacacuugacuuucaugauucuaaugucaagaaccuguaugauaaagucagaaugcagcugagagacaacgucaaagaacuaggaaauggauguuuugaauuuuaucauaaaugugacaaugaaugcaugaauagugugaaaaaugggacguaugauuaucccaaguaugaagaagaaucuaaacuaaagagaaaugaaaucaaagggguaaaauugagcagcauggggguuuaccaaauucuugccauuuaugcuacaguugcagguucucugucacuggcaaucaugauagcugggaucucuuucuggaugugcuccaacgggucucugcagugcagaaucugcauauga

SEQ ID NO: 44794 - RNA, 1701 nt, Artificial Sequence
  derived and/or modified CDS sequence (wt) from hemagglutinin__InfluenzaA__AIV09219
augaaggcaauacuaguaguucugcuauauacauuugcaaccacaaaugcagacauauuauguauagguuaucaugcgaacaauucaacagacacuguagacacaguacuggaaaagaauguaacaguaacacacucuguuaaccuucuagaagacaagcauaacgggaaacuaugcaaacuaagagggguagccccauugcauuuggguaaauguaacauugcuggcuggauccugggaaauccagagugugaauuacucuccacaacaagcucaugguccuacauuguggaaacaucuaguucagacaauggaacguguuaccccggagauuucaucgauuaugaggagcuaagagagcaauugagcucagugucaucauuugaaagguuugagauauuccccaagacaaguucauggcccgaucaugacucgaacaaagguguaacggcagcaugcccucaugcuggggcaggaagcuucuacaaaaauuuaauauggcuaguuaaaaagggaaauucauacccaaagcucagcaaauccuacauuaaugauaaagggaaagaaguccucgugcuauggggcauucaccauccaccuacuagugcugaccaacaaaggcucuaucagaaugcagaugcauauguuuuuguggggacaucaagauacagcaagaaguucaagccagaaauagcaauaagacccaaagugagggaucaagaagggagaaugaacuauuacuggacacuaguagagccgggggacaaaauaacauucgaagcaacuggaaaucuagugguaccgagauaugcauucgcaauggaaagaaaugcuggaucugguauuaucacuucagauacaccaguccacgauugcaauacaacuugucagacacccaagggugcuauaaacaccagccucccauuucagaauauacauccgaucacaauuggaaaauguccaaaauauguaaaaagcacaaaauugagacuggccacaggauugaggaauguuccgucuauucaaucuaggggccuauuuggggccauugccgguuucauugaagggggguggacagggaugguagauggaugguacgguuaucaccaucaaaaugagcagggaucaggguaugcagccgaccugaagagcacacagaaugccauugacgagauuacuaacaaaguaaauucuguuauugacaagaugaauacacaguucacagcaguagguaaagaguucaaccaccuggaaaaaagaauagagaauuuaaauaaaaaaguugaugaugguuuccuggacauuuggacuuacaaugccgaacuguugguucuauuagaaaaugaaagaaccuuggacuaucacgauucaaaugugaagaacuuauaugaaaaggugagaagccaguuaaaaaacaaugccaaggaaauuggaaacggcugcuuugaauuuuaccacaaaugcgauaacacgugcauggaaagugucaaaaaugggacuuaugacuacccaaaauacucagaggaagcaaaauuaaacagagaagaaauagaugggguaaagcuggaaucaacaaggauuuaccagauuuuggcgaucuauucaacugucgccaguucauugguacugguagucucccugggggcaaucaguuucuggaugugcucuaaugggucucuacaguguagaauauguauuuaa

SEQ ID NO: 44795 - RNA, 1701 nt, Artificial Sequence
  derived and/or modified CDS sequence (wt) from hemagglutinin__InfluenzaA__AIW60689
augaagacuaucauugcuuugagcuacauuuuaugucugguuuucgcucaaaaacuucccggaaaugacaacagcacggcaacgcugugccugggacaccaugcagugccaaacggaacgcuagugaaaacaaucacgaaugaccaaauugaagugacuaaugcuacugagcugguucagaguuccucaacagguagaauaugcgacaguccucaccgaauccuugauggaaaaaacugcacacugauagaugcucuauugggagacccucauugugauggcuuccaaaauaaggaaugggaccuuuuuguugaacgcagcaaagcuuacagcgacuguuacccuuaugaugugccggauuaugcuucccuuaggucacuaguugccucauccggcacccuggaguuuaccaaugaaggcuucaauuggacuggagucgcucaggauggaacaagcuaugcuugcaaaaggggaucuguuaaaaguuucuuuaguagauugaauugguugcacaaauuagaauacaaauauccagcacugaacgugacuaugccaaacaaugacaaauuugacaaauuguacauuugggggguucaccacccgaguacggacagugaccaaaccagcauauauguucaagcaucagggagagucacagucucuaccaaaagaagccaacaaacuguaaucccgaauaucgggucuagacccuggguaagggggaucuccagcagaauaagcaucuauuggacaauaguaaaaccgggagacauacuuuugauuaauagcacagggaaucuaauugccccucgggguuacuucaaaauacgaagugggaaaagcucaauaaugaggucagaugcacccauuggcaacugcaauucugaaugcaucacuccaaauggaagcauucccaaugacaaaccuuuucaaaauguaaacaggaucacauauggggccugucccagauauguuaagcaaaacacucugaaauuggcaacagggaugcggaauguaccagagaaacaaacuagaggcauauucggcgcaaucgcagguuucauagaaaaugguugggagggaaugguagacgguugguacgguuucaggcaucaaaauuaugagggcacaggacaagcagcagaucuuaaaagcacucaagcagcaaucaaccaaaucaacgggaaacugaauagguuaaucgagaaaacgaacgagaaauuccaucaaaucgaaaaagaauucucagaaguagaagggagaauucaggaccucgagaaauauguugaagacacuaaaauagaucucuggucuuacaacgcagagcuucuuguugcccuggagaaccaacauacaauugaucuaacugacucagaaaugaacaaacuguuugaaagaacaaggaagcaacugagggaaaaugcugaggacaugggcaaugguugcuucaaaauauaccacaaaugugacaaugccugcauagggucaaucagaaauggaacuuaugaccaugaugcauacagagacgaagcauuaaacaaccgguuccagaucaaagguguugagcugaagucaggauacaaagauuggauccuauggauuuccuuugccauaucaugcuuuuugcuuuguguuguuuugcugggguucaucaugugggccugccaaaaaggcaacauuaggugcaacauuugcauuuga

SEQ ID NO: 44796 - RNA, 1701 nt, Artificial Sequence
  derived and/or modified CDS sequence (wt) from hemagglutinin__InfluenzaA__AIW60690
augaagacuaucauugcuuugagcuacauuuuaugucugguuuucgcucaaaaacuucccggaaaugacaacagcacggcaacgcugugccugggacaccaugcagugccaaacggaacgcuagugaaaacaaucacgaaugaccaaauugaagugacuaaugcuacugagcugguucagaguuccucaacagguagaauaugcgacaguccucaccgaauccuugauggaaaaaacugcacacugauagaugcucuauugggagacccucauugugauggcuuccaaaauaaggaaugggaccuuuuuguugaacgcagcaaagcuuacagcgacuguuacccuuaugaugugccggauuaugcuucccuuaggucacuaguugccucauccggcacccuggaguuuaccaaugaaggcuucaauuggacuggagucgcucaggauggaacaagcuaugcuugcaaaaggggaucuguuaaaaguuucuuuaguagauugaauugguugcacaaauuagaauacaaauauccagcacugaacgugacuaugccaaacaaugacaaauuugacaaauuguacauuugggggguucaccacccgaguacggacagugaccaaaccagccuauauguucaagcaucagggagagucacagucucuaccaaaagaagccaacaaacuguaaucccgaauaucgggucuagacccuggguaaggggggucuccagcagaauaagcaucuauuggacaauaguaaaaccgggagacauacuuuugauuaauagcacagggaaucuaauugccccucgggguuacuucaaaauacgaagugggaaaagcucaauaaugaggucagaugcacccauuggcaacugcaauucugaaugcaucacuccaaauggaagcauucccaaugacaaaccuuuucaaaauguaaacaggaucacauauggggccugucccagauauguuaagcaaaacacucugaaauuggcaacagggaugcggaauguaccagagaaacaaacuagaggcauauucggcgcaaucgcagguuucauagaaaaugguugggagggaaugguagacgguugguacgguuucaggcaucaaaauuaugagggcacaggacaagcagcagaucuuaaaagcacucaagcagcaaucaaccaaaucaacgggaaacugaauagguuaaucgagaaaacgaacgagaaauuccaucaaaucgaaaaagaauucucagaaguagaagggagaauucaggaccucgagaaauauguugaagacacuaaaauagaucucuggucuuacaacgcagagcuucuuguugcccuggagaaccaacauacaauugaucuaacugacucagaaaugaacaaacuguuugaaagaacaaggaagcaacugagggaaaaugcugaggacaugggcaaugguugcuucaaaauauaccacaaaugugacaaugccugcauagggucaaucagaaauggaacuuaugaccaugaugcauacagagacgaagcauuaaacaaccgguuccagaucaaagguguugagcugaagucaggauacaaagauuggauccuauggauuuccuuugccauaucaugcuuuuugcuuuguguuguuuugcugggguucaucaugugggccugccaaaaaggcaacauuaggugcaacauuugcauuuga

SEQ ID NO: 44797 - RNA, 1701 nt, Artificial Sequence
  derived and/or modified CDS sequence (wt) from hemagglutinin__InfluenzaA__AIW60691
augaagacuaucauugcuuugagcuacauuuuaugucugguuuucgcucaaaaacuucccggaaaugacaacagcacggcaacgcugugccugggacaccaugcagugccaaacggaacgcuagugaaagcaaucacgaaugaccaaauugaagugacuaaugcuacugagcugguucagaguuccucaacagguagaauaugcgacaguccucaccgaauccuugauggaaaaaacugcacacugauagaugcucuauugggagacccucauugugauggcuuccaaaauaaggaaugggaccuuuuuguugaacgcagcaaagcuuacagcgacuguuacccuuaugaugugccggauuaugcuucccuuaggucacuaguugccucauccggcacccuggaguuuaccaaugaaggcuucaauuggacuggagucgcucaggauggaacaagcuaugcuugcaaaaggggaucuguuaaaaguuucuuuaguagauugaauugguugcacaaauuagaauacaaauauccagcacugaacgugacuaugccaaacaaugacaaauuugacaaauuguacauuugggggguucaccacccgaguacggacagugaccaaaccagacuauauguucaagcaucagggagagucacagucucuaccaaaagaagccaacaaacuguaaucccgaauaucgggucuagacccuggguaagggggaucuccagcagaauaagcaucuauuggacaauaguaaaaccgggagacauacuuuugauuaauagcacagggaaucuaauugccccucgggguuacuucaaaauacgaagugggaaaagcucaauaaugaggucagaugcacccauuggcaacugcaauucugaaugcaucacuccaaaugggagcauucccaaugacaaaccuuuucaaaauguaaacaggaucacauauggggccugucccagauauguuaagcaaaacacucugaaauuggcaacagggaugcggaauguaccagagaaacaaacuagaggcauauucggcgcaaucgcagguuucauagaaaaugguugggagggaaugguagacgguugguacgguuucaggcaucaaaauucugagggcacaggacaagcagcagaucuuaaaagcacucaagcagcaaucaaccaaaucaaugggaaacugaauagguuaaucgagaaaacgaacgagaaauuccaucaaaucgaaaaagaauucucagaaguagaagggagaauucaggaccucgagaaauauguugaagacacuaaaauagaucucuggucuuacaacgcagagcuucuuguugcccuggagaaccaacauacaauugaucuaacugacucagaaaugaacaaacuguuugaaagaacaaggaagcaacugagggaaaaugcugaggacaugggcaaugguugcuucaaaauauaccacaaaugugacaaugccugcauagggucaaucagaaauggaacuuaugaccaugauguauacagagacgaagcauuaaacaaccgguuccagaucaaagguguugagcugaagucaggauacaaagauuggauccuauggauuuccuuugccauaucaugcuuuuugcuuuguguuguuuugcugggguucaucaugugggccugccaaaaaggcaacauuaggugcaacauuugcauuuga

SEQ ID NO: 44798 - RNA, 1701 nt, Artificial Sequence
  derived and/or modified CDS sequence (wt) from hemagglutinin__InfluenzaA__AIW60692
augaagacuaucauugcuuugagcuacauuuuaugucugguuuucgcucaaaaacuucccggaaaugacaacagcacggcaacgcugugccugggacaccaugcagugccaaacggaacgcuagugaaagcaaucacgaaugaccaaauugaagugacuaaugcuacugagcugguucagaguuccucaacagguagaauaugcgacaguccucaccgaauccuugauggaaaaaacugcacacugauagaugcucuauugggagacccucauugugauggcuuccaaaauaaggaaugggaccuuuuuguugaacgcagcaaagcuuacagcgacuguuacccuuaugaugugccggauuaugcuucccuuaggucacuaguugccucauccggcacccuggaguuuaccaaugaaggcuucaauuggacuggagucgcucaggauggaacaagcuaugcuugcaaaaggggaucuguuaaaaguuucuuuaguagauugaauugguugcacaaauuagaauacaaauauccagcacugaacgugacuaugccaaacaaugacaaauuugacaaauuguacauuugggggguucaccacccgaguacggacagugaccaaaccagccuauauguucaagcaucagggagagucacagucucuaccaaaagaagccaacaaacuguaaucccgaauaucgggucuagacccuggguaagggggaucuccagcagaauaagcaucuauuggacaauaguaaaaccgggagacauacuuuugauuaauagcacagggaaucuaauugccccucgggguuacuucaaaauacgaagugggaaaagcucaauaaugaggucagaugcacccauuggcaacugcaauucugaaugcaucacuccaaaugggagcauucccaaugacaaaccuuuucaaaauguaaacaggaucacauauggggccugucccagauauguuaagcaaaacacucugaaauuggcaacagggaugcggaauguaccagagaaacaaacuagaggcauauucggcgcaaucgcagguuucauagaaaaugguugggagggaaugguagacgguugguacgguuucaggcaucaaaauucugagggcacaggacaagcagcagaucuuaaaagcacucaagcagcaaucaaccaaaucaaugggaaacugaauagguuaaucgagaaaacgaacgagaaauuccaucaaaucgaaaaagaauucucagaaguagaagggagaauucaggaccucgagaaauauguugaagacacuaaaauagaucucuggucuuacaacgcagagcuucuuguugcccuggagaaccaacauacaauugaucuaacugacucagaaaugaacaaacuguuugaaagaacaaggaagcaacugagggaaaaugcugaggacaugggcaaugguugcuucaaaauauaccacaaaugugacaaugccugcauagggucaaucagaaauggaacuuaugaccaugauguauacagagacgaagcauuaaacaaccgguuccagaucaaagguguugagcugaagucaggauacaaagauuggauccuauggauuuccuuugccauaucaugcuuuuugcuuuguguuguuuugcugggguucaucaugugggccugccaaaaaggcaacauuaggugcaacauuugcauuuga

SEQ ID NO: 44799 - RNA, 1701 nt, Artificial Sequence
  derived and/or modified CDS sequence (wt) from hemagglutinin__InfluenzaA__AIW60693
augaagaccaucauugcuuugagcuacauuuuaugucugguuuucgcucaaaaacuucccggaaaugacaacagcacagcaacgcugugccugggacaccaugcagugcuaaacggaacgcuagugaaaacaaucacgaaugaccaaauugaagugacuaaugcuacugagcugguucagaauuccucaacagguagaauaugcgacaguccucaccaaauccuugauggagaaaacugcacacuaauagaugcucuauugggagacccucauugugauggcuuccaaaauaaggaaugggaccuuuuuguugaacgcagcaaagccuacagcaacuguuacccuuaugaugugccggauuaugccucccuuaggucacuaguugccucauccggcacacuggaguuuaacaaugaaagcuucaauuggacuggagucgcucagaauggaacaagcucugcuugcaaaaggagaucuauuaaaaguuucuuuaguagauugaauugguugcaccaauuaaaauacaaauauccagcacugaacgugacuaugccaaacaaugaaaaauuugacaaauuguacauuugggggguucaccacccgaguacggacagugaccaaaccagcauauaugcucaagcaucagggagagucacagucucuaccaaaagaagccaacaaacuguaaucccgaauaucggaucuagacccuggguaaggggugucuccagcauaauaagcaucuauuggacaauaguaaaaccgggagacauacuuuugauuaacagcacagggaaucuaauugcuccucgggguuacuucaaaauacgaagugggaaaagcucaauaaugaggucagaugcacccauuggcaaaugcaauucugaaugcaucacuccaaauggaagcauucccaaugacaaaccauuucaaaauguaaacaggaucacauauggggccugucccagauauguuaagcaaaacacucugaaauuggcaacagggaugcggaauguaccagagaaacaaacuagaggcauauucggcgcaaucgcagguuucauagaaaaugguugggagggaaugguggacgguugguacgguuucaggcaucaaaauucugagggcacaggacaagcagcagaucucaaaagcacucaagcagcaaucaaccaaaucaacggaaaacugaauagguuaaucgagaaaacgaacgagaaauuccaucaaauugaaaaagaauucucagaaguagaagggagaauucaggaccucgagaaauauguugaggacacuaaaauagaucucuggucguacaacgcggagcuucuuguugcccuggagaaccaacauacaauugaucuaacugacucagaaaugaacaaacuguuugaaagaacaaggaagcaacugagggaaaaugcugaggauaugggcaaugguuguuucaaaauauaccacaaaugugacaaugccugcauagggucaaucagaaauggaacuuaugaccaugauguauacagagacgaagcauuaaacaaccgguuccagaucaaagguguugagcugaagucaggauacaaagauuggauccuauggauuuccuuugccauaucauguuuuuugcuuuguguuguuuugcugggguucaucaugugggccugccaaaaaggcaacauuaggugcaacauuugcauuuga

SEQ ID NO: 44800 - RNA, 1701 nt, Artificial Sequence
  derived and/or modified CDS sequence (wt) from hemagglutinin__InfluenzaA__AIW60694
augaagacuaucauugcuuugagcuacauuuuaugucugguuuucgcucaaaaacuucccggaaaugacaacagcacagcaacgcugugccugggacaccaugcagugcuaaacggaacgcuagugaaaacaaucacgaaugaccaaauugaagugacuaaugcuacugagcugguucagaauuccucaacagguagaauaugcgacaguccucaccaaauccuugauggagaaaacugcacacuaauagaugcucuauugggagacccucauugugauggcuuccaaaauaaggaaugggaccuuuuuguugaacgcagcaaagccuacagcaacuguuacccuuaugaugugccggauuaugccucccuuaggucacuaguugccucauccggcacacuggaguuuaacaaugaaagcuucaauuggacuggagucgcucagaauggaacaagcucugcuugcaaaaggagaucuauuaaaaguuucuuuaguagauugaauugguugcaccaauuaaaauacaaauauccagcacugaacgugacuaugccaaacaaugaaaaauuugacaaauuguacauuugggggguucaccacccgaguacggacagugaccaaaccagccuauaugcucaagcaucagggagagucacagucucuaccaaaagaagccaacaaacuguaaucccgaauaucggaucuagacccuggguaaggggugucuccagcagaauaagcaucuauuggacaauaguaaaaccgggagacauacuuuugauuaacagcacagggaaucuaauugcuccucgggguuacuucaaaauacgaagugggaaaagcucaauaaugaggucagaugcacccauuggcaaaugcaauucugaaugcaucacuccaaauggaagcauucccaaugacaaaccauuucaaaauguaaacaggaucacauauggggccugucccagauauguuaagcaaaacacucugaaauuggcaacagggaugcggaauguaccagagaaacaaacuagaggcauauucggcgcaaucgcagguuucauagaaaaugguugggagggaaugguggacgguugguacgguuucaggcaucaaaauucugagggcacaggacaagcagcagaucucaaaagcacucaagcagcaaucaaccaaaucaacggaaaacugaauagguuaaucgagaaaacgaacgagaaauuccaucaaauugaaaaagaauucucagaaguagaagggagaauucaggaccucgagaaauauguugaggacacuaaaauagaucucuggucguacaacgcggagcuucuuguugcccuggagaaccaacauacaauugaucuaacugacucagaaaugaacaaacuguuugaaagaacaaggaagcaacugagggaaaaugcugaggauaugggcaaugguuguuucaaaauauaccacaaaugugacaaugccugcauagggucaaucagaaauggaacuuaugaccaugauguauacagagacgaagcauuaaacaaccgguuccagaucaaagguguugagcugaagucaggauacaaagauuggauccuauggauuuccuuugccauaucauguuuuuugcuuuguguuguuuugcugggguucaucaugugggccugccaaaaaggcaacauuaggugcaacauuugcauuuga

SEQ ID NO: 44801 - RNA, 1701 nt, Artificial Sequence
  derived and/or modified CDS sequence (wt) from hemagglutinin__InfluenzaA__AIW60695
augaagacuaucauugcuuugagcuacauuuuaugucugguuuucgcucaaaaacuucccggaaaugacaacagcacggcaacgcugugccuggggcaccaugcagugccaaacggaacgcuagugaaaacaaucacgaaugaccaaauugaagugacuaaugcuacugagcugguucagaguuccucaacagguggaauaugcgacaguccucaccaaauccuugauggagaaaacugcacacuaauagaugcucuauugggagacccucauugugauggcuuccaaaauaaggaaugggaccuuuuuguugaacgcagcaaagccuacagcaacuguuacccuuaugaugugccggauuaugccucccuuaggucacuaguugccucauccggcacacuggaguuuaacaaugaaagcuucaauuggacuggagucgcucagaauggaacaagcucugcuugcaaaaggagaucuaauaaaaguuucuuuaguagauugaauugguugcaccaauuaaacuacaaauacccagcacugaacgugacuaugccaaacaaugaaaaauuugacaaauuguacauuugggggguucaccacccgaguacggacagugaccaaaucagcauauaugcucaagcaccagggagagucacagucucuaccaaaagaagccaacaaacuguaaucccgaauaucggaucuagacccuggguaaggggugucuccagcauaauaagcaucuauuggacaauaguaaaaccgggagacauacuuuugauuaacugcacagggaaucuaauugcuccucgggguuacuucaaaauacgaagugggaaaagcucaauaaugaggucagaugcauccauuggcaaaugcaauucugaaugcaucacuccaaauggaagcauucccaaugacaaaccauuucaaaauguaaacaggaucacauauggggccugucccagauauguuaagcaaaacacucugaaauuggcaacagggaugcggaauguaccagagaaacaaacuagaggcauauucggcgcaaucgcggguuucauagaaaaugguugggagggaaugguggacgguugguacgguuucaggcaucaaaauucugagggcacaggacaagcagcagaucucaaaagcacucaagcagcaaucaaccaaaucaacgggaaacugaauagguuaaucgagaaaacgaacgagaaauuccaucaaauugaaaaagaauucucagaaguggaagggagaauucaggaccucgagaaauauguugaggacacuaaaauagaucucuggucguacaacgcggagcuucuuguugcccuggagaaccagcauacaauugaucuaacugacucagaaaugaacaaacuguuugaaagaacaaagaagcaacugagggaaaaugcugaggauaugggcaaugguuguuucaaaauauaccacaaaugugauaaugccugcauagggucaaucagaaaugggacuuaugaccaugauguauacagagacgaagcauuaaacaaccgguuccagaucaaagguguugagcugaagucaggauacaaagauuggauccuauggauuuccuuugccauaucauguuuuuugcuuuguguugucuugcugggguucaucaugugggccugccaaaaaggcaacauuaggugcaacauuugcauuuga

SEQ ID NO: 44802 - RNA, 1701 nt, Artificial Sequence
  derived and/or modified CDS sequence (wt) from hemagglutinin__InfluenzaA__AIW60696
augaagacuaucauugcuuugagcuacauuuuaugucugguuuucgcucaaaaacuucccggaaaugacaacagcacggcaacgcugugccuggggcaccaugcagugccaaacggaacgcuagugaaaacaaucacgaaugaccaaauugaagugacuaaugcuacugagcugguucagaguuccucaacagguggaauaugcgacaguccucaccaaauccuugauggagaaaacugcacacuaauagaugcucuauugggagacccucauugugauggcuuccaaaauaaggaaugggaccuuuuuguugaacgcagcaaagccuacagcaacuguuacccuuaugaugugccggauuaugccucccuuaggucacuaguugccucauccggcacacuggaguuuaacaaugaaagcuucaauuggacuggagucgaucagaauggaacaagcucugcuugcaaaaggagaucuaauaaaaguuucuuuaguagauugaauugguugcaccaauuaaaauacaaauacccagcacugaacguggcuaugccaaacaaugaaaaauuugacaaauuguacauuugggggguucaccacccgaguacggacagugaccaaaucagccuauaugcucaagcaccagggagagucacagucucuaccaaaagaagccaacaaacuguaaucccgaauaucggaucuagacccuggguaaggggugucuccagcagaauaagcaucuauuggacaauaguaaaaccgggagacauacuuuugauuaacugcacagggaaucuaauugcuccucgggguuacuucaaaauacgaagugggaaaagcucaauaaugaggucagaugcauccauuggcaaaugcaauucugaaugcaucacuccaaauggaagcauucccaaugacaaaccauuucaaaauguaaacaggaucacauauggggccugucccagauauguuaagcaaaacacucugaaauuggcaacagggaugcggaauguaccagagaaacaaacuagaggcauauucggcgcaaucgcggguuucauagaaaaugguugggagggaaugguggacgguugguacgguuucaggcaucaaaauucugagggcacaggacaagcagcagaucucaaaagcacucaagcagcaaucaaccaaaucaacgggaaacugaauagguuaaucgagaaaacgaacgagaaauuccaucaaauugaaaaagaauucucagaaguggaagggagaauucaggaccucgagaaauauguugaggacacuaaaauagaucucuggucguacaacgcggagcuucuuguugcccuggagaaccagcauacaauugaucuaacugacucagaaaugaacaaacuguuugaaagaacaaagaagcaacugagggaaaaugcugaggauaugggcaaugguuguuucaaaauauaccacaaaugugacaaugccugcauagggucaaucagaaaugggacuuaugaccaugauguauacagagacgaagcauuaaacaaccgguuccagaucaaagguguugagcugaagucaggauacaaagauuggauccuauggauuuccuuugccauaucauguuuuuugcuuuguguugucuugcugggguucaucaugugggccugccaaaaaggcaacauuagaugcaacauuugcauuuga

SEQ ID NO: 44803 - RNA, 1701 nt, Artificial Sequence
  derived and/or modified CDS sequence (wt) from hemagglutinin__InfluenzaA__AIW60697
augaagacuaucauugcuuugagcuacauucuaugucugguuuucgcucaaaaacuucccggaaaugacaacagcacggcaacgcugugccuugggcaccaugcaguaccaaacggaacgauagugaaaacaaucacaaaugaccaaauugaaguuacuaaugcuacugagcugguucagaguuccucaacagguggaauaugcgacaguccucaucagauccuugauggagaaaacugcacacuaauagaugcucuauugggagacccucagugugauggcuuccaaaauaagaaaugggaccuuuuuguugaacgcagcaaagccuacagcaacuguuacccuuaugaugugccggaucaugccucccuuaggucacuaguugccucauccggcacacuggaguuuaacaaugaaagcuucgauuggacuggagucacucagaauggaacaagcucuucuugcaaaaggagaucuaauaaaaguuucuuuaguagauugaauugguugacccacuuaaaauacaaauacccagcauugaacgugacuaugccaaacaaugaaaaauuugacaaauuguacauuugggggguucaccacccggauacggacaguguccaaaucagccuauaugcucaagcaucaggaagaaucacagucucuaccaaaagaagccaacaaacuguaaucccgaauaucggaucuagacccaggguaagggauaucuccagccgaauaagcaucuauuggacaauaguaaaaccgggagacauacuuuugauuaacagcacagggaaucuaauugcuccucgggguuacuucaaaauacgaagugggaaaagcucaauaaugagaucagaugcacccauuggcaaaugcaauucugaaugcaucacuccaaauggaagcauucccaaugacaaaccauuucaaaauguaaacaggaucacauauggggccugucccagauauguuaagcaaaacacucugaaauuggcaacagggaugcgaaauguaccagagaaacaaacuagaggcauauuuggcgcaaucgcggguuucauagaaaaugguugggagggaaugguggacgguugguacgguuucaggcaucaaaauucugagggcacaggacaagcagcagaucucaaaagcacucaagcagcaaucaaccaaaucaaugggaaacugaauagguuaaucgggaaaacaaacgagaaauuccaucagauugaaaaagaauucucagaaguagaagggagaauucaggaccucgagaaauauguugaggacacuaaaauagaucucuggucauacaacgcggagcuucuuguugcccuggagaaccaacauacaauugaucuaacugacucagaaaugaacaaacuguuugaaagaacaaagaagcaacugagggaaaaugcugaggauaugggcaaugguuguuucaaaauauaccacaaaugugacaaugccugcauagggucaaucagaaauggaacuuaugaccaugauguguacagagaugaagcauuaaacaaccgguuccagaucaaagguguugagcugaagucaggauauaaagauuggauccuauggauuuccuuugccauaucauguuuuuugcuuuguguugcuuuguugggguucaucaugugggccugccaaaaaggcaacauuaggugcaacauuugcauuuga

SEQ ID NO: 44804 - RNA, 1701 nt, Artificial Sequence
  derived and/or modified CDS sequence (wt) from hemagglutinin__InfluenzaA__AIW60698
augaagacuaucauugcuuugagcuacauucuaugucugguuuucgcucaaaaacuucccggaaaugacaacagcacggcaacgcugugccuugggcaccaugcaguaccaaacggaacgauagugaaaacaaucacaaaugaccaaauugaaguuacuaaugcuacugagcugguucagaguuccucaacagguggaauaugcgacaguccucaucagauccuugauggagaaaacugcacacuaauagaugcucuauugggagacccucagugugauggcuuccaaaauaagaaaugggaccuuuuuguugaacgcagcaaagccuacagcaacuguuacccuuaugaugugccggaucaugccucccuuaggucacuaguugccucauccggcacacuggaguuuaacaaugaaagcuucgauuggacuggagucacucagaauggaacaagcucugcuugcaaaaggagaucuaauaaaaguuucuuuaguagauugaauugguugacccacuuaaaauacaaauacccagcauugaacgugacuaugccaaacaaugaaaaauuugacaaauuguacauuugggggguucaccacccggguacggacagugaccaaaucagccuauaugcucaagcaucaggaagaaucacagucucuaccaaaagaagccaacaaacuguaaucccgaauaucggaucuagacccaggguaagggauaucuccagccgaauaagcaucuauuggacaauaguaaaaccgggagacauacuuuugauuaacagcacagggaaucuaauugcuccucgggguuacuucaaaauacgaagugggaaaagcucaauaaugagaucagaugcacccauuggcaaaugcaauucugaaugcaucacuccaaauggaagcauucccaaugacaaaccauuucaaaauguaaacaggaucacauauggggccugucccagauauguuaagcaaaacacucugaaauuggcaacagggaugcgaaauguaccagagaaacaaacuagaggcauauuuggcgcaaucgcggguuucauagaaaaugguugggagggaaugguggacgguugguacgguuucaggcaucaaaauucugagggcacaggacaagcagcagaucucaaaagcacucaagcagcaaucaaccaaaucaaugggaaacugaauagguuaaucgggaaaacaaacgagaaauuccaucagauugaaaaagaauucucagaaguagaagggagaauucaggaccucgagaaauauguugaggacacuaaaauagaucucuggucauacaacgcggagcuucuuguugcccuggagaaccaacauacaauugaucuaacugacucagaaaugaacaaacuguuugaaagaacaaagaagcaacugagggaaaaugcugaggauaugggcaaugguuguuucaaaauauaccacaaaugugacaaugccugcauagggucaaucagaaauggaacuuaugaccaugauguguacagagaugaagcauuaaacaaccgguuccagaucaaagguguugagcugaagucaggauauaaagauuggauccuauggauuuccuuugccauaucauguuuuuugcuuuguguugcuuuguugggguucaucaugugggccugccaaaaaggcaacauuaggugcaacauuugcauuuga

SEQ ID NO: 44805 - RNA, 1701 nt, Artificial Sequence
  derived and/or modified CDS sequence (wt) from hemagglutinin__InfluenzaA__AIW60699
augaagacuaucauugcuuugagcuacauucuaugucugguuuucgcucaaaaacuucccggaaaugacaacagcacggcaacgcugugcauugggcaccaugcaguaccaaacggaacgauagugaaaacaaucacgaaugaccaaauugaaguuacuaaugcuacugagcugguucagaguuccucaacagguggaauaugcgacaguccucaucagauccuugauggagaaaacugcacacuaauagaugcucuauugggagacccucagugugauggcuuccaaaauaagaaaugggaccuuuuuguugaacgcagcaaagccuacagcaacuguuacccuuaugaugugccggauuaugccucccuuaggucacuaauugccucauccggcacacuggaguuuaacaaugaaagcuucaauuggacuggagucacucaaaauggaacaagcucugcuugcaaaaggagaucuaauaacaguuucuuuaguagauugaauugguugacccacuuaaaauucaaauacccagcauugaacgugacuaugccaaacaaugaagaauuugacaaauuguacauuugggggguucaccacccgguuacggacaaugaccaaaucagccuauaugcucaagcaucaggaaaaaucacagucucuaccaaaagaagccaacaaacuguaaucccgaauaucggaucuagacccaggguaagggauauccccagcagaauaagcaucuauuggacaauaguaaaaccgggagacauacuuuugauuaaaagcacagggaaucuaauugcuccucgggguuacuucaaaauacgaagugggaaaagcucaauaaugagaucagaugcacccauuggcaaaugcaauucugaaugcaucacuccaaauggaagcauucccaaugacaaaccauuucaaaauguaaacaggaucacauauggggccugucccagauauguuaagcaaaacacucugaaauuggcaacagggaugcgaaauguaccagagaaacaaacuagaggcauauuuggcgcaaucgcggguuucauagaaaaugguugggagggaaugguggaugguugguacgguuuccggcaucaaaauucugagggaauaggacaagcagcagaucucaaaagcacucaagcagcaaucgaccaaaucaaugggaagcugaauagguugaucgggaaaaccaacgagaaauuccaucagauugaaaaagaauucucagaaguagaagggagaauccaggaccucgagaaauauguugaggacacuaaaauagaucucuggucauacaacgcggagcuucuuguugcccuggagaaccaacauacaauugaucuaacugacucagaaaugaacaaacuguuugaagaaacaaagaagcaacugagggaaaaugcugaggauaugggcaaugguuguuucaaaauauaccacaaaugugacaaugccugcauagggucaaucagaaauggaacuuaugaccaugauguauacagagaugaagcauuaaacaaccgguuccagaucaaagguguugagcugaagucaggauacaaagauuggauccuauggauuuccuuugccauaucauguuuuuugcuuuguguugcuuuguugggguucaucaugugggccugccaaaaaggcaacauuaggugcaacauuugcauuuga

SEQ ID NO: 44806 - RNA, 1701 nt, Artificial Sequence
  derived and/or modified CDS sequence (wt) from hemagglutinin__InfluenzaA__AIW60700
augaagacuaucauugcuuugagcuacauucuaugucugguuuucgcucaaaaacuucccggaaaugacaacagcacggcaacgcugugcauugggcaccaugcaguaccaaacggaacgauagugaaaacaaucacgaaugaccaaauugaaguuacuaaugcuacugagcugguucagaguuccucaacagguggaauaugcgacaguccucaucagauccuugauggagaaaacugcacacuaauagaugcucuauugggagacccucagugugauggcuuccaaaauaagaaaugggaccuuuuuguugaacgcagcaaagccuacagcaacuguuacccuuaugaugugccggauuaugccucccuuaggucacuaauugccucauccggcacacuggaguuuaacaaugaaagcuucaauuggacuggagucacucaaaauggaacaagcucugcuugcaaaaggagaucuaauaacaguuucuuuaguagauugaauugguugacccacuuaaaauucaaauacccagcauugaacgugacuaugccaaacaaugaagaauuugacaaauuguacauuugggggguucaccacccggguacggacaaugaccaaaucagccuauaugcucaagcaucaggaaaaaucacagucucuaccaaaagaagccaacaaacuguaaucccgaauaucggaucuagacccaggguaagggauauccccagcagaauaagcaucuauuggacaauaguaaaaccgggagacauacuuuugauuaacagcacagggaaucuaauugcuccucgggguuacuucaaaauacgaagugggaaaagcucaauaaugagaucagaugcacccauuggcaaaugcaauucugaaugcaucacuccaaauggaagcauucccaaugacaaaccauuucaaaauguaaacaggaucacauauggggccugucccagauauguuaagcaaaacacucugaaauuggcaacagggaugcgaaauguaccagagaaacaaacuagaggcauauuuggcgcaaucgcggguuucauagaaaaugguugggagggaaugguggaugguugguacgguuucaggcaucaaaauucugagggaauaggacaagcagcagaucucaaaagcacucaagcagcaaucgaccaaaucaaugggaagcugaauagguugaucgggaaaaccaacgagaaauuccaucagauugaaaaagaauucucagaaguagaagggagaauccaggaccucgagaaauauguugaggacacuaaaauagaucucuggucauacaacgcggagcuucuuguugcccuggagaaccaacauacaauugaucuaacugacucagaaaugaacaaacuguuugaagaaacaaagaagcaacugagggaaaaugcugaggauaugggcaaugguuguuucaaaauauaccacaaaugugacaaugccugcauagggucaaucagaaauggaacuuaugaccaugauguauacagagaugaagcauuaaacaaccgguuccagaucaaagguguugagcugaagucaggauacaaagauuggauccuauggauuuccuuugccauaucauguuuuuugcuuuguguugcuuuguugggguucaucaugugggccugccaaaaaggcaacauuaggugcaacauuugcauuuga

SEQ ID NO: 44807 - RNA, 1701 nt, Artificial Sequence
  derived and/or modified CDS sequence (wt) from hemagglutinin__InfluenzaA__AIW60701
augaagacuaucauugcuuugagcuacauucuaugucugguuuucacucaaaaacuucccggaaaugacaacagcacggcaacgcugugccuugggcaccaugcaguaccaaacggaacgauagugaaaacaaucacgaaugaccaaauugaaguuacuaaugcuacugagcugguucagaguuccucaacaggugaaauaugcgacaguccucaucagauccuugauggagaaaacugcacacuaauagaugcucuauugggagacccucagugugauggcuuccaaaauaagaaaugggaccuuuuuguugaacgcagcaaagccuacagcaacuguuacccuuaugaugugccggauuaugccucccuuaggucacuaguugccucauccggcacacuggaguuuaacaaugaaagcuucaauuggacuggagucacucaaaacggaacaagcucugcuugcauaaggagaucuaauaacaguuucuuuaguagauugaauugguugacccacuuaaaauucaaauacccagcauugaacgugacuaugccaaacaaugaaaaauuugacaaauuguacauuugggggguucaccacccggguacggacaaugaccaaaucuucccguaugcucaagcaucaggaagaaucacagucucuaccaaaagaagccaacaaacuguaaucccgaauaucggaucuagacccagaguaaggaauauccccagcagaauaagcaucuauuggacaauaguaaaaccgggagacauacuuuugauuaacagcacagggaaucuaauugcuccuagggguuacuucaaaauacgaagugggaaaagcucaauaaugagaucagaugcacccauuggcaaaugcaauucugaaugcaucacuccaaacggaagcauucccaaugacaaaccauuccaaaauguaaacaggaucacauacggggccugucccagauauguuaagcaaaacacucugaaauuggcaacagggaugcgaaauguaccagagaaacaaacuagaggcauauuuggcgcaaucgcggguuucauagaaaaugguugggagggaaugguggaugguugguacgguuucaggcaucaaaauucugagggaauaggacaagcagcagaucucaaaagcacucaagcagcaaucgaucaaaucaaugggaagcugaauagguugaucgggaaaaccaacgagaaauuccaucagauugaaaaagaauucucagaagucgaagggagaauucaggaccuugagaaauauguugaggacaccaaaauagaucucuggucauacaacgcggagcuucuuguugcccuggagaaccaacauacaauugaucuaacugacucagaaaugaacaaacuguuugaaaaaacaaagaagcaacugagggaaaaugcugaggauaugggcaaugguuguuucaaaauauaccacaaaugugacaaugccugcauaggaucaaucagaaauggaacuuaugaccacgauguauacagagaugaagcauuaaacaaccgguuccagaucaagggcguugagcugaagucaggauacaaagauuggauccuauggauuuccuuugccauaucauguuuuuugcuuuguguugcuuuguugggguucaucaugugggccugccaaaaaggcaacauuaggugcaacauuugcauuuga

SEQ ID NO: 44808 - RNA, 1701 nt, Artificial Sequence
  derived and/or modified CDS sequence (wt) from hemagglutinin__InfluenzaA__AIW60702
augaagacuaucauugcuuugagcuacauucuaugucugguuuucacucaaaaacuucccggaaaugacaacagcacggcaacgcugugccuugggcaccaugcaguaccaaacggaacgauagugaaaacaaucacgaaugaccaaauugaaguuacuaaugcuacugagcugguucagaguuccucaacaggugaaauaugcgacaguccucaucagauccuugauggagaaaacugcacacuaauagaugcucuauugggagacccucagugugauggcuuccaaaauaagaaaugggaccuuuuuguugaacgcagcaaagccuacagcaacuguuacccuuaugaugugccggauuaugccucccuuaggucacuaguugccucauccggcacacuggaguuuaacaaugaaagcuucaauuggacuggagucacucaaaacggaacaagcucugcuugcauaaggagaucuaauaacaguuucuuuaguagauugaauugguugacccacuuaaaauucaaauacccagcauugaacgugacuaugccaaacaaugaaaaauuugacaaauuguacauuugggggguucaccacccggguacggacaaugaccaaaucuuccuguaugcucaagcaucaggaagaaucacagucucuaccaaaagaagccaacaaacuguaaucccgaauaucggaucuagacccaggguaaggaauauccccagccgaauaagcaucuauuggacaauaguaaaaccgggagacauacuuuugauuaacagcacagggaaucuaauugcuccuagggguuacuucaaaauacgaagugggaaaagcucaauaaugagaucagaugcacccauuggcaaaugcaauucugaaugcaucacuccaaauggaagcauucccaaugacaaaccauuccaaaauguaaacaggaucacauauggggccugucccagauauguuaagcaaaacacucugaaauuggcaacagggaugcgaaauguaccagagaaacaaacuagaggcauauuuggcgcaaucgcggguuucauagaaaaugguugggagggaaugguggacgguugguacgguuucaggcaucaaaauucugagggaauaggacaagcagcagaucucaaaagcacucaagcagcaaucgaucaaaucaaugggaagcugaauagguugaucgggaaaaccaacgagaaauuccaucagauugaaaaagaauucucagaagucgaagggagaauucaggaccuugagaaauauguugaggacacuaaaauagaucucuggucauacaacgcggagcuucuuguugcccuggagaaccaacauacaauugaucuaacugacucagaaaugaacaaacuguuugaaaaaacaaagaagcaacugagggaaaaugcugaggauaugggcaaugguuguuucaaaauauaccacaaaugugacaaugccugcauaggaucaaucagaaauggaacuuaugaccacgauguguacagagaugaagcauuaaacaaccgguuccagaucaagggcguugagcugaagucaggauacaaagauuggauccuauggauuuccuuugccauaucauguuuuuugcuuuguguugcuuuguugggguucaucaugugggccugccaaaaaggcaacauuaggugcaacauuugcauuuga

SEQ ID NO: 44809 - RNA, 1701 nt, Artificial Sequence
  derived and/or modified CDS sequence (wt) from hemagglutinin__InfluenzaA__AIZ07211
augaagacuaucauugcuuugagcuacauucuaugucugguuuucgcucaaaaacuuccuggaaaugacaauagcacggcaacgcugugccuugggcaccaugcaguaccaaacggaacgauagugaaaacaaucacgaaugaccgaauugaaguuacuaaugcuacugagcugguucagaauuccucaauaggugaaauaugcgacaguccucaucagauccuugauggagaaaacugcacacuaauagaugcucuauugggagacccucagugugauggcuuucaaaauaagaaaugggaccuuuuuguugaacgaagcaaagccuacagcaacuguuacccuuaugaugugccggauuaugccucccuuaggucacuaguugccucauccggcacacuggaguuuaacaaugaaagcuucaauugggcuggagucacucaaaacggaacaaguucugcuugcauaaggggaucuaauaguaguuucuuuaguagauuaaauugguugacccacucaaacuucaaauacccagcauugaacgugacuaugccaaacaaugaacaauuugacaaauuguacauuugggggguucaccacccggguacggacaaggaccaaaucuuccuguaugcucaaucaucaggaagaaucacaguaucuaccaaaagaagccaacaagcuguaaucccgaauaucggaucuagacccagaauaaggaauaucccuagcagaauaagcaucuauuggacaauaguaaaaccgggagacauacuuuugauuaacagcacagggaaucuaauugcuccuagggguuacuucaaaauacgaagugggaaaagcucaauaaugagaucagaugcacccauuggcaaaugcaagucugaaugcaucacuccaaauggaagcauucccaaugacaaaccauuccaaaauguaaacaggaucacauacggggccugucccagauauguuaagcaaagcacucugaaauuggcaacaggaaugcgaaauguaccagagaaacaaacuagaggcauauuuggcgcaauagcggguuucauagaaaaugguugggagggaaugauggaugguugguacgguuucaggcaucaaaauucugagggaagaggacaagcagcagaucucaaaagcacucaagcagcaaucgaucaaaucaaugggaagcugaaucgauugaucgggaaaaccaacgagaaauuccaucagauugaaaaagaauucucagaaguagaagggagaauucaggaccuugagaaauauguugaggacacaaaaauagaucucuggucauacaacgcggagcuucuuguugcccuggagaaccaacauacaauugaucuaacugacucagaaaugaacaaacuguuugaaaaaacaaagaagcaacugagggaaaaugcugaggauaugggcaaugguuguuucaaaauauaccacaaaugugacaaugccugcauaggaucaaucagaaauggaacuuaugaccacgauguauacagggaugaagcauuaaacaaccgguuccagaucaagggaguugagcuaaagucaggguacaaagauuggauccuauggauuuccuuugccauaucauguuuuuugcuuuguguugcuuuguugggguucaucaugugggccugccaaaagggcaacauuaggugcaacauuugcauuuga

SEQ ID NO: 44810 - RNA, 1701 nt, Artificial Sequence
  derived and/or modified CDS sequence (wt) from hemagglutinin__InfluenzaA__AIZ07212
augaagacuaucauggccuugagcuacauucuaugucugguuuucgcucaaaaacuuccuggaaaugacaauagcacggcaacgcugugccuugggcaccaugcaguaccaaacggaacgauagugaaaacaaucacgaaugaccgaauugaaguuacuaaugcuacugagcugguucagaauuccucaauaggugaaauaugcgacaguccucaucagauccuugauggagaaaacugcacacuaauagaugcucuauugggagacccucagugugauggcuuucaaaauaagaaaugggaccuuuuuguugaacgaagcaaagccuacagcaacuguuacccuuaugaugugccggauuaugccucccuuaggucacuaguugccucauccggcacacuggaguuuaacaaugaaagcuucaauugggcuggagucacucaaaacggaacaaguucugcuugcauaaggggaucuaauaguaguuucuuuaguagauuaaauugguugacccacucaaacuucaaauacccagcauugaacgugacuaugccaaacaaugaacaauuugacaaauuguacauuugggggguucaccacccggguacggacaaggaccaaaucuuccuguaugcucaaucaucaggaagaaucacaguaucuaccaaaagaagccaacaagcuguaaucccgaauaucggaucuagacccagaauaaggaauaucccuagcagaauaagcaucuauuggacaauaguaaaaccgggagacauacuuuugauuaacagcacagggaaucuaauugcuccuagggguuacuucaaaauacgaagugggaaaagcucaauaaugagaucagaugcacccauuggcaaaugcaagucugaaugcaucacuccaaauggaagcauucccaaugacaaaccauuccaaaauguaaacaggaucacauacggggccugucccagauauguuaagcaaagcacucugaaauuggcaacaggaaugcgaaauguaccagagaaacaaacuagaggcauauuuggcgcaauagcggguuucauagaaaaugguugggagggaaugauggaugguugguacgguuucaggcaucaaaauucugagggaagaggacaagcagcagaucucaaaagcacucaagcagcaaucgaucaaaucaaugggaagcugaaucgauugaucgggaaaaccaacgagaaauuccaucagauugaaaaagaauucucagaaguagaagggagaauucaggaccuugagaaauauguugaggacacaaaaauagaucucuggucauacaacgcggagcuucuuguugcccuggagaaccaacauacaauugaucuaacugacucagaaaugaacaaacuguuugaaaaaacaaagaagcaacugagggaaaaugcugaggauaugggcaaugguuguuucaaaauauaccacaaaugugacaaugccugcauaggaucaaucagaaauggaacuuaugaccacgauguauacagggaugaagcauuaaacaaccgguuccagaucaagggaguugagcuaaagucaggguacaaagauuggauccuauggauuuccuuugccauaucauguuuuuugcuuuguguugcuuuguugggguucaucaugugggccugccaaaagggcaacauuaggugcaacauuugcauuuga

SEQ ID NO: 44811 - RNA, 1683 nt, Artificial Sequence
  derived and/or modified CDS sequence (wt) from hemagglutinin__InfluenzaA__AJD78175
auggagacagcaucacugauaacuauacuacuaguaguaacaguaagcaaugcagauaagaucugcaucggcuaccaaucaacaaacuccacagaaacuguagacacacuaacagaaaacaaugucccugugacacaugccaaagaacugcuccacacagagcauaaugggaugcugugugcaacaagcuugggacaaccucuuauucuagacacuuguaccauugaaggauuaaucuauggcaauccuucuugugaucuauuguugggaggaagagaaugguccuauaucgucgagagaccaucagcugcuaacggauuguguuaucccgggaauguagaaaaucuagaagagcuaagaucacuuuuuaguucugcuaggucuuaucaaaggauccagauuuucccagacacaaucuggaaugugucuuacagugggacaagcaaagcauguucagauucauucuacagaagcaugagaugguugacucaaaaggacaacacuuacccuauucaagacgcccaauacacaaauaaucaaggaaagaacauucuuuucauguggggcauaaaucacccacccacugauacugcgcagacaaaucuguacacaagaaccgacacaacaacgaguguggcaacagaagagauaaauaggacuuucaaaccauugauaggaccaaggccucuugucaacgguuugaugggaagaauuaauuauuauuggucgguauuaaaaccgggucaaacacugcgaauaaaaucuaaugggaauuuaauagcuccaugguauggacacauucuuucaggagagagccacggaagaauccugaagacugauuuaaaaagggguagcugcacagugcaaugucagacagagaaggguggcuuaaacacaacauugccauuccaaaaugugaguaaguaugcauuuggaaacugcucaaaauacauuggcauaaagagucucaaacuugcaguuggucugaggaaugugccuucuagaucuaguagaggacuauucggggccauagcaggauuuauagagggagguuggucaggacuaguugcugguugguauggauuccagcauucaaaugaccaagggguugguauggcagcagauagagacucaacccaaaaggcaauugauaaaauaacauccaaagugaauaacauagucgacaaaaugaacaagcaguaugaaauuauagaucaugaauucaaugagguugaaacuagacuuaacaugaucaauaauaagauugaugaucaaauccaagauauaugggcauauaaugcagaauugcuaguucugcuugagaaccagaaaacacucgaugagcaugaugcaaacguaaacaaucuauauaauaaagugaagagggcauuggguuccaaugcgguggaagaugggaaaggauguuucgagcuauaccacaaaugugaugaccaaugcauggagacaauucggaacgggaccuacaauagaaggaaauaucaagaggagucaaaauuagaaagacagaaaauagagggggucaagcuggaaucugaaggaacuuacaaaauccucaccauuuauucgacugucgccucaucucuugugauugcaaugggguuugcugccuucuuguucugggccauguccaaugggucuugcagaugcaacauuuguauauaa

SEQ ID NO: 44812 - RNA, 1683 nt, Artificial Sequence
  derived and/or modified CDS sequence (wt) from hemagglutinin__InfluenzaA__AJD78187
auggagacagcaucacugauaacuauacuacuaguaguaacaguaagcaaugcagauaagaucugcaucggcuaucaaucaacaaacuccacagaaacuguagacacacuaacagaaaacaaugucccugugacacaugccaaagaacugcuccacacagagcauaaugggaugcugugugcaacaagcuugggacacccucuuauucuagacaccuguaccauugaaggguuaaucuauggcaauccuucuugugaucuauuguugggaggaagagaaugguccuauaucgucgagagaccaucagcuguuaacggauuguguuaucccgggaauguagaaaaucuagaagaacuaagaucacuuuuuaguucugccaggucuuaucaaaggauccagauuuucccagacacaaucuggaaugugucuuacagugggacaagcaaaacauguucagauucauucuacagaagcaugagaugguugacucaaaaggacaacgcuuacccuauccaagacgcccaauacacaaauaaucaaggaaagaacauucuuuucauguggggcauaaaucacccacccacugauacuacgcagacaaaucuguacacaagaaccgacacgacaacgaguguggcaacagaagagauaaauaggacuuucaaaccauugauaggaccaaggccucuugucaacgguuugaugggaagaauuaauuauuauuggucgguauuaaaaccgggucaaacacugcgaauaaaaucuaaugggaauuugauagcuccaugguauggacacauucuuucaggagagagccacggaagaauccugaagacugauuuaaaaagggguagcugcacaguacaaugucagacagagaaggguggcuuaaacacaacauugccauuccaaaaugugaguaaguaugcauuuggaaacugcucaaaauacauuggcauaaagagucucaaacuugcaguuggucugaggaaugugccuucuagaucuaguagaggacuauucggggccauagcaggauuuauagagggagguuggucaggacuaguugcugguugguauggauuccagcauucaaaugaccaagggguugguauggcagcagauagagacucaacccaaaaggcaauugauaaaauaacauccaaagugaauaacauagucgacaaaaugaacaagcaguaugaaauuauagaucaugaauucagugagguugaaacuagacuuaacaugaucaauaauaagauugaugaucaaauccaagauauaugggcauauaaugcagaauuguuaguucugcuugagaaccagaaaacacucgaugagcaugaugcaaacguaaacaaucuauauaauaaagugaagagggcguuggguuccaaugcgguggaagaugggaaaggauguuucgagcuauaccacaaaugugaugaccaaugcauggagacaauucggaaugggaccuacaauagaaggaaauaucaagaggagucgaaauuagaaagacagaaaauagagggggucaagcuggaaucugaaggaacuuacaaaauccucaccauuuauucgacugucgccucaucucuugugauugcaaugggguuugcugccuucuuguucugggccauguccaaugggucuugcagaugcaacauuuguauauaa

SEQ ID NO: 44813 - RNA, 1683 nt, Artificial Sequence
  derived and/or modified CDS sequence (wt) from hemagglutinin__InfluenzaA__AJD78199
auggagacaguaucacuaauaacuauacuacuaguagcaacaguaagcaaugcagauaaaaucugcaucggcuaucaaucaacaaacuccacagaaacuguggacacacuaacagaaaacaaugucccugugacacaugccaaagaacugcuccacacagagcauaaugggaugcugugugcaacaagcuugggacaaccucuuauuuuagacaccugcaccauugaagggcuaaucuauggcaauccuucuugugaucuaucgcuggaaggaagagaaugguccuauaucgucgagagaccaucagcuguuaacggauuguguuaccccgggaauguagaaaaucuagaagagcuaaggucacuuuuuaguucugcuaggucuuaucaaagaauccagauuuucccagacacaaucuggaaugugucuuacgaugggacaagcacagcaugcucagguucauucuacagaagcaugagaugguugacucggaagaacggcgauuacccuauccaagacgcccaauacacaaauaaucaagggaagaacauucuuuucauguggggcauaaaucacccacccaccgauacuacacagagagaucuguacacgagaaccgacacaacaacgaguguggcaacagaagaaauaaauaggaucuucaaaccauugauaggaccaaggccucuugucaacgguuugaugggaagaauugauuauuauuggucuguauugaaaccgggucagacacugcgaauaaaaucugaugggaaucuaauagcuccaugguauggacacauucuuucaggagagagccacggaagaauucugaagacugauuuaaaaagggguagcugcacagugcaaugucagacagagaaagguggcuuaaacacaacacugccauuccaaaauguaaguaaguaugcauuuggaaacugcucaaaauacauuggcauaaagagucucaaacuugcaguuggucugaggaaugugccuucuagaucuaguagaggacuauucggggccauagcaggguuuauagagggagguuggucaggacuaguugcugguugguauggauuccagcauucaaaugaccaagggguugguauggcagcagauagagacucaacccaaaaggcaauugauaaaauaacauccaaagugaauaauauagucgacaaaaugaacaagcaguaugaaaucauugaucaugaauucagugagguagaaacuagacuuaacaugaucaauaauaagauugaugaucaaauccaggauauaugggcauauaaugcagaauugcuaguucugcuugaaaaccagaaaacacucgaugagcaugacgcaaauguaaacaaucuauauaauaaaguaaagagggcguuggguuccaaugcgguggaagaugggaaaggauguuucgagcuauaccacaaaugugaugaccaaugcauggagacaauucggaacgggaccuacaacagaaggaaguaucaagaggagucaaaauuagaaagacagaaaauagagggggucaagcuggaaucugaaggaacuuacaaaauccucaccauuuauucgacuguugccucaucucuugugauugcaaugggguuugcugccuucuuguucugggccauguccaaugggucuugcagaugcaacauuuguauauaa

SEQ ID NO: 44814 - RNA, 1683 nt, Artificial Sequence
  derived and/or modified CDS sequence (wt) from hemagglutinin__InfluenzaA__AJD78211
auggagacaguaucacuaauaacuauacuacuaguagcaacaguaagcaaugcagauaaaaucugcaucggcuaucaaucaacaaacuccacagaaacuguggacacacuaacagaaaacaaugucccugugacacaugccaaagaacugcuccacacagagcauaaugggaugcugugugcaacaagcuugggacaaccucuuauuuuagacaccugcaccauugaagggcuaaucuauggcaauccuucuugugaucuaucgcuggaaggaagagaaugguccuauaucgucgagagaccaucagcuguuaacggauuguguuaccccgggaauguagaaaaucuagaagagcuaaggucacuuuuuaguucugcuaggucuuaucaaagaauccagauuuucccagacacaaucuggaaugugucuuacgaugggacaagcacagcaugcucagguucauucuacagaagcaugagaugguugacucgaaagaauggcgauuacccuauccaagacgcccaauacacaaauaaucaagggaagaacauucuuuucauguggggcauaaaucacccacccaccgauacuacacagagagaucuguacacgagaaccgacacaacaacgaguguggcaacagaagaaauaaauaggaucuucaaaccauugauaggaccaaggccucuugucaacgguuugaugggaagaauugauuauuauuggucuguauugaaaccgggucagacacugcgaauaaaaucugaugggaaucuaauagcuccaugguauggacacauucuuucaggagagagccacggaagaauucugaagacugauuuaaaaagggguagcugcacagugcaaugucagacagagaaagguggcuuaaacacaacacugccauuucaaaauguaaguaaguaugcauuuggaaacugcucaaaauacauuggcauaaagagccucaaacuugcaguuggucugaggaaugugccuucuagaucuagaagaggacuauucggggccauagcaggguuuauagaaggagguuggucaggacuaguugcugguugguauggauuccagcauucaaaugaccaagggguugguauggcagcagauagagacucaacccaaaaggcaauugauaaaauaacauccaaagugaauaauauagucgacaaaaugaacaagcaguaugaaaucauugaucaugaauucagugagguagaaacuagacuuaacaugaucaauaauaagauugaugaucaaauccaggauauaugggcauauaaugcagaauugcuaguucugcuugaaaaccagaaaacacucgaugagcaugacgcaaauguaaacaaucuauauaauaaaguaaagagggcguuggguuccaaugcgguggaagaugggaaaggauguuucgagcuauaccacaaaugugaugaccaaugcauggagacaauucggaacgggaccuacaacagaaggaaguaucaagaggagucaaaauuagaaagacagaaaauagagggggucaagcuggaaucugaaggaacuuacaaaauccucaccauuuauucgacuguugccucaucucuugugauugcaaugggguuugcugccuucuuguucugggccauguccaaugggucuugcagaugcaacauuuguauauaa

SEQ ID NO: 44815 - RNA, 1689 nt, Artificial Sequence
  derived and/or modified CDS sequence (wt) from hemagglutinin__InfluenzaA__AJI76401
auggccaucauuuaucucauacuccuguucgcaacggugagaggggaccagauaugcauuggauaccaugccaauaauuccacagaaaaggucgacacaauucuagagcggaaugucacugugacucaugccaaggacauccuugagaagacccacaacggaaagcuaugcaaacuaaacggaaucccuccacuugaacuaggggacuguagcauugccggauggcuucuuggaaauccagaaugugauaggcuucuaagggugccagaauggucauauauaauggaaaaagaaaacccaagauacaguuuguguuacccaggcagcuuaaaugacuaugaagaauugaaacaucuccucagcagcguaaaacauuucgagaaaguaaggauccugcccaaagauagauggacaaaucauacaacaacuggagguucaaaggccugcgcagugucagguaaaccaucauucuucaggaacauggucuggcugacaaagaaaggaccaaauuauccggucgccaaaggaucguacaacaauacgagcggggagcaaaugcuaauaauuuggggggugcaccauccuauugaugaggcagaacaaagagcauuguaccagaacgugggaaccuauguuuccgcaagcacaucaacauuguacaaaaggucaaucccugaaauagcagcaaggccugaagugaauggacuuggaaguagaauggaauucucuuggacccucuuggauguaugggacaccauaaauuuugagagcacugguaaucuaguugcaccagaguauggauucaaaauaucaaaaagagguaguucagggaucaugaagacagaaggaacacuugggaacugugagaccaaaugccaaacuccuuugggagcaauaaauacaacacuaccuuuucacaauguccacccacugacaauaggugaaugccccaaauauguaaaaucggagaaauuggucuuagcaacaggacuaaggaauguuccccaaauugaaucaagaggauuguuuggggcaauagcuggcuuuauagaaggaggauggcaaggaaugguugaugguugguauggauaccaccacagcaaugaccagggaucaggguaugcagcagacaaagaauccacucaaaaagcauuugauggaaucaccaacaagguaaauucugugauugaaaagaugaacacccaauuugaagcuguugggaaagaauucaauaacuuagagaaaagacuggagaacuugaacaaaaggauggaagacggguuccuagauguguggacauauaaugcugagcuucuaguucugauggaaaaugaaaggacacuugacuuccaugauucuaauguaaaaaaccuguaugaaaaagucagaaugcagcugagagacaacgucagagaacuaggaaauggauguuuugaauuuuaucacaaaugugacgaugaaugcaugaauagugugaaaaacggaacauaugauuaucccaaguaugaagaagaaucuaaacuaaagagaaaugaaaucaaagggguaaaauuaagcagcauggggguuuaccaaauucuugccauuuaugcuacaguugcagguucucugucacuggcaaucaugguagcugggaucucuuucuggaugugcuccaacgggucucugcagugcagaaucugcauauga

SEQ ID NO: 44816 - RNA, 1701 nt, Artificial Sequence; identical to SEQ ID NO: 44077
  derived and/or modified CDS sequence (wt) from hemagglutinin__InfluenzaA__AJI80137

SEQ ID NO: 44817 - RNA, 1701 nt, Artificial Sequence; identical to SEQ ID NO: 44077
  derived and/or modified CDS sequence (wt) from hemagglutinin__InfluenzaA__AJI80149

SEQ ID NO: 44818 - RNA, 1701 nt, Artificial Sequence; identical to SEQ ID NO: 44640
  derived and/or modified CDS sequence (wt) from hemagglutinin__InfluenzaA__AJI80161

SEQ ID NO: 44819 - RNA, 1701 nt, Artificial Sequence
  derived and/or modified CDS sequence (wt) from hemagglutinin__InfluenzaA__AJI80172
augaagacuaucauugcuuugagcuacauucuaugucugguuuucgcucaaaaacuuccuggaaaugacaauagcacggcaacgcugugccuugggcaccaugcaguaccaaacggaacgauagugaaaacaaucacgaaugaccgaauugaaguuacuaaugcuacugagcugguucagaauuccucaauaggugaaauaugcgacaguccucaucagauccuugauggagaaaacugcucacuaauagaugcucuauugggagacccucagugugauggcuuucaaaauaagaaaugggaccuuuuuguugaacgaagcaaagccuacagcaacuguuacccuuaugaugugccggauuaugccucccuuaggucacuaguugccucauccggcacacuggaguuuaacaaugaaagcuucaauugggcuggagucacucaaaacggaacaaguucugcuugcauaaggggaucuaauaguaguuucuuuaguagauuaaauugguugacccacuuaaacuucaaauacccagcauugaacgugacuaugccaaacaaugaacaauuugacaaauuguacauuugggggguucaccacccggguacggacaaggaccaaaucuuccuguaugcucaaucaucaggaagaaucacaguaucuaccaaaagaagccaacaagcuguaaucccgaauaucggaucuagacccagaauaaggaauaucccuagcagaauaagcaucuauuggacaauaguaaaaccgggagacauacuuuugauuaacagcacagggaaucuaauugcuccuagggguuacuucaaaauacgaagugggaaaagcucaauaaugagaucagaugcacccauuggcaaaugcaagucugaaugcaucaccccaaauggaagcauucccaaugacaaaccauuccaaaauguaaacaggaucacauacggggccugucccagauauguuaagcaaagcacucugaaauuggcaacaggaaugcgaaauguaccagagaaacaaacuagaggcauauuuggcgcaauagcggguuucauagaaaaugguugggagggaaugguggaugguugguacgguuucaggcaucaaaauucugagggaagaggacaagcagcagaucucaaaagcacucaagcagcaaucgaucaaaucaaugggaagcugaaucgauugaucgggaaaaccaacgagaaauuccaucagauugaaaaagaauucucagaaguagaagggagaauucaggaccuugagaaauauguugaggacacaaaaauagaucucuggucauacaacgcggagcuucuuguugcccuggagaaccaacauacaauugaucuaacugacucagaaaugaacaaacuguuugaaaaaacaaagaagcaacugagggaaaaugcugaggauaugggcaaugguuguuucaaaauauaccacaaaugugacaaugccugcauaggaucaaucagaaauggaacuuaugaccacgauguauacagggaugaggcauugaacaaccgguuccagaucaagggaguugaguugaagucaggguacaaagauuggauccuauggauuuccuuugccauaucauguuuuuugcuuuguguugcuuuguugggguucaucaugugggccugccaaaagggcaacauuaggugcaacauuugcauuuga

SEQ ID NO: 44820 - RNA, 1701 nt, Artificial Sequence
  derived and/or modified CDS sequence (wt) from hemagglutinin__InfluenzaA__AJI80196
augaagacuaucauugcuuugagcuacauucuaugucugguuuucgcucaaaaacuuccuggaaaugacaauagcacggcaacgcugugccuugggcaccaugcaguaccaaacggaacgauagugaaaacaaucacgaaugaccgaauugaaguuacuaaugcuacugagcugguucagaauuccucaauaggugaaauaugcgacaguccucaucagauccuugauggagaaaacugcacacuaauagaugcucuauugggagacccucagugugauggcuuucaaaauaaggaaugggaccuuuuuguugaacgaagcaaagccuacagcaacuguuacccuuaugaugugccggauuaugccucccuuaggucacuaguugccucauccggcacacuggaguuuaacaaugaaagcuucaauugggcuggagucacucaaaacggaacaaguucugcuugcauaaggggaucuaauaguaguuucuuuaguagauuaaauugguugacccacuuaaacuucaaauacccagcauugaacgugacuaugccaaacaaugaacaauuugacaaauuguacauuugggggguucaccacccggguacggacaaggaccaaaucuuccuguaugcucaaucaucaggaagaaucacaguaucuaccaaaagaagccaacaagcuguaaucccgaauaucggaucuagacccagaauaaggaauaucccuagcagaauaagcaucuauuggacaauaguaaaaccgggagacauacuuuugauuaacagcacagggaaucuaauugcuccuagggguuacuucaaaauacgaagugggaaaagcucaauaaugagaucagaugcacccauuggcaaaugcaagucugaaugcaucacuccaaauggaagcauucccaaugacaaaccauuccaaaauauaaacaggaucacauacggggccugucccagauauguuaagcaaagcacucugaaauuggcaacaggaaugcgaaauguaccagagaaacaaacuagaggcauauuuggcgcaauagcggguuucauagaaaaugguugggagggaaugguggaugguugguacgguuucaggcaucaaaauucugagggaagaggacaagcagcagaucucaaaagcacucaagcagcaaucgaucaaaucaaugggaagcugaaucgauugaucgggaaaaccaacgagaaauuccaucagauugaaaaagaauucucagaaguagaagggagaauucaggaccuugagaaauauguugaggacacaaaaauagaucucuggucauacaacgcggaguuucuuguugcccuggagaaccaacauacaauugaucuaacugacucagaaaugaacaaacuguuugaaaaaacaaagaagcaacugagggaaaaugcugaggauaugggcaaugguuguuucaaaauauaccacaaaugugacaaugccugcauaggaucaaucagaaauggaacuuaugaccacgauguauacagggaugaggcauugaacaaccgguuccagaucaagggaguugaguugaagucaggguacaaagauuggauccuauggauuuccuuugccauaucauguuuuuugcuuuguguugcuuuguugggguucaucaugugggccugccaaaagggcaacauuaggugcaacauuugcauuuga

SEQ ID NO: 44821 - RNA, 1701 nt, Artificial Sequence; identical to SEQ ID NO: 44674
  derived and/or modified CDS sequence (wt) from hemagglutinin__InfluenzaA__AJI80208

SEQ ID NO: 44822 - RNA, 1701 nt, Artificial Sequence
  derived and/or modified CDS sequence (wt) from hemagglutinin__InfluenzaA__AJI80220
augaagacuaucauugcuuugagcuacauucuaugucugguuuucgcucaaaaacuuccuggaaaugacaauagcacggcaacgcugugccuugggcaccaugcaguaccaaacggaacgauagugaaaacaaucacgaaugaccgaauugaaguuacuaaugcuacugagcugguucagaauuccucaauaggugaaauaugcgacaguccucaucagauccuugauggagaaaacugcacacuaauagaugcucuauugggagacccucagugugauggcuuucaaaauaagaaaugggaccuuuuuguugaacgaagcaaagccuacagcaacuguuacccuuaugaugugccggauuaugccucccuuaggucacuaguugccucauccggcacacuggaguuuaacaaugaaagcuucaauugggcuggagucacucaaaacggaacaaguucugcuugcauaaggggaucuaauaguaguuucuuuaguagauuaaauugguugacccacuuaaacuucaaauacccagcauugaacgugacuaugccaaacaaugaacaauuugacaaauuguacauuugggggguucaccacccggguacggacaaggaccaaaucuuccuguaugcucaaucaucaggaagaaucacaguaucuaccaaaagaagccaacaagcuguaaucccgaauaucggaucuagacccagaauaaggaauaucccuagcagaauaagcaucuauuggacaauaguaaaaccgggagacauacuuuugauuaacagcacagggaaucuaauugcuccuagggguuacuucaaaauacgaagugggaaaagcucaauaaugagaucagaugcacccauuggcaaaugcaagucugaaugcaucacuccaaauggaagcauucccaaugacaaaccauuccaaaauguaaacaggaucacauacggggccugucccagauauguuaagcaaagcacucugaaauuggcaacaggaaugcgaaauguaccagagaaacaaacuagaggcauauuuggcgcaauagcggguuucauagaaaaugguugggagggaaugguggaugguugguacgguuucaggcaucagaauucugagggaagaggacaagcagcagaucucaaaagcacucaagcagcaaucgaucaaaucaaugggaagcugaaucgauugaucgggaaaaccaacgagaaauuccaucagauugaaaaagaauucucagaaguagaagggagaauucaggaccuugagaaauauguugaggacacaaaaauagaucucuggucauacaacgcggagcuucuuguugcccuggagaaccaacauacaauugaucuaacugacucagaaaugaacaaacuguuugaaaaaacaaagaagcaacugagggaaaaugcugaggauaugggcaaugguuguuucaaaauauaccacaaaugugacaaugccugcauaggaucaaucagaaauggaacuuaugaccacgauguauacagggaugaagcauuaaacaaccgguuccagaucaagggaguugaguugaagucaggguacaaagauuggauccuauggauuuccuuugccauaucauguuuuuugcuuuguguugcuuuguugggguucaucaugugggccugccaaaagggcaacauuaggugcaacauuugcauuuga

SEQ ID NO: 44823 - RNA, 1701 nt, Artificial Sequence; identical to SEQ ID NO: 44819
  derived and/or modified CDS sequence (wt) from hemagglutinin__InfluenzaA__AJI80232

SEQ ID NO: 44824 - RNA, 1701 nt, Artificial Sequence; identical to SEQ ID NO: 44822
  derived and/or modified CDS sequence (wt) from hemagglutinin__InfluenzaA__AJI80244

SEQ ID NO: 44825 - RNA, 1701 nt, Artificial Sequence; identical to SEQ ID NO: 44622
  derived and/or modified CDS sequence (wt) from hemagglutinin__InfluenzaA__AJI80256

SEQ ID NO: 44826 - RNA, 1701 nt, Artificial Sequence; identical to SEQ ID NO: 42155
  derived and/or modified CDS sequence (wt) from hemagglutinin__InfluenzaA__AJI80268

SEQ ID NO: 44827 - RNA, 1701 nt, Artificial Sequence
  derived and/or modified CDS sequence (wt) from hemagglutinin__InfluenzaA__AJI80280
augaagacuaucauugcuuugagcuacauucuaugucugguuuucgcucaaaaacuuccuggaaaugacaauagcacggcaacgcugugccuugggcaccaugcaguaccaaacggaacgauagugaaaacaaucacgaaugaccgaauugaaguuacuaaugcuacugagcugguucagaauuccucaauagguaaaauaugcgacaguccucaucagauccuugauggagaaaacugcacacuaauagaugcucuauugggagacccucagugugauggcuuucaaaauaaggaaugggaccuuuuuguugaacgaagcaaagccuacagcaacuguuacccuuaugaugugccggauuaugccucccuuaggucacuaguugccucauccggcacacuggaguuuaacaaugaaagcuucaauugggcuggagucacucaaaacggaacaaguucugcuugcauaaggggaucuaauaguaguuucuuuaguagauuaaauugguugacccacuuaaacuucaaauacccagcauugaacgugacuaugccaaacaaugaacaauuugacaaauuguacauuugggggguucaccacccggguacggacaaggaccaaaucuuccuguaugcucaaucaucaggaagaaucacaguaucuaccaaaagaagccaacaagcuguaaucccgaauaucggaucuagacccagaauaaggaauaucccuagcagaauaagcaucuauuggacaauaguaaaaccgggagacauacuuuugauuaacagcacagggaaucuaauugcuccuagggguuacuucaaaauacgaagugggaaaagcucaauaaugagaucagaugcacccauuggcaaaugcaagucugaaugcaucacuccaaauggaagcauucccaaugacaaaccauuccaaaauguaaacaggaucacauacggggccugucccagauauguuaagcaaagcacucugaaauuggcaacaggaaugcgaaauguaccagagaaacaaacuagaggcauauuuggcgcaauagcggguuucauagaaaaugguugggagggaaugguggaugguugguacgguuucaggcaucaaaauucugagggaagaggacaagcagcagaucucaaaagcacucaagcagcaaucgaucaaaucaaugggaagcugaaucgauugaucgggaaaaccaacgagaaauuccaucagauugaaaaagaauucucagaaguagaagggaggauucaggaccuugagaaauauguugaggacacaaaaauagaucucuggucauacaacgcggagcuucuuguugcccuggagaaccaacauacaauugaucuaacugacucagaaaugaacaaacuguuugaaaaaacaaagaagcaacugagggaaaaugcugaggauaugggcaaugguuguuucaaaauauaccacaaaugugacaaugccugcauaggaucaaucagaaauggaacuuaugaccacgauguauacagggaugaggcauugaacaaccgguuccagaucaagggaguugaguugaagucaggguacaaagauuggauccuauggauuuccuuugccauaucauguuuuuugcuuuguguugcuuuguugggguucaucaugugggccugccaaaagggcaacauuaggugcaacauuugcauuuga

SEQ ID NO: 44828 - RNA, 1701 nt, Artificial Sequence; identical to SEQ ID NO: 44610
  derived and/or modified CDS sequence (wt) from hemagglutinin__InfluenzaA__AJI80292

SEQ ID NO: 44829 - RNA, 1701 nt, Artificial Sequence; identical to SEQ ID NO: 44674
  derived and/or modified CDS sequence (wt) from hemagglutinin__InfluenzaA__AJI80303

SEQ ID NO: 44830 - RNA, 1701 nt, Artificial Sequence; identical to SEQ ID NO: 44610
  derived and/or modified CDS sequence (wt) from hemagglutinin__InfluenzaA__AJI80315

SEQ ID NO: 44831 - RNA, 1701 nt, Artificial Sequence
  derived and/or modified CDS sequence (wt) from hemagglutinin__InfluenzaA__AJI80326
augaaggcaauacuaguaguucugcuauauacauuugcaaccgcaaaugcagacacauuauguauagguuaucaugcgaacaauucaacagacacuguagacacaguacuagaaaagaauguaacaguaacacacucuguuaaccuucuagaagacaagcauaacgggaaacuaugcaaacuaagagggguagccccauugcauuuggguaaauguaacauugcuggcuggauccugggaaauccagagugugaaucacucuccacagcaaguucaugguccuacauuguggaaacaucuaguucagacaauggaacguguuacccaggagauuucaucaauuaugaggagcuaagagagcaauugagcucagugucaucauuugaaagguuugagauauuccccaagacaaguucauggcccaaucaugacucgaacaaagguguaacggcagcauguccucacgcuggagcaaaaagcuucuacaaaaauuuaauauggcuaguuaaaaaaggaaauucauacccaaagcucagccaauccuacauuaaugauaaagggaaagaaguccucgugcuguggggcauccaccauccaucuacuacugcugaccaacaaagucucuaucagaaugcagaugcauauguuuuuguggggacaucaagauacagcaaaaaguucaagccggaaauagcaauaagacccaaagugagggaucaagaagggagaaugaacuauuacuggacacuaguagagccgggagacaaaauaacauucgaagcaacuggaaaucuagugguaccgagauaugcauucacaauggaaaaaaaugcuggaucugguauuaucauuucagauacaccaguccacgauugcaauacaacuugucagacacccgagggugcuauaaacaccagccucccauuucagaauauacauccgaucacaauuggaaaauguccaaaguauguaaaaagcacaaaauugagacuggccacaggauugaggaaugucccgucuauucaaucuagaggccuauucggggccauugccggcuucauugaagggggguggacagggaugguagauggaugguacgguuaucaccaucaaaaugagcaggggucaggauaugcagccgaccugaagagcacacaaaaugccauugacaagauuacuaacaaaguaaauucuguuauugaaaagaugaauacacaguucacagcaguggguaaagaguucaaccaccuggaaaaaagaauagagaauuuaaauaaaaaaguugaugaugguuuccuggacauuuggacuuacaaugccgaacuguugguucuauuggaaaaugaaagaacuuuggacuaccacgauucaaaugugaagaacuuguaugaaaagguaagaaaccaguuaaaaaacaaugccaaggaaauuggaaacggcugcuuugaauuuuaccacaaaugcgauaacacgugcauggaaagugucaaaaaugggacuuaugacuacccaaaauacucagaggaagcaaaauuaaacagagaaaaaauagaugggguaaagcuggaaucaacaaggauuuaccagauuuuggcgaucuauucaacugucgccaguucauugguacugguagucucccugggggcaaucagcuucuggaugugcucuaaugggucucuacaauguagaauauguauuuaa

SEQ ID NO: 44832 - RNA, 1701 nt, Artificial Sequence
  derived and/or modified CDS sequence (wt) from hemagglutinin__InfluenzaA__AJI80337
augaaggcaauacuaguaguucugcuauacacauuugcaaccgcaaaugcagacacauuauguauagguuaucaugcgaacaauucaacagacacuguagacacaguacuagaaaagaauguaacaguaacacacucuauuaaccuucuagaagacaagcauaacgggaaacuaugcaaacuaagagggguagccccauugcauuuggguaaauguaacauugcuggcuggauccugggaaauccagagugugaaucacucuccacagcaaguucaugguccuacauuguggaaacaucuaguucagacaauggaacguguuacccaggagauuucaucaauuaugaggagcuaagagagcaauugagcucagugucaucauuugaaagguuugagauguuccccaagacaaguucauggcccaaucaugacucgaacaaagguguaacggcagcauguccucaugcuggagcaaaaagcuucuacaaaaauuuaauauggcuaguuaaaaaaggaaauucauacccaaagcucagcaaauccuacauuaaugauaaagggaaagaaguccucgugcuguggggcauucaccauccaucuacuacugcugaccaacaaagucucuaucagaaugcaaaugcauauguuuuuguggggacaucaaaauacagcaagaaguucaagccggaaauagcaauaagacccaaagugagggaucaagaagggagaaugaacuauuacuggacacuaauagagccgggagacaaaauaacauucgaagcaacuggaaaucuagugguaccgagauaugcauucgcaauggaaagaaaugcuggaucugguauuaucauuucagauacaccaguccacgauugcaauacaacuugucagacacccgagggugcuauaaacaccagccucccauuucagaauauacauccgaucacaauuggaaaauguccaaaguauguaaaaagcacaaaauugagacuggccacaggauugaggaauaucccgucuauucaaucuagaggccuauucggggccauugccggcuucauugaagggggguggacagggaugguagauggaugguacgguuaucaccaucaaaaugagcaggggucaggauaugcagccgaccugaagagcacacaaaaugccauugacaagauuacuaacaaaguaaauucuguuauugaaaagaugaauacacaguucacagcaguggguaaagaguucaaucaccuggaaaaaagaauagagaauuuaaauaaaaaaguugaugaugguuuccuggacauuuggacuuacaaugccgaacuguugguucuauuggaaaaugaaagaacuuuggacuaccacgauucaaaugugaagaacuuguaugaaaagguaagaaaccaguuaaaaaacaaugccaaggaaauuggaaacggcugcuuugaauuuuaccacaaaugcgauaacacgugcauggaaagugucaaaaaugggacuuaugacuacccaaaauacucagaggaagcaaaauuaaacagagaaaaaauagaugggguaaagcuggaaucaacaaggauuuaccagauuuuggcgaucuauucaacugucgccaguucauugguacugguagucucccugggggcaaucaguuucuggaugugcucuaaugggucucuacaguguagaauauguauuuaa

SEQ ID NO: 44833 - RNA, 1701 nt, Artificial Sequence; identical to SEQ ID NO: 44822
  derived and/or modified CDS sequence (wt) from hemagglutinin__InfluenzaA__AJI80348

SEQ ID NO: 44834 - RNA, 1701 nt, Artificial Sequence; identical to SEQ ID NO: 44679
  derived and/or modified CDS sequence (wt) from hemagglutinin__InfluenzaA__AJI80360

SEQ ID NO: 44835 - RNA, 1701 nt, Artificial Sequence; identical to SEQ ID NO: 44622
  derived and/or modified CDS sequence (wt) from hemagglutinin__InfluenzaA__AJI80372

SEQ ID NO: 44836 - RNA, 1701 nt, Artificial Sequence; identical to SEQ ID NO: 44640
  derived and/or modified CDS sequence (wt) from hemagglutinin__InfluenzaA__AJI80384

SEQ ID NO: 44837 - RNA, 1701 nt, Artificial Sequence; identical to SEQ ID NO: 44640
  derived and/or modified CDS sequence (wt) from hemagglutinin__InfluenzaA__AJI80395

SEQ ID NO: 44838 - RNA, 1701 nt, Artificial Sequence; identical to SEQ ID NO: 44640
  derived and/or modified CDS sequence (wt) from hemagglutinin__InfluenzaA__AJI80406

SEQ ID NO: 44839 - RNA, 1701 nt, Artificial Sequence; identical to SEQ ID NO: 44640
  derived and/or modified CDS sequence (wt) from hemagglutinin__InfluenzaA__AJI80417

SEQ ID NO: 44840 - RNA, 1701 nt, Artificial Sequence; identical to SEQ ID NO: 44594
  derived and/or modified CDS sequence (wt) from hemagglutinin__InfluenzaA__AJI80428

SEQ ID NO: 44841 - RNA, 1701 nt, Artificial Sequence
  derived and/or modified CDS sequence (wt) from hemagglutinin__InfluenzaA__AJI80439
augaagacuaucauugcuuugagcuacauucuaugucugguuuucgcucaaaaacuuccuggaaaugacaauagcacggcaacgcugugccuugggcaccaugcaguaccaaacggaacgauagugaaaacaaucacgaaugaccgaauugaaguuacuaaugcuacugagcugguucagaauuccucaauaggugaaauaugcgacaguccucaucagauccuugauggagaaaacugcacacuaauagaugcucuauugggagacccucagugugauggcuuucaaaauaagaaaugggaccuuuuuguugaacgaagcaaagccuacagcaacuguuacccuuaugaugugccggauuaugccucccuuaggucacuaguugccucauccggcacacuggaguuuaacaaugaaagcuucaauugggcuggagucacucaaaacggaacaaguucugcuugcauaaggggaucuaauaguaguuucuuuaguagauuaaauugguugacccacuuaaacuucaaauacccagcauugaacgugacuaugccaaacaaugaacaauuugacaaauuguacauuugggggguucaccacccggguacggacaaggaccaaaucuuccuguaugcucaaucaucaggaagaaucacaguaucuaccaaaagaagccaacaagcuguaaucccgaauaucggaucuagacccagaauaaggaauaucccuagcagaauaagcaucuauuggacaauaguaaaaccgggagacauacuuuugauuaacagcacagggaaucuaauugcuccuagggguuacuucaaaauacgaagugggaaaagcucaauaaugagaucagaugcacccauuggcaaaugcaagucugaaugcaucacuccaaauggaagcauucccaaugacaaaccauuccaaaauguaaacaggaucacauacggggccugucccagauauguuaagcaaagcacucugaaauuggcaacaggaaugcgaaauguaccagagaaacaaacuagaggcauauuuggcgcaauagcggguuucauagaaaaugguugggagggaaugguggaugguugguacgguuucagacaucaaaauucugagggaagaggacaagcagcagaucucaaaagcacucaagcagcaaucgaucaaaucaaugggaagcugaaucgauugaucgggaaaaccaacgagaaauuccaucagauugaaaaagaauucucagaaguagaagggagaauucaggaccuugagaaauauguugaggacacaaaaauagaucucuggucauacaacgcggagcuucuuguugcccuggagaaccaacauacaauugaucuaacugacucagaaaugaacaaacuguuugaaaaaacaaagaagcagcugagggaaaaugcugaggauaugggcaaugguuguuucaaaauauaccacaaaugugacaaugccugcauaggaucaaucagaaauggaacuuaugaccacgauguauacagggaugaggcauugaacaaccgguuccagaucaagggaguugaguugaagucaggguacaaagauuggauccuauggauuuccuuugccauaucauguuuuuugcuuuguguugcuuuguugggguucaucaugugggccugccaaaagggcaacauuaggugcaacauuugcauuuga

SEQ ID NO: 44842 - RNA, 1701 nt, Artificial Sequence; identical to SEQ ID NO: 44613
  derived and/or modified CDS sequence (wt) from hemagglutinin__InfluenzaA__AJI80462

SEQ ID NO: 44843 - RNA, 1701 nt, Artificial Sequence
  derived and/or modified CDS sequence (wt) from hemagglutinin__InfluenzaA__AJI80474
augaaggcaauacuaguaguucugcuauauacauuugcaaccgcaaaugcagacacauuauguauagguuaucaugcgaacaauucaacagacacuguagauacaguacuagaaaagaauguaacaguaacacacucuauuaaccuucuagaagacaagcauaacgggaaacuaugcaaacuaagagggguagccccauugcauuuggguaaauguaacauugcuggcuggauccugggaaauccagagugugaaucacucuccacagcaaguucaugguccuacauuguggaaacaucuaguucagacaauggaacguguuacccaggagauuucaucaauuaugaggagcuaagagagcaauugagcucagugucaucauuugaaagguuugagauauuccccaagacaaguucauggcccaaucaugacucgaacaaagguguaacggcagcauguccucacgcuggagcaaaaagcuucuacaaaaauuuaauauggcuaguuaaaaaaggaaauucauacccaaagcucagccaauccuacauuaaugauaaagggaaagaaguccucgugcuguggggcauccaccauccaucuacuacugcugaccaacaaagucucuaucagaaugcagaugcauauguuuuuguggggacaucaagauacagcaaaaaguucaagccggaaauagcaauaagacccaaagugagggaucaagaagggagaaugaacuauuacuggacacuaguagagccgggagacaaaauaacauucgaagcaacuggaaaucuagugguaccgagauaugcauucacaauggaaagaaaugcuggaucugguauuaucauuucagauacaccaguccacgauugcaauacaacuugucagacacccgagggugcuauaaacaccagccucccauuucagaauauacauccgaucacaauuggaaaauguccaaaguauguaaaaagcacaaaauugagacuggccacaggauugaggaaugucccgucuauucaaucuagaggccuauucggggccauugccggcuucauugaagggggguggacagggaugguagauggaugguacgguuaucaccaucaaaaugagcaggggucaggauaugcagccgaccugaagagcacacaaaaugccauugacaagauuacuaacaaaguaaauucuguuauugaaaagaugaauacacaguucacagcaguggguaaagaguucaaccaccuggaaaaaagaauagagaauuuaaauaaaaaaguugaugaugguuuccuggacauuuggacuuacaaugccgaacuguugguucuauuggaaaaugaaagaacuuuggacuaccacgauucaaaugugaagaacuuguaugaaaagguaagaaaccaguuaaaaaacaaugccaaggaaauuggaaacggcugcuuugaauuuuaccacaaaugcgauaacacgugcauggaaagugucaaaaaugggacuuaugacuacccaaaauacucagaggaagcaaaauuaaacagagaaaaaauagaugggguaaagcuggaaucaacaaggauuuaccagauuuuggcgaucuauucaacugucgccaguucauugguacugguagucucccugggggcaaucagcuucuggaugugcucuaaugggucucuacaauguagaauauguauuuaa

SEQ ID NO: 44844 - RNA, 1701 nt, Artificial Sequence; identical to SEQ ID NO: 44843
  derived and/or modified CDS sequence (wt) from hemagglutinin__InfluenzaA__AJI80485

SEQ ID NO: 44845 - RNA, 1701 nt, Artificial Sequence; identical to SEQ ID NO: 44640
  derived and/or modified CDS sequence (wt) from hemagglutinin__InfluenzaA__AJI80496

SEQ ID NO: 44846 - RNA, 1701 nt, Artificial Sequence; identical to SEQ ID NO: 44655
  derived and/or modified CDS sequence (wt) from hemagglutinin__InfluenzaA__AJI80507

SEQ ID NO: 44847 - RNA, 1701 nt, Artificial Sequence; identical to SEQ ID NO: 44640
  derived and/or modified CDS sequence (wt) from hemagglutinin__InfluenzaA__AJI80518

SEQ ID NO: 44848 - RNA, 1701 nt, Artificial Sequence
  derived and/or modified CDS sequence (wt) from hemagglutinin__InfluenzaA__AJJ98765
augaagacuaucauugcuuugagcuacauucuaugucugguguucgcucaaaaacuuccuggaaaugacaacagcacggcaacgcugugccuugggcaccaugcaguaccaaacggaacgauagugaaaacaaucacgaaugaccaaauugaaguuacuaaugcuacugagcugguucagaauuccucaacaggugaaauaugcgacaguccucaucagauccuugauggagaaaacugcacacuaauagaugcucuauugggagacccucagugugauggcuuccaaaauaagaaaugggaccuuuuuguugaacgcagcaaagccuacagcaacuguuacccuuaugaugugccggauuaugccucccuuaggucacuaguugccucauccggcacacuggaguuuaacaaugaaagcuucaauuggaccggagucacucaaaacggaacaagcucugcuugcauaaggagaucuaauaauaguuucuuuaguagauugaauugguugacccacuuaaaauucaaauacccagcauugaacgugacuaugccaaacaaugaacaauuugacaaauuguacauuugggggguucaccacccggguacggacaaugaccaaaucuuccuguaugcucaagcaucaggaagaaucacagucucuaccaaaagaagccaacaaacuguaaucccgaauaucggaucuagacccagaguaaggaauaucccuagcagaauaagcaucuauuggacaauaguaaaaccgggagacauacuuuugauuaacagcacagggaaucuaauugccccuagggguuacuucaaaauacgaagugggaaaagcucaauaaugagaucagaugcacccauuggcaaaugcaacucugaaugcaucacuccaaauggaagcauucccaaugacaaaccauuccaaaauguaaacaggaucacauacggggccugucccagauauguuaagcaaaacacucugaaauuggcaacagggaugcgaaauguaccagagaaacaaacuagaggcauauuuggcgcaaucgcggguuucauagaaaaugguugggagggaaugguggaugguugguacgguuucaggcaucaaaauucugagggaagaggacaagcagcagaucucaaaagcacucaagcagcaaucgaucaaaucaaugggaagcugaauagauugaucgggaaaaccaacgagaaauuccaucagauugaaaaagaauucucagaagucgaagggagaauucaggaccuugagaaauauguugaggacacuaaaauagaucucuggucauacaacgcggagcuucuuguugcccuggagaaccaacauacaauugaucuaacugacucagaaaugaacaaacuguuugaaaaaacaaagaagcaacugagggaaaaugcugaggauaugggcaaugguuguuucaaaauauaccacaaaugugacaaugccugcauaggaucaaucagaaauggaacuuaugaccacgauguauacagagaugaagcauuaaacaaccgguuccagaucaagggaguugagcugaagucaggguacaaagauuggauccuauggauuuccuuugccauaucauguuuuuugcuuuguguugcuuuguugggguucaucaugugggccugccaaaaaggcaacauuaggugcaacauuugcauuuga

SEQ ID NO: 44849 - RNA, 1701 nt, Artificial Sequence
  derived and/or modified CDS sequence (wt) from hemagglutinin__InfluenzaA__AJJ98777
augaagacuaucauugcuuugagcuacauucuaugucugguuuucgcucaaaaacuuccuggaaaugacaacagcacggcaacgcugugccuugggcaccaugcaguaccaaacggaacgauagugaaaacaaucacgaaugaccaaauugaaguuacuaaugcuacugagcugguucagaguuucucaacaggugaaauaugcaacaguccucaucagauccuugauggagaaaacugcacacuaauagaugcucuauugggagacccucagugugauggcuuccaaaauaagaaaugggaccuuuuuguugaacgcagcaaagccuacagcaacuguuacccuuaugaugugccagauuaugccucccuuaggucacuaguugccucauccggcacacuggaguuuaacaaugaaagcuucaauuggacuggagucacucaaaacggaacaagcucugcuugcauaaggagaucuaauaacaguuucuuuaguagauugaauugguugacccacuuaaaauucaaauacccagcauugaacgugacuaugccaaacaaugaagaauuugacaaauuguacauuugggggguucaccacccggguacggacaaugaccaaaucuuccuguaugcucaagcaucaggaagaaucacagucucuaccaaaagaagccaacaaacuguaaucccgaauaucggaucuagacccagaguaaggaauauccccagcagaauaagcaucuauuggacaauaguaaaaccgggagacauacuuuugauuaacagcacagggaaucuaauugcuccuagggguuacuucaaaauacgaagugggaaaagcucaauaaugagaucagaugcacccauuggcaaaugcaauucugaaugcaucacuccaaauggaagcauucccaaugacaaaccauuccaaaauguaaacaggaucacauacggggccugucccagauauguuaaacaaaacacucugaaauuggcaacagggaugcgaaauguaccagagaaacaaacuagaggcauauuuggcgcaaucgcggguuucauagaaaaugguugggagggaaugguggaugguugguacgguuucaggcaucaaaauucugagggaauaggacaagcagcagaucucaaaagcacucaagcagcaaucgaucaaaucaaugggaagcugaauagguugaucgggaaaaccaacgagaaauuccaucagauugaaaaagaauucucagaagucgaagggaggauucaggaccuugagaaauauguugaggauaccaaaauagaucucuggucauacaacgcggagcuucuuguugcccuggagaaccaacauacaauugaucuaacugacucagaaaugaacaaacuguuugaaaaaacaaagaagcaacugagggaaaaugcugaggauaugggcaaugguuguuucaaaauauaccacaaaugugacaaugccugcauaggaucaaucagaaauggaacuuaugaccacgauguauacagagaugaagcauuaaacaaccgauuccagaucaagggcguugagcugaagucaggauacaaagauuggauccuauggauuuccuuugccauaucauguuuuuugcuuuguguugcuuuguugggguucaucaugugggccugccaaaaaggcaacauuaggugcaacauuugcauuuga

SEQ ID NO: 44850 - RNA, 1701 nt, Artificial Sequence
  derived and/or modified CDS sequence (wt) from hemagglutinin__InfluenzaA__AJJ98789
augaagacuaucauugcuuugagcuacauucuaugucugguuuucgcucaaaaacuuccuggaaaugacaauagcacggcaacgcugugccuugggcaccaugcaguaccaaacggaacgauagugaaaacaaucacgaaugaccgaauugaaguuacuaaugcuacugagcugguucagaauuccucaauaggugaaauaugcgacaguccucaucagauccuugauggagaaaacugcacacuaauagaugcucuauugggagacccucagugugauggcuuccaaaauaagaaaugggaccuuuuuguugaacgaagcaaagccuacagcaacuguuacccuuaugaugugccggauuaugccucccuuaggucacuaguugccucauccggcacacuggaguuuaacaaugaaagcuucaauuggacuggagucacucaaaacggaacaaguucugcuugcauaaggagaucuaauaauaguuucuuuaguagauuaaauugguugacccacuuaaacuucaaauacccagcauugaacgugacuaugccaaacaaugaacaauuugacaaauuguacauuugggggguucaccacccggguacggacaaggaccaaaucuuccuguaugcucaaucaucaggaagaaucacaguaucuaccaaaagaagccaacaagcuguaaucccgaauaucggaucuagacccagaauaaggaauaucccuagcagaauaagcaucuauuggacaauaguaaaaccgggagacauacuuuugauuaacagcacagggaaucuaauugcuccuagggguuacuucaaaauacgaagugggaaaagcucaauaaugagaucagaugcacccauuggcaaaugcaagucugaaugcaucacuccaaauggaagcauucccaaugacaaaccauuccaaaauguaaacaggaucacauacggggccugucccagauauguuaagcaaagcacucugaaauuggcaacaggaaugcgaaauguaccagagaaacaaacuagaggcauauuuggcgcaauagcggguuucauagaaaaugguugggagggaaugguggaugguugguacgguuucaggcaucaaaauucugagggaagaggacaagcagcagaucucaaaagcacucaagcagcaaucgaucaaaucaaugggaagcugaaucgauugaucgggaaaaccaacgagaaauuccaucagauugaaaaagaauucucagaaguagaagggagaauucaggaccuugagaaauauguugaggacacuaaaauagaucucuggucauacaacgcggagcuucuuguugcccuggagaaccaacauacaauugaucuaacugacucagaaaugaacaaacuguuugaaaaaacaaagaagcaacugagggaaaaugcugaggauaugggcaaugguuguuucaaaauauaccacaaaugugacaaugccugcauaggaucaaucagaaauggaacuuaugaccacgauguauacagagaugaagcauuaaacaaccgguuccagaucaagggaguugagcugaagucaggauacaaagauuggauccuauggauuuccuuugccauaucauguuuuuugcuuuguguugcuuuguugggguucaucaugugggccugccaaaagggcaacauuaggugcaacauuugcauuuga

SEQ ID NO: 44851 - RNA, 1701 nt, Artificial Sequence
  derived and/or modified CDS sequence (wt) from hemagglutinin__InfluenzaA__AJJ98801
augaagacuaucauugcuuugagcuacauucuaugucugguuuucgcucaaaaacuuccuggaaaugacaauagcacggcaacgcugugccuugggcaccaugcaguaccaaacggaacgauagugaagacaaucacgaaugaccaaauugaaguuacuaaugcuacugagcugguucagaauuccucaauaggugaaauaugcgacaguccucaucagauccuugauggagaaaacugcacacuaauagaugcucuauugggagacccucagugugauggcuuccaaaauaagaaaugggaccuuuuuguugaacgaaacaaagccuacagcaacuguuacccuuaugaugugccggauuaugccucccuuaggucacuaguugccucauccggcacacuggaguuuaacaaugaaagcuucaauuggacuggagucacucaaaacggaacaaguucugcuugcauaaggagaucuaauaauaguuucuuuaguagauuaaauugguugacccacuuaaacuucaaauacccagcauugaacgugacuaugccaaacaaugaacaauuugacaaauuguacauuugggggguucaccacccggguacggacaaggaccaaaucuuccuguaugcucaaucaucaggaagaaucacaguaucuaccaaaagaagccaacaagcuguaaucccgaauaucggaucuagacccagaauaaggaauaucccuagcagaauaagcaucuauuggacaauaguaaaaccgggagacauacuuuugauuaacagcacagggaaucuaauugcuccuagggguuacuucaaaauacgaagugggaaaagcucaauaaugagaucagaugcacccauuggcaaaugcaagucugaaugcaucacuccaaauggaagcauucccaaugacaaaccauuccaaaauguaaacaggaucacauacggggccugucccagauauguuaagcaaagcacucugaaauuggcaacaggaaugcgaaauguaccagagaaacaaacuagaggcauauuuggcgcaauagcggguuucauagaaaaugguugggagggaaugguggaugguugguacgguuucaggcaucaaaauucugagggaagaggacaagcagcagaucucaaaagcacucaagcagcaaucgaucaaaucaaugggaagcugaaucgauugaucgggaaaaccaacgagaaauuccaucagauugaaaaagaauucucagaaguagaagggagaauucaggaccuugagaaauauguugaggacacuaaaauagaucucuggucauacaacgcggagcuucuuguugcccuggagaaccaacauacaauugaucuaacugacucagaaaugaacaaacuguuugaaaaaacaaagaagcaacugagggaaaaugcugaggauaugggcaaugguuguuucaaaauauaccacaaaugugacaaugccugcauaggaucaaucagaaauggaacuuaugaccacgauguauacagagaugaagcauuaaacaaccgguuccagaucaagggaguugagcugaagucaggguacaaagauuggauccuauggauuuccuuugccauaucauguuuuuugcuuuguguugcuuuguugggguucaucaugugggccugccaaaagggcaacauuaggugcaacauuugcauuuga

SEQ ID NO: 44852 - RNA, 1701 nt, Artificial Sequence
  derived and/or modified CDS sequence (wt) from hemagglutinin__InfluenzaA__AJJ98813
augaagacuaucauugcuuugagcuacauucuaugucugguuuucgcucaaaaacuuccuggaaaugacaauagcacggcaacgcugugccuugggcaccaugcaguaccaaacggaacgauagugaaaacaaucacgaaugaccgaauugaaguuacuaaugcuacugagcugguucagaauuccucaauaggugaaauaugcgacaguccucaucagauccuugauggagaaaacugcacacuaauagaugcucuauugggagacccucagugugauggcuuccaaaauaagaaaugggaccuuuuuguugaacgaagcaaagccuacagcaacuguuacccuuaugaugugccggauuaugccucccuuaggucacuaguugccucauccggcacacuggaguuuaacaaugaaagcuucaauuggacuggagucacucaaaacggaacaaguucugcuugcauaaggagaucuaauaguaguuucuuuaguagauuaaauugguugacccacuuaaacuucaaauacccagcauugaacgugacuaugccaaacaaugaacaauuugacaaauuguacauuugggggguucaccacccggguacggacaaggaccaaaucuuccuguaugcucaaucaucaggaagaaucacaguaucuaccaaaagaagccaacaagcuguagucccgaauaucggaucuagacccagaauaaggaauaucccuagcagaauaagcaucuauuggacaauaguaaaaccgggagacauacuuuugauuaacagcacagggaaucuaauugcuccuagggguuacuucaaaauacgaagugggaaaagcucaauaaugagaucagaugcacccauuggcaaaugcaagucugaaugcaucacuccaaauggaagcauucccaaugacaaaccauuccaaaauguaaacaggaucacauacggggccugucccagauauguuaagcaaagcacucugaaauuggcaacaggaaugcgaaauguaccagagaaacaaacuagaggcauauuuggcgcaauagcggguuucauagaaaaugguugggagggaaugguggaugguugguacgguuucaggcaucaaaauucugaaggaagaggacaagcagcagaucucaaaagcacucaagcagcaaucgaucaaaucaaugggaagcugaaucgauugaucgggaaaaccaacgagaaauuccaucagauugaaaaagaauucucagaaguagaagggagaauucaggaccuugagaaauauguugaggacacuaaaauagaucucuggucauacaacgcggagcuucuuguugcccuggagaaccaacauacaauugaucuaacugacucagaaaugaacaaacuguuugaaaaaacaaagaagcaacugagggaaaaugcugaggauaugggcaaugguuguuucaaaauauaccacaaaugugacaaugccugcauaggaucaaucagaaauggaacuuaugaccacgauguauacagagaugaagcauuaaacaaccgguuccagaucaagggaguugagcugaagucaggguacaaagauuggauccuauggauuuccuuugccauaucauguuuuuugcuuuguguugcuuuguugggguucaucaugugggccugccaaaagggcaacauuaggugcaacauuugcauuuga

SEQ ID NO: 44853 - RNA, 1701 nt, Artificial Sequence
  derived and/or modified CDS sequence (wt) from hemagglutinin__InfluenzaA__AJJ98825
augaagacuaucauugcuuugagcuacauucuaugucugguuuucgcucaagaacuuccuggaaaugacaauagcacggcaacgcugugccuugggcaccaugcaguaccaaacggaacgauagugaaaacaaucacgaaugaccgaauugaaguuacuaaugcuacugagcugguucagaauuccucaauaggugaaauaugcgacaguccucaucagauccuugauggagaaaacugcacacuaauagaugcucuauugggagacccucagugugauggcuuccaaaauaagaaaugggaccuuuuuguugaacgaagcaaagccuacagcaacuguuacccuuaugaugugccggauuaugccucccuuaggucacuaguugccucauccggcacacuggaguuuaacaaugaaagcuucaauuggacuggagucacucaaaacggaacaaguucugcuugcauaaggagaucuaauaauaguuucuuuaguagauuaaauugguugacccacuuaaacuucaaauacccagcauugaacgugacuaugccaaacaaugaacaauuugacaaauuguacauuugggggguucaccacccggguacggacaaggaccaaaucuuccuguaugcucaaucaucaggaagaaucacaguaucuaccaaaagaagccaacaagcuguaaucccgaauaucggaucuagacacagaauaaggaauaucccuagcagaauaagcaucuauuggacaauaguaaaaccgggagacauacuuuugauuaacagcacagggaaucuaauugcuccuagggguuacuucaaaauacgaagugggaaaagcucaauaaugagaucagaugcacccauuggcaaaugcaagucugaaugcaucacuccaaauggaagcauucccaaugacaaaccauuccaaaauguaaacaggaucacauacggggccugucccagauauguuaagcaaagcacucugaaauuggcaacaggaaugcgaaauguaccagagaaacaaacuagaggcauauuuggcgcaauagcggguuucauagaaaaugguugggagggaaugguggaugguugguacgguuucagacaucaaaauucugagggaagaggacaagcagcagaucucaaaagcacucaagcagcaaucgaucaaaucaaugggaagcugaaucgauugaucgggaaaaccaacgagaaauuccaucagauugaaaaagaauucucagaaguagaagggagaauucaggaccuugagaaauauguugaggacacuaaaauagaucucuggucauacaacgcggagcuucuuguugcccuggagaaccaacauacaauugaucuaacugacucagaaaugaacaaacuguuugaaaaaacaaagaagcaacugagggaaaaugcugaggauaugggcaaugguuguuucaaaauauaccacaaaugugacaaugccugcauaggaucaaucagaaauggaacuuaugaccacgauguauacagagaugaagcauuaaacaaccgguuccagaucaagggaguugagcugaagucaggguacaaagauuggauccuauggauuuccuuugccauaucauguuuuuugcuuuguguugcuuuguugggguucaucaugugggccugccaaaagggcaacauuaggugcaacauuugcauuuga

SEQ ID NO: 44854 - RNA, 1701 nt, Artificial Sequence
  derived and/or modified CDS sequence (wt) from hemagglutinin__InfluenzaA__AJJ98837
augaagacuaucauugcuuugagcuacauucuaugucugguuuucgcucaaaaacuuccuggaaaugacaacagcacggcaacgcugugccuugggcaccaugcagugccaaacggaacgauagugaaaacaaucacgaaugaccaaauugaaguuacuaaugcuacugagcugguucagaguuccucaacaggugaaauaugcaacaguccucaucagauccuugauggagaaaacugcacacuaauagaugcucuauugggagacccucagugugauggcuuccaaaacaagaaaugggaccuuuuuguugaacggagcaaagcccacagcaacuguuacccuuaugaugugccggauuaugccucccuuaggucacuaguugccucauccggcacacuggaguuuaacaaugaaagcuucaauuggacuggagucacucaaaacggaacaagcucugcuugcauaaggagaucuaauaauaguuucuuuaguagauugaauugguugacccacuuaaacuucaaauacccagcauugaacgugacuaugccaaacaaugaacaauuugacaaauuguacauuugggggguucaccacccggguacggacaaggaccaaaucuuccuguaugcucaagcaucaggaagaaucacaguaucuaccaaaagaagccaacaagcuguaauuccgaauaucggaucuagacccagaguaaggaauaucccuagcagaguaagcaucuauuggacaauaguaaaaccgggagacauacuuuugauuaacagcacagggaaucuaauugcuccuagggguuacuucaaaauacgaagugggaaaagcucaauaaugagaucagaugcacccauuggcaaaugcaauucugcaugcaucacuccaaauggaagcauucccaaugacaaaccauuccaaaauguaaacaggaucacauacggggccugucccagauauguuaagcaaagcacucugaaauuggcaacaggaaugagaaauguaccagagaaacaaacuagaggcauauuuggcgcaauagcggguuucauagaaaaugguugggagggaaugguggaugguugguacgguuucaggcaucaaaauucugagggaaggggacaagcagcagaucucaaaagcacucaagcagcaaucgaucaaaucaaugggaagcugaauagauugaucgggaaaaccaacgagaaauuccaucagauugaaaaagaauucucagaagucgaagggagaauucaggaccuugagaaauauguugaggacacuaaaauagaucucuggucauacaacgcggagcuucuuguugcccuggagaaccaacacacaauugaucuaacugacucagaaaugaacaaacuguuugaaaaaacaaagaagcaacugagggaaaaugcugaggauaugggcaaugguuguuucaaaauauaccacaaaugugacaaugccugcauaggaucaaucagaaauggaacuuaugaccacgauguguacagagaugaagcauuaaacaaccgauuccagaucaagggaguugagcugaagucaggguacaaagauuggauccuauggauuuccuuugccauaucauguuuuuugcuuuguguugcuuuguugggguucaucaugugggccugccaaaaaggcaacauuaggugcaacauuugcauuuga

SEQ ID NO: 44855 - RNA, 1701 nt, Artificial Sequence
  derived and/or modified CDS sequence (wt) from hemagglutinin__InfluenzaA__AJJ98849
augaagacuaucauugcuuugagcuacauucuaugucugguuuucgcucaagaacuuccuggaaaugacaacagcacggcaacgcugugccuugggcaccaugcagugccaaacggaacgauagugaaaacaaucacgaaugaccaaauugaagucacuaaugcuacugagcugguucagaguuccucaacaggugaaauaugcaacaguccucaucagauccuugauggagaaaacugcacacuaauagaugcucuauugggagacccucagugugauggcuuccaaaacaagaaaugggaccuuuuuguugaacgaagcaaagcccacagcaacuguuacccuuaugaugugccggauuaugccucccuuaggucacuaguugccucauccggcacacuggaguuuaacaaugaaagcuucaauuggacuggagucacucaaaacggaacaagcucugcuugcauaaggagaucuaauaauaguuucuuuaguagauugaauugguugacccacuuaaacuucaaguacccagcauugaacgugacuaugccaaacaaugaacaauuugacaaauuguacauuugggggguucaccacccggguacggacaaggaccaaaucuuccuguaugcucaagcaucaggaagaaucacaguaucuaccaaaagaagccaacaagcuguaauuccgaauaucggaucuagacucagaguaaggaauaucccuagcagaguaagcaucuauuggacaauaguaaaaccgggagacauacuuuugauuaacagcacagggaaucuaauugcuccuagggguuacuucaaaauacgaagugggaaaagcucaauaaugagaucagaugcacccauuggcaaaugcaauucugcaugcaucacuccaaauggaagcauucccaaugacaaaccauuccaaaauguaaacaggaucacauacggggccugucccagauauguuaagcaaaacacucugaaauuggcaacaggaaugagaaauguaccagagaaacaaacuagaggcauauuuggcgcaauagcggguuucauagaaaaugguugggagggaaugguggaugguugguacgguuucaggcaucaaaauucugagggaaggggacaagcagcagaucucaaaagcacucaagcagcaaucgaucaaaucaacgggaagcugaauagauugaucgggaaaaccaacgagaaauuccaucagauugaaaaagaauucucagaagucgaagggagaauucaggaccuugagaaauauguugaggacacuaaaauagaucucuggucauacaaugcggagcuucuuguugcccuggagaaccaacacacaauugaucuaacugacucagaaaugaacaaacuguuugaaaaaacaaagaagcaacugagggaaaaugcugaggauaugggcaaugguuguuucaaaauauaccacaaaugugacaaugccugcauaggaucaaucagaaauggaacuuaugaccacgauguguacagagaugaagcauuaaacaaccgauuccagaucaagggaguugagcugaagucaggguacaaagauuggauccuauggauuuccuuugccauaucauguuuuuugcuuuguguugcuuuguugggguucaucaugugggccugccaaaaaggcaacauuaggugcaacauuugcauuuga

SEQ ID NO: 44856 - RNA, 1701 nt, Artificial Sequence
  derived and/or modified CDS sequence (wt) from hemagglutinin__InfluenzaA__AJJ98861
augaagacuaucauugcuuugagcuacauucuaugucugguuuucgcucaaaaacuuccuggaaaugacaacagcacggcaacgcugugccuugggcaccaugcaguaccaaacggaacgauagugaaaacaaucacgaaugaccaaauugaaguuacuaaugcuacugagcugguucagauuuccucaacaggugaaauaugcgacaguccucaucagauccuugauggagaaaacugcacacuaauagaugcucuauugggagacccucagugugauggcuuccaaaauaagaaaugggaccuuuuuguugaacgcagcaaagccuacagcaacuguuacccuuaugaugugccggauuaugccucccuuaggucacuaguugccucauccggcacacuggaguuuaacaaugaaagcuucaauuggacuggagucacucaaaacggaacaagcucugcuugcauaaggagaucuaauaacaguuucuuuaguagauugaauugguugacccacuuaaaauucaaauacccagcauugaaugugacuaugccaaacaaugaacaauuugacaaauuguacauuugggggguucaccacccggguacggacaaugaccaaaucuuccuguaugcucaagcaucaggaagaaucacagucucuaccaaaagaagccaacaaacuguaaucccgaauaucggaucuagacccagaguaaggaauaucccuagcagaauaagcaucuauuggacaauaguaaaaccgggagacauacuuuugauuaacagcacagggaaucuaauugcuccuagggguuacuucaaaauacgaagugggaaaagcucaauaaugaaaucagaugcacccauuggcaaaugcaauucugaaugcaucacuccaaauggaagcauucccaaugacaaaccauuccaaaauguaaacaggaucacauacggggccugucccagauauguuaagcaaaacacucugaaauuggcaacagggaugcgaaauguaccagagaaacaaacuagaggcauauuuggcgcaaucgcggguuucauagaaaaugguugggagggaaugguggaugguugguacgguuucaggcaucaaaauucugagggaagaggacaagcagcagaucucaaaagcacucaagcagcaaucgaccaaaucaaugggaagcugaauagauugaucgggaaaaccaacgagaaauuccaucagauugaaaaagaauucucagaagucgaagggagaauucaggaccuugagaaauauguugaggacaccaaaauagaucucuggucauacaacgcggagcuucuuguugcccuggagaaccaacauacaauugaucuaacugacucagaaaugaacaaacuguuugaaaaaacaaagaagcaacugagggaaaaugcugaggauaugggcaaugguuguuucaaaauauaccacaaaugugacaaugccugcauaggaucaaucagaaauggaacuuaugaccacgauguauacagagaugaagcauuaaacaaccgguuccagaucaagggaguugagcugaagucaggguacaaagauuggauccuauggauuuccuuugccauaucauguuuuuugcuuuguguugcuuuguugggguucaucaugugggccugccaaaaaggcaacauuaggugcaacauuugcauuuga

SEQ ID NO: 44857 - RNA, 1701 nt, Artificial Sequence
  derived and/or modified CDS sequence (wt) from hemagglutinin__InfluenzaA__AJJ98873
augaagacuaucauugcuuugagcuacagucuaugucugguuuucgcucaaaaacuuccuggaaaugacaacagcacggcaacgcugugccuugggcaccaugcaguaccaaacggaacgauagugaaaacaaucacgaaugaccaaauugaaguuacuaaugcuacugagcugguucagaguuccucaacaggugaaauaugcgacaguccucaucagauccuugauggagaaaacugcacacuaauagaugcucuauugggagacccucagugugauggcuuccaaaauaagaaaugggaccuuuuuguugaacgcagcaaagccuacagcaacuguuacccuuaugaugugccggauuaugccucacuuaggucacuaguugccucauccggcacacuggaguuuaacaaugaaagcuucaauuggacuggagucacucaaaacggaacaagcucugcuugcauaaggaaaucuaauaacaguuucuuuaguagauugaauugguugacccacuuaaaauucaaauacccagcauugaacgugacuaugccaaacaaugaacaauuugacaaauuguacauuugggggguucaccacccggguacggacaaugaccaaaucuuccuguaugcucaagcaucaggaagaaucacagucucuaccaaaagaagccaacaaacuguaaucccgaauaucggaucuagacccagaguaaggaauaucccuagcagaauaagcaucuauuggacaauaguaaaaccgggagacauacuuuugauuaacagcacagggaaucuaauugcuccuagggguuacuucaaaauacgaagugggaaaagcucaauaaugagaucagaugcacccauuggcaaaugcaauucugaaugcaucacuccaaauggaagcauucccaaugacaaaccauuccaaaauguaaacaggaucacauacggggccugucccagauauguuaagcaaaacacucugaaauuggcaacagggaugcgaaauguaccagagaaacaaacuagaggcauauuuggcgcaaucgcggguuucauagaaaaugguugggagggaaugguggaugguugguacgguuucaggcaucaaaauucugagggaagaggacaagcagcagaucucaaaagcacucaagcagcaaucgaucaaaucaaugggaagcugaauagauugaucgggaaaaccaacgagaaauuccaucagauugaaaaagaauucucagaagucgaagggagaauucaggaccuugagaaauauguugaggacaccaaaauagaucucuggucauacaacgcggagcuucuuguugcccuggagaaccaacauacaauugaucuaacugacucagaaaugaacaaacuguuugaaaaaacaaagaagcaacugagggaaaaugcugaggauaugggcaaugguuguuucaaaauauaccacaaaugugacaaugccugcauaggaucaaucagaaauggaacuuaugaccacgauguauacagagaugaagcauuaaacaaccgguuccagaucaagggaguugagcugaagucaggguacaaagauuggauucuauggauuuccuuugccauaucauguuuuuugcuuuguguugcuuuguugggguucaucaugugggccugccaaaaaggcaacauuaggugcaacauuugcauuuga

SEQ ID NO: 44858 - RNA, 1701 nt, Artificial Sequence
  derived and/or modified CDS sequence (wt) from hemagglutinin__InfluenzaA__AJJ98885
augaagacuaucauugcuuugagcaacauucuaugucugguuuucgcucaaaaacuuccuggaaaugacaacagcacggcaacgcugugccuugggcaccaugcaguaccaaauggaacgauagugaaaacaaucacgaaugaccaaauugaaguuacuaaugcuacugagcugguucagaguuccucaacaggugaaauaugcgacaguccucaucagauccuugauggagaaaacugcacacuaauagaugcucuauugggagacccucagugugauggcuuccaaaauaagaaaugggaccuuuuuguugaacgcagcaaagccuacagcaacuguuacccuuaugaugugccggauuaugccucccuuaggucacuaguugccucauccggcacacuggaguuuaacaaugaaagcuucaauuggacuggagucacucaaaacggaacaagcucugcuugcauaaggaggucuaauaacaguuucuuuaguagauugaauugguugacccacuuaaaauucaaauacccagcauugaacgugacuaugccaaacaaagaaaaauuugacaaauuguacauuugggggguucaccacccggguacggacaaugaccaaaucuuccuguaugcucaagcaucaggaagaaucacagucucuaccaaaagaagccaacaaacuguaaucccgaauaucggaucuagacccagaguaaggaauaucccuagcagaauaagcaucuauuggacaauaguaaaaccgggagacauacuuuugauuaacagcacagggaaucuaauugcuccuagggguuacuucaaaauacgaagugggaaaagcucaauaaugagaucagaugcacccauuggcaaaugcaauucugaaugcaucacuccaaauggaagcauucccaaugacaaaccauuccaaaauguaaacaggaucacauacggggccugucccagauauguuaagcaaaacacucugaaauuggcaacagggaugcgaaauguaccagagaaacaaacuagaggcauauuuggcgcaaucgcggguuucauagaaaaugguugggagggaaugguggaugguugguacgguuucaggcaucaaaauucugagggaauaggacaagcagcagaucucaaaagcacucaagcagcaaucgaucaaaucaaugggaagcugaauagguugaucgggaaaaccaacgagaaauuccaucagauugaaaaggaauucucagaagucgaagggagaauucaggaccuugagaaauauguugaggacaccaaaauagaucucuggucauacaacgcggagcuucuuguugcccuggagaaccaacauacaauugaucuaacugauucagaaaugaacaaacuguuugaaaaaacaaagaagcaacugagggaaaaugcugaggauaugggcaaugguuguuucaaaaucuaccacaaaugugacaaugccugcauaggaucaaucagaaauggaacuuaugaccacgauguauacagagaugaagcauuaaacaaccgguuccagaucaagggcguugagcugaagucaggauacaaagauuggauccuauggauuuccuuugccauaucauguuuuuugcuuuguguugcuuuguugggguucaucaugugggccugccaaaaaggcaacauuaggugcaacauuugcauuuga

SEQ ID NO: 44859 - RNA, 1701 nt, Artificial Sequence
  derived and/or modified CDS sequence (wt) from hemagglutinin__InfluenzaA__AJJ98897
augaagacuaucauugcuuugagcuacauucuaugucugguuuucgcucaaaaacuuccuggaaaugacaacagcacggcaacgcugugccuugggcaccaugcaguaccaaacggaacgauagugaaaacaaucacgaaugaccaaauugaaguuacuaaugcuacugagcugguucagaguuccucaacaggugaaauaugcgacaguccucaucagauccuugauggagaaaacugcacacuaauagaugcucuauugggagacccccagugugauggcuuccaaaauaagaaaugggaccuuuuuguugaacgcagcaaagccuacagcaacuguuacccuuaugaugugccggauuaugccucccuuaggucacuaguugccucauccggcacacuggaguuuaacaaugaaagcuucaauuggacuggagucacucaaaacggaacaagcucugcuugcauaaggagaucuaauagcaguuucuuuaguagauugaauugguugacccacuuaaaauucaaauauccagcauugaacgugacuaugccaaacaaugaaaaauuugacaaauuguacauuugggggguucaccacccggguacggacaaugaccaaaucuuccuguaugcucaagcaucaggaagaaucacagucucuaccaaaagaagccaacaaacuguaaucccgaauaucggaucuagacccagaguaaggaauauccccagcagaauaagcaucuauuggacaauaguaaaaccgggagacauacuuuugauuaacagcacagggaaucuaauugcuccuagggguuacuucaaaauacgaagugggaaaagcucaauaaugagaucagaugcacccauuggcaaaugcaauucugaaugcaucacuccaaauggaagcauucccaaugacaaaccauuccaaaauguaaacaggaucacauacggggccugucccagauauguuaagcaaaacacucugaaauuggcaacagggaugcgaaauguaccagaaaaacaaacuagaggcauauuuggcgcaaucgcggguuucauagaaaaugguugggagggaaugguggaugguugguacgguuucaggcaucaaaauucugagggaauaggacaagcagcagaucucaaaagcacucaagcagcaaucgaucaaaucaaugggaagcugaauagguugaucgggaaaaccaacgagaaauuccaucagauugaaaaagaauucucagaagucgaagggaggauucaggaccuugagaaauauguugaggacaccaaaguagaucucuggucauacaacgcggagcuucuuguugcccuggagaaccaacauacaauugaucuaacugacucagaaaugaacaaacuguuugaaaaaacaaagaagcaacugagggaaaaugcugaggauaugggcaaugguuguuucaaaauauaccacaaaugugacaaugccugcauaggaucaaucagaaauggaacuuaugaccacgauguauacagagaugaagcauuaaauaaccgguuccagaucaagggcguugagcugaagucaggauacaaagauuggauccuauggauuuccuuugccauaucauguuuuuugcuuuguguugcuuuguugggguucaucaugugggccugccaaaaaggcaacauuaggugcaacauuugcauuuga

SEQ ID NO: 44860 - RNA, 1701 nt, Artificial Sequence
  derived and/or modified CDS sequence (wt) from hemagglutinin__InfluenzaA__AJJ98909
augaagacuaucauugcuuugagcuacauucuaugucugguuuucgcucaaaaacuuccuggaaaugacaauagcacggcaacgcugugccuugggcaccaugcaguaccaaacggaacgauagugaaaacaaucacgaaugaccaaauugaaguuacuaaugcuacugagcugguucagaauuccucaauaggugaaauaugcgacaguccucaucagauccuugauggagaaaacuguacacuaauagaugcucuauugggagacccucagugugauggcuuucaaaauaagaaaugggaccuuuuuguugaacgaagcaaagccuacagcaacuguuacccuuaugaugugccggauuaugccucccuuaggucacuaguugccucauccggcacacuggaguuuaacaaugaaagcuucaauuggacuggagucacucaaaacggaacaaguucugcuugcauaaggagaucuaauaguaguuucuuuaguagauuaaauugguugacccacuuaaacuucaaauacccagcauugaacgugacuaugccaaacaaugaacaauuugacaaauuguacauuugggggguucaccacccggguacggacaaggaccaaaucuuccuguaugcucaaucaucaggaagaaucacaguaucuaccaaaagaagccaacaagcuguaaucccgaauaucggaucuagacccagaauaaggaauaucccuagcagaauaagcaucuauuggacaauaguaaaaccuggagacauacuuuugauuaacagcacagggaaucuaauugcuccuagggguuacuucaaaauacgaagugggaaaagcucaauaaugagaucagaugcacccauuggcaaaugcaagucugaaugcaucacuccaaauggaagcauuccaaaugacaaaccauuccaaaauguaaacaggaucacauacggggccugucccagauauguuaagcaaagcacucugaaauuggcaacaggaaugcgaaacguaccagagaaacaaacuagaggcauauuuggcgcaauagcggguuucauagaaaaugguugggagggaaugguggaugguugguacgguuucaggcaucaaaauucugagggaagaggacaagcagcagaucucaaaagcacucaagcagcaaucgaucaaaucaaugggaagcugaaucgauugaucgggaaaaccaacgagaaauuccaucagauugaaaaagaauucucagaaguagaagggagaauucaggaccuugagaaauauguugaggacacuaaaauagaucucuggucauacaacgcggagcuucuuguugcccuggagaaccaacauacaauugaucuaacugacucagaaaugaacaaacuguuugaaaaaacaaagaagcaacugagggaaaaugcugaggauaugggcaaugguuguuucaaaauauaccacaaaugugacaaugccugcauaggaucaaucagaaauggaacuuaugaccacgauguauacagggaugaagcauuaaacaaccgguuccagaucaagggaguugagcugaagucaggguacaaagauuggauccuauggauuuccuuugccauaucauguuuuuugcuuuguguugcuuuguugggguucaucaugugggccugccaaaagggcaacauuaggugcaacauuugcauuuga

SEQ ID NO: 44861 - RNA, 1701 nt, Artificial Sequence
  derived and/or modified CDS sequence (wt) from hemagglutinin__InfluenzaA__AJJ98921
augaagacuaucauugcuuugagcuacauucuaugucugguuuucgcucaaaaacuuccuggaaaagacaacagcacggcaacgcugugccuugggcaccaugcaguaccaaacggaacgauagugaaaacaaucacgaaugaccaaauugaaguuacuaaugcuacugaacugguucagaguuccucaacaggugaaauaugcaacaguccucaucagauccuugauggagaaaacugcacacuaauagaugcucuauugggagacccucagugugauggcuuccaaaauaagaagugggaccuuuuuguugaacgaagcaaagccuacagcaacuguuacccuuaugaugugccggauuaugccucccuuaggucacuaguugccucauccggcacacuggaguuuaacaaugaaagcuucaauuggacuggagucaagcaaaacggaacaagcucugcuugcauaaggagaucuaauaguaguuucuuuaguagauugaauugguugacccacuuaaacuucaaauacccagcauugaacgugacuaugccaaacaaugaacaauuugacaaauuguacauuugggggguucaccacccggguacggacaaggaccaaaucuuccuguaugcucaaucaucaggaagaaucacaguaucuaccaaaagaagccaacaagcuguaaucccgaauaucggaucuagacccagaauaaggaauaucccuagcagaauaagcaucuauuggacaauaguaaaaccgggagacauacuuuugauuaacagcacagggaaucuaauugcuccuagggguuacuucaaaauacgaagugggaaaagcucaauaaugagaucagaugcacccauuggcaaaugcaauucugaaugcaucacuccaaauggaagcauucccaaugacaaaccauuccaaaauguaaacaggaucacauacggggccugucccagauauguuaagcaaagcacucugaaauuggcaacaggaaugcgaaauguaccagagaaacaaacuagaggcauauuuggcgcaauagcggguuucauagaaaaugguugggagggaaugguggaugguugguacgguuucaggcaucaaaauucugagggaagaggacaagcagcagaucucaaaagcacucaagcagcaaucgaucaaaucaaugggaagcugaaucgauugaucgggaaaaccaacgagaaauuccaucagauugaaaaagaauucucagaagucgaagggagaauucaggaccuugagaaauauguugaggacacuaaaauagaucucuggucauacaacgcggagcuucuuguugcccuggagaaccaacauacaauugaucuaacugacucagaaaugaacaaacuguuugaaaaaacaaagaagcaacugagggaaaaugcugaggauaugggcaaugguuguuucaaaauauaccacaaaugugacaaugccugcauaggaucaaucagaaauggaacuuauaaccacgauguauacagagaugaagcauuaaacaaccgguuccagaucaagggaguugagcugaagucaggguacaaagauuggauccuauggauuuccuuugccauaucauguuuuuugcuuuguguugcuuuguugggguucaucaugugggccugccaaaagggcaacauuaggugcaacauuugcauuuga

SEQ ID NO: 44862 - RNA, 1701 nt, Artificial Sequence
  derived and/or modified CDS sequence (wt) from hemagglutinin__InfluenzaA__AJJ98933
augaagacuaucauugcuuugagcuacauucuaugucugguuuucgcucaaaaacuuccuggaaaugacaauagcacggcaacgcugugccuugggcaccaugcaguaccaaacggaacgauagugaaaacaaucacgaaugaccgaauugaaguuacuaaugcuacugagcugguucagaauuccucaauaggugaaauaugcgacaguccucaucagauccuugauggagaaaacugcacacuaauagaugcucuauugggagacccucagugugauggcuuccaaaauaagaaaugggaccuuuuuguugaacgaagcaaagccuacagcaacuguuacccuuaugaugugccggauuaugccucccuuaggucacuaguugccucauccggcacacuggaguuuaacaaugaaagcuucaauuggacuggagucacucaaaacggaacaaguucugcuugcauaaggagaucuaauaauaguuucuuuaguagauuaaauugguugacccacuuaaacuucaaauacccagcauugaacgugacuaugccaaacaaugaacaauuugacaaauuguacauuugggggguucaccacccggguacggacaaggaccaaaucuuccuguaugcucaaucaucaggaagaaucacaguaucuaccaaaagaagccaacaagcuguaaucccgaauaucggaucuagacccagaauaaggaauaucccuagcagaauaagcaucuauuggacaauaguaaaaccgggagacauacuuuugauuaacagcacagggaaucuaauugcuccuagggguuacuucaaaauacgaagugggaaaagcucaauaaugagaucagaugcacccauuggcaaaugcaagucugaaugcaucacuccaaauggaagcauucccaaugacaaaccauuccaaaauguaaacaggaucacauacggggccugucccagauauguuaagcaaagcacucugaaauuggcaacaggaaugcgaaauguaccagagaaacaaacuagaggcauauuuggcgcaauagcggguuucauagaaaaugguugggagggaaugguggaugguugguacgguuucaggcaucaaaauucugagggaagaggacaagcagcagaucucaaaagcacucaagcagcaaucgaucaaaucaaugggaagcugaaucgauugaucgggaaaaccaacgagaaauuccaucagauugaaaaagaauucucagaaguagaagggagaauucaggaccuugagaaauauguugaggacacuaaaauagaucucuggucauacaacgcggagcuucuuguugcccuggagaaccaacauacaauugaucuaacugacucagaaaugaacaaacuguuugaaaaaacaaagaagcaacugagggaaaaugcugaggauaugggcaaugguuguuucaaaauauaccacaaaugugacaaugccugcauaggaucaaucagaaauggaacuuaugaccacgauguauacagagaugaagcauuaaacaaccgguuccagaucaagggaguugagcugaagucaggguacaaagauuggauccuauggauuuccuuugccauaucauguuuuuugcuuugcguugcuuuguugggguucaucaugugggccugccaaaagggcaacauuaggugcaacauuugcauuuga

SEQ ID NO: 44863 - RNA, 1701 nt, Artificial Sequence; identical to SEQ ID NO: 42608
  derived and/or modified CDS sequence (wt) from hemagglutinin__InfluenzaA__AJJ98945

SEQ ID NO: 44864 - RNA, 1701 nt, Artificial Sequence
  derived and/or modified CDS sequence (wt) from hemagglutinin__InfluenzaA__AJJ98957
augaagacuaucauugcuuugagcuacauucuaugucugguuuucgcucaaaaacuuccuggaaaugacaacagcacggcaacgcugugccuugggcaccaugcaguaccaaacggaacgauagugaaaacaaucacgaaugaccaaauugaaguuacuaaugcuacugagcugguucagaguuccucaacaggugaaauaugcgacaguccucaucagauccuugauggagaaaacugcacacuaauagaugcucuauugggagacccucagugugauggcuuccaaaauaagaaaugggaccuuuuuguugaacgcagcaaagccuacagcaacuguuacccuuaugaugugccggauuaugccucccuuaggucacuaguugccucauccggcacacuggaguuuaacaaugaaagcuucaauuggaccggagucacucaaaacggaacaagcucugcuugcauaaggagaucuaauaacaguuucuuuaguagauugaauugguugacccacucaaaauucaaauacccagcauugaacgugacuaugccaaacaaugaacaauuugacaaauuguacauuugggggguucaccacccggguacggacaaugaccaaaucuuccuguaugcucaagcaucaggaagaaucacagucucuaccaaaagaagccaacaaacuguaaucccgaauaucggaucuagacccagaguaaggaauaucccuagcagaauaagcaucuauuggacaauaguaaaaccgggagacauacuuuugauuaacagcacagggaaucuaauugcuccuagggguuacuucaaaauacgaagugggaaaagcucaauaaugagaucagaugcacccauuggcaaaugcaacucugaaugcaucacuccaaauggaagcauucccaaugacaaaccauuccaaaauguaaacaggaucacauacggggccugucccagauauguuaagcaaaacacucugaaauuggcaacagggaugcgaaauguaccagagaaacaaacuagaggcauauuuggcgcaaucgcggguuucauagaaaaugguugggagggaaugguggaugguugguacgguuucaggcaucaaaauucugagggaagaggacaagcagcagaucucaaaagcacucaagcagcaaucgaucaaaucaaugggaagcugaauagauugaucgggaaaaccaacgagaaauuccaucagauugaaaaagaauucucagaagucgaagggagaauucaggaccuugagaaauauguugaggacacuaaaauagaucucuggucauacaacgcggagcuucuuguugcccuggagaaccaacauacaauugaucuaacugacucagaaaugaacaaacuguuugaaaaaacaaagaagcaacugagggaaaaugcugaggauaugggcaaugguuguuucaaaauauaccacaaaugugacaaugccugcauaggaucaaucagaaauggaacuuaugaccacgauguauacagagaugaagcauuaaacaaccgguuccagaucaagggaguugagcugaagucaggguacaaagauuggauccuauggauuuccuuugccauaucauguuuuuugcuuuguguugcuuuguugggguucaucaugugggccugccaaaaaggcaacauuaggugcaacauuugcauuuga

SEQ ID NO: 44865 - RNA, 1701 nt, Artificial Sequence
  derived and/or modified CDS sequence (wt) from hemagglutinin__InfluenzaA__AJJ98969
augaagacuaucauugcuuugagcuacauucuaugucugguuuucgcucaaaaacuuccuggaaaugacaacagcacggcaacgcugugccuugggcaccaugcaguaccaaacggaacgauagugaaaacaaucacgaaugaccaaauugaaguuacuaaugcuacugagcugguucagaguuccucaacaggugaaauaugcgacaguccucaucagauccuugauggagaaaacugcacacuaauagaugcucuauugggagacccucagugugauggcuuccaaaauaagaaaugggaccuuuuuguugaacgcagcaaagccuacagcaacuguuacccuuaugaugugccggauuaugccucccuuaggucacuaguugccucauccggcacacuggaguuuaacaaugaaagcuucaauuggacuggagucacucaaaacggaacaagcucugcuugcauaaggagaucuaauaacaguuucuuuaguagauugaauugguugacccacuuaaaauucaaauacccagcauugaacgugacuaugccaaacaaugaacaauuugacaaauuguacauuugggggguucaccacccggguacggacaaugaccaaaucuuccuguaugcucaagcaucaggaagaaucacagucucuaccaaaagaagccaacaaacuguaaucccgaauaucggaucuagacccagaguaaggaauaucccuagcagaauaagcaucuauuggacaauaguaaaaccgggagacauacuuuugauuaacagcacagggaaucuaauugcuccuagggguuacuucaaaauacgaagugggaaaaguucaauaaugagaucagaugcacccauuggcaaaugcaauucugaaugcaucacuccaaauggaagcauucccaaugacaaaccauuccaaaauguaaacaggaucacauacggggccugucccagauauguuaagcaaaacacucugaaauuggcaacagggaugcgaaauguaccagagaaacaaacuagaggcauauuuggcgcaaucgcggguuucauagaaaaugguugggagggaaugguggaugguugguacgguuucaggcaucaaaauucugagggaagaggacaagcagcagaucucaaaagcacucaagcagcaaucgaucaaaucaaugggaagcugaauagauugaucgggaaaaccaacgagaaauuccaucagauugaaaaagaauucucagaagucgaagggagaauucaggaccuugagaaauauguugaggacaccaaaauagaucucuggucauacaacgcggagcuucuuguugcccuggagaaccaacauacaauugaucuaacugacucagaaaugaacaaacuguuugaaaaaacaaagaagcaacugagggaaaaugcugaggauaugggcaaugguuguuucaaaauauaccacaaaugugacaaugccugcauaggaucaaucagaaauggaacuuaugaccacgauguauacagagaugaagcauuaaacaaccgguuccagaucaagggaguugagcugaagucaggguacaaagauuggauccuauggauuuccuuugccauaucauguuuuuugcuuuguguugcuuuguugggguucaucaugugggccugccaaaaaggcaacauuaggugcaacauuugcauuuga

SEQ ID NO: 44866 - RNA, 1701 nt, Artificial Sequence
  derived and/or modified CDS sequence (wt) from hemagglutinin__InfluenzaA__AJJ98981
augaagacuaucauugcuuugagcuacauucuaugucugguuuucgcucaaaaacuuccuggaaaugacaauagcacggcaacgcugugccuugggcaccaugcaguaccaaacggaacgauagugaaaacaaucacgaaugaccgaauugaaguuacuaaugcuacugagcugguucagaauuccucaauaggugaaauaugcgacaguccucaucauauccuugauggagaaaacugcacacuaauagaugcucuauugggagacccucagugugauggcuuucaaaauaagaaaugggaccuuuuuguugaacgaagcaaagccuacagcaacuguuacccuuaugaugugccggauuaugccucccuuaggucacuaguugccucauccggcacacuggaguuuaacaaugaaagcuucaauuggacuggagucacucaaaauggaacaaguucugcuugcauaaggagaucuaauaguaguuucuuuaguagauuaaauugguugacccacuuaaacuucaaauacccagcauugaacgugacuaugccaaacaaugaacaauuugacaaauuguacauuugggggguucaccacccggguacggacaaggaccaaaucuuccuguaugcucaaucaucaggaagaaucacaguaucuaccaaaagaagccaacaagcuguaaucccaaauaucggaucuagacccagaauaaggaaugucccuagcagaauaagcaucuauuggacaauaguaaaaccgggagacauacuuuugauuaacagcacagggaaucuaauugcuccuagggguuacuucaaaauacgaagugggaaaagcucaauaaugagaucagaugcacccauuggcaaaugcaagucugaaugcaucacuccaaauggaagcauucccaaugacaaaccauuccaaaauguaaacaggauaacauacggggccugucccagauauguuaagcaaagcacucugaaauuggcaacaggaaugcgaaauguaccagagaaacaaacuagaggcauauuuggcgcaauagcggguuucauagaaaaugguugggagggaaugguggaugguugguacgguuucaggcaucaaaauucugagggaagaggacaagcagcagaucucaaaagcacucaagcagcaaucgaucaaaucaaugggaagcugaaucgauugaucgggaaaaccaacgagaaauuccaucagauugaaaaagaauucucagaaguagaagggagaauucaggaccuugagaaauauguugaggacacuaaaauagaucucuggucauacaacgcggagcuucuuguugcccuggagaaccaacauacaauugaucuaacugacucagaaaugaacaaacuguuugaaaaaacaaagaagcaacugagggaaaaugcugaggauaugggcaaugguuguuucaaaauauaccacaaaugugacaaugccugcauaggaucaauaagaaauggaacuuaugaccacaauguguacagggaugaagcauuaaacaaccgguuccagaucaagggaguugagcugaagucaggguacaaagauuggauccuauggauuuccuuugccauaucauguuuuuugcuuuguguugcuuuguugggguucaucaugugggccugccaaaagggcaacauuaggugcaacauuugcauuuga

SEQ ID NO: 44867 - RNA, 1701 nt, Artificial Sequence
  derived and/or modified CDS sequence (wt) from hemagglutinin__InfluenzaA__AJJ98993
augaagacuaucauugcuuugagcuacauucuaugucugguuuucgcucaaaaacuuccuggaaaugacaacagcacggcaacgcugugccuugggcaccaugcaguaccaaacggaacgauagugaaaacaaucacgaaugaccaaauugaaguuacuaaugcuacugagcugguucagaauuccucaauaggugaaauaugcgacaauccucaucagauccuugauggagaaaacugcacacuaauagaugcucuauugggagacccucagugugauggcuuccaaaauaagaaaugggaccuuuuuguugaacgaagcaaagccuacagcaacuguuacccuuaugaugugccggauuaugccucccuuaggucacuaguugccucauccggcacacuggaguuuaacaaugaaagcuucaauuggacuggagucacucaaaacggaacaaguucugcuugcaugaggagaucuaauaguaguuucuuuaguagauugaauugguugacccacuuaaacuucaaauacccagcauugaacgugacuaugccaaacaaugaacaauuugacaaauuguacauuugggggguucaccacccggguacggacaaggaccaaaucuuccuguaugcucaaucaucaggaagaaucacaguaucuaccaaaagaagccaacaagcuguaaucccgaauaucggaucuagacccagaauaagaaauaucccuagcagaauaagcaucuauuggacaauaguaaaaccgggagacauacuuuugauuaacagcacagggaaucuaauugcuccuagggguuacuucaaaauacgaagugggaaaagcucaauaaugagaucagaugcacccauuggcaaaugcaauucugaaugcaucacuccaaauggaagcauucccaaugacaaaccauuccaaaauguaaacaggaucacauacggggccugucccagauauguuaagcaaagcacucugaaauuggcaacaggaaugcgaaauguaccagagaaacaaacuagaggcauauuuggcgcaauagcggguuucauagaaaaugguugggagggaaugguggaugguugguacgguuucaggcaucaaaauucugagggaagaggacaagcagcagaucucaaaagcacucaagcagcaaucgaucaaaucaaugggaagcugaaucgauugaucgggaaaaccaacgagaaauuccaucagauugaaaaagaauucucagaagucgaagggagaauucaggaccuugagaaauauguugaggacacuaaaauagaucucuggucauacaacgcggagcuucuuguugcccuggagaaucaacauacaauugaucuaacugacucagaaaugaacaaacuguuugaaaaaacaaagaagcaacugagggaaaaugcugaggauaugggcaaugguuguuucaaaauauaccacaaaugugacaaugccugcauaggaucaaucagaaauggaacuuaugaccacgauguauacagagaugaagcauuaaacaaccgguuccagaucaagggaguugagcugaagucaggguacaaagauuggauccuauggauuuccuuugccauaucauguuuuuugcuuuguguugcuuuguugggguucaucaugugggccugccaaaagggcaacauuaggugcaacauuugcauuuga

SEQ ID NO: 44868 - RNA, 1701 nt, Artificial Sequence
  derived and/or modified CDS sequence (wt) from hemagglutinin__InfluenzaA__AJJ99005
augaagacuaucauugcuuugagcuacauucuaugucugguuuucgcucaaaaacuuccuggaaaugacaacagcacggcaacgcugugccuugggcaccaugcagugccaaacggaacgauagugaaaacaaucacgaaugaccaaauugaaguuacuaaugcuacugagcugguucagaguuccucaacaggugaaauaugcaacaguccucaucagauccuugauggagaaaacugcacacuaauagaugcucuauugggagacccucagugugauggcuuccaaaacaagaaaugggaccuuuuuguugaacgaagcaaagcccacagcaacuguuacccuuaugaugugccggauuaugccucccuuaggucacuaguugccucauccggcacacuggaguuuaacaaugaaagcuucaauuggauuggagucacucaaaacggaacaagcucugcuugcauaaggagaucuaauaauaguuucuuuaguagauugaauugguugacccacuuaaacuucaaauacccagcauugaacgugacuaugccaaacaaugaacaauuugacaaauuguacauuugggggguucaccacccggguacggacaaggaccaaaucuuccuguaugcucaagcaucaggaagaaucacaguaucuaccaaaagaagccaacaagcuguaauuccgaauaucggaucuagacccagaguaaggaauaucccuagcagaguaagcaucuauuggacaauaguaaaaccgggagacauacuuuugauuaacagcacagggaaucuaauugcuccuagggguuacuucaaaauacgaagugggaaaagcucaauaaugagaucagaugcacccauuggcaaaugcaauucugcaugcaucacuccaaauggaagcauucccaaugacaaaccauuccaaaauguaaacaggaucacauacggggccugucccagauauguuaagcaaaacacucugaaauuggcaacaggaaugagaaauguaccagagaaacaaacuagaggcauauuuggcgcaauagcggguuucauagaaaaugguugggagggaaugguggaugguugguacgguuucaggcaucaaaauucugagggaaggggacaagcagcagaucucaaaagcacucaagcagcaaucgaucaaaucaaugggaagcugaauagauugaucgggaaaaccaacgagaaauuccaucagauugaaaaagaauucucagaagucgaagggagaauucaggaccuugagaaauauguugaggacacuaaaauagaucucuggucauacaacgcggagcuucuuguugcccuggagaaccaacacacaauugaucuaacugacucagaaaugaacaaacuguuugaaaaaacaaagaagcaacugagggaaaaugcugaggauaugggcaaugguuguuucaaaauauaccacaaaugugacaaugccugcauaggaucaaucagaaauggaacuuaugaccacgauguguacagagaugaagcauuaaacaaccgauuccagaucaagggaguugagcugaagucaggguacaaagauuggauccuauggauuuccuuugccauaucauguuuuuugcuuuguguugcuuuguugggguucaucaugugggccugccaaaaaggcaacauuaggugcaacauuugcauuuga

SEQ ID NO: 44869 - RNA, 1701 nt, Artificial Sequence
  derived and/or modified CDS sequence (wt) from hemagglutinin__InfluenzaA__AJJ99017
augaagacuaucauugcuuugagcuacauucuaugucugguuuucgcucaaaaacuuccuggaaaugacaacagcacggcaacgcugugccuugggcaccaugcaguaccaaacggaacgauagugaaaacaaucacgaaugaccaaauugaaguuacuaaugcuacugagcugguucagaguuccucaacaggugaaauaugcgacaguccucaucagauccuugauggagaaaacugcacacuaauagaugcucuauuaggagacccucagugugauggcuuccaaaauaagaaaugggaccuuuuuguugaacgaagcaaagccuacagcaacuguuacccuuaugaugugccggauuaugccucccuuaggucacuaguugccucauccggcacacuggaguuuaacaaugaaagcuucaauuggacuggagucacucaaaacggaacaagcucugcuugcauaaggagaucuaauaauaguuucuuuaguagauugaauugguugacccacuuaaacuucaaauacccagcauugaacgugacuaugccaaacaaugaacaauuugacaaauuguacauuugggggguucaccacccggguacggacaaggaccaaaucuuccuguaugcucaagcaucaggaagaaucacaguaucuaccaaaagaagccaacaagcuguaaucccgaauaucggaucuagacccagaguaaggaauaucccuagcagaauaagcaucuauuggacaauaguaaaaccgggagacauacuuuugauuaacagcacagggaaucuaauugcuccuagggguuacuucaaaauacgaagugggaaaagcucaauaaugagaucagaugcacccauuggcaaaugcaauucugaaugcaucacuccaaauggaagcauucccaaugacaaaccauuccaaaauguaaacaggaucacauacggggccugucccagauauguuaagcaaaacacucugaaauuggcaacaggaaugcgaaauguaccagagaaacaaacuagaggcauauuuggcgcaauagcggguuucauagaaaaugguugggagggaaugguggaugguugguacgguuucaggcaucaaaauucugagggaagaggacaagcagcagaucucaaaagcacucaagcagcaaucgaucaaaucaaugggaagcugaauagauugaucgggaaaaccaacgagaaauuccaucagauugaaaaagaauucucagaagucgaagggagaauucaggaccuugagaaauauguugaggacacuaaaauagaucucuggucauacaacgcggagcuucucguugcccuggagaaccaacauacaauugaucuaacugacucagaaaugaacaaacuguuugaaaaaacaaagaagcaacugagggaaaaugcugaggauaugggcaaugguuguuucaaaauauaccacaaaugugacaaugccugcauaggaucaaucagaaauggaacuuaugaccacgauguauacagagaugaagcauuaaacaaccgguuccagaucaagggaguugagcugaagucaggguacaaagauuggauccuauggauuuccuuugccauaucauguuuuuugcuuuguguugcuuuguugggguucaucaugugggccugccaaaaaggcaacauuaggugcaacauuugcauuuga

SEQ ID NO: 44870 - RNA, 1701 nt, Artificial Sequence
  derived and/or modified CDS sequence (wt) from hemagglutinin__InfluenzaA__AJJ99029
augaagacuaucauugcuuugagcuacauucuaugucugguuuucgcucaaaaacuuccuggaaaugacaacagcacggcaacgcugugccuugggcaccaugcaguaccaaacggaacgauagugaaaacaaucacgaaugaccaaauugaaguuacuaaugcuacugagcugguucagaguuccucaacaggugaaauaugcgacaguccucaucagauccuugauggagaaaacugcacacuaauagaugcucuauugggagacccucagugugauggcuuccaaaauaagaaaugggaccuuuuuauugaacgcagcaaagccuacagcaacuguuacccuuaugaugugccggauuaugccucccuuaggucacuaguugccucauccggcacacuggaguuuaacaaugaaagcuucaauuggacuggagucacucaaaacggaacaagcucuucuugcauaaggagaucuaauaacaguuucuuuaguagauugaauugguugacccauuuaaaauucaaauacccagcauugaaugugacuaugccaaacaaugaacaauuugacaaauuguacauuugggggguucaccacccggguacggacaaugaccaaaucuuccuguaugcucaagcaucaggaagaaucacagucucuaccaaaagaagccaacaaacuguaaucccgaauaucggaucuagacccagaguaaggaauaucccuagcagaauaagcaucuauuggacaauaguaaaaccgggagacauacuuuugauuaacagcacagggaaucuaauugcuccuagggguuacuucaaaauacgaagugggaaaagcucaauaaugagaucagaugcacccauuggcaaaugcaauucugaaugcaucacuccaaauggaagcauucccaaugacaaaccauuccaaaauguaaacaggaucacauacggggccugucccagauauguuaagcaaaacacucugaaauuggcaacagggaugcgaaauguaccagagaaacaaacuagaggcauauuuggcgcaaucgcggguuucauagaaaaugguugggagggaaugguggaugguugguacgguuucaggcaucaaaauucugagggaagaggacaagcagcagaucucaaaagcacucaagcagcaaucgaucaaaucaaugggaagcugaauagauugaucgggaaaaccaacgagaaauuccaucagauugaaaaagaauucucagaagucgaagggagaauucaggaccuugagaaauauguugaggacaccaaaauagaucucuggucauacaacgcggagcuucuuguugcccuggagaaccaacauacaauugaucuaacugacucagaaaugaacaaacuguuugaaaaaacaaagaagcaacugagggaaaaugcugaggauaugggcaaugguuguuucaaaauauaccacaaaugugacaaugccugcauaggaucaaucagaaauggaacuuaugaccacaauguauacagagaugaagcauuaaacaaccgguuccagaucaagggaguugagcugaagucaggguacaaagauuggauccuauggauuuccuuugccauaucauguuuuuugcuuuguguugcuuuguugggguucaucaugugggccugccaaaaaggcaacauuaggugcaacauuugcauuuga

SEQ ID NO: 44871 - RNA, 1701 nt, Artificial Sequence
  derived and/or modified CDS sequence (wt) from hemagglutinin__InfluenzaA__AJJ99041
augaagacuaucauugcuuugagcuacauucuaugucugguuuucgcucaaaaacuucccggaaaugacaacagcacggcaacgcugugccuugggcaccaugcaguaccaaacggaacgauagugaaaacaaucacgaaugaccaaauugaaguuacuaaugcuacugagcugguucagaguuccucaacaggugaaauaugcgacagcccucaucagauccuugauggagaaaacugcacacuaauagaugcucuauugggagacccucagugugauggcuuccaaaauaagaaaugggaccuuuuuguugaacgcagcaaagccuacagcaacuguuacccuuaugaugugccggauuaugccucccuuaggucacuaguugccucaucuggcacacuggaguuuaacaaugaaagcuucaauuggacgggagucacucaaaauggaacaagcucugcuugcaaaaggggaucugauaacaguuucuuuaguagauugaauugguugacccacuuaaaauucaaauacccagcauugaacgugacuaugccaaacaaugaaaaauuugacaaauuguacauuugggggguucaccacccggguacggacaaugaccaaaucuucccguaugcucaagcaucaggaagaaucacagucucuaccaaaagaagccaacaaacuguaaucccgaauaucggaucuagacccagaguaaggaauauccccagcagaauaagcaucuauuggacaauaguaaaaccgggagacauacuuuugauuaacagcacagggaaucuaauugcuccuagggguuacuucaaaauacgaagugggaaaagcucaauaaugagaucagaugcacccauuggcaaaugcaauucuggaugcaucacuccaaauggaagcauucccaaugacaaaccauuucaaaauguaaacaggaucacauauggggccugucccagauauguuaagcaaagcacccugaaauuggcaacagggaugcgaaauguaccagagaaacaaacuagaggcauauuuggcgcaaucgcggguuucauagaaaaugguugggagggaaugguggaugguugguacgguuucaggcaucaaaauucugagggaauaggacaagcagcagaucucaaaagcacucaagcagcaaucaaucaaaucaaugggaagcugaauagauugaucgggaaaaccaacgagaaauuccaucagauugaaaaagaauucucagaaguagaagggagaauucaggaccucgagaaauauguugaggacacuaaaauagaucucuggucauacaacgcggagcuucuuguugcccuggagaaccaacauacaauugaucuaacugacucagaaaugaacaaacuguuugaaagaacaaagaagcaacugagggaaaaugcugaggauaugggcaaugguuguuucaaaauauaccacaaaugugacaaugccugcauaggaucaaucagaaauggaacuuaugaccaugauguauacagagaugaagcauuaaacaaccgguuccagaucaaaggcguugagcugaagucaggcuacaaagauuggauccuauggauuuccuuugccauaucauguuuuuugcuuuguguugcuuuguugggguucaucaugugggccugccaaaaaggcaacauuaggugcaacauuugcauuuaa

SEQ ID NO: 44872 - RNA, 1701 nt, Artificial Sequence; identical to SEQ ID NO: 42148
  derived and/or modified CDS sequence (wt) from hemagglutinin__InfluenzaA__AJJ99053

SEQ ID NO: 44873 - RNA, 1701 nt, Artificial Sequence; identical to SEQ ID NO: 42148
  derived and/or modified CDS sequence (wt) from hemagglutinin__InfluenzaA__AJJ99065

SEQ ID NO: 44874 - RNA, 1701 nt, Artificial Sequence
  derived and/or modified CDS sequence (wt) from hemagglutinin__InfluenzaA__AJJ99089
augaagacuaucauugcuuugagcuacauucuaugucugguuuucgcucaaaaacuuccuggaaaugacaauagcacggcaacgcugugccuugggcaccaugcaguaccaaacggaacgauagugaaaacaaucacgaaugaccgaauugaaguuacuaaugcuacugagcugguucagaauuccucaauaggugaaauaugcgacaguccucaucagauccuugauggagaaaacugcacacuaauagaugcucuauugggagacccucagugugauggcuuucaaaauaagaaaugggaccuuuuuguugaacgaaacaaagccuacagcaacuguuacccuuaugaugugccggauuaugccucccuuaggucacuaguugccucauccggcacacuggaguuuaacaaugaaagcuucaauuggacuggagucacucaaaacggaacaaguucugcuugcauaaggagaucuaauaguaguuucuuuaguagauuaaauugguugacccacuuaaacuucaaauacccagcauugaacgugacuaugccaaacaaugaacaauuugacaaauuguacauuugggggguucaccacccggguacggacaaggaccaaaucuuccuguaugcucaaucaucaggaagaaucacaguaucuaccaaaagaagccaacaagcuguaaucccgaauaucggaucuagacccagaauaaggaauaucccuagcagaauaagcaucuauuggacaauaguaaaaccgggagacauacuuuugauuaacagcacaggaaaucuaauugcuccuagggguuacuucaaaauacgaagugggaaaagcucaauaaugagaucagaugcacccauuggcaaaugcaagucugaaugcaucacuccaaauggaagcauucccaaugacaaaccauuccaaaauguaaacaggaucacauacggggccugucccagauauguuaagcaaagcacucugaaauuggcaacaggaaugcgaaauguaccagagaaacaaacuagaggcauauuuggcgcaauagcggguuucauagaaaaugguugggagggaaugguggaugguugguacgguuucaggcaucaaaauucugagggaagaggacaagcagcagaucucaaaagcacucaagcagcaaucgaucaaaucaaugggaagcugaaucgauugaucgggaaaaccaacgagaaauuccaucagauugaaaaagaauucucagaaguagaagggagaauucaggaccuugagaaauauguugaggacacuaaaauagaucucuggucauacaacgcggagcuucuuguugcccuggagaaccaacauacaauugaucuaacugacucagaaaugaacaaacuguuugaaaaaacaaagaagcaacugagggaaaaugcugaggauaugggcaaugguuguuucaaaauauaccacaaaugugacaaugccugcauaggaucaaucagaaauggaacuuaugaccacgauguguacagggaugaagcauuaaacaaccgguuccagaucaagggaguugagcugaagucaggguacaaagauuggauccuauggauuuccuuugccauaucauguuuuuugcuuuguguugcuuuguugggguucaucaugugggccugccaaaagggcaacauuaggugcaacauuugcauuuga

SEQ ID NO: 44875 - RNA, 1701 nt, Artificial Sequence; identical to SEQ ID NO: 41560
  derived and/or modified CDS sequence (wt) from hemagglutinin__InfluenzaA__AJJ99101

SEQ ID NO: 44876 - RNA, 1701 nt, Artificial Sequence; identical to SEQ ID NO: 41471
  derived and/or modified CDS sequence (wt) from hemagglutinin__InfluenzaA__AJJ99113

SEQ ID NO: 44877 - RNA, 1701 nt, Artificial Sequence
  derived and/or modified CDS sequence (wt) from hemagglutinin__InfluenzaA__AJJ99125
augaagacuaucauugcuuugagcuacauucuauguaugguuuucgcucaaaaacuuccuggaaaugacaacagcacggcaacgcugugccuugggcaccaugcagugccaaacggaacgauagugaaaacaaucacgaaugaccaaauugaaguuaccaaugcuacugagcugguucagaguuccucaacaggugaaauaugcaacaguccucaucagauccuugauggagaaaacugcacacuaauagaugcucuauugggagacccucagugugauggcuuccaaaacaagaaaugggaccuuuuuguugaacgaagcaaagcccacagcaacuguuacccuuaugaugugccggauuaugccucccuuaggucacuaguugccucauccggcacacuggaguuuaacaaugaaagcuucaauuggacuggagucacucaaaacggaacaagcucugcuugcauaaggagaucuaguaauaguuucuuuaguagauugaauugguugacccacuugaacuucaaauacccagcauugaacgugacuaugccaaacaaugaacaauuugacaaauuguacauuugggggguucaccacccggguacggacaaggaccaaaucuuccuguaugcucaagcaucaggaagaaucacaguaucuaccaaaagaagccaacaagcuguaauuccgaauaucggaucuagacccagaguaaggaauaucccuagcagaguaagcaucuauuggacaauaguaaaaccgggagauauacuuuugauuaacagcacagggaaucuaauugcuccuagggguuacuucaaaauacgaagugggaaaagcucaauaaugagaucagaugcacccauuggcaaaugcaauucugcaugcaucacuccaaauggaagcauucccaaugacaaaccauuccaaaauguaaacaggaucacauacggggccugucccagauauguuaagcaaaacacucugaaauuggcaacaggaaugcgaaauguaccagagaaacaaacuagaggcauauuuggcgcaauagcggguuucauagaaaaugguugggagggaaugguggaugguugguacgguuucaggcaucaaaauucugagggaaggggacaagcagcagaucucaaaagcacucaagcagcaaucgaucaaaucaaugggaagcugaauagauugaucgggaaaaccaacgagaaauuccaucagauugaaaaagaauucucagaagucgaagggagaauucaggaccuugagaaauauguugaggacacuaaaauagaucucuggucauacaacgcggagcuucuuguugcccuggagaaccaacacacaauugaucuaacugacucagaaaugaacaaacuguuugaaaaaacaaagaagcaacugagggaaaaugcugaggauaugggcaaugguuguuucaaaauauaccacaaaugugacaaugccugcauaggaucaaucagaaauggaacuuaugaccacgauguguacagagaugaagcauuaaacaaccguuuccagaucaagggaguugagcugaagucaggguacaaagauuggauccuauggauuuccuuugccauaucauguuuuuugcuuuguguugcuuuguugggguucaucaugugggccugccaaaaaggcaacauuaggugcaacauuugcauuuga

SEQ ID NO: 44878 - RNA, 1701 nt, Artificial Sequence
  derived and/or modified CDS sequence (wt) from hemagglutinin__InfluenzaA__AJJ99137
augaagacuaucauugcuuugagcuacauucuaugucugguuuucgcucaaaaacuuccuggaaaugacaacagcacggcaacgcugugccuugggcaccaugcagugccaaacggaacgauagugaaaacaaucacgaaugaccaaauugaaguuacuaaugcuacugagcugguucagaguuccucaacaggugaaauaugcaacaguccucaucagauccuugauggagaaaacugcacacuaauagaugcucuauugggagacccucagugugauggcuuccaaaacaagaaaugggaccuuuuuguugaacgaagcaaagcccacagcaacuguuacccuuaugaugugccggauuaugccucccuuaggucacuaguugccucauccggcacacuggaguuuaacaaugaaagcuucaauuggacuggagucacucaaaacggaacaagcucugcuugcauaaggagaucuaauaauaguuucuuuaguagauugaauugguugacccacuugaacuucaaauacccagcauugaacgugacuaugccaaacaaugaacaauuugacaaauuguacauuugggggguucaccacccggguacggacaaggaccaaaucuuccuguaugcucaagcaucaggaagaaucacaguaucuaccaaaagaagccaacaagcuguaauuccgaauaucggaucuagacccagaguaaggaauaucccuagcagaguaagcaucuauuggacaauaguaaaaccgggagauauacuuuugauuaacagcacagggaaucuaauugcuccuagggguuacuucaaaauacgaagugggaaaagcucaauaaugagaucagaugcacccauuggcaaaugcaauucugcaugcaucacuccaaauggaagcauucccaaugacaaaccauuccaaaauguaaacaggaucacauacggggccugucccagauauguuaagcaaaacacucugaaauuggcaacaggaaugcgaaauguaccagagaaacaaacuagaggcauauuuggcgcaauagcggguuucauagaaaaugguugggagggaaugguggaugguugguacgguuucaggcaucaaaauucugagggaaggggacaagcagcagaucucaaaagcacucaagcagcaaucgaucaaaucaaugggaagcugaauagauugaucgggaaaaccaacgagaaauuccaucagauugaaaaagaauucucagaagucgaagggagaauucaggaccuugagaaauauguugaggacacuaaaauagaucucuggucauacaacgcggagcuucuuguugcccuggagaaccaacacacaauugaucuaacugacucagaaaugaacaaacuguuugaaaaaacaaagaagcaacugagggaaaaugcugaggauaugggcaaugguuguuucaaaauauaccacaaaugugacaaugccugcauaguaucgaucagaaauggaacuuaugaccacgauguguacagagaugaagcauuaaacaaccgauuccagaucaagggaguugagcugaagucaggguacaaagauuggauccuauggauuuccuuugccauaucauguuuuuugcuuuguguugcucuguugggguucaucaugugggccugccaaaaaggcaacauuaggugcaacauuugcauuuga

SEQ ID NO: 44879 - RNA, 1701 nt, Artificial Sequence
  derived and/or modified CDS sequence (wt) from hemagglutinin__InfluenzaA__AJJ99149
augaagacuaucauugcuuugagcuacauucuaugucugguuuucgcucaaaaauuuccuggaaaugacaacagcacggcaacgcugugccuugggcaccaugcaguaccaaacggaacgauagugaaaacaaucacgaaugaccaaauugaaguuacuaaugcuacugagcugguucagaguucaucaacaggugaaauaugcgacaguccucaucagauccuugauggaaaaaacugcacacuaauagaugcucuauugggagacccucagugugauggcuuccaaaauaagaaaugggaccuuuuuguugaacgcagcaaagccuacagcaacuguuacccuuaugauaugccggauuaugccucccuuaggucacuaguugccucaucuggcacacuggaguuuaacaaugaaagcuucaauuggacuggagucacucaaaacggaacaagcucugcuugcauaaggagaucuaauaguaguuucuuuaguagauugaauugguugacccacuuaaacuucaaauaccaagcauugaacgugacuaugccgaacaaugaacaauuugacaaauuguacauuugggggguucaccacccggguacggacaaagaccaaaucuuccuguaugcucaagcaucaggaagaaucacagucucuaccaaaagaagccaacaaacuguaaucccgaauaucggaucuagaccccgaguaaggaauaucccuagcagaauaagcaucuauuggacaauaguaaaaccgggagacauacuuuugauuaacagcacagggaaucuaauugcuccuagggguuacuucaaaauacaaagugggaaaagcucaauaaugagaucagaugcacccauuggcaaaugcaauucugaaugcaucacuccaaauggaagcauucccaaugacaaaccauuccaaaauguaaacaggaucacauacggggccugucccagauauguuaagcaaaacacucugaaauuggcaacagggaugcgaaauguaccagagaaacaaacuagaggcauauuuggcgcaaucgcggguuucauagaaaaugguugggagggaaugguggaugguugguacgguuucaggcaucaaaauucugagggaagaggacaagcagcagaucucaaaagcacucaagcagcaaucgaucaaaucaaugggaagcugaauagauugaucgggaaaaccaacgagaaauuccaucagauugaaaaagaauucucagaagucgaagggagaauucaggaccuugagaaauauguugaggacacuaaaauagaucucuggucauacaacgcggagcuucuuguugcccuggagaaccaacauacaauugaucugacugacucagaaaugaacaaacuguuugaaaaaacaaagaagcaacugagggaaaaugcugaggauaugggcaaugguuguuucaaaauauaccacaaaugugacaaugccugcauaggaucaaucagaaauggaacuuaugaccacgauguauacagagaugaagcauuaaacaaccgguuucagaucaagggaguugagcugaagucaggguacaaagauuggauccuauggauuuccuuugccauaucauguuuuuugcuuuguguugccuuguugggguucaucaugugggccugccaaaaaggcaacauuaggugcaacauuugcauuuga

SEQ ID NO: 44880 - RNA, 1701 nt, Artificial Sequence
  derived and/or modified CDS sequence (wt) from hemagglutinin__InfluenzaA__AJJ99161
augaagacuaucauugcuuugagcuacauucuaugucugguuuucgcucaaaaacuuccuggaaaugacaacagcacggcaacgcugugccuugggcaccaugcaguaccaaacggaacgauagugaaaacaaucacgaaugaccaaauugaaguuacuaaugcuacugagcugguucagaguuccucaacaggugaaauaugcgacaguccucaucagauccuugauggagaaaacugcacacuaauagaugcucuauugggagacccucagugugauggcuuccaaaauaagaaaugggaccuuuuuguugaacgcagcaaagccuacagcaacuguuacccuuaugaugugccggauuaugccucccuuaggucacuaguugccucauccggcacacuggaguuuaacaaugaaagcuucaauuggaccggagucacucaaaacggaacaagcucugcuugcauaaggagaucuaauaacaguuucuuuaguagauugaauugguugacccacuuaaaauucaaauacccagcauugaacgugacuaugccaaacaaugaacaauuugacaaauuguacauuugggggguucaccacccggguacggacaaugaccaaaucuuccuguaugcucaagcaucaggaagaaucacagucucuaccaaaagaagccaacaaacuguaaucccgaauaucggaucuagacccagaguaagggauaucccuagcagaauaagcaucuauuggacaauaguaaaaccgggagacauacuuuugauuaacagcacagggaaucuaauugcuccuagggguuacuucaaaauacgaagugggaaaagcucaauaaugagaucagaugcacccauuggcaaaugcaacucugaaugcaucacuccaaauggaagcauucccaaugacaaaccauuccaaaauguaaacaggaucacauacggggccugucccagauauguuaagcaaaacacucugaaauuggcaacagggaugcgaaauguaccagagaaacaaacuagaggcauauuuggcgcaaucgcggguuucauagaaaaugguugggagggaaugguggaugguugguacgguuucaggcaucaaaauucugagggaagaggacaagcagcagaucucaaaagcacucaagcagcaaucgaucaaaucaaugggaaacugaauagauugaucgggaaaaccaacgagaaauuccaucagauugaaaaagaauucucagaagucgaagggagaauucaggaccuugagaaauauguugaggacacuaaaauagaucucuggucauacaacgcggagcuucuuguugcccuggagaaccaacauacaauugaucuaacugacucagaaaugaacaaacuguuugaaaaaacaaagaagcaacugagggaaaaugcugaggauaugggcaaugguuguuucaaaauauaccacaaaugugacaaugccugcauaggaucaaucagaaauggaacuuaugaccacgauguauacagagaugaagcauuaaacaaccgguuccagaucaagggaguugagcugaagucaggguacaaagauuggauccuauggauuuccuuugccauaucauguuuuuugcuuuguguugcuuuguugggguucaucaugugggccugccaaaaaggcaacauuaggugcaacauuugcauuuga

SEQ ID NO: 44881 - RNA, 1701 nt, Artificial Sequence
  derived and/or modified CDS sequence (wt) from hemagglutinin__InfluenzaA__AJJ99173
augaagacuaucauugcuuugagcuacauucuaugucugguuuucgcucaaaaacuuccuggaaaugacaacagcacggcaacgcugugccuugggcaccaugcaguaccaaacggaacgauagugaaaacaaucacgaaugaccaaauugaaguuacuaaugcuacugagcugguucagaguuccucaacaggugaaauaugcaacagcccucaucagauccuugauggagaaaacugcacacuaauagaugcucuauugggagacccucagugugauggcuuccaaaauaagaaaugggaccuuuuuguugaacgcagcaaagccuacagcaacuguuacccuuaugaugugccggauuaugccucccuuaggucacuaguugccucauccggcacacuggaguuuaacaaugaaagcuucaauuggacuggagucacucaaaacggaacaagcucugcuugcauaaggagaucuaauagcaguuucuuuaguagauugaauugguugacccacuuaaaauucaaauacccagcauugaacgugacuaugccaaacaaugaacaauuugacaaauuguacauuugggggguucaccacccggguacggacaaugaccaaaucuuccuguaugcucaagcaucaggaagaaucacagucucuaccaaaagaagccaacaaacuguaaucccgaauaucggaucuagacccagaguaaggaauaucccuagcagaauaagcaucuauuggacaauaguaaaaccgggagacauacuuuugauuaacagcacagggaaucuaauugcuccuagggguuacuucaaaauacgaagugggaaaagcucaauaaugagaucagaugcacccauuggcaaaugcaauucugaaugcaucacuccaaauggaagcauucccaaugacaaaccauuccaaaauguaaacaggaucacauacggggccugucccagauauguuaaacaaaacacucugaaauuggcaacagggaugcgaaauguaccagagaaacaaacuagaggcauauuuggcgcaaucgcggguuucauagaaaaugguugggagggaaugguggaugguugguacgguuucaggcaucaaaauucugagggaagaggacaagcagcagaucucaaaagcacucaagcagcaaucgaucaaaucaaugggaagcugaauagauugaucgggaaaaccaacgagaaauuccaucagauugaaaaagaauucucagaagucgaagggagaauucaggaccuugagaaauauguugaggacaccaaaauagaucucuggucauacaacgcggagcuucuuguugcccuggagaaccaacauacaauugaucuaacugacucagaaaugaacaaacuguuugaaaaaacgaagaagcaacugagggaaaaugcugaggauaugggcaaugguuguuucagaauauaccacaaaugugacaaugccugcauaggaucaaucagaaauggaacuuaugaccacgauguauacagagaugaagcauuaaacaaccgguuccagaucaagggaguugagcugaagucaggguacaaagauuggauccuauggauuuccuuugccauaucauguuuuuugcuuuguguugcuuuguugggguucaucaugugggccugccaaaaaggcaacauuaggugcaacauuugcauuuga

SEQ ID NO: 44882 - RNA, 1701 nt, Artificial Sequence
  derived and/or modified CDS sequence (wt) from hemagglutinin__InfluenzaA__AJJ99185
augaagacuaucauugcuuugagcuacauucuaugucugguuuucgcucaaaaacuuccuggaaaugacaacagcacggcaacgcugugccuugggcaccaugcaguaccaaacggaacgauagugaaaacaaucacgaaugaccaaauugaaguuacuaaugcuacugagcugguucagaguuccucaacaggugaaauaugcgacaguccucaucagauccuugauggagaaaacugcacacuaauagaugcucuauugggagacccucagugugauggcuuccaaaauaagaaaugggaccuuuuuguugaacgcagcaaagccuacagcaacuguuacccuuaugaugugccggauuaugccucccuuaggucacuaguugccucauccggcacacuggaguuuaacaaugaaagcuucaauuggacuggggucacucaaaacggaacaagcucugcuugcauaaggaaaucuaauaacaguuucuuuaguagauugaauugguugacccacuuaaaauucaaauacccagcauugaacgugacuaugccaaacaaugaacaauuugacaaauuguacauuugggggguucaccacccggguacggacaaugaccaaaucuuccuguaugcucaagcaucaggaagaaucacagucucuaccaaaagaagccaacaaacuguaaucccgaauaucggaucuagacccagaguaaggaauaucccuagcagaauaagcaucuauuggacaauaguaaaaccgggagacauacuuuugauuaacagcacagggaaucuaauugcuccuagggguuacuucaaaauacgaagugggaaaagcucaauaaugagagcagaugcacccauuggcaaaugcaauucugaaugcaucacuccaaauggaagcauucccaaugacaaaccauuccaaaauguaaacaggaucacauacggggccugucccagauauguuaagcaaaacacucugaaauuggcaacagggaugcgaaauguaccagagaaacaaacuagaggcauauuuggcgcaaucgcggguuucauagaaaaugguugggagggaaugguggaugguugguacgguuucaggcaucaaaauucugagggaagaggacaagcagcagaucucaaaagcacucaagcagcaaucgaucaaaucaaugggaagcugaauagauugaucgggaaaaccaacgagaaauuccaucagauugaaaaagaauucucagaagucgaagggaggauucaggaccuugagaaauauguugaggacaccaaaauagaucucuggucauacaacgcggagcuucuuguugcccuggagaaccaacauacaauugaucuaacugacucagaaaugaacaaacuguuugaaaaaacaaagaagcaacugagggaaaaugcugaggauaugggcaaugguuguuucaaaauauaccacaaaugugacaaugccugcauaggaucaaucagaaauggaacuuaugaccacgauguauacagagaugaagcauuaaacaaccgguuccagaucaagggaguugagcugaagucaggguacaaagauuggauccuauggauuuccuuugccauaucauguuuuuugcuuuguguugcuuuguugggguucaucaugugggccugccaaaaaggcaacauuaggugcaacauuugcauuuga

SEQ ID NO: 44883 - RNA, 1701 nt, Artificial Sequence
  derived and/or modified CDS sequence (wt) from hemagglutinin__InfluenzaA__AJJ99197
augaagacuaucauugcuuugagcuacauucuauguuugguuuucgcucaaaaacuuccuggaaaugacaacagcacggcaacgcugugccuugggcaccaugcaguaccaaacggaacgauagugaaaacaaucacgaaugaccaaauugaaguuacuaaugcuacugagcugguucagaguuccucaacaggugaaauaugcgacaguccucaucagauccuugauggagaaaacugcacacuaauagaugcucuauugggagacccucagugugauggcuuccaaaauaagaaaugggaccuuuuuguugaacgcagcaaagccuacagcaacuguuacccuuaugaugugccggauuaugccucccuuaggucacuaguugccucauccggcacacuggaguuuaacaaugaaagcuucaauuggacuggagucacucaaaacggaacaagcucugcuugcauaaggagaucuaacaauaguuucuuuaguagauugaauugguugacccacuuaaaauucaaauacccagcauugaacgugacuaugccaaacaaugaagaauuugacaaauuguacauuugggggguucaccacccggguacggacaaugaccaaaucuuccuguaugcccaagcaucaggaagaaucacagucucuaccaaaagaagccaacaaacuguaaucccgaauauuggaucuagacccagaguaaggaauaucccuagcagaauaagcaucuauuggacaauaguaaaaccgggagacauacuuuugauuaacagcacagggaaucuaauugcuccuagggguuacuucaaaauacgaaguggaaaaagcucaauaaugagaucagaugcacccauuggcaaaugcaauucugaaugcaucacuccaaauggaagcauucccaaugacaaaccauuccaaaauguaaacaggaucacauacggggccugucccagauauguuaagcaaaacacucugaaauuggcaacagggaugcgaaauguaccagagaaacaaacuagaggcauauuuggcgcaaucgcggguuucauagaaaaugguugggagggaaugguggaugguugguacgguuucaggcaucaaaauucugagggaacaggacaagcagcagaucucaaaagcacucaagcagcaaucgaucaaaucaaugggaagcugaauagguugaucgggaaaaccaacgagaaauuccaucagauugaaaaagaauucucagaagucgaagggagaauucaggaccuugagaaauauguugaggacaccaaaauagaucucuggucauacaacgcggagcuucuuguugcccuggagaaccaacauacaauugaucuaacugacucagaaaugaacaaacuguuugaaaaaacaaagaagcaacugagggaaaaugcugaggauaugggcaaugguuguuucaaaauauaccacaaaugugacaaugccugcauaggaucaaucagaaauggaacuuaugaccacgauguauacagagaugaagcauuaaacaaccgguuccagaucaagggcguugagcugaagucaggauacaaagauuggauccuauggauuuccuuugccauaucauguuuuuugcuuuguguugcuuuguugggguucaucaugugggccugccaaaaaggcaacauuaggugcaacauuugcauuuga

SEQ ID NO: 44884 - RNA, 1701 nt, Artificial Sequence
  derived and/or modified CDS sequence (wt) from hemagglutinin__InfluenzaA__AJJ99209
augaagacuaucauugcuuugagcuacauucuaugucugguuuucgcucaaaaacuucccggaaaugacaacagcacggcaacgcugugccuugggcaccaugcaguaccaaacggaacgauagugaaaacaaucacgaaugaccaaauugaaguuacuaaugcuacugagcugguucagaguuccucaacagguggaauaugcgacaguccucaucagauccuugauggagaaaacugcacacuaauagaugcucuauugggagacccucagugugauggcuuccaaaauaagaaaugggaccuuuuuguugaacgcagcaaagccuacagcaacuguuacccuuaugaugugccggauuaugccucccuuaggucacuaguugccucaucuggcacacuggaguuuaacaaugaaagcuucaauuggacgggagucacucaaaauggaacaagcucugcuugcaaaaggaaaucugauaacaguuucuuuaguagauugaauugguugacccacuuaaaauucaaauacccagcauugaacgugacuaugccaaacaaugaagaauuugacaaauuguacauuugggggguucaccacccggggacggacaaugaccaaaucuuccuguaugcucaagcaucaggaagaaucacagucucuaccaaaagaagccaacaaacuguaaucccgaauaucggaucuagacccagaguaaggaauauccccagcagaauaagcaucuauuggacaauaguaaaaccuggagacauacuuuugauuaacagcacagggaaucuaauugcuccuagggguuacuucaaaauacgaagugggaaaagcucaauaaugagaucagaugcacccauuggcaaaugcaauucugaaugcaucacuccaaauggaagcauucccaaugacaaaccauuucaaaauguaaacagaaucacauauggggccugucccagauauguuaagcaaagcacccugaaauuggcaacagggaugcgaaauguaccggagaaacaaacuagaggcauauuuggcgcaaucgcggguuucauagaaaaugguugggagggaaugguggaugguugguacgguuucaggcaucaaaauucugagggaauaggacaagcagcagaucucaaaagcacucaagcagcaaucaaucaaaucaaugggaagcugaauagguugaucgggaaaaccaacgagaaauuccaucagauugaaaaagaauucucagaaguagaagggagaauucaggaccucgagaaauauguugaggacacuaaaauagaucucuggucauacaacgcggagcuucuuguugcccuggagaaccaacauacaauugaucuaacugacucagaaaugaacaaacuguuugaaagaacaaagaagcaacugagggaaaaugcugaggauaugggcaaugguuguuucaaaauauaccacaaaugugacaaugccugcauaggaucaaucagaaauggaacuuaugaccaugauguauacagagaugaagcauuaaacaaccgguuccagaucaaaggcguugagcugaagucaggcuacaaagauuggauccuauggauuuccuuugccaugucauguuuuuugcuuuguguugcuuuguugggguucaucaugugggccugccaaaaaggcaacauuaggugcaacauuugcauuuga

SEQ ID NO: 44885 - RNA, 1701 nt, Artificial Sequence
  derived and/or modified CDS sequence (wt) from hemagglutinin__InfluenzaA__AJJ99221
augaagacuaucauugcuuugagcuacauucuaugucugguuuucgcucaaaaacuucccggaaaugacaacagcacggcaacgcugugccuugggcaccaugcaguaccaaacggaacgauagugaaaacaaucacgaaugaccaaauugaaguuacuaaugcuacugagcugguucagaguuccucaacaggugaaauaugcgacaguccucaucagauccuugauggagaaaacugcacacuaauagaugcucuauugggagacccucagugugauggcuuccaaaauaagaaaugggaccuuuuuguugaacgcagcaaagccuacagcaacuguuacccuuaugaugugccggauuaugccucccuuaggucacuaguugccucauccggcacacuggaguuuaacaaugaaagcuucaauuggacuggagucacucaaaacggaacaagcucugcuugcauaaggagaucuaauaguaguuucuuuaguagauugaauugguugacccacuuaaaauucaaauacccagcauugaacgugacuaugccaaacaaugaaaaauuugacaaauuguacauuugggggguucaccacccggguacggacaaugaccaaaucuuccuguaugcucaagcaucaggaagaaucacagucucuaccaaaagaagccaacaaacuguaaucccaaauaucggaucuagacccagaguaaggaauauccccagcagaauaagcaucuauuggacaauaguaaaaccgggagacauacuuuugauuaacagcacagggaaucuaauugcuccuagggguuacuucaaaauacaaagugggaaaagcucaauaaugagaucagaugcacccauuggcaaaugcaauucugaaugcaucacuccaaauggaagcauucccaaugacaaaccauuccaaaauguaaacaggaucacauacggggccugucccagauauguuaagcaaaacacucugaaauuggcaacagggaugcgaaauguaccagagaaacaaacuagaggcauauuuggcgcaaucgcggguuucauagaaaaugguugggagggaaugguggaugguugguacgguuucaggcaucaaaauucugagggaauaggacaagcagcagaucucaaaagcacccaagcagcaaucgaucaaaucaaugggaagcugaauagguugaucgggaaaaccaacgagaaauuccaucagauugaaaaagaauucucagaagucgaagggagaauucaggaccuugagaaauauguugaggacaccaaaauagaucucuggucauacaacgcggagcuucuuguugcccuggagaaucaacauacaauugaucuaacugacucagaaaugaacaaacuguuugaaaaaacaaaaaagcaacugagggaaaacgcugaggauaugggcaaugguuguuucaaaauauaccacaaaugugacaaugccugcauaggaucaaucagaaauggaacuuaugaccacgauguauacagagaugaagcauuaaacaaccgguuccagaucaagggcguugagcugaagucaggauacaaagauuggauccuauggauuuccuuugccauaucauguuuuuugcuuuguguugcuuuguugggguucaucaugugggccugccaaaaaggcaacauuaggugcaacauuugcauuuga

SEQ ID NO: 44886 - RNA, 1701 nt, Artificial Sequence
  derived and/or modified CDS sequence (wt) from hemagglutinin__InfluenzaA__AJJ99233
augaagacuaucauugcuuugagcuacauucuaugucugguuuucgcucaaaaacuucccggaaaugacaacagcacggcaacgcugugccuugggcaccaugcaguaccaaacggaacgauagugaaaacaaucacgaaugaccaaauugaaguuacuaaugcuacugagcugguucagaguuccucaacaggugaaauaugcgacaguccucaucagauccuugauggagaaaacugcacacuaauagaugcucuauugggagacccucagugugauggcuuccaaaauaagaaaugggaccuuuuuguugaacgcagcaaagccuacagcaacuguuacccuuaugaugugccggauuaugccucccuuaggucacuaguugccucauccggcacacuggaguuuaacaaugaaagcuucaauuggacuggagucacucaaaacggaacaagcucugcuugcauaaggagaucuaauaacaguuucuuuaguagauugaauugguugacccacuuaaaauucaaauacccagcauugaacgugacuaugccaaacaaugaaaaauuugacaaauuguacauuugggggguucaccacccggguacggacaaugaccaaaucuuccuguaugcucaagcaucaggaagaaucacagucucuaccaaaagaagccaacaaacuguaaucccaaauaucggaucuagacccagaguaaggaauauccccagcagaauaagcaucuauuggacaauaguaaaaccgggagacauacuuuugauuaacagcacagggaaucuaauugcuccuagggguuacuucaaaauacaaagugggaaaagcucaauaaugagaucagaugcacccauuggcaaaugcaauucugaaugcaucacuccaaauggaagcauucccaaugacaaaccauuccaaaauguaaacaggaucacauacggggccugucccagauauguuaagcaaaacacucugaaauuggcaacagggaugcgaaauguaccagagaaacaaacuagaggcauauuuggcgcaaucgcggguuucauagaaaaugguugggagggaaugguggaugguugguacgguuucaggcaucaaaauucugagggaauaggacaagcagcagaucucaaaagcacccaagcagcaaucgaucaaaucaaugggaagcugaauagguugaucgggaaaaccaacgagaaauuccaucagauugaaaaagaauucucagaagucgaagggagaauucaggaccuugagaaauauguugaggacaccaaaauagaucucuggucauacaacgcggagcuucuuguugcccuggagaaucaacauacaauugaucuaacugacucagaaaugaacaaacuguuugaaaaaacaaaaaagcaacugagggaaaacgcugaggauaugggcaaugguuguuucaaaauauaccacaaaugugacaaugccugcauaggaucaaucagaaauggaacuuaugaccacgauguauacagagaugaagcauuaaacaaccgguuccagaucaagggcguugagcugaagucaggauacaaagauuggauccuauggauuuccuuugccauaucauguuuuuugcuuuguguugcuuuguugggguucaucaugugggccugccaaaaaggcaacauuaggugcaacauuugcauuuga

SEQ ID NO: 44887 - RNA, 1701 nt, Artificial Sequence
  derived and/or modified CDS sequence (wt) from hemagglutinin__InfluenzaA__AJJ99244
augaaggcaauacuaguagucaugcuguauacauuugcaaccgcaaaugcagacacauuauguauagguuaucaugcgaacaauucaacagacacuguagacacaguacuagaaaagaauguaacaguaacacacucuguuaaucuucuagaagacaaacauaacgggaaacuaugcaaacuaagagggguagccccauugcauuuggguaaauguaacauugcuggcuggauccugggaaauccagagugugaaucacucuccacagcaagcucaugguccuacauuguggaaacaucugguucagacaauggaacguguuacccaggagauuucaucgauuaugaagagcuaagagagcaauugagcucagugucaucauuugaaagguuugagauauuccccaaaacaaguucauggcccaaucaugacucgaacaaagguguaacggcagcauguccucaugcuggagcaaaaggcuucuacaaaaauuuaauauggcuaguuaaaaaaggaaauucauacccaaagcucagcaaauccuacauuaaugauaaagggaaagaaguccucgugcuauggggcauucaccauccaucuacuacugcugaccaacaaagucucuaucagaaugcagauacauauguuuuuguggggacaucaagauacagcaagaaguucaagccggaaauagcaauaagacccaaaguaagggaucaagaagggagaaugaacuauuacuggacacuaguagagccgggagacaaaauaacauucgaagcaacuggaaaucuagugguaccgagauaugcauuugcaauggaaagaaaugcuggaucugguauuaucauuucagauacaccaguccacgauugcaauacaacuugucagacacccaagggugcuauaaacaccagccucccauuucagaauauacauccgaucacaauuggaaaauguccaaaauauguaaaaagcacaaaauugagacuggccacaggauugaggaaugucccgucuauucaaucuagaggccuauuuggggccauugccggcuucauugaagggggguggacagggaugguagauggaugguacgguuaucaccaucaaaaugagcaggggucaggauaugcagccgaccugaagagcacacagaaugccauugacaagauuacuaacaaaguaaauucuguuauugaaaagaugaauacacaguucacagcaguagguaaagaguucaaccaccuggaaaaaagaauagagaauuuaaauaaaaaaguugaugaugguuuccuggacauuuggacuuacaaugccgaacuguugguucuauuggaaaaugaaagaacuuuggacuaccacgauucaaaugugaagaacuuauaugaaaagguaagaaaccaguuaaaaaacaaugccaaggaaauuggaaauggcugcuuugaauuuuaccacaaaugcgauaacacgugcauggaaagugucaaaaaugggacuuaugacuacccaaaauacucagaggaagcaaaauuaaacagagaagaaauagaugggguaaagcuggaaucaacaaggauuuaccaaauuuuggcgaucuauucaacugucgcuaguucauugguacugguagucucccugggggcaaucaguuuuuggaugugcucuaaugggucucuacaguguagaauauguauuuaa

SEQ ID NO: 44888 - RNA, 1701 nt, Artificial Sequence
  derived and/or modified CDS sequence (wt) from hemagglutinin__InfluenzaA__AJJ99255
augaaggcaauacuaguaguucugcuauauacauuugcaaccgcaaaugcagacacauuauguauagguuaucaugcgaacaauucaacagacacuguagacacaguacuagaaaagaauguaacaguaacucacucuguuaaccuucuagaagacaaucauaacgggaaacuaugcaaacuaagagggguagccccauugcauuuggguaaauguaacauugcgggcuggauccugggaaauccagagugugaaucacucuccacagcaagcucaugguccuacauuguggaaacaucuagcucagacaauggaacguguuacccaggagauuucaucaauuaugaggagcuaagagagcaauugagcucagugucaucauuugaaagguuugaaauauuccccaagacaaguucauggcccaaucaugacucgaacaaagguguaacggcagcauguccucgugcuggagcaaaaagcuucuacaaaaauuuaauauggcuaguuaaaaaaggaaauucauacccaaagcucagcaaauccuacauuaaugauaaagggaaagaaguccucgugauguggggcauucaccauccaucuacuacugcugaccaacaaagucucuaucagaaugcagaugcauauguuuuuguggggacaucaagauacagcaaggaguucaagccggaaauagcaauaagacccaaagugagggaucaagaagggagaaugaacuauuacuggacacuaguagagccgggagacaaaauaacauucgaagcaacuggaaaucuauugguaccgagauaugcauucgcaauggaaagaaaugcuggaucugguauuaucauuucagauacaccaguccacgauugcaauacaacuugucagacacccaagggugcuauaaacaccagccucccauuucagaauauacauccgaucacaauuggaaaauguccaaaauauguaaaaagcacaaaauugagacuggccacaggauugaggaaugucccgucuauucaaucuagaggccuauuuggagccauugccggcuucauugaagggggguggacagggaugguagauggaugguacgguuaucaccaucaaaaugagcaggggucaggauaugcagccgaccugaagagcacacagaaugccaucgacaagauuaccaacaaaguaaauucuguuauugaaaagaugaauacacaguucacagcaguagguaaagaguucaaccaccuggaaaaaagaauagagaauuuaaauaaaaaaguugaugaugguuuccuggacauuuggacuuacaaugccgaacuguugguucuauuggaaaaugaaagaacuuuggacuaccacgauucaaaugugaagaacuuguaugaaaagguaagaaaccaguuaaaaaacaaugccaaggaaauuggaaacggcugcuuugaauuuuaccacaaaugcgauaacacgugcauggaaagugucaaaaaugggacuuaugacuacccaaaauacucagaggaagcaaaauuaaacagagaagaaauagaugggguaaagcuggaaucaacaaggauuuaccagauuuuggcgaucuauucaacugucgccaguucauugguacugguagucucccugggggcaaucaguuucuggaugugcucuaaugggucucuacaguguagaauauguauuuaa

SEQ ID NO: 44889 - RNA, 1698 nt, Artificial Sequence
  derived and/or modified CDS sequence (wt) from hemagglutinin__InfluenzaA__AJJ99267
augaaaguaaaacuacugguccuguuaugcacauuuacagcuacauaugcagacacaauauguauaggcuaccaugcuaacaacucgaccgacacuguugacacagugcuugaaaagaaugugacagugacacacucugucaaccugcuugagaacagucacaauggaaaacuaugucuauuaaaaggaauagccccacuacaauuggguaauugcagcguugccggguggaucuuaggaaacccagaaugcgaauuacugauuuccaaggagucaugguccuacauuguagaaaaaccaaauccugagaauggaacauguuacccagggcauuucgcugacuaugaggaacugagggagcaauugaguucaguaucuucguuugagagguucgaaauauuccccaaagaaagcucauggcccaaccacaccauaaccggagugucagcaucaugcucccauaauggggaaagcaguuuuuacagaaauuugcuauggcugacggggaagaaugguuuguacccaaaccugagcaaguccuaugcaaacaacaaagaaaaagaaguccuuguacuaugggguguucaucacccgccaaacauaggugaccaaaaggcccucuaucauacagaaaaugcuuaugucucuguagugucuucacauuauagcagaaaauucaccccagaaauagccaaaagacccaaaguaagagaucaagaaggaagaaucaacuacuacuggacucugcuugaacccggggauacuauaauauuugaggcaaauggaaaucuaauagcgccaagauaugcuuucgcacugaguagaggcuuuggaucaggaaucaucaacucaaaugcaccaauggacaaaugugaugcgaagugccaaacaccucagggagcuauaaacagcagucuuccuuuccagaacguacacccaguaacaauaggagaguguccaaaguaugucaggagugcaaaauuaaggaugguuacaggacuaaggaacaucccauccauucaauccagagguuuguuuggagccauugccgguuucauugaagggggguggacuggaaugguagaugguugguaugguuaucaucaucagaaugagcaaggaucuggcuaugcugcagaucaaaaaagcacacaaaaugccauuaaugggauuacaaacaaggugaauucuguaauugagaaaaugaacacucaauucacagcagugggcaaagaauucaacaaauuggaaagaaggauggaaaacuugaauaaaaaaguugaugauggguuuauagacauuuggacauauaaugcagaacuguugguucuacuggaaaaugaaaggacuuuggauuuccaugacuccaaugugaagaaucuguaugagaaaguaaaaagccaguuaaagaauaaugcuaaagaaauaggaaauggguguuuugaauucuaucacaaguguaacgaugaaugcauggagaguguaaagaauggaacuuaugacuauccaaaauauuccgaagaaucaaaguuaaacagggagaaaauugauggagugaaauuggaaucaaugggaguuuaucagauucuagcgaucuacucaacggucgccaguucucugguucuuuuggucucccugggggcagucagcuucuggauguguuccaaugggucuuugcaguguagaguaugcaucuaa

SEQ ID NO: 44890 - RNA, 1701 nt, Artificial Sequence
  derived and/or modified CDS sequence (wt) from hemagglutinin__InfluenzaA__AJJ99278
augaaggcaauacuaguaguucugcuauauacauuugcaaccgcaaaugcagacacauuauguauagguuaucaugcgaacaauucaacagauacuguagacacaguacuagaaaagaauguaacaguaacacacucuguuaaccuucuagaagacaagcauaacgggaaacuaugcaaacugagagggguagccccauugcauuuggguaaauguaacauugcuggcuggauccugggaaauccagagugugaaucacucuccacagcaagcucaugguccuacauuguggaaacaucuaguucagacaauggaacguguuacccaggagauuucaucaauuaugaggagcuaagagagcaauugagcucagugucaucauuugaaagguuugagauauuccccaagacaaguucauggcccaaucaugacucgaacaaagguguaacggcagcauguccucaugcuggagcaaaaagcuucuacaaaaauuuaauauggcuaguuaaaaaaggaaauucauacccaaagcucagcaaauccuacauuaacgauaaagggaaagaaguccucgugcuauggggcauucaccauccaucuacuagugcugaccaacaaagucucuaucagaaugcagaugcauauguuuuuguggggacaucaaaauacagcaagaaguucaagccggaaauagcaguaagacccaaagugagggaucaagaagggagaaugaacuauuacuggacacuaguagagccgggagacaaaauaacauucgaagcaacuggaaaucuauugguaccgagauaugcauucgcaauggaaagaaaugcuggaucugguauuaucauuucagauacaccaguccacgauugcaauacaacuugucagacacccaagggugcuauaaacaccagccucccauuucagaauauacauccgaucacaauuggaaaauguccaaaauauguaaaaagcacaaaauugagacuggccacaggauugaggaaugucccgucuauucaaucuagaggccuauuuggggccauugccgguuucauugaagggggguggacagggaugguagauggaugguacgguuaucaccaucaaaaugagcaggggucaggauaugcagccgaccugaagagcacacagaaugccauugacaagauuacuaacaaaguaaauucuguuauugaaaagaugaauacacaguucacagcaguagguaaagaguucaaccaccuggaaaaaagaauagagaauuuaaauaaaaaaguugaugaugguuuccuggacauuuggacuuacaaugccgaacuguugguucuauuggaaaaugaaagaacuuuggacuaccacgauucaaaugugaaaaacuuauaugaaaagguaagaagccaguuaaaaaacaaugccaaggaaauuggaaacggcugcuuugaauuuuaccacaaaugcgauaacacgugcauggaaagugucaaaaaugggacuuaugacuacccaaaauacucagaggaagcaaaauuaaacagagaagaaauagaugggguaaagcuggaaucaacaaggauuuaccagauuuuggcgaucuauucaacugucgccaguucauugguacugguagucucccugggggcaaucaguuucuggaugugcucuaaugggucucuacaguguagaauauguauuuaa

SEQ ID NO: 44891 - RNA, 1701 nt, Artificial Sequence
  derived and/or modified CDS sequence (wt) from hemagglutinin__InfluenzaA__AJJ99289
augaaggcaauacuaguaguucugcuauauacauuugcaaccgcaaaugcagacacauuauguauagguuaucaugcgaacaauucaacagacacuguagacacaguacuagaaaagaauguaacaguaacacacucuguuaaccuucuagaagacaagcauaacgggaaacuaugcaaacuaagagggguagccccauugcauuuggguaaauguaacauugcuggcuggauccugggaaauccagagugugaaucacucuccacagcaagcucaugguccuacauuguggaaacaucuaguucagacaauggaacguguuacccaggaguuuucaucgauuaugaggagcuaagagagcaauugagcucagugucaucauuugaaagguuugagauauuccccaagacaaguucauggcccaaucaugacucgaacaaagguguaacggcagcauguccucaugcuggagcaaaaagcuucuauaaaaauuuaauauggcuaguuaaaaaaggaaauucauacccaaagcucagcaaauccuacauuaaugauaaagggaaagaaguccucgugcuauggggcauucaccauccaucuacuacugcugaccaacaaagucucuaucagaaugcagaugcauauguuuuuguggggacaucaagauacagcaagaaguucaagccggaaauagcaauaagacccaaagugagggaucaagaagggagaaugaacuauuacuggacacuaguagagccgggagacaaaauaacauucgaagcaacuggaaaucuagugguaccgagauaugcauucgcaauggaaagaaaugcuggaucugguauuaucauuucagauacaccaguccacgauugcaauacaacuugucagacacccaagggugcuauaaacaccagccucccauuucagaauauacauccgaucacaauuggaaaauguccaaaauauguaaaaagcacaaaauugagacuggccacaggauugaggaaugucccgucuauucaaucuagaggccuauuuggggccauugccggcuucauugaagggggguggacagggaugguagauggaugguacgguuaucaccaucaaaaugagcaggggucaggauaugcagccgaccugaagagcacacagaaugccauugacaagauuacuaacaaaguaaauucuguuauugaaaagaugaauacacaguucacagcaguagguaaagaguucaaccaccuggaaaaaagaauagagaauuuaaauaaaaaaguugaugaugguuuccuggacauuuggacuuacaaugccgaacuguugguucuauuggaaaaugaaagaacuuuggacuaccacgauucaaaugugaagaacuuauaugaaaagguaagaaaccaguuaaaaaacaaugccaaggaaauuggaaacggcugcuuugaauuuuaccacaaaugcgauaacacgugcauggaaagugucaaaaaugggacuuaugacuacccaaaauacucagaggaagcaaaauuaaacagagaagaaauagaugggguaaagcuggaaucaacaaggauuuaccagauuuuggcgaucuauucaacugucgccaguucauugguacugguagucucccugggggcaaucaguuucuggaugugcucuaaugggucucuacaguguagaauauguauuuaa

SEQ ID NO: 44892 - RNA, 1698 nt, Artificial Sequence
  derived and/or modified CDS sequence (wt) from hemagglutinin__InfluenzaA__AJJ99301
augaaaguaaaacuacugguccuguuaugcacauuuacagcuacauaugcagacacaauauguauaggcuaccaugcuaacaacucgaccgacacuguugacacaguacuugaaaagaaugugacagugacacacucugucaaccugcuugagaacagucacaauggaaaacuaugucuauuaaaaggaauagccccacuacaauuggguaauugcagcguugccggguggaucuuaggaaacccagaaugcgaaucacugauuuccaaggagucaugguccuacauuguagaaaaaccaaauccugagaauggaacauguuacccagggcauuucgcugacuaugaggaacugagggagcaauugaguucaguaucuucauuugagagguucgaaauauuccccaaagaaagcucauggcccaaccacaccguaaccggagugucagcaucaugcucccauaauggggaaagcaguuuuuacagaaauuugcuauggcugacggggaagaaugguuuguacccaaaccugagcaaguccuaugcaaacaacaaagaaaaagaaguccuuguacuaugggguguucaucacccgccaaacauaggugaccaaaaggcccucuaucauacagaaaaugcuuaugucucuguagugucuucacauuauagcagaaaauucaccccagaaauagccaaaagacccaaaguaagagaucaagaaggaagaaucaauuacuacuggacucugcuugaacccggggauacaauaauauuugaggcaaauggaaaucuaauagcgccaagauaugcuuucgcacugaguagaggcuuuggaucaggaaucaucaacucaaaugcaccaauggauaaaugugaugcgaagugccaaacaccucagggagcuauaaacagcagucuuccuuuccagaacguacacccagucacaauaggagaguguccaaaguaugucaggagugcaaaauuaaggaugguuacaggacuaaggaacaucccauccauucaauccagagguuuguuuggagccauugccgguuucauugaagggggguggacuggaaugguagaugguugguaugguuaucaucaucagaaugagcaaggaucuggcuaugcugcagaucaaaaaagcacacaaaaugccauuaaugggauuacaaacaaggugaauucuguaauugagaaaaugaacacucaauucacagcagugggcaaagaauucaacaaauuggaaagaaggauggaaaacuugaauaaaaaaguugaugauggguuuauagacauuuggacauauaaugcagaacuguugguucuacuggaaaaugaaaggacuuuggauuuccaugacuccaaugugaagaaucuguaugagaaaguaaaaagccaguuaaagaauaaugcuaaagaaauaggaaauggguguuuugaauucuaucacaaguguaacgaugaaugcauggagaguguaaagaauggaacuuaugacuauccaaaauauuccgaagaaucaaaguuaaacagggagaaaauugauggagugaaauuggaaucaaugggagucuaucagauucuggcgaucuacucaacagucgccaguucucugguucuuuuggucucccugggggcaaucagcuucuggauguguuccaaugggucuuugcaguguagaauaugcaucuaa

SEQ ID NO: 44893 - RNA, 1698 nt, Artificial Sequence
  derived and/or modified CDS sequence (wt) from hemagglutinin__InfluenzaA__AJJ99324
augaaaguaaaacuacugguccuguuaugcacauuuacagcuacauaugcagacacaauauguauaggcuaccaugcuaacaacucgaccgacacuguugacacaguacuugaaaagaaugugacagugacacacucugucaaccugcuugagaacagucacaauggaaaacuaugucuauuaaaaggaauagccccacuacaauuggguaacugcagcguugccggguggaucuuaggaaacccagaaugcgaauuacugauuuccaaggagucaugguccuacauuguagaaaaaccaaauccugagaauggaacauguuacccaggacauuucgcugacuaugaggaacugagggagcaauugaguucaguaucuucauuugagagguucgaaauauuccccaaagaaagcucauggcccaaccacaccguaaccggagugucagcaucaugcucccauaauggggaaaacaguuuuuacagaaauuugcuauggcugacggggaagagugguuuguacccaaaccugagcaaguccuaugcaaacaacaaagaaaaagaaguccuuguacuaugggguguucaucacccgccaaacauagcugaccaaaagacccucuaucauacagaaaaugcuuauguuucuguagugucuucacauuauagcagaaaauucaccccagaaauagccaaaagacccaaaguaagagaucaagaaggaagaaucaacuacuacuggacucugcuugaacccggggauacaauaauauuugaggcaaauggaaaucuaauagcgccaagauaugcuuucgcacugaguagaggcuuuggaucaggaaucaucaacucaaaugcaccaauggauaaaugugaugcgaagugccaaacaccucaaggagcuauaaacagcagucuuccuuuccagaacguacacccagucacaauaggagaguguccaaaguaugucaggagugcaaaauuaaggaugguuacaggacuaaggaacaucccauccauucaauccagagguuuguuuggagccauugccgguuucauugaagggggguggacuggaaugguagaugguugguaugguuaucaucaucagaaugagcaaggaucuggcuaugcugcagaucaaaaaagcacacaaaaugccauuaaugggauuacaaacaaggugaauucuguaauugagaaaaugaacacucaauucacagcagugggcaaagaauucaacaaauuggaaagaaggauggaaaacuugaauaaaaaaguugaugauggguuuauagacauuuggacauauaaugcagaacuguugguucuacuggaaaaugaaaggacuuuggauuuccaugacuccaaugugaagaaucuguaugagaaaguaaaaagccaguuaaagaauaaugcuaaagaaauaggaaauggguguuuugaauucuaucacaaguguaacgaugaaugcauggagaguguaaagaauggaacuuaugacuauccaaaauauuccgaagaaucaaaguuaaacagggagaaaauugauggagugaaauuggaaucaaugggagucuaucagauucuggcgaucuacucaacagucgccaguucucugguucuuuuggucucccugggggcaaucagcuucuggauguguuccaaugggucuuugcaguguagaauaugcaucuaa

SEQ ID NO: 44894 - RNA, 1701 nt, Artificial Sequence
  derived and/or modified CDS sequence (wt) from hemagglutinin__InfluenzaA__AJJ99335
auggaggcaauacuaguaguucugcuauauacauuugcaaccgcaaaugcagacacauuauguauagguuaucaugcgaacaauucaacagacacuguagacacaguacuagaaaagaauguaacaguaacacacucuguuaaccuucuagaagacaagcauaacgggaaacuaugcaaacuaagagggguagccccauugcauuuggguaaauguaacauugcuggcuggauccugggaaauccagagugugaaucacucuccacagcaagcucaugguccuacauuguggaaacaucuaguucaaacaauggaacguguuacccaggagauuucaucgauuaugaggagcuaagagagcaauugagcucagugucaucauuugaaagguuugagauauuccccaagacaaguucauggcccaaucaugacucgaacaaagguguaacggcagcauguccucaugcuggagcaaaaagcuucuacaaaaauuuaauauggcuaguuaaaaaaggaaauucauacccaaagcucagcaaauccuacauuaaugauaaagggaaagaaguccucgugcuauggggcauucaccauccaucuacuagugcugaccaacaaagucucuaucagaaugcagaugcauauguuuuuguggggucaucaagauacagcaagaaguucaagccggaaauagcaauaagacccaaagugagggaucaagaagggagaaugaacuauuacuggacacuaguagagccgggagacaaaauaacauucgaagcaacuggaaaucuagugguaccgagauaugcauucgcaauggaaagaaaugcuggaucugguauuaucauuucagauacaccaguccacgauugcaauacaacuugucagacacccaauggugcuauaaacaccagccucccauuucauaauauacauccgaucacaauuggaaaauguccaaaauauguaaaaagcacaaaauugagacuggccacaggauugaggaaugucccgucuauucaaucuagaggccuauuuggggccauugccgguuucauugaagggggguggacagggaugguagauggaugguacgguuaucaccaucaaaaugagcaggggucaggauaugcagccgaccugaagagcacacagaaugccauugacgagauuacuaacaaaguaaauucuguuauugaaaagaugaauacacaguucacagcaguagguaaagaguucaaccaccuggaaaaaagaauagagaauuuaaauaaaaaaguugaugaugguuuccuggacauuuggacuuacaaugccgaacuguugguucuauuggaaaaugaaagaacuuuggacuaccacgauucaaaugugaagaacuuauaugaaaagguaagaagccaguuaaaaaacaaugccaaggaaauuggaaacggcugcuuugaauuuuaccacaaaugcgauaacacgugcauggaaagugucaaaaaugggacuuaugacuaccccaaauacucagaggaagcaaaauuaaacagagaagaaauagaugggguaaagcuggaaucaacaaggauuuaccagauuuuggcgaucuauucaacugucgccaguucauugguacugguagucucccugggggcaaucaguuucuggaugugcucuaaugggucucuacaguguagaauauguauuuaa

SEQ ID NO: 44895 - RNA, 1701 nt, Artificial Sequence
  derived and/or modified CDS sequence (wt) from hemagglutinin__InfluenzaA__AJJ99357
augaaggcaauacuaguaguucugcuauauacauuugcaaccgcaaaugcagacacauuauguauagguuaucaugcgaacaauucaacagacacuguagacacaguacuagaaaagaauguaacaguaacacacucuguuaaccuucuagaagacaagcauaacgggaaacuaugcaaacuaagagggguagccccauugcauuuggguaaauguaacauugcuggcuggauccugggaaauccagaaugugaaucacucuccacagcaagcucaugguccuacauuguggaaacaucuaguucagacaauggaacguguuacccaggagauuucaucgauuaugaggagcuaagagagcaauugagcucagugucaucauuugaaagguuugagauauuccccaagacaaguucauggcccaaucaugacucgaacaaagguguaacggcagcauguccucaugcuggagcaaaaagcuucuacaaaaauuuaauauggcuaguuaaaaaaggaaauucauacccaaagcucagcaaauccuacauuaaugauaaagggaaagaaguccucgugcuauggggcauucaccauccaucuacuagugcugaccaacaaagucucuaucagaaugcagaugcauauguuuuuguggggacaucaagauacagcaagaaguucaagccggaaauagcaauaagacccaaagugagggaucaagaagggagaaugaacuauuacuggacacuaguagagccgggagacaaaauaacauucgaagcaacuggaaaucuagugguaccgagauaugcauucgcaauggaaagagaugcuggaucugguauuaucauuucagauacaccaguccacgauugcaauacaacuugucagacacccaagggugcuauaaacaccagccucccauuucagaauauacauccgaucacaauuggaaaauguccaaaauauguaaaaagcacaaaauugagacuggccacaggauugaggaaugucccgucuauucaaucuagaggccuauuuggggccauugccgguuucauugaagggggguggacagggaugguagauggaugguacgguuaucaccaucaaaaugagcaggggucaggauaugcagccgaccugaagagcacacagaaugccauugacgagauuacuaacaaaguaaauucuguuauugaaaagaugaauacacaguucacagcaguagguaaagaguucaaccaccuggaaaaaagaauagagaauuuaaauaaaaaaauugaugaugguuuccuggacauuuggacuuacaaugccgaacuguugguucuauuggaaaaugaaagaacuuuggacuaccacgauucaaaugugaagaacuuauaugaaaagguaagaagccaguuaaaaaacaaugccaaggaaauuggaaacggcugcuuugaauuuuaccacaaaugcgauaacacgugcauggaaagugucaaaaaugggacuuaugacuacccaaaauacucagaggaagcaaaauuaaacagagaagaaauagaugggguaaagcuggaaucaacaaggauuuaccagauuuuggcgaucuauucaacugucgccaguucauugguacugguagucucccugggggcaaucaguuucuggaugugcucuaaugggucucuacaguguagaauauguauuuaa

SEQ ID NO: 44896 - RNA, 1701 nt, Artificial Sequence
  derived and/or modified CDS sequence (wt) from hemagglutinin__InfluenzaA__AJJ99368
augaaggcaauacuaguaguuaugcuauauacauuugcaaccgcaaaugcagacacauuauguauagguuaucaugcgaacaauucaacagacacuguagacacaguacuagaaaagaauguaacaguaacacacucuguuaaucuucuagaagacaagcauaacgggaaacuaugcaaacuaagagggguagccccauugcauuuggguaaauguaacauugcuggcuggauccugggaaauccagagugugaaucacucuccacagcaagcucauggucauacauuguggaaacaucuaguucagacaauggaacguguuacccaggagauuucaucgauuaugaggagcuaagagagcaauugagcucagugucaucauuugaaagguuugagauauuccccaaaacaaguucauggcccaaucaugacucgaacaaagguguaacggcagcauguccucaugcuggagcaaaaggcuucuacaaaaauuuaauauggcuaguuaaaaaaggaaauucauacccaaagcucagcaaauccuacauuaaugauaaagggaaagaaguccucguacuauggggcauucaccauccaucuacuacugcugaccaacaaagucucuaucagaaugcagauacauauguuuuuguggggacaucaagauacagcaagaaguucaagccggaaauagcaauaagacccaaagugagggaucaagaagggagaaugaacuauuacuggacacuaguagagccgggagacaaaauaacauucgaagcaacuggaaaucuagugguaccgagauaugcauucgcaauggaaagaaaugcuggaucugguauuaucauuucagauacaccaguccacgauugcaauacaacuugucagacacccaagggugcuauaaacaccagccucccauuucagaauauacauccgaucacaauuggaaaauguccaaaauauguaaaaagcacaaaauugagacuggccacaggauugaggaaugucccgucuauucaaucuagaggccuauuuggggccauugccggcuucauugaagggggguggacagggaugguagaugggugguacgguuaccaccaucaaaaugagcaggggucaggauaugcagccgaccugaagagcacacagaaugccauugacaagauuacuaacaaaguaaauucuguuauugaaaagaugaauacacaguucacagcaguagguaaagaguucaaccaccuggaaaaaagaauagagaauuuaaauaaaaaaguugaugaugguuuccuggacauuuggacuuacaaugccgaacuguugguucuauuggaaaaugaaagaacuuuggacuaccacgauucaaaugugaagaacuuauaugaaaagguaaggaaccaguuaaaaaacaaugccaaggaaauuggaaauggcugcuuugaauuuuaccacaaaugcgauaacacgugcauggaaagugucaaaaaugggacuuaugacuacccaaaauacucagaggaagcaaaauuaaacagagaagaaauagaugggguaaagcuggaaucaacaaggauuuaccagauuuuggcgaucuauucaacugucgccaguucauugguacugguagucucccugggggcaaucaguuuuuggaugugcucuaaugggucucuacaguguagaauauguauuuaa

SEQ ID NO: 44897 - RNA, 1701 nt, Artificial Sequence
  derived and/or modified CDS sequence (wt) from hemagglutinin__InfluenzaA__AJJ99379
augaaggcaauacuaguaguucugcuauauacauuugcaaccgcaaaugcagacacauuauguauagguuaucaugcgaacaauucaacagacacuguagacacaguacuagaaaagaauguaacaguaacacacucuguuaaucuucuagaagacaagcauaacgggaaacuaugcaaacuaagagggguagccccauugcauuuggguaaauguaacauugcuggcuggauccugggaaauccagagugugaaucacucuccacagcaagcucaugguccuacauuguggaaacaucuaguucagacaauggaacguguuacccaggagauuucaucgauuaugaggagcuaagagagcaauugagcucagugucaucauuugaaagguuugagauauuccccaagacaaguucauggcccaaucaugacucgaacaaagguguaacggcagcauguccucaugcuggagcaaaaagcuucuacaaaaauuuaauauggcuaguuaaaaaaggaaauucauacccaaagcucagcaaauccuacauuaaugauaaagggaaagaaguccucgugcuauggggcauucaccauccaucuacuacugcugaccaacaaagucucuaucagaaugcagauacauauguuuuuguggggacaucaagauacagcaagaaguucaagccggaaauagcaauaagacccaaagugagggaucaagaagggagaaugaacuauuacuggacacuaguagagccgggagacaaaauaacauucgaagcaacuggaaaucuagugguaccgagauaugcauucgcaauggaaagaaaugcuggaucugguauuaucauuucagauacaccaguccacgauugcaauacaacuugucagacacccaagggugcuauaaacaccagccucccauuucagaauauacauccgaucacaauugggaaauguccaaaauauguaaaaagcacaaaauugagacuggccacaggauugaggaaugucccgucuauucaaucuagaggccuauuuggggccauugccggcuucauugaagggggguggacagggaugguagauggaugguacgguuaucaccaucaaaaugagcaggggucaggauaugcagccgaccugaagagcacacagaaugccauugacaagauuacuaacaaaguaaauucuguuauugaaaagaugaauacacaguucacagcaguagguaaagaguucaaccaccuggaaaaaagaauagagaauuuaaauaaaaaaguugaugaugguuuccuggacauuuggacuuacaaugccgaacuguugguucuauuggaaaaugaaagaacuuuggacuaccacgauucaaaugugaagaacuuauaugaaaagguaagaaaccaguuaaaaaacaaugccaaggaaauuggaaauggcugcuuugaauuuuaccacaaaugcgauaacacgugcauggaaagugucaaaaaugggacuuaugacuacccaaaauacucagaggaagcaaaauuaaacagagaagaaauagaugggguaaagcuggaaucaacaaggauuuaccagauuuuggcgaucuauucaacugucgccaguucauugguacugguagucucccugggggcaaucaguuuuuggaugugcucuaaugggucucuacaguguagaauauguauuuaa

SEQ ID NO: 44898 - RNA, 1701 nt, Artificial Sequence
  derived and/or modified CDS sequence (wt) from hemagglutinin__InfluenzaA__AJJ99390
auggaggcaauacuaguaguucugcuauauacauuugcaaccgcaaaugcagacacauuauguauagguuaucaugcgaacaauucaacagacacuguagacacaguacuagaaaagaauguaacaguaacacacucuguuaaccuucuagaagacaagcauaacgggaaacuaugcaaacuaagaggaguagccccauugcauuuggguaaauguaacauugcuggcuggauccugggaaauccagagugugaaucacucuccacagcaagcucaugguccuacauuguggaaacaucuaguucagacaauggaacguguuacccaggagauuucaucgauuaugaggagcuaagagagcaauugagcucagugucaucauuugaaagguuugagauauuccccaagacaaguucauggcccaaucaugacucgaacaaagguguaacagcagcauguccucaugcuggagcaaaaagcuucuacaaaaauuuaauauggcuaguuaaaaaaggaaauucauacccaaagcucagcaaauccuacauuaaugauaaagggaaagaaguccucgugcuauggggcauucaccauccaucuacuagugcugaccaacaaagucucuaucagaaugcagaugcauauguuuuuguggggucaucaagauacagcaagaaguucaagccggaaauagcaauaagacccaaagugagggaucaagaagggagaaugaacuauuacuggacacuaguagagccgggagacaaaauaacauucgaagcaacuggaaaucuagugguaccgagauaugcauucgcaauggaaagaaaugcuggaucugguauuaucauuucagauacaccaguccacgauugcaauacaacuugucagacacccaagggugcuauaaacaccagccucccauuucauaauauacauccgaucacaauuggaaaaugcccaaaauauguaaaaagcacaaaauugagacuggccacaggauugaggaaugucccgucuauucaaucuagaggccuauuuggggccauugccgguuucauugaagggggguggacagggaugguggauggaugguacgguuaucaccaucaaaaugagcaggggucaggauaugcagccgaccugaagagcacacagaaugccauugacaagauuaccaacaaaguaaauucuguuauugaaaagaugaauacacaguucacagcaguagguaaagaguucaaccaccuggaaaaaagaauagagaauuuaaauaaaaaaguugaugaugguuuccuggacauuuggacuuacaaugccgaacuguugguucuauuggaaaaugaaagaacuuuggacuaccacgauucaaaugugaagaacuuauaugaaaagguaagaagccaguuaaaaaacaaugccaaggaaauuggaaacggcugcuuugaauuuuaccacaaaugcgauaacacgugcauggaaagugucaaaaaugggacuuaugacuacccaaaauacucagaggaagcaaaauuaaacagagaagaaauagaugggguaaagcuggaaucaacaaggauuuaccagauuuuggcgaucuauucaacugucgccaguucauugguacugguagucucccugggggcaaucaguuucuggaugugcucuaaugggucucuacaguguagaauauguauuuaa

SEQ ID NO: 44899 - RNA, 1701 nt, Artificial Sequence
  derived and/or modified CDS sequence (wt) from hemagglutinin__InfluenzaA__AJJ99401
augaaggcaauacuaguaguucugcuauauacauuugcaacugcaaaugcagacacauuauguauagguuaucaugcgaacaauucaacagacacuguagacacaguacuagaaaagaauguaacaguaacacacucuguuaaccuucuagaagacaagcauaacgggaaacuaugcaaacuaagagggguagccccauugcauuuggguaaauguaacauugcuggcuggauccugggaaauccagagugugaaucacucuccacagcaagcucaugguccuacauuguggaaacaucuaguucagacaauggaacguguuacccaggagauuucaucgauuaugaggagcuaagagagcaauugagcucagugucaucauuugaaagguuugagauauuccccaagacaaguucauggcccaaucaugacucgaacaaagguguaacggcagcauguccucaugcuggagcaaaaagcuucuacaaaaauuuaauauggcuaguuaaaaaaggaaauucauacccaaagcucagcaaauccuacauuaaugauaaagggaaagaaguccucgugcuauggggcauucaccauccaucuacuagugcugaccaacaaagucucuaucagaaugcagaugcauauguuuuuguggggacaucaagauacagcaagaaguucaagccggaaauagcaauaagacccaaagugagggaucaagaagggagaaugaacuauuacuggacacuaguagagccgggagacaaaauaacauucgaagcaacuggaaaucuagugguaccgagauaugcauucgcaauggaaagagaugcuggaucugguauuaucauuucagauacaccaguccacgauugcaauacaacuugucagacacccaagggugcuauaaacaccagccucccauuucagaauauacauccgaucacaauuggaaaauguccaaaauauguaaaaagcacaaaauugagacuggccacaggauugaggaaugucccgucuauucaaucuagaggccuauuuggggccauugccgguuucauugaagggggguggacagggaugguagauggaugguacgguuaucaccaucaaaaugagcaggggucaggauaugcagccgaccugaagagcacacagaaugccauugacgagauuacuaacaaaguaaauucuguuauugaaaagaugaauacacaguucacagcaguagguaaagaguucaaccaccuggaaaaaagaauagagaauuuaaauaaaaaaauugaugaugguuuccuggacauuuggacuuacaaugccgaacuguugguucuauuggaaaaugaaagaacuuuggacuaccacgauucaaaugugaagaacuuauaugaaaagguaagaagccaguuaaaaaacaaugccaaggaaauuggaaacggcugcuuugaauuuuaccacaaaugcgauaacacgugcauggaaagugucaaaaaugggacuuaugacuacccaaaauacucagaggaagcaaaauuaaacagagaagaaauagaugggguaaagcuggaaucaacaaggauuuaccagauuuuggcgaucuauucaacugucgccaguucauugguacugguagucucccugggggcaaucaguuucuggaugugcucuaaugggucucuacaguguagaauauguauuuaa

SEQ ID NO: 44900 - RNA, 1698 nt, Artificial Sequence
  derived and/or modified CDS sequence (wt) from hemagglutinin__InfluenzaA__AJJ99413
augaaaguaaaacuacugguccuguuaugcacauuuacagcuacauaugcagacacaauauguauaggcuaccaugcuaacaacucgaccgacacuguugacacaguacuugaaaagaaugugacagugacacacucugucaaccugcuugagaacagucacaauggaaaacuaugucuauuaaaaggaauagccccacuacaauuggguaacugcagcguugccggguggaucuuaggaaacccagaaugcgaauugcugauuuccaaggagucaugguccuacauuguagaaaaaccaaauccugagaauggaacauguuacccagggcauuucgcugacuaugaggaacugagggagcaauugaguucaguaucuucauuugagagguucgaaauauuccccaaagaaagcucauggcccaaccacaccguaaccggagugucagcaucaugcucccauaauggggaaaacaguuuuuacagaaaucugcuauggcugacggggaagaaugguuuguacccaaaccugagcaaguccuaugcaaacaacaaagaaaaagaaguccuuguacuaugggguguucaucacccgccaaacauagcugaccaaaaaacccucuaucauacagaaaaugcuuauguuucuguagugucuucacauuauagcagaaaauucaccccagaaauagccaaaagacccaaaguaagagaucaagaaggaagaaucaacuacuacuggacucugcuugaacccggggauacaauaauauuugaggcaaauggaaaucuaauagcgccaagauaugcuuucgcacugaguagaggcuuuggaucaggaaucaucaacucaaaugcaucaauggauaaaugugaugcgaagugccaaacaccucaaggagcuauaaacagcagucuuccuuuccagaacguacacccagucacaauaggagaguguccaaaguaugucaggagugcaaaauuaaggaugguuacaggacuaaggaacaucccauccauucaauccagagguuuguuuggagccauugccgguuucauugaagggggguggacuggaaugguagaugguugguaugguuaucaucaucagaaugagcaaggaucuggcuaugcugcagaucaaaaaagcacacaaaaugccauuaaugggauuacaaacaaggugaauucuguaauugagaaaaugaacacucaauucacagcaguaggcaaagaauucaacaaauuggaaagaaggauggaaaacuugaauaaaaaaguugaugauggguuuauagacauuuggacauauaaugcagaacuguugguucuacuggaaaaugaaaggacuuuggauuuccaugacuccaaugugaagaaucuguaugagaaaguaaaaagccaguuaaagaauaaugcuaaagaaauaggaaauggguguuuugaauucuaucacaaguguaacgaugaaugcauggagaguguaaagaauggaacuuaugacuauccaaaauauuccgaagaaucaaaguuaaacagggagaaaauugauggagugaaauuggaaucaaugggagucuaucagauucuggcgaucuacucaacagucgccaguucucugguucuuuuggucucccugggggcaaucagcuucuggauguguuccaaugggucuuugcaguguagaauaugcaucuaa

SEQ ID NO: 44901 - RNA, 1698 nt, Artificial Sequence
  derived and/or modified CDS sequence (wt) from hemagglutinin__InfluenzaA__AJJ99425
augaaaguaaaacuacugguccuguuaugcacauuuacagcuacauaugcagacacaauauguauaggcuaccaugcuaacaacucgaccgacacuguugacacaguacuugaaaagaaugugacagugacacacucugucaaccugcuugagaacagucacaauggaaaacuaugucuauuaaaaggaauagccccacuacaauuggguaacugcagcguugccggguggaucuuaggaaacccagaaugcgaauuacugauuuccaaggagucaugguccuacauuguagaaaaaccaaauccugagaauggaacauguuacccagggcauuucgcugacuaugaggaacugagggagcaauugaguucaguaucuucauuugagagguucgaaauauuccccaaagaaagcucauggcccaaccacaccguaaccggagugucagcaucaugcucccauaauggggaaaacaguuuuuacagaaauuugcuauggcugacggggaagaaugguuuguacccaaaccugagcaaguccuaugcaaacaacaaagaaaaagaaguccuuguacuaugggguguucaucacccgccaaacauagcugaccaaaagacccucuaucauacagaaaaugcuuauguuucuguagugucuucacauuauagcagaaaauucaccccagaaauagccaaaagacccaaaguaagagaucaagaaggaagaaucaacuacuacuggacucugcuugaacccggggauacaauaauauuugaggcaaauggaaaucuaauagcgccaagauaugcuuucgcacugaguagaggcuuuggaucaggaaucaucaacucaaaugcaccaauggauaaaugugaugcgaagugccaaacaccucaaggagcuauaaacagcagucuuccuuuccagaacguacacccagucacaauaggagaguguccaaaguaugucaggagugcaaaauuaaggaugguuacaggacuaaggaacaucccauccauucaauccagagguuuguuuggagccauugccgguuucauugaagggggguggacuggaaugguagaugguugguaugguuaucaucaucagaaugagcaaggaucuggcuaugcugcagaucaaaaaagcacacaaaaugccauuaaugggauuacaaacaaggugaauucuguaauugagaaaaugaacacucaauucacagcaguaggcaaagaauucaacaaauuggaaagaaggauggaaaacuugaauaaaaaaguugaugauggguuuauagacauuuggacauauaaugcagaacuguugguucuacuggaaaaugaaaggacuuuggauuuccaugacuccaaugugaagaaucuguaugagaaaguaaaaagccaguuaaagaauaaugcuaaagaaauaggaaauggguguuuugaauucuaucacaaguguaacgaugaaugcauggagaguguaaagaauggaacuuaugacuauccaaaauauuccgaagaaucaaaguuaaacagggagaaaauugauggagugaaauuggaaucaaugggagucuaucagauucuggcgaucuacucaacagucgccaguucucugguucuuuuggucucccugggggcaaucagcuucuggauguguuccaaugggucuuugcaguguagaauaugcaucuaa

SEQ ID NO: 44902 - RNA, 1698 nt, Artificial Sequence
  derived and/or modified CDS sequence (wt) from hemagglutinin__InfluenzaA__AJJ99437
augaaaguaaaacuacugguccuguuaugcacauuuacagcuacauaugcagacacaauauguauaggcuaccaugcuaacaacucgaccgacacuguugacacaguacuugaaaagaaugugacagugacacacucugucaaccugcuugagaacagucacaauggaaaacuaugucuauuaaaaggaauagccccacuacaauuggguaacugcagcguugccggguggaucuuaggaaacccagaaugcgaauuacugauuuccaaggagucaugguccuacauuguagaaaaaccaaauccugagaauggaacauguuacccagggcauuucgcugacuaugaggaacugagagagcaauugaguucaguaucuucauuugaaagguucgaaauauuccccaaagaaagcucauggcccaaccacaccguaaccggagugucagcaucaugcucccauaauggggaaaacaguuuuuacagaaauuugcuauggcugacggggaagaaugguuuguacccaagccugagcaaguccuaugcaaacaacaaagaaaaagaaguccuuguacuaugggguguucaucacccgccaaacauagcugaccaaaagacccucuaucauacagaaaaugcuuauguuucuguagugucuucacauuauagcagaaaauucaccccagaaauagccaaaagacccaaaguaagagaucaagaaggaagaaucaacuacuacuggacucugcuugaacccggggauacaauaauauuugaggcaaauggaaaucuaauagcgccaagauaugcuuucgcacugaguagaggcuuuggaucaggaaucaucaacucaaaugcaccaauggauaaaugugaugcgaagugccaaacaccucaaggagcuauaaacagcagucuuccuuuccagaacguacacccagucacaauaggagaguguccaaaguaugucaggagugcaaaauuaaggaugguuacaggacuaaggaacaucccauccauucaauccagagguuuguuuggagccauugccgguuucauugaagggggguggacuggaaugguagaugguugguaugguuaucaucaucagaaugagcaaggaucuggcuaugcugcagaucaaaaaagcacacaaaaugccauuaaugggauuacaaacaaggugaauucuguaauugagaaaaugaacacucaauucacagcagugggcaaagaauucaacaaauuggaaagaaggauggaaaacuugaauaaaaaaguugaugauggguuuauagacauuuggacauauaaugcagaacuguugguucuacuggaaaaugaaaggacuuuggauuuccaugacuccaaugugaagaaucuguaugagaaaguaaaaagccaguuaaagaacaaugcuaaagaaauaggaaauggguguuuugaauucuaucacaaguguaacgaugaaugcauggagaguguaaagaauggaacuuaugacuauccaaaauauuccgaagaaucaaaguuaaacagggagaaaauugauggagugaaauuggaaucaaugggagucuaucagauucuggcgaucuacucaacagucgccaguucucugguucuuuuggucucccugggggcaaucagcuucuggauguguuccaaugggucuuugcaguguagaauaugcaucuaa

SEQ ID NO: 44903 - RNA, 1698 nt, Artificial Sequence
  derived and/or modified CDS sequence (wt) from hemagglutinin__InfluenzaA__AJJ99449
augaaaguaaaacuacugguccuguuaugcacauuuacagcuacauaugcagacacaauauguauaggcuaccaugcuaacaacucgaccgacacuguugacacaguacuugaaaagaaugugacagugacacacucugucaaccugcuugagaacagucacaauggaaaacuaugucuauuaaaaggaauagccccacuacaauuggguaauugcagcguugccggguggaucuuaggaaacccagaaugcgaauuacugauuuccaaggagucaugguccuacauuguagaaaaaccaaauccugagaauggaacauguuacccagggcauuucgcugacuaugaagaacugagggagcaauugaguucaguaucuucauuugagagguucgaaauauuucccaaagaaagcucauggcccaaccacaccguaaccggagugucagcaucaugcucccauaauggggaaagcaguuuuuacagaaauuugcuauggcugacggggaagaaugguuuguacccaaaccugagcaaguccuaugcaaacaacaaagaaaaagaaguccuuguacuaugggguguucaucacccgccaaacauaggugaccaaaaggcccucuaucauacagaaaaugcuuaugucucuguagugucuucacauuauagcagaaaauucaccccagaaauagccaaaagacccaaaguaagagaucaagaaggaagaaucaacuacuacuggacucugcuugaacccggggauacaauaauauuugaggcaaauggaaaucuaauagcgccaagauaugcuuucgcacugaguagaggcuuuggaucaggaaucaucaacucaaaugcaccaauggguaaaugugaugcgaagugccaaacaccucagggagcuauaaacagcagucuuccuuuccagaacguacacccagucacaauaggagaguguccaaaguaugucaggagugcaaaauuaaggaugguuacaggacuaaggaacaucccauccauucaauccagagguuuguuuggagccauugccgguuucauugaagggggguggacuggaaugguagaugguugguaugguuaucaucaucagaaugagcaaggaucuggcuaugcugcagaucaaaaaagcacacaaaaugccauuaaugggauuacaaacaaggugaauucuguaauugagaaaaugaacacucaauucacagcagugggcaaagaauucaacaaauuggaaagaaggauggaaaacuugaauaaaaaaguugaugauggguuuauagacauuuggacauauaaugcagaacuguugguucuacuggaaaaugaaaggacuuuggauuuccaugacuccaaugugaagaaucuguaugagaaaguaaaaagccaguuaaagaauaaugcuaaagaaauaggaaauggguguuuugaauucuaucacaaguguaacgaugaaugcauggagaguguaaagaauggaacuuaugacuauccaaaauauuccaaagaaucaaaguuaaacagggagaaaauugacggagugaaauuggaaucaaugggagucuaucagauucuggcgaucuacucaacagucgccaguucucugguucuuuuggucucccugggggcaaucagcuucuggauguguuccaaugggucuuugcaguguagaauaugcaucuaa

SEQ ID NO: 44904 - RNA, 1698 nt, Artificial Sequence
  derived and/or modified CDS sequence (wt) from hemagglutinin__InfluenzaA__AJJ99461
augaaaguaaaacuacugguccuguuaugcacauuuacagcuacauaugcagacacaauauguauaggcuaccaugcuaacaacucgaccgacacuguugacacaguacuugaaaagaaugugacagugacacacucugucaaccugcuugagaacagucacaauggaaaacuaugucuauuaaaaggaauagccccacuacaauuggguaauugcagcguugccggguggaucuuaggaaacccagaaugcgaauuacugauuuccaaggagucaugguccuacauuguagaaaaaccaaauccugagaauggaacauguuacccagggcauuucgcugacuaugaggaacugagggagcaauugaguucaguaucuucguuugagagguucgaaauauuccccaaagaaagcucauggcccaaccacaccguaaccggagugucagcaucaugcucccauaauggggaaagcaguuuuuacagaaauuugcuauggcugacggggaagaaugguuuguacccaaaccugagcaaguccuaugcaaacaacaaagaaaaagaaguccuuguacuaugggguguucaucacccgccaaacauaggugaccaaaaggcccucuaucauacagaaaaugcuuaugucucuguagugucuucacauuauagcagaaaauucaccccagaaauagccaaaagacccaaaguaagagaucaagaaggaagaaucaacuacuacuggacucugcuugaacccggggauacuauaauauuugaggcaaauggaaaucuaauagcgccaagauaugcuuucgcacugaguagaggcuuuggaucaggaaucaucaacucaaaugcaccaauggacaaaugugaugcgaagugccaaacaccucagggagcuauaaacagcagucuuccuuuccagaacguacacccaguaacaauaggagaguguccaaaguaugucaggagugcaaaauuaaggaugguuacaggacuaaggaacaucccauccauucaauccagagguuuguuuggagccauugccgguuucauugaagggggguggacuggaaugguagaugguugguaugguuaucaucaucagaaugagcaaggaucuggcuaugcugcagaucaaaaaagcacacaaaaugccauuaaugggauuacaaacaaggugaauucuguaauugagaaaaugaacacucaauucacagcagugggcaaagaauucaacaaauuggaaagaaggauggaaaacuugaauaaaaaaguugaugauggguuuauagacauuuggacauauaaugcagaacuguugguucuacuggaaaaugaaaggacuuuggauuuccaugacuccaaugugaagaaucuguaugagaaaguaaaaagccaguuaaagaauaaugcuaaagaaauaggaaauggguguuuugaauucuaucacaaguguaacgaugaaugcauggagaguguaaagaauggaacuuaugacuauccaaaauauuccgaagaaucaaaguuaaacagggagaaaauugauggagugaaauuggaaucaaugggagucuaucagauucuagcgaucuacucaacagucgccaguucucugguucuuuuggucucccugggggcaaucagcuucuggauguguuccaaugggucuuugcaguguagaauaugcaucuaa

SEQ ID NO: 44905 - RNA, 1701 nt, Artificial Sequence
  derived and/or modified CDS sequence (wt) from hemagglutinin__InfluenzaA__AJJ99483
augaaggcaauacuauuaguucugcuauauacauuugcaaccgcaaaugcagacacauuauguauagguuaucaugcgaacaauucaacagacacuguagacacaguacuagaaaagaauguaacaguaacucacucuguuaaccuucuagaagacaagcauaacgggaaacuaugcaaacuaagagggguagccccauugcauuuggguaaauguaacauugcgggcuggauccugggaaauccagagugugaaucacucuccacagcaagcucaugguccuacauuguggaaacaucuagcucagacaauggaacguguuacccaggagauuucaucaauuaugaggagcuaagagagcaauugagcucagugucaucauuugaaagguuugaaauauuccccaagacaaguucauggcccaaucaugacucgaacaaagguguaacggcagcauguccucgugcuggagcaaaaagcuucuacaaaaauuuaauauggcuaguuaaaaaaggaaauucauacccaaagcucagcaaauccuacauuaaugauaaagggaaagaaguccucgugcuguggggcauucaccauccaucuacuacugcugaccaacaaagucucuaucagaaugcagaugcauauguuuuuguggggacaucaagauacagcaagaaguucaagccggaaauagcaauaagacccaaagugagggaucaagaagggagaaugaacuauuacuggacacuaguagagccgggagacaaaauaacauucgaagcaacuggaaaucuauugguaccgagauaugcauucgcaauggaaagaaaugcuggaucugguauuaucauuucagauacaccaguccacgauugcaauacaacuugucagacacccaagggugcuauaaacaccagccucccauuucagaauauacauccgaucacaauuggaaaauguccaaaauauguaaaaagcacaaaauugagacuggccacaggauugaggaaugucccgucuauucaaucuagaggccuauuuggagccauugccggcuucauugaagggggguggacagggaugguagauggaugguacgguuaucaccaucaaaaugagcaggggucaggauaugcagccgaccugaagagcacacagaaugccaucgacaaaauuaccaacaaaguaaauucuguuauugaaaagaugaauacacaguucacagcaguagguaaagaguucaaccaccuggaaaaaagaauagagaauuuaaauaaaaaaguugaugaugguuuccuggacauuuggacuuacaaugccgaacuguugguucuauuggaaaaugaaagaacuuuggacuaccacgauucaaaugugaagaacuuguaugaaaagguaagaaaccaguuaaaaaacaaugccaaggaaauuggaaacggcugcuuugaauuuuaccacaaaugcgauaacacgugcauggaaagugucaaaaaugggacuuaugacuacccaaaauacucagaggaagcaaaauuaaacagagaagaaauagaugggguaaagcuggaaucaacaaggauuuaccagauuuuggcgaucuauucaacugucgccaguucauugguacugguagucucccugggggcaaucaguuucuggaugugcucuaaugggucucuacaguguagaauauguauuuaa

SEQ ID NO: 44906 - RNA, 1701 nt, Artificial Sequence
  derived and/or modified CDS sequence (wt) from hemagglutinin__InfluenzaA__AJJ99494
augaaggcaauacuaguaguucugcuauauacauuugcaaccgcaaaugcagacacauuauguauagguuaucaugcgaacaauucaacagacacuguagacacaguacuagaaaagaauguaacaguaacacacucuguuaaccuucuagaagacaagcauaacgggaaacuaugcaaacuaagagggguagccccauugcauuuggguaaauguaacauugcuggcuggauccugggaaauccagagugugaaucacucuccacagcaagcucaugguccuacauuguggaaacaucuaguucagacaauggaacguguuacccaggaguuuucaucgauuaugaggagcuaagagagcaauuaagcucagugucaucauuugaaagguuugagauauuccccaagacaaguucauggcccaaucaugacucgaacaaagguguaacggcagcauguccucaugcuggagcaaaaagcuucuacaaaaauuuaauauggcuaguuaaaaaaggaaauucauacccaaagcucagcaaauccuacauuaaugauaaagggaaagaaguccucgugcuauggggcauucaccauccauccacuacugcugaccaacaaagucucuaucagaaugcagaugcauauguuuuuguggggacaucaagauacagcaagaaguucaagccggaaauagcaauaagacccaaagugagggaucaagaagggagaaugaacuauuacuggacacuaguagagccgggagacaaaauaacauucgaagcaacuggaaaucuagugguaccgagauaugcauucgcaauggaaagaaaugcuggaucugguauuaucauuucagauacaccaguccacgauugcaauacaacuugucagacacccaagggugcuauaaacaccagccucccauuucagaauauacauccgaucacaauuggaaaauguccaaaauauguaaaaagcacaaaauugagacuggccacaggauugaggaaugucccgucuauucaaucuagaggccuauuuggggccauugccggcuucauugaagggggguggacagggaugguagauggaugguacgguuaucaccaucaaaaugagcaggggucaggauaugcagccgaccugaagagcacacagaaugccauugacaagauuacuaacaaaguaaauucuguuauugaaaagaugaauacacaguucacagcaguagguaaagaguucaaccaccuggaaaaaagaauagagaauuuaaauaaaaaaguugaugaugguuuccuggacauuuggacuuacaaugccgaacuguugguucuauuggaaaaugaaagaacuuuggacuaccacgauucaaaugugaagaacuuauaugaaaagguaagaaaccaguuaaaaaacaaugccaaggaaauuggaaacggcugcuuugaauuuuaccacaaaugcgauaacacgugcauggaaagugucaaaaaugggacuuaugacuacccaaaauacucagaggaagcaaaauuaaacagagaagaaauagaugggguaaagcuggaaucaacaaggauuuaccagauuuuggcgaucuauucaacugucgccaguucauugguacugguagucucccugggggcaaucaguuucuggaugugcucuaaugggucucuacaguguagaauauguauuuaa

SEQ ID NO: 44907 - RNA, 1701 nt, Artificial Sequence
  derived and/or modified CDS sequence (wt) from hemagglutinin__InfluenzaA__AJJ99505
augaaggcaauacuaguaguucugcuauauacauuugcaaccgcaaaugcagacacauuauguauagguuaucaugcgaacaauucaacagacacuguagacacaguacuagaaaagaauguaacaguaacacacucuguuaaccuucuagaagacaagcauaacgggaaacuaugcaaacugagagggguagccccauugcauuuggguaaauguaacauugcuggcuggauccugggaaauccagagugugaaucacucuccacagcaagcucaugguccuacauuguggaaacaucuaguucagacaauggaacguguuacccaggagauuucaucaauuaugaggagcuaagagagcaauugagcucagugucaucauuugaaagguuugagauauuccccaagacaaguucauggcccaaucaugacucgaacaaagguguaacggcagcauguccucaugcuggagcaaaaagcuucuacaaaaauuuaauauggcuaguuaaaaaaggaaauucauacccaaagcucagcaaauccuacauuaacgauaaagggaaagaaguccucgugcuauggggcauucaccauccaucuacuagugcugaccaacaaagucucuaucagaaugcagaugcauauguuuuuguggggacaucaaaauacagcaagaaguucaagccggaaauagcaguaagacccaaagugagggaucaagaagggagaaugaacuauuacuggacacuaguagagccgggagacaaaauaacauucgaagcaacuggaaaucuauugguaccgagauaugcauucgcaauggaaagaaaugcuggaucugguauuaucauuucagauacaccaguccacgauugcaauacaacuugucagacacccaagggugcuauaaacaccagccucccauuucagaauauacauccgaucacaauuggaaaauguccaaaauauguaaaaagcacaaaauugagacuggccacaggauugaggaaugucccgucuauucaaucuagaggccuauuuggggccauugccgguuucauugaagggggguggacagggaugguagauggaugguacgguuaucaccaucaaaaugagcaggggucaggauaugcagccgaccugaagagcacacagaaugccauugacaagauuacuaacaaaguaaauucuguuauugaaaagaugaauacacaguucacagcaguagguaaaggguucaaccaccuggaaaaaagaauagagaauuuaaauaaaaaaguugaugaugguuuccuggacauuuggacuuacaaugccgaacuguugguucuauuggaaaaugaaagaacuuuggacuaccacgauucaaaugugaaaaacuuauaugaaaagguaagaagccaguuaaaaaacaaugccaaggaaauuggaaacggcugcuuugaauuuuaccacaaaugcgauaacacgugcauggaaagugucaaaaaugggacuuaugacuacccaaaauacucagaggaagcaaaauuaaacagagaagaaauagaugggguaaagcuggaaucaacaaggauuuaccagauuuuggcgaucuauucaacugucgccaguucauugguacugguagucucccugggggcaaucaguuucuggaugugcucuaaugggucucuacaguguagaauauguauuuaa

SEQ ID NO: 44908 - RNA, 1701 nt, Artificial Sequence; identical to SEQ ID NO: 36785
  derived and/or modified CDS sequence (wt) from hemagglutinin__InfluenzaA__AJJ99516

SEQ ID NO: 44909 - RNA, 1701 nt, Artificial Sequence
  derived and/or modified CDS sequence (wt) from hemagglutinin__InfluenzaA__AJJ99527
augaaggcaauacuauuaguucugcuauauacauuugcaaccgcaaaugcagacacauuauguauagguuaucaugcgaacaauucaacagacacuguagacacaguacuagaaaagaauguaacaguaacucacucuguuaaccuucuagaagacaagcauaacgggaaacuaugcaaacuaagagggguagccccauugcauuuggguaaauguaacauugcgggcuggauccugggaaauccagagugugaaucacucuccacagcaagcucaugguccuacauuguggaaacaucuagcucagacaauggaacguguuacccaggagauuucaucaauuaugaggagcuaagagagcaauugagcucagugucaucauuugaaagguuugaaauauuccccaagacaaguucauggcccaaucaugacucgaacaaagguguaacggcagcauguccucgugcuggagcaaaaagcuucuacaaaaauuuaauauggcuaguuaaaaaaggaaauucauacccaaagcucagcaaauccuacauuaaugauaaagggaaagaaguccucgugcuguggggcauucaccauccaucuacuacugcugaccaacaaagucucuaucagaaugcagaugcauauguuuuuguggggacaucaagauacagcaagaaguucaagccggaaauagcaauaagacccaaagugagggaucaagaagggagaaugaacuauuacuggacacuaguagagccgggagacaaaauaacauucgaagcaacuggaaaucuauugguaccgagauaugcauucgcaauggaaagaaaugcuggaucugguauuaucauuucagauacaccaguccacgauugcaauacaacuugucagacacccaagggugcuauaaacaccagccucccauuucagaacauacauccgaucacaauuggaaaauguccaaaauauguaaaaagcacaaaauugagacuggccacaggauugaggaaugucccgucuauucaaucuagaggccuauuuggagccauugccggcuucauugaagggggguggacagggaugguggauggaugguacgguuaucaccaucaaaaugagcaggggucaggauaugcagccgaccugaagagcacacagaaugucaucgacaaaauuaccaacaaaguaaauucuguuauugaaaagaugaauacacaguucacagcaguagguaaagaguucaaccaccuggaaaaaagaauagagaauuuaaauaaaaaaguugaugaugguuuccuggacauuuggacuuacaaugccgaacuguugguucuauuggaaaaugaaagaacuuuggacuaccacgauucaaaugugaagaacuuguaugaaaagguaagaaaccaguuaaaaaacaaugccaaggaaauuggaaacggcugcuuugaauuuuaccacaaaugcgauaacacgugcauggaaagugucaaaaaugggacuuaugacuacccaaaauacucagaggaagcaaaauuaaacagagaagaaauagaugggguaaagcuggaaucaacaagaauuuaccagauuuuggcgaucuauucaacugucgccaguucauuaguacugguagucucccugggggcaaucaguuucuggaugugcucuaaugggucucuacaguguagaauauguauuuaa

SEQ ID NO: 44910 - RNA, 1701 nt, Artificial Sequence
  derived and/or modified CDS sequence (wt) from hemagglutinin__InfluenzaA__AJJ99538
augaaggcaauacuaguaguucugcuauauacauuugcaaccgcaaaugcagacacauuauguauagguuaucaugcgaacaauucaacagacacuguagacacaguacuagaaaagaauguaacaguaacacacucuguuaaucuucuagaagacaagcauaacgggaaacuaugcaaacugagagggguagccccauugcauuuggguaaauguaacauugcuggcuggauccugggaaauccagagugugaaucacucuccacagcaagcucaugguccuacauuguggaaacaucuaguucagacaauggaacguguuacccaggagauuucaucgauuaugaggaacuaagggagcaauugagcucagugucaucauuugaaagguuugagauauuccccaagacaaguucauggcccaaucaugauucgaacaaagguguaacggcagcauguccucaugcuggagcaaaaagcuucuacaaaaauuuaauauggcuaguuaaaaaaggaaauucauacccaaagcucagcaaauccuacauuaaugauaaagggaaagaaguccucgugcuauggggaauucaucauccaucuacuacugcugaccaacaaagucucuaucagaaugcagauacauauguuuuuguggggacaucaagauacagcaagaaguucaagccggaaauagcaauaagacccaaagugagggaucaagaagggagaaugaacuauuacuggacacuaguagagccgggagacaaaauaacauucgaagcaacuggaaaucuagugguaccgagauaugcauucgcaauggaaagaaaugcuggaucugguauuaucauuucagauacaccaguccacgauugcaauacaacuugucagacacccaagggugcuauaaacaccagccucccauuucagaauauacauccgaucacaauuggaaaauguccaaaauauguaaaaagcacaaaauugagacuggccacaggauugaggaaugucccgucuauucaaucuagaggccuauuuggggccauugccggcuucauugaagggggguggacagggaugguagauggaugguaugguuaucaccaucaaaaugagcaggggucaggauaugcagccgaccugaagagcacacagaaugccauugacaagaucacuaacaaaguaaauucaguuauugaaaagaugaauacacaguucacagcaguagguaaagaguucaaccaccuggaaaaaagaauagagaauuuaaauaaaaaagucgaugaugguuuccuggacauuuggacuuacaaugccgaacuguugguucuauuggaaaaugaaagaacuuuggacuaccacgauucaaaugugaagaacuuauaugaaaagguaagaaaccaguuaaaaaacaaugccaaggaaacuggaaauggcugcuuugaauuuuaccacaaaugcgauaacacgugcauggaaagugucaaaaaugggacuuaugacuacccaaaauacucagaggaagcaaaauuaaacagagaaaaaauagaugggguaaagcuggaaucaacaaggauuuaccagauuuuggcgaucuauucaacugucgccaguucauugguacugguagucucccugggggcaaucaguuuuuggaugugcucuaaugggucucuacaguguagaauauguauuuaa

SEQ ID NO: 44911 - RNA, 1701 nt, Artificial Sequence
  derived and/or modified CDS sequence (wt) from hemagglutinin__InfluenzaA__AJJ99549
augaaggcaauacuaguaguucugcuauauacauuugcaaccgcaaaugcagacacauuauguauagguuaccaugcgaacaauucaacagacacuguagacacaguacuagaaaagaauguaacaguaacacacucuguuaaucuucuagaagacaagcauaacgggaaacuaugcaaacuaagagggguagccccauugcauuuggguaaauguaacauugcuggcuggauccugggaaauccagagugugaaucacucuccacagcaagcucaugguccuacauuguggaaacaucuaguucagacaauggaacguguuacccaggagauuucaucgauuaugaggagcuaagagagcaauugagcucagugucaucauuugaaagguuugagauauuccccaagacaaguucauggcccaaucaugacucgaacaaagguguaacggcagcauguccucaugcuggagcaaaaggcuucuacaaaaauuuaauauggcuaguuaaaaaaggaaauucauacccaaagcucagcaaauccuacauuaaugauaaagggaaagaaguccucgugcuauggggcauucaccauccaucuacuacugcugaccaacaaagucucuaucagaaugcagauacauauguuuuuguggggacaucaagauacagcaagaaguucaagccggaaauagcaauaagacccaaagugagggaucaagaagggagaaugaacuauuacuggacacuaguagagccgggagacaaaauaacauucgaagcaacuggaaaucuagugguaccgagauaugcauucgcaauggaaagaaaugcuggaucugguauuaucauuucagauacaccaguccacgauugcaauacaacuugucagacacccaagggugcuauaaacaccagccucccauuucagaauauacauccgaucacaauuggaaaauguccaaaauauguaaaaagcacaaaauugagacuggccacaggauugaggaaugucccgucuauucaaucuagaggccuauuuggggccauugccggcuucauugaagggggguggacagggaugguagauggaugguacgguuaucaccaucaaaaugagcaggggucaggauaugcagcugaccugaagagcacacagaaugccauugacaagauuacuaacaaaguaaauucuguuauugaaaagaugaauacacaguucacagcaguagguaaagaguucaaccaccuggaaaaaagaauagagaauuuaaauaaaaaaguugaugaugguuuccuggacauuuggacuuacaaugccgaacuguugguucuauuggaaaaugaaagaacuuuggacuaccacgauucaaaugugaagaacuuauaugaaaagguaagaaaccaguuaaaaaacaaugccaaggaaauuggaaauggcugcuuugaauuuuaccacaaaugcgauaacaugugcauggaaagugucaaaaaugggacuuaugacuacccaaaauacucagaggaagcaaaauuaaacagagaagaaauagaugggguaaagcuggaaucaacaaggauuuaccagauuuuggcgaucuauucaacugccgccaguucauugguacugguagucucccugggggcaaucaguuuuuggaugugcucuaaugggucucuacaguguagaauauguauuuaa

SEQ ID NO: 44912 - RNA, 1701 nt, Artificial Sequence
  derived and/or modified CDS sequence (wt) from hemagglutinin__InfluenzaA__AJJ99560
augaaggcaauacuaguaguucugcuauauacauuugcaaccgcaaaugcagacacauuauguauagguuaucaugcgaacaauucaacagacacuguagacacaguacuagaaaagaauguaacaguaacacacucugucaaccuucuagaagacaagcauaacgggaaacuaugcaagcuaagagggguagccccauugcauuuggguaaauguaacauugcuggcuggauccugggaaauccagagugugaaucacucuccacagcaagcucaugguccuacauuguggaaacaucuaguucagacaauggaacguguuacccaggagauuucaucgauuaugaggagcuaagagagcaauugagcucagugucaucauuugaaagguuugagauauuccccaagacaaguucauggcccaaucaugacucgaacaaagguguaacggcagcauguccucaugcuggagcaaaaagcuucuacaaaaauuuaauauggcuaguuaaaaaaggaaauucauacccaaagcucagcaaauccuacauuaaugauaaagggaaagaaguccucgugcuauggggcauucaccauccaucuacuacugcugaccaacaaagucucuaucagaaugcagaugcauauguuuuuguggggacaucaagauacagcaagaaguucaagccggaaauagcaauaagacccaaagugagagaucaagaagggagaaugaacuauuacuggacacuaguagagccgggagacaaaauaacauucgaagcaacuggaaaucuagugguaccgagauaugcauucgcaauggaaagaaaugcuggaucugguauuaucauuucagauacaccaguccacgauugcaauacaacuugucagacacccaagggugcuauaaacaccagccucccauuucagaauauacauccgaucacaauuggaaaauguccaaaauauguaaaaagcacaaaauugagacuggccacaggauugaggaaugucccgucuauucaaucuagaggccuauuuggggccauugccggcuucauugaagggggguggacagggaugguagauggaugguacgguuaucaccaucaaaaugagcaggggucaggauaugcagccgaccugaagagcacacagaaugccauugacaagauuacuaacaaaguaaauucuguuauugaaaaaaugaauacacaguucacagcaguagguaaagaguucaaccaccuggaaaaaagaauagagaauuuaaauaaaaaaguugaugaugguuuccuggacauuuggacuuacaaugccgaacuguugguucuauuggaaaaugaaagaacuuuggacuaccacgauucaaaugugaagaacuuauaugaaaagguaagaaaccaguuaaaaaacaaugccaaggaaauuggaaacggcugcuuugaauuuuaucacaaaugcgauaacacgugcauggaaagugucaaaaaugggacuuaugacuacccaaaauacucagaggaagcaaaauuaaacagagaagaaauagaugggguaaagcuggaaucaacaaggauuuaccagauuuuggcgaucuauucaacugucgccaguucauuaguacugguagucucccugggggcaaucaguuucuggaugugcucuaaugggucucuacaguguagaauauguauuuaa

SEQ ID NO: 44913 - RNA, 1701 nt, Artificial Sequence
  derived and/or modified CDS sequence (wt) from hemagglutinin__InfluenzaA__AJJ99571
augaaggcaauacuaguaguucugcuauauacauuugcaaccgcaaaugcagacacauuauguauagguuaucaugcgaacaauucaacagacacuguagacacaguacuagaaaagaauguaacaguaacacacucuguuaaucuucuagaagacaagcauaacgggaaacuaugcaaacuaagagggguagccccauugcauuuggguaaauguaacauugcuggcuggauccugggaaauccagagugugaaucacucuccacagcaagcucaugguccuacauuguggaaacaucuaguucagacaauggaacguguuacccaggagauuucaucgauuaugaggagcuaagagagcaauugagcucagugucaucauuugaaagguuugagauauuccccaagacaaguucauggcccaaucaugacucgaacaaagguguaacggcagcauguccucaugcuggagcaaaaagcuucuacaaaaauuuaauauggcuaguuaaaaaaggaaauucauacccaaagcucagcaaauccuacauuaaugauaaagggaaagaaguccucgugcuauggggcauucaccauccaucuacuacugcugaccaacaaagucucuaucagaaugcagauacauauguuuuuguggggacaucaagauacagcaagaaguucaagccggaaauagcaauaagacccaaagugagggaucaagaagggagaaugaacuauuacuggacacuaguagagccgggagacaaaauaacauucgaagcaacuggaaaucuagugguaccgagauaugcauucgcaauggaaagaaaugcuggaucugguauuaucauuucagauacaccaguccacgauugcaauacaacuugucagacacccaagggugcuauaaacaccagccucccauuucagaauauacauccgaucacaauuggaaaauguccaaaauauguaaaaagcacaaaauugagacuggccacaggauugaggaaugucccgucuauucaaucuagaggccuauuuggggccauugccggcuucauugaagggggguggacagggaugguagauggaugguacgguuaucaccaucaaaaugagcaggggucaggauaugcagccgaccugaagagcacacagaaugccauugacaagauuacuaacaaaguaaauucuguuauugaaaagaugaauauacaguucacagcaguagguaaagaguucaaccaccuggaaaaaagaauagagaauuuaaauaaaaaaguugaugaugguuuccuggacauuuggacuuacaaugccgaacuguugguucuauuggaaaaugaaagaacuuuggacuaccacgauucaaaugugaagaacuuauaugaaaagguaagaaaccaguuaaaaaacaaugccaaggaaauuggaaauggcugcuuugaauuuuaccacaaaugcgauaacacgugcauggaaagugucaaaaaugggacuuaugacuacccaaaauacucagaggaagcaaaauuaaacagagaagaaauagaugggguaaagcuggaaucaacaaggauuuaccagauuuuggcgaucuauucaacugucgccaguucauugguacugguagucucccugggggcaaucaguuuuuggaugugcucuaaugggucucuacaguguagaauauguauuuaa

SEQ ID NO: 44914 - RNA, 1701 nt, Artificial Sequence
  derived and/or modified CDS sequence (wt) from hemagglutinin__InfluenzaA__AJJ99582
augaaggcaauacuaguaguucugcuauauacauuugcaaccgcaaaugcagacacauuauguauagguuaucaugcgaacaauucaacagacacuguagacacaguacuagaaaagaauguaacaguaacacacucuguuaaccuucuagaagacaagcauaacgggaaacuaugcaaacuaagagggguagccccauugcauuuggguaaauguaacauugcuggcuggauccugggaaauccagagugugaaucacucuccacagcaagcucaugguccuacauuguggaaacaucuaguucagacaauggaacguguuacccaggagauuucaucgauuaugaggagcuaagagagcaauugagcucagugucaucauuugaaagguuugagauauuccccaagacaaguucauggcccaaucaugacucgaacaaagguguaacggcagcauguccucaugcuggagcaaaaagcuucuacaaaaauuuaauauggcuaguuaaaaaaggaaauucauacccaaagcucagcaaauccuacauuaaugauaaagggaaagaaguccucgugcuauggggcauucaccauccaucuacuagugcugaccaacaaagucucuaucagaaugcagaugcauauguuuuuguggggacaucaagauacagcaagaaguucaagccggaaauagcaauaagacccaaagugagggaucaagaagggagaaugaacuauuacuggacacuaguagagccgggagacaaaauaacauucgaagcaacuggaaaucuagugguaccgagauaugcauucgcaauggaaagaaaugcuggaucugguauuaucauuucagauacaccaguccacgauugcaauacaacuugucagacacccaauggugcuauaaacaccagccucccauuucagaauauacauccgaucacaauuggaaaauguccaaaauauguaaaaagcacaaaauugagacuggccacaggauugaggaaugucccgucuauucaaucuagaggccuauuuggggccauugccgguuucauugaagggggguggacagggaugguagauggaugguacgguuaucaccaucaaaaugagcaggggucaggauaugcagccgaccugaagagcacacagaaugccauugacaagauuacuaacaaaguaaauucuguuauugaaaagaugaauacacaguucacagcaguagguaaagaguucaaccaccuggaaaaaagaauagagaauuuaaauaaaaaaguugaugaugguuuccuggacauuuggacuuacaaugccgaacuguugguucuauuggaaaaugaaagaacuuuggacuaccacgauucaaaugugaagaacuuauaugaaaagguaagaagccaguuaaaaaacaaugccaaggaaauuggaaacggcugcuuugaauuuuaccacaaaugcgauaacacgugcauggaaagugucaaaaaugggacuuaugacuacccaaaauacucagaggaagcaaaauuaaacagagaagaaauagaugggguaaagcuggaaucaacaaggauuuaccagauuuuggcgaucuauucaacugucgccaguucauugguacugguagucucccugggggcaaucaguuucuggaugugcucuaaugggucucuacaguguagaauauguauuuaa

SEQ ID NO: 44915 - RNA, 1701 nt, Artificial Sequence; identical to SEQ ID NO: 36785
  derived and/or modified CDS sequence (wt) from hemagglutinin__InfluenzaA__AJJ99593

SEQ ID NO: 44916 - RNA, 1701 nt, Artificial Sequence
  derived and/or modified CDS sequence (wt) from hemagglutinin__InfluenzaA__AJJ99604
augaaggcaauacuaguaguucugcuauauacauuugcaaccgcaaaugcagacacauuauguauagguuaucaugcgaacaauucaacagacacuguagacacaguacuagaaaagaauguaacaguaacacacucuguuaaccuucuagaagacaagcauaacgggaaacuaugcaaacuaagagggguagccccauugcauuuggguaaauguaacauugcuggcuggauccuaggaaauccagaaugugaaucacucuccacagcaagcucaugguccuacauuguggaaacaucuaguucagacaauggaacguguuacccaggagauuucaucgauuaugaggagcuaagagagcaauugagcucagugucaucauuugaaagguuugagauauuccccaagacaaguucauggcccaaucaugacucgaacaaagguguaacggcagcauguccucaugcuggagcaaaaagcuucuacaaaaauuuaauauggcuaguuaaaaaaggaaauucauacccaaagcucagcaaauccuacauuaaugauaaagggaaagaaguccucgugcuauggggcauucaccauccaucuacuagugcugaccaacaaagucucuaucagaaugcagaugcauauguuuuuguggggacaucaagauacagcaagaaguucaagccggaaauagcaauaagacccagagugagggaucaagaagggagaaugaacuauuacuggacacuaguagagccgggagacaaaauaacauucgaagcaacuggaaaucuagugguaccgagauaugcauucgcaauggaaagagaugcuggaucugguauuaucauuucagauacaccaguccacgauugcaauacaacuugucagacacccaagggugcuauaaacaccagccucccauuucagaauauacauccgaucacaauuggaaaauguccaaaauauguaaaaagcacaaaauugagacuggccacaggauugaggaaugucccgucuauucaaucuagaggccuauuuggggccauugccgguuucauugaagggggguggacagggaugguagauggaugguacgguuaucaccaucaaaaugagcaggggucaggauaugcagccgaccugaagagcacacagaaugccauugacgagauuacuaacaaaguaaauucuguuauugaaaagaugaauacacaguucacagcaguagguaaagaguucaaccaccuggaaaaaagaauagagaauuuaaauaaaaaaauugaugaugguuuccuggacauuuggacuuacaaugccgaacuguugguucuauuggaaaaugaaagaacuuuggacuaccacgauucaaaugugaagaacuuauaugaaaagguaagaagccaguuaaaaaacaaugccaaggaaauuggaaacggcugcuuugaauuuuaccacaaaugcgauaacacgugcauggaaagugucaaaaaugggacuuaugacuacccaaaauacucagaggaagcaaaauuaaacagagaagaaauagaugggguaaagcuggaaucaacaaggauuuaccagauuuuggcgaucuauucaacugucgccaguucauugguacugguagucucccugggggcaaucaguuucuggaugugcucuaaugggucucuacaguguagaauauguauuuaa

SEQ ID NO: 44917 - RNA, 1698 nt, Artificial Sequence
  derived and/or modified CDS sequence (wt) from hemagglutinin__InfluenzaA__AJJ99616
augaaaguaaaacuacugguccuguuaugcacauuuacagcuacauaugcagacacaauauguauaggcuaccaugcuaacaacucgaccgacacuguugacacaguacuugaaaagaaugugacagugacacacucugucaaccugcuugagaacagucacaauggaaaacuaugucuauuaaaaggaauagccccacuacaauuggguaacugcagcguugccggguggaucuuaggaaacccagaaugcgaauuacugauuuccaaggagucaugguccuacauuguagaaaaaccaaauccugagaauggaacauguuacccgggacauuucgcugacuaugaggaacugagggagcaauugaguucaguaucuucauuugagagguucgaaauauuccccaaagaaagcucauggcccaaccacaccguaaccggagugucagcaucaugcucccauaauggggaaaacaguuuuuacagaaauuugcuauggcugacggggaagaaugguuuguacccaaaccugagcaaguccuaugcaaacaacaaagaaaaagaaguccuuguacuaugggguguucaucacccgccaaacauagcuaaccaaaagacccucuaccauacagaaaaugcuuauguuucuguagugucuucacauuauagcagaaaauuaaccccagaaauagccaaaagacccaaaguaagagaucaagaaggaagaaucaacuacuacuggacucugcuugaacccggggauacaauaauauuugaggcaaauggaaaucuaauagcgccaagauaugcuuucgcacugaguagaggcuuuggaucaggaaucaucaacucaaaugcaccaauggauaaaugugaugcgaagugccaaacaccucaaggagcuauaaacagcagucuuccuuuccagaacguacacccagucacaauaggagaguguccaaaguaugucaggagugcaaaauuaaggaugguuacaggacuaaggaacaucccauccauucaauccagagguuuguuuggagccauugccgguuucauugaagggggguggacuggaaugguagaugguugguaugguuaucaucaucagaaugagcaaggaucuggcuaugcugcagaucaaaaaagcacacaaaaugccauuaaugggauuacaaacaaggugaauucuguaauugagaaaaugaacacucaauucacagcagugggcaaagaauucaacaaauuggaaagaaggauggaaaacuugaauaaaaaaguugaugauggauuuauagacauuuggacauauaaugcagaacuguugguucuacuggaaaaugaaaggacuuuggauuuccaugacuccaaugugaagaaucuguaugagaaaguaaaaagccaguuaaagaauaaugcuaaagaaauaggaaauggguguuuugaauucuaucacaaguguaacgaugaaugcauggagaguguaaagaauggaacuuaugacuauccaaaauauuccgaagaaucaaaguuaaacagggagaaaauugauggagugaaauuggaaucaaugggagucuaucagauucuggcgaucuacucaacagucgccaguucucugguucuuuuggucucccugggggcaaucagcuucuggauguguuccaaugggucuuugcaguguagaauaugcaucuaa

SEQ ID NO: 44918 - RNA, 1698 nt, Artificial Sequence; identical to SEQ ID NO: 39747
  derived and/or modified CDS sequence (wt) from hemagglutinin__InfluenzaA__AJJ99628

SEQ ID NO: 44919 - RNA, 1698 nt, Artificial Sequence
  derived and/or modified CDS sequence (wt) from hemagglutinin__InfluenzaA__AJJ99640
augaaaguaaaacuacugguccuguuaugcacauuuacagcuacauaugcagacacaauauguauaggcuaccaugcuaacaacucgaccgacacuguugacacaguacuugaaaagaaugugacagugacacacucugucaaccugcuugagaacagucacaauggaaaacuaugucuauuaaaaggaauagccccacuacaauuggguaacugcagcguugccggguggaucuuaggaaacccagaaugcgaauuacugauuuccaaggagucaugguccuacauuguagaaaaaccaaauccugagaauggaacauguuacccagggcauuucgcugacuaugaggaacugagggagcaauugaguucaguaucuucauuugagagguucgaaauauuccccaaagaaagcucauggcccaaccacaccguaaccggagugucagcaucaugcucccauaauggggaaaacaguuuuuacagaaauuugcuauggcugacggggaagaaugguuuguacccaaaccugagcaaguccuaugcaaacaacaaagaaaaagaaguccuuguacuaugggguguucaucacccgccaaacauagcuaaccaaaagacccucuaucauacagaaaaugcuuauguuucuguagugucuucacauuauagcagaaaauucaccccagaaauagccaaaagacccaaaguaagagaucaagaaggaagaaucaacuacuacuggacucugcuugaacccggggauacaauaauauuugaggcaaauggaaaucuaauagcgccaagauaugcuuucgcacugaguagaggcuuuggaucaggaaucaucaacucaaaugcaccaauggauaaaugugaugcgaagugccaaacaccucaaggagcuauaaacagcagucuuccuuuccagaacguacacccagucacaauaggagaguguccaaaguaugucaggagugcaaaauuaaggaugguuacaggacuaaggaacaucccauccauucaauccagagguuuguuuggagccguugccgguuucauugaagggggguggacuggaaugguagaugguugguaugguuaucaucaucagaaugagcaaggaucuggcuaugcugcagaucaaaaaagcacacaaaaugccauuaaugggauuacaaacaaggugaauucuguaauugagaaaaugaacacucaauucacagcagugggcaaagaauucaacaaauuggaaagaaggauggaaaacuugaauaaaaaaguugaugauggauuuauagacauuuggacauauaaugcagaacuguugguucuacuggaaaaugaaaggacuuuggauuuccaugacuccaaugugaagaaucuguaugagaaaguaaaaagccaguuaaagaauaaugcuaaagaaauaggaaauggguguuuugaauucuaucacaaguguaacgaugaaugcauggagaguguaaagaauggaacuuaugacuauccaaaauauuccgaagaaucaaaguuaaacagggagaaaauugauggagugaaauuggaaucaaugggagucuaucagauucuggcgaucuacucaacagucgccaguucucugguucucuuggucucccugggggcaaucagcuucuggauguguuccaaugggucuuugcaguguagaauaugcaucuaa

SEQ ID NO: 44920 - RNA, 1698 nt, Artificial Sequence
  derived and/or modified CDS sequence (wt) from hemagglutinin__InfluenzaA__AJJ99652
augaaaguaaaacuacugguccuguuaugcacauuuacagcuacauaugcagacacaauauguauaggcuaccaugcuaacaacucgaccgacacuguugacacaguacuugaaaagaaugugacagugacacacucugucaaccugcuugagaacagucacaauggaaaacuaugucuauuaaaaggaauagccccacuacaauuggguaacugcagcguugccggguggaucuuaggaaacccagaaugcgaauuacugauuuccaaggagucaugguccuacauuguagaaaaaccaaauccugagaauggaacauguuacccagggcauuucgcugacuaugaggaacugagggagcaauugaguucaguaucuucauuugagagguucgaaauauuccccaaagaaagcucauggcccaaccacaccguaaccggagugucagcaucaugcucccauaauggggaaaacaguuuuuacagaaauuugcuauggcugacggggaagaaugguuuguacccaaaccugagcaaguccuaugcaaacaacaaagaaaaagaaguccuuguacuaugggguguucaucacccgccaaacauagcugaccaaaagacccucuaucauacagaaaaugcuuauguuucuguagugucuucacauuauagcagaaaauucaccccagaaauagccaaaagacccaaaguaagagaucaagaaggaagaaucaacuacuacuggacucugcuugaacccggggauacaauaauauuugaggcaaauggaaaucuaauagcgccaagauaugcuuucgcacugaguagaggcuuuggaucaggaaucaucaacucaaaugcaccaauggauaaaugugaugcgaagugccaaacaccucaaggagcuauaaacagcagucuuccuuuccagaacguacacccagucacaauaggagaguguccaaaguaugucaggagugcaaaauuaaggaugguuacaggacuaaggaacaucccauccauucaauccagagguuuguuuggagccauugccgguuucauugaagggggguggacuggaaugguagaugguugguaugguuaucaucaucagaaugagcaaggaucuggcuaugcugcagaucaaaaaagcacacaaaaugccauuaaugggauuacaaacaaggugaauucuguaauugagaaaaugaacacucaauucacagcagugggcaaagaauucaacaaauuggaaagaaggauggaaaacuugaauaaaaaaguugaugauggauuuauagacauuuggacauauaaugcagaacuguugguucuacuggaaaaugaaaggacuuuggauuuccaugacuccaaugugaagaaucuguaugagaaaguaaaaagccaguuaaagaauaaugcuaaagaaauaggaaauggguguuuugaauucuaucacaaguguaacgaugaaugcauggagaguguaaagaauggaacuuaugacuauccaaaauauuccgaagaaucaaaguuaaacagggagaaaauugauggagugaaauuggaaucaaugggagucuaucagauucuggcgaucuacucaacagucgccaguucucugguucuuuuggucucccugggggcaaucagcuucuggauguguuccaaugggucuuugcaguguagaauaugcaucuaa

SEQ ID NO: 44921 - RNA, 1698 nt, Artificial Sequence
  derived and/or modified CDS sequence (wt) from hemagglutinin__InfluenzaA__AJJ99664
augaaagcaaaacuacugguccuguuaugcacauucacagcuacauaugcagacacaauauguauaggcuaccaugcuaacaacucgaccgacacuguugacacaguacuugaaaagaaugugacagugacacacucugucaaccugcuugagaacagucacaauggaaaauuaugucuauuaaaaggaauagccccacuacaauuggguaauugcagcauugccggguggaucuuaggaaauccagaaugcgaauuacugauuuccaaggagucaugguccuacauuguagaaaaaccaaauccugagaauggaacauguuacccagggcauuucgcugacuaugaggaacugagggagcaauugaguucaguaucuucauuugagagguucgaaauauuccccaaagaaagcucauggcccaaccacaccguaaccggagugucagcaucaugcucccauaauggggaaagcaguuuuuacagaaauuugcuauggcugacggggaagaaugguuuguacccaaaccugagcaaguccuaugcaaacaacaaagaaaaagaaguccuuguacuaugggguguucaucacccgccaaacauaggugaccaaaaggcccucuaucauacagaaaaugcuuauguuucuguagugucuucacauuauagcagaaaauucaccccagaaauagccaaaagacccaaaguaagagaucaagaaggaagaaucaacuacuacuggacucugcuugaacccggggauacaauaauauuugaggcaaauggaaaucuaauagcgccaagauaugcuuucgcacugaguagaggcuuuggaucaggaaucaucaacucaaaugcaccaauggauaaaugugaugcgaagugccaaacaccucagggagcuauaaacagcagucuuccuuuccagaacguacacccagucacaauaggagaguguccaaaauaugucaggagugcaaaauuaaggaugguuacaggacuaaggaacaucccauccauucaauccagagguuuguuuggagccauugccgguuucauugaagggggguggacuggaaugguagaugguugguaugguuaucaucaucagaaugagcaaggaucuggcuaugcugcagaucaaaaaagcacacaaaaugccauuaaugggauuacaaacaaggugaauucuguaauugagaaaaugaacacucaauucacagcagugggcaaagaauucaacaaauuggaaagaaggauggaaaacuugaauaaaaaaguugaugauggguuuauagacauuuggacauauaaugcagaacuguugguucuacuggaaaaugaaaggacuuuggauuuccaugacuccaaugugaagaaucuguaugagaaaguaaaaagccaguuaaagaauaaugcuaaagaaauaggaaauggguguuuugaauucuaucacaaguguaacgaugaaugcauggagaguguaaagaauggaacuuaugacuauccaaaauauuccgaagaaucaaaguuaaacagggagaaaauugauggagugaaauuggaaucaaugggagucuaucagauucuggcgaucuacucaacagucgccaguucucugguucuuuuggucucccugggggcaaucagcuucuggauguguuccaaugggucuuuacaguguagaauaugcaucuaa

SEQ ID NO: 44922 - RNA, 1701 nt, Artificial Sequence
  derived and/or modified CDS sequence (wt) from hemagglutinin__InfluenzaA__AJJ99675
augaaggcaauacuauuaguucugcuauauacauuugcaaccgcaaaggcagacacauuauguauagguuaucaugcgaacaauucaacagacacuguagacacaguacuagaaaagaauguaacaguaacucacucuguuaaccuucuagaagacaagcauaacgggaaacuaugcaaacuaagagggguagccccauugcauuuggguaaauguaacauugcgggcuggauccugggaaauccagagugugaaucacucuccacagcaagcucaugguccuacauuguggaaacaucuagcucagacaauggaacguguuacccaggagauuucaucaauuaugaggagcuaagagagcaauugagcucagugucaucauuugaaagguuugaaauauuccccaagacaaguucauggcccaaucaugacucgaacaaagguguaacggcagcauguccucgugcuggagcaaaaagcuucuacaaaaauuuaauauggcuaguuaaaaaaggaaauucauacccaaagcucagcaaauccuacauuaaugauaaagggaaagaaguccucgugcuguggggcauucaccauccaucuacuacugcugaccaacaaagucucuaucagaaugcagaugcauauguuuuuguggggacaucaagauacagcaagaaguucaagccggaaauagcaauaagacccaaagugagggaucaagaagggagaaugaacuauuacuggacacuaguagagccgggagacaaaauaacauucgaagcaacuggaaaucuauugguaccgagauaugcauucgcaauggaaagaaaugcuggaucugguauuaucauuucagauacaccaguccacgauugcaauacaacuugucagacacccaagggugcuauaaacaccagccucccauuucagaauauacauccgaucacaauuggaaaauguccaaaauauguaaaaagcacaaaauugagacuggccacaggauugaggaaugucccgucuauucaaucuagaggccuauuuggagccauugccggcuucauugaagggggguggacagggaugguagauggaugguacgguuaucaccaucaaaaugagcaggggucaggauaugcagccgaccugaagagcacacagaaugccaucgacaaaauuaccgacaaaguaaauucuguuauugaaaagaugaauacacaguucacagcaguagguaaagaguucaaccaccuggaaaaaagaauagagaauuuaaauaaaaaaguugaugaugguuuccuggacauuuggacuuacaaugccgaacuguugguucuauuggaaaaugaaagaacuuuggacuaccacgauucaaaugugaagaacuuguaugaaaagguaagaaaccaguuaaaaaacaaugccaaggaaauuggaaacggcugcuuugaauuuuaccacaaaugcgauaacacgugcauggaaagugucaaaaaugggacuuaugacuacccaaaauacucagaggaagcaaaauuaaacagagaagaaauagaugggguaaagcuggaaucaacaaggauuuaccagauuuuggcgaucuauucaacugucgccaguucauugguacugguagucucccugggggcaaucaguuucuggaugugcucuaaugggucucuacaguguagaauauguauuuaa

SEQ ID NO: 44923 - RNA, 1701 nt, Artificial Sequence
  derived and/or modified CDS sequence (wt) from hemagglutinin__InfluenzaA__AJJ99686
augacggcaauacuauuaguucugcuauauacauuugcaaccgcaaaugcagacacauuauguauagguuaucaugcgaacaauucaacagacacuguagacacaguacuagaaaagaauguaacaguaacucacucuguuaaccuucuagaagacaagcauaacgggaaacuaugcaaacuaagagggguagccccauugcauuuggguaaauguaacauugcgggcuggaucuugggaaauccagagugugaaucacucuccacagcaagcucaugguccuacauuguggaaacaucuagcucagacaauggaacguguuacccaggagauuucaucaauuaugaggagcuaagagagcaauugagcucagugucaucauuugaaagguuugaaauauuccccaagacaaguucauggcccaaucaugacucgaacaaagguguaacggcagcauguccucgugcuggagcaaaaagcuucuacaaaaauuuaauauggcuaguuaaaaaaggaaauucauacccaaagcucagcaaauccuacauuaaugauaaagggaaagaaguccucgugcuguggggcauucaccauccaucuacuacugcugaccaacaaagucucuaucagaaugcagaugcauauguuuuuguggggacaucaagauacagcaagaaguucaagccggaaauagcaauaagacccaaagugagggaucaagaagggagaaugaacuauuacuggacacuaguagagccgggagacaaaauaacauucgaagcaacuggaaaucuauugguaccgagauaugcauucgcaauggaaagaaaugcuggaucugguauuaucauuucagauacaccaguccacgauugcaauacaacuugucagacacccaagggugcuauaaacaccagccucccauuucagaauauacauccgaucacaauuggaaaauguccaaaauauguaaaaagcacaaaauugagacuggccacaggauugaggaaugucccgucuauucaaucuagaggccuauuuggagccauugccggcuucauugaagggggguggacagggaugguagauggaugguacgguuaucaccaucaaaaugagcaggggucaggauaugcagccgaccugaagagcacacagaaugccaucgacaaaauuaccaacaaaguaaauucuguuauugaaaagaugaauacacaguucacagcaguagguaaagaguucaaccaccuggaaaaaagaauagagaauuuaaauaaaaaaguugaugaugguuuccuggacauuuggacuuacaaugccgaacuguuaguucuauuggaaaaugaaagaacuuuggacuaccacgauucaaaugugaagaacuuguaugaaaagguaagaaaccaguuaaaaaacaaugccaaggaaauuggaaacggcugcuuugaauuuuaccacaaaugcgauaacacgugcauggaaagugucaaaaaugggacuuaugacuacccaaaauacucagaggaagcaaaauuaaacagagaagaaauagaugggguaaagcuggaaucaacaaggauuuaccagauuuuggcgaucuauucaacugucgccaguucauugguacugguagucucccugggggcaaucaguuucuggaugugcucuaaugggucucuacaguguagaauauguauuuaa

SEQ ID NO: 44924 - RNA, 1701 nt, Artificial Sequence
  derived and/or modified CDS sequence (wt) from hemagglutinin__InfluenzaA__AJJ99697
augaaggcaauacuaguaguucugcuauauacauuugcaaccgcaaaugcagacacauuauguauagguuaucaugcgaacaauucaacagacacuguagacacaguacuagaaaagaauguaacaguaacacacucuguuaaucuucuagaagacaagcauaacgggaaacuaugcaaacuaagagggguagccccauugcauuuggguaaauguaacauugcuggcuggauccugggaaauccagagugugaaucacucuccacagcaagcucaugguccuacauuguggaaacaucuaguucagacaauggaacguguuacccaggagauuucaucgauuaugaggaacuaagggagcaauugagcucagugucaucauuugaaagguuugagauauuccccaagacaaguucauggcccaaucaugacucgaacaaagguguaacggcagcauguccucaugcuggagcaaaaagcuucuacaaaaauuuaauauggcuaguuaaaaaaggaaauucauacccaaagcucagcaaauccuacauuaaugauaaagggaaagaaguccucgugcuauggggaauucaccauccaucuacuacugcugaccaacaaagucucuaucagaaugcagauacauauguuuuuguggggacaucaagauacagcaagaaguucaagccggaaauagcaauaagacccaaagugagggaucaagaagggagaaugaacuauuacuggacacuaguagagccgggagacaaaauaacauucgaagcaacugggaaucuagugguaccgagauaugcauucguaauggaaagaaaugcuggaucugguauuaucauuucagauacaccaguccacgauugcaauacaacuugucagacacccaagggugcuauaaacaccagccucccauuucagaauauacauccgaucacaauuggaaaauguccaaaauauguaaaaagcacaaaauugagacuggccacaggauugaggaaugucccgucuauucaaucuagaggccuauuuggggccauugccggcuucauugaagggggguggacagggaugguagauggaugguacgguuaucaccaucaaaaugagcaggggucaggauaugcagccgaccugaagagcacacagaaugccauugacaagauuacuaacaaaguaaauucaguuauugaaaagaugaauacacaguucacagcaguagguaaagaguucaaccaccuggaaaaaagaauagagaauuuaaauaaaaaaguugaugaugguuuccuggacauuuggacuuacaaugccgaacuguugguucuauuggaaaaugaaagaacuuuggacuaccacgauucaaaugugaagaacuuauaugaaaagguaagaaaccaguuaaaaaacaaugccaaggaaacuggaaauggcugcuuugaauuuuaccacaaaugcgauaacacgugcauggaaagugucaaaaaugggacuuaugacuacccaaaguacucagaggaagcaaaauuaaacagagaaaaaauagaugggguaaagcuggaaucaacaaggauuuaccagauuuuggcgaucuauucaacugucgccaguucauugguacugguagucucccugggggcaaucaguuuuuggaugugcucuaaugggucucuacaguguagaauauguauuuaa

SEQ ID NO: 44925 - RNA, 1701 nt, Artificial Sequence
  derived and/or modified CDS sequence (wt) from hemagglutinin__InfluenzaA__AJJ99708
augaaggcaauacuaguaguucugcuauauacauuugcaaccgcaaaugcagacacauuauguauagguuaucaugcgaacaauucaacagacacuguagacacaguacuagaaaagaauguaacaguaacacacucuguuaaucuucuagaagacaagcauaacgggaaacuaugcaaacuaagagggguagccccauugcauuuggguaaauguaacauugcuggcuggauccugggaaauccagagugugaaucacucuccacagcaagcucaugguccuacauuguggaaacaucuaguucagacaauggaacguguuacccaggagauuucaucgauuaugaggaacuaagggagcaauugagcucagugucaucauuugaaagguuugagauauuccccaagacaaguucauggcccgaucaugacucgaacaaagguguaacggcagcauguccucaugcuggagcaaaaagcuucuacaaaaauuuaauauggcuaguuaaaaaaggaaauucauacccaaagcucagcaaauccuacauuaaugauaaagggaaagaaguccucgugcuauggggaauucaccauccaucuacuacugcugaccaacaaagucucuaucagaaugcagauacauauguuuuuguggggacaucaagauacagcaagaaguucaagccggaaauagcaauaagacccaaagugagggaucaagaagggagaaugaacuauuacuggacacuaguagagccgggagacaaaauaacauucgaagcaacugggaaucuagugguaccgagauaugcauucguaauggaaagaaaugcuggaucugguauuaucauuucagauacaccaguccacgauugcaauacaacuugucagacacccaagggugcuauaaacaccagccucccauuucagaauauacauccgaucacaauuggaaaauguccaaaauauguaaaaagcacaaaauugagacuggccacaggauugaggaaugucccgucuauucaaucuagaggccuauuuggggccauugccggcuucauugaagggggguggacagggaugguagauggaugguacgguuaucaccaucaaaaugagcaggggucaggauaugcagccgaccugaagagcacacagaaugccauugacaagauuacuaacaaaguaaauucaguuauugaaaagaugaauacacaguucacagcaguagguaaagaguucaaccaccuggaaaaaagaauagagaauuuaaauaaaaaaguugaugaugguuuccuggacauuuggacuuacaaugccgaacuguugguucuauuggaaaaugaaagaacuuuggacuaccacgauucaaaugugaagaacuuauaugaaaagguaagaaaccaguuaaaaaacaaugccaaggaaacuggaaauggcugcuuugaauuuuaccacaaaugcgauaacacgugcauggaaagugucaaaaaugggacuuaugacuacccaaaguacucagaggaagcaaaauuaaacagagaaaaaauagaugggguaaagcuggaaucaacaaggauuuaccagauuuuggcgaucuauucaacugucgccaguucauugguacugguagucucccugggggcaaucaguuuuuggaugugcucuaaugggucucuacaguguagaauauguauuuaa

SEQ ID NO: 44926 - RNA, 1701 nt, Artificial Sequence
  derived and/or modified CDS sequence (wt) from hemagglutinin__InfluenzaA__AJJ99719
augaaggcaauacuaguaguuaugcuauauacauuugcaaccgcaaaugcagacacauuauguauagguuaucaugcgaacaauucaacagacacuguagacacaguacuagaaaagaauguaacaguaacacacucuguuaaucuucuagaagacaagcauaacgggaaacuaugcaaacuaagagggguagccccauugcauuuggguaaauguaacauugcuggcuggauccugggaaauccagagugugaaucacucuccacagcaagcucaugguccuacauuguggaaacaucuaguucagacaauggaacguguuacccaggagauuucaucgauuaugaggagcuaagagagcaauugagcucagugucaucauuugaaagguuugagauauuccccaaaacaaguucauggcccaaucaugacucgaacaaagguguaacggcagcauguccucaugcuggagcaaaaggcuucuacaaaaauuuaauauggcuaguuaaaaaaggaaauucauacccaaagcucagcaaauccuacauuaaugauaaagggaaagaaguccucguacuauggggcauucaccauccaucuacuacugcugaccaacaaagucucuaucagaaugcagauacauauguuuuuguggggacaucaagauacagcaagaaguucaagccggaaauagcaauaagacccaaagugagggaucaagaagggagaaugaacuauuacuggacacuaguagaaccgggagacaaaauaacauucgaagcaacuggaaaucuagugguaccgagauaugcauucgcaauggaaagaaaugcuggaucugguauuaucauuucagauacaccaguccacgauugcaauacaacuugucagacacccaagggugcuauaaacaccagccucccauuucagaauauacauccgaucacaauuggaaaauguccaaaauauguaaaaagcacaaaauugagacuggccacaggauugaggaaugucccgucuauucaaucuagaggccuauuuggggccauugccggcuucauugaagggggguggacagggaugguagauggaugguacgguuaucaccaucaaaaugagcaggggucaggauaugcagcugaccugaagagcacacagaaugccauugacaagauuacuaacaaaguaaauucuguuauugaaaagaugaauacacaguucacagcaguagguaaagaguucaaccaccuggaaaaaagaauagagaauuuaaauaaaaaaguugaugaugguuuccuggacauuuggacuuacaaugccgaacuguugguucuauuggaaaaugaaagaacuuuggacuaccacgauucaaaugugaagaacuuauaugaaaagguaagaaaccaguuaaaaaacaaugccaaggaaauuggaaauggcugcuuugaauuuuaccacaaaugcgauaacacgugcauggaaagugucaaaaaugggacuuaugacuacccaaaauacucagaggaagcaaaauuaaacagagaagaaauagaggggguaaagcuggaaucaacaaggauuuaccagauuuuggcgaucuauucaacugucgccaguucauugguacugguagucucccugggggcaaucaguuuuuggaugugcucuaaugggucucuacaguguagaauauguauuuaa

SEQ ID NO: 44927 - RNA, 1701 nt, Artificial Sequence
  derived and/or modified CDS sequence (wt) from hemagglutinin__InfluenzaA__AJJ99730
augaaggcaauacuaguaguuaugcuauauacauuugcaaccgcaaaugcagacacauuauguauagguuaucaugcgaacaauucaacagacacuguagacacaguacuagaaaagaauguaacaguaacacacucuguuaaucuucuagaagacaagcauaacgggaaacuaugcaaacuaagagggguagccccauugcauuuggguaaauguaacauugcuggcuggauccugggaaauccagagugugaaucacucuccacagcaagcucaugguccuacauuguggaaacaucuaguucagacaauggaacguguuacccaggagauuucaucgauuaugaggagcuaagagagcaauugagcucagugucaucauuugaaagguuugagauauuccccaaaacaaguucauggcccaaucaugacucgaacaaagguguaacggcagcauguccucaugcuggagcaaaaggcuucuacaaaaauuuaauauggcuaguuaaaaaaggaaauucauacccaaagcucagcaaauccuacauuaaugauaaagggaaagaaguccucguacuauggggcauucaccauccaucuacuacugcugaccaacaaagucucuaucagaaugcagauacauauguuuuuguggggacaucaagauacagcaagaaguucaagccggaaauagcaauaagacccaaagugagggaucaagaagggagaaugaacuauuacuggacacuaauagagccgggagacaaaauaacauucgaagcaacuggaaaucuagugguaccgagauaugcauucgcaauggaaagaaaugcuggaucugguauuaucauuucagauacaccaguccacgauugcaauacaacuugucagacacccaagggugcuauaaacaccagccucccauuucagaauauacauccgaucacaauuggaaaauguccaaaauauguaaaaagcacaaaauugagacuggccacaggauugaggaaugucccgucuauucaaucuagaggccuauuuggggccauugccggcuucauugaagggggguggacagggaugguagaugggugguacgguuaucaccaucaaaaugagcaggggucaggauaugcagccgaccugaagagcacacagaaugccauugacaagauuacuaacaaaguaaauucuguuauugaaaagaugaauacacaguucacagcaguagguaaagaguucaaccaccuggaaaaaagaauagagaauuuaaauaaaaaaguugaugaugguuuccuggacauuuggacuuacaaugccgaacuguugguucuauuggaaaaugaaagaacuuuggacuaccacgauucaaaugugaagaacuuauaugaaaagguaagaaaccaguuaaaaaacaaugccaaggaaauuggaaauggcugcuuugaauuucaccacaaaugcgauaacacgugcauggaaagugucaaaaaugggacuuaugacuacccaaaauacucagaggaagcaaaauuaaacagagaagaaauagaugggguaaagcuggaaucaacaaggauuuaccagauuuuggcgaucuauucaacugucgccaguucauugguacugguagucucccugggggcaaucaguuuuuggaugugcucuaaugggucucuacaguguagaauauguauuuaa

SEQ ID NO: 44928 - RNA, 1701 nt, Artificial Sequence; identical to SEQ ID NO: 39054
  derived and/or modified CDS sequence (wt) from hemagglutinin__InfluenzaA__AJJ99741

SEQ ID NO: 44929 - RNA, 1701 nt, Artificial Sequence; identical to SEQ ID NO: 37220
  derived and/or modified CDS sequence (wt) from hemagglutinin__InfluenzaA__AJJ99752

SEQ ID NO: 44930 - RNA, 1701 nt, Artificial Sequence
  derived and/or modified CDS sequence (wt) from hemagglutinin__InfluenzaA__AJJ99763
augaaggcaauacuaguaguucugcuauauacauuugcaaccgcaaaugcagacacauuauguauagguuaucaugcgaacaauucaacagacacuguagacacaguacuagaaaagaauguaacaguaacacacucuguuaaccuucuagaagacaagcauaacgggaaacuaugcaaacuaagagggguagccccauugcauuuggguaaauguaacauugcuggcuggauccugggaaauccagagugugaaucacucuccacagcaagcucaugguccuacauuguggaaacuucuaguucagacaauggaacguguuacccaggagauuucaucgauuaugaggagcuaagagagcaauugagcucagugucaucauuugaaagguuugagauauuccccaagacaaguucauggcccaaucaugacucgaacaaagguguaacagcagcauguccucaugcuggagcaaaaagcuucuacaaaaauuuaauauggcuaguuaaaaaaggaaauucauacccaaagcucagcaaauccuacauuaaugauaaagggaaagaaguccucgugcuauggggcauucaccauccaucuacuagugcugaccaacaaagucucuaucagaaugcagaugcauauguuuuuguggggacaucaagauacagcaagaaguucaagccggaaauagcaauaagacccaaagugagggaucaagaagggagaaugaacuauuacuggacacuaguagagccgggagacaaaauaacauucgaagcaacuggaaaucuagugguaccgagauaugcauucgcaauggaaagaaaugcuggaucugguauuaucauuucagauacaccaguccacgauugcaauacaacuugucagacacccaagggugcgauaaacaccagccuaccauuucagaauauacauccgaucacaauuggaaaauguccaaaauauguaaaaagcacaaaauugagacuggccacaggauugaggaaugucccgucuauucaaucuagaggccuauuuggggccauugccgguuucauugaagggggguggacagggaugguagauggaugguacgguuaucaccaucaaaaugagcaggggucaggauaugcagccgaccugaagagcacacagaaugccauugacgagauuacuaacaaaguaaauucuguuauugaaaagaugaauacacaguucacagcaguagguaaagaguucaaccaccuggaaaaaagaauagagaauuuaaauaaaaaaguugaugaugguuuccuggacauuuggacuuacaaugccgaacuguugguucuauuggaaaaugaaagaacuuuggacuaccacgauucaaaugugaagaacuuauaugaaaagguaagaagccaguuaaaaaacaaugccaaggaaauuggaaacggcugcuuugaauuuuaccacaaaugcgauaacacgugcauggaaagugucaaaaaugggacuuaugacuacccaaaauacucagaggaagcaaaauuaaacagagaagaaauagaugggguaaagcuggaaucaacaaggauuuaccagauuuuggcgaucuauucaacugucgccaguucauugguacugguagucucccugggggcaaucaguuucuggaugugcucuaaugggucucuacaguguagaauauguauuuaa

SEQ ID NO: 44931 - RNA, 1698 nt, Artificial Sequence
  derived and/or modified CDS sequence (wt) from hemagglutinin__InfluenzaA__AJJ99775
augaaaguaaaacuauugguccuguuaugcacauuuacagcuacauaugcagacacaauauguauaggcuaccaugcuaacaacucgaccgacacuguugacacaguacuugaaaagaaugugacagugacacacucugucaaccugcuugagaacagucacaauggaaaacuaugucuauuaaaaggaauagccccacuacaauuggguaacugcagcguugccggguggaucuuaggaaacccagaaugcgaauugcugauuuccaaggagucaugguccuacauuguagaaaaaccaaauccugagaauggaacauguuacccagggcauuucgcugacuaugaggaacugagggagcaauugaguucaguaucuucauuugagagguucgaaauauuccccaaagaaagcucauggcccaaccacaccguaaccggagugucagcaucaugcucccauaauggggaaaacaguuuuuacagaaauuugcuauggcugacggggaagaaugguuuguacccaaaccugagcaaguccuaugcaaacaacaaagaaaaagaaguccuuguucuaugggguguucaucacccgccaaacauagcugaccaaaagacccucuaucauacagaaaaugcuuauguuucuguagugucuucacauuauagcagaaaauucaccccagaaauagccaaaagacccaaaguaagagaucaagaaggaagaaucaacuacuacuggacucugcuugaacccggggauacaauaauauuugaggcaaauggaaaucuaauagcgccaagauaugcuuucgcacugaguagaggcuuuggaucaggaaucaucaacucaaaugcaccaacggauaaaugugaugcgaagugccaaacaccucaaggagcuauaaacagcagucuuccuuuccagaacguacacccagucacaauaggagaguguccaaaguaugucaggagugcaaaauuaaggaugguuacaggacuaaggaacaucccauccauucaauccagagguuuguuuggagccauugccgguuucauugaagggggguggacuggaaugguagaugguugguaugguuaucaucaucagaaugagcaaggaucuggcuaugcugcagaucaaaaaagcacacaaaaugccauuaaugggauuacaaacaaggugaauucuguaauugagaaaaugaacacucaauucacagcagugggcaaagaauucaacaaauuggaaagaaggauggaaaacuugaauaaaaaaguugaugauggguuuauagacauuuggacauauaaugcagaacuguugguucuacuggaaaaugaaaggacuuuggauuuccaugacuccaaugugaagaaucuguaugagaaaguaaaaagccaguuaaagaauaaugcuaaagaaauaggaaauggguguuuugaauucuaucacaaguguaacgaugaaugcauggagaguguaaagaauggaacuuaugacuauccaaaauauuccgaagaaucaaaguuaaacagggagaaaauugauggagugaaauuggaaucaaugggagucuaucagauucuggcgaucuacucaacagucgccaguucucugguucuuuuggucucccugggggcaaucagcuucuggauguguuccaaugggucuuugcaguguagaauaugcauuuaa

SEQ ID NO: 44932 - RNA, 1701 nt, Artificial Sequence
  derived and/or modified CDS sequence (wt) from hemagglutinin__InfluenzaA__AJJ99786
augaaggcaauacuaguaguucugcuauauacauuugcaaccgcaaaugcagacacauuauguauagguuaucaugcgaacaauucaacagacacuguagacacaguacuagaaaagaauguaacaguaacacacucuguuaaccuucuagaagacaaacauaacgggaaacuaugcaaacuaagagggguagccccauugcauuuggguaaauguaacauugcuggcuggauccugggaaauccagagugugaaucacucuccacagcaagcucaugguccuacauuguggaaacaucuaguucagacaauggaacguguuacccaggagauuucaucgauuaugaggagcuaagagagcaauugagcucagugucaucauuugaaagguuugagauauuccccaagacaaguucauggcccaaucaugacucgaacaaagguguaacggcagcauguccucaugcuggagcaaaaagcuucuacaaaaauuuaauauggcuaguuaaaaaaggaaauucauacccaaagcucagcaaauccuacauuaaugauaaagggaaagaaguccucgugcuauggggcauucaccauccaucuacuagugcugaccaacaaagucucuaucagaaugcagaugcauauguuuuuguggggacaucaagauacagcaagaaguucaagccggaaauagcaauaagacccaaagugagggaucaagaagggagaaugaacuauuacuggacacuaguagagccgggagacaaaauaacauucgaagcaacuggaaaucuagugguaccgagauaugcauucgcaauggaaagagaugcuggaucugguauuaucauuucagauacaccaguccacgauugcaauacaacuugucagacacccaagggugcuauaaacaccagccucccauuucagaauauacauccgaucacaauuggaaaauguccaaaauauguaaaaagcacaaaauugagacuggccacaggauugaggaauaucccgucuauucaaucuagaggccuauuuggggccauugccgguuucauugaagggggguggacagggaugguagauggaugguacgguuaucaccaucaaaaugagcaggggucaggauaugcagccgaccugaagagcacacagaaugccauugacgagauuacuaacaaaguaaauucuguuauugaaaagaugaauacacaguucacagcaguagguaaagaguucaaccaccuggaaaaaagaauagagaauuuaaauaaaaaaauugaugaugguuuccuggacauuuggacuuacaaugccgaacuguugguucuauuggaaaaugaaagaacuuuggacuaccacgauucaaaugugaagaacuuauaugaaaagguaagaagccaguuaaaaaacaaugccaaggaaauuggaaacggcugcuuugaauuuuaccacaaaugcgauaacacgugcauggaaagugucaaaaaugggacuuaugacuacccaaaauacucagaggaagcaaaauuaaacagagaagaaauagaugggguaaagcuggaaucaacaaggauuuaccagauuuuggcgaucuauucagcugucgccaguucauugguacugguagucucccugggggcaaucaguuucuggaugugcucuaaugggucucuacaguguagaauauguauuuaa

SEQ ID NO: 44933 - RNA, 1698 nt, Artificial Sequence
  derived and/or modified CDS sequence (wt) from hemagglutinin__InfluenzaA__AJJ99798
augaaaguaaaacuacugguccuguuaugcacauuuacagcuacauaugcagacacaauauguauaggcuaccaugcuaacaacucgaccgauacuguugacacaguacuugaaaagaaugugacagugacacacucugucaaccugcuugagaacagucacaauggaaaacuaugucuauuaaaaggaauagccccacuacaauuggguaacugcagcguugccggguggaucuuaggaaacccagaaugcgaauuacugauuuccaaggagucaugguccuacauuguagaaagaccaaauccugaaaauggaacauguuacccagggcauuucgcugacuaugaggaacugagggagcaauugaguucaguaucuucauuugagagguucgaaauauuccccaaagaaagcucauggcccaaccacaccguaaccggagugucagcaucaugcucccauaauggggaaaacaguuuuuacagaaauuugcuauggcugacggggaagaaugguuuguacccaaaccugagcaaguccuaugcaaacaacaaagaaaaagaaguccuuguacuaugggguguucaucauccgccaaacauagcuaaccaaaagacccucuaucauacagaaaaugcuuauguuucuguagugucuucacauuauagcagaaaauucaccccagaaauagccaaaagacccaaaguaagagaucaagaaggaagaaucaacuacuacuggacucugcuugaacccggggauacaauaauguuugaggcaaauggaaaucuaauagcgccaagauaugcuuucgcacugaguagaggcuuuggaucaggaaucaucaacucaaaugcaccaauggauaaaugugaugcgaagugccaaacaccucaaggagcuauaaacagcagucuuccuuuccagaacguacacccagucacaauaggagaguguccaaaguaugucaggagugcaaaauuaaggaugguuacaggacuaaggaacaucccauccauucaauccagagguuuguuuggagccauugccgguuucauugaagggggguggacuggaaugguagaugguugguaugguuaucaucaucagaaugagcaaggaucuggcuaugcugcagaucaaaaaagcacacaaaaugccauuaaugggauuacaaacaaggugaauucuguaauugagaaaaugaacacucaauucacagcagugggcaaagaauucaacaaauuggaaagaaggauggaaaacuugaauaaaaaaguugaugauggguuuauagacauuuggacauauaaugcagaacuguugguucuacuggaaaaugaacggacuuuggauuuccaugacuccaaugugaagaaucuguaugagaaaguaaaaagccaguuaaagaauaaugcuaaagaaauaggaaauggguguuuugaauucuaucacaaguguaacgaugaaugcauggagaguguaaagaauggaacuuaugacuauccaaaauauuccgaagaaucaaaguuaaacagggagaaaauugauggagugaaauuggaaucaaugggagucuaucagauucuggcgaucuacucaacagucgccaguucucugguucuuuuggucucccugggggcaaucagcuucuggauguguuccaaugggucuuugcaguguagaauaugcaucuaa

SEQ ID NO: 44934 - RNA, 1698 nt, Artificial Sequence
  derived and/or modified CDS sequence (wt) from hemagglutinin__InfluenzaA__AJJ99810
augaaaguaaaacuacugguccuguuaugcacauuuacagcuacauaugcagacacaauauguauaggcuaccaugcuaacaacucgaccgacacuguugacacaguacuugaaaagaaugugacagugacacacucugucaaccugcuugagaacagucacaauggaaaacuaugucuauuaaaaggaauagccccacuacaauuggguaacugcagcguugccggguggaucuuaggaaacccagaaugcgaauuacugauuuccaaggagucaugguccuacauuguagaaaaaccaaauccugagaauggaacauguuacccagggcauuucgcugacuaugaggaacugagggagcaauugaguucaguaucuucauuugagagguucgaaauauuccccaaagaaagcucauggcccaaccacaccguaaccggagugucagcaucaugcucccauaauggggaaagcaguuuuuacagaaauuugcuauggcugacggggaagaaugguuuguacccaaaccugagcaaguccuaugcaaacaacaaagaaaaagaaguccuuguacuaugggguguucaucacccgccaaacauaggugaccaaaaggcccucuaucauacagaaaaugcuuauguuucuguagugucuucacauuauagcagaaaauucaccccagaaauagccaaaagacccaaaguaagagaccaagaaggaagaaucaacuacuacuggacucugcuugaacccggggauacaauaauauuugaggcaaauggaaaucuaauagcgccaagauaugcuuucgcacugaguagaggcuuuggaucaggaaucaucaacucaaaugcaccaauggauaaaugugaugcgaagugccaaacaccucagggagcuauaaacagcagucuuccuuuccagaacguacacccagucacaauaggagaguguccaaaguaugucaggagugcaaaauuaaggaugguuacaggacuaaggaacaucccauccauucaauccagagguuuguuuggagccauugccgguuucauugaagggggguggacuggaaugguagaugguugguaugguuaucaucaucagaaugagcaaggaucuggcuaugcugcagaucaaaaaagcacacaaaaugccauuaaugggauuacaaacaaggugaauucuguaauugagaaaaugaacacucaauucacagcagugggcaaagaauucaacaaauuggaaagaaggauggaaaacuugaauaaaaaaguugaugauggguuuauagacauuuggacauauaaugcagaacuguugguucuacuggaaaaugaaaggacuuuggauuuccaugacuccaaugugaagaaucuguaugagaaaguaaaaagccaguuaaagaauaaugcuaaagaaauaggaaauggguguuuugaauucuaucacaaguguaacgaugaaugcauggagaguguaaagaauggaacuuaugacuauccaaaauauuccgaagaaucaaaguuaaacagggagaaaauugauggagugaaauuggaaucaaugggagucuaucagauucuggcgaucuacucaacagucgccaguucucugguucuuuuggucucccugggggcaaucagcuucuggauguguuccaaugggucuuugcagugcagaauaugcaucuaa

SEQ ID NO: 44935 - RNA, 1698 nt, Artificial Sequence
  derived and/or modified CDS sequence (wt) from hemagglutinin__InfluenzaA__AJJ99822
augaaaguaaaacuacugguccuguuaugcacauuuacagcuacauaugcagacacaauauguauaggcuaccaugcuaacaacucgaccgacacuguugacacaguacuugaaaagaaugugacagugacacacucugucaaccugcuugagaacagucacaauggaaaacuaugucuauuaaaaggaauagccccacuacaauuggguaauugcagcguugccggguggaucuuaggaaacccagaaugcgaauuacugauuuccaaggagucaugguccuacauuguagaaaaaccaaauccugagaauggaacauguuacccagggcauuucgcugacuaugaggaacugagggagcaauugaguucaguaucuucauucgagagguucgaaauauuccccaaagaaagcucauggcccaaccacaccguaaccggagugucagcaucaugcucccauaauggggaaagcaguuuuuacagaaauuugcuauggcugacggggaagaaugguuuguacccaaaccugagcaaguccuaugcaaacaacaaagaaaaagaaguccuuguacuaugggguguucaucacccgccaaacauaggugaccaaaaggcccucuaucauacagaaaaugcuuauguuucuguagugucuucacauuauagcagaaaauucaccccagaaauagccaaaagacccaaaguaagagaucaagaaggaagaaucaacuacuacuggacucugcuugaacccggggauacaauaauauuugaggcaaauggaaaucuaauagcgccaagauaugcuuuugcacugaguagaggcuuuggaucaggaaucaucaacucaaaugcaccaauggauaaaugugaugcgaagugccaaacaccucagggagcuauaaacagcagucuuccuuuccagaacguacacccagucacaauaggagaguguccaaaauaugucaggagugcaaaauuaaggaugguuacaggacuaaggaacaucccauucauucaauccagagguuuguuuggagccauugccgguuucauugaagggggguggacuggaaugguagaugguugguaugguuaucaucaucagaaugagcaaggaucuggcuaugcugcagaucaaaaaagcacacaaaaugccauuaaugggauuacaaacaaggugaauucuguaauugagaaaaugaacacucaauucacagcagugggcaaagaauucaacaaauuggaaagaaggauggaaaacuugaauaaaaaaguugaugauggguuuauagacauuuggacauauaaugcagaacuguugguucuacuggaaaaugaaaggacuuuggauuuccaugacuccaaugugaagaaucuguaugagaaaguaaaaagccaguuaaagaauaaugcuaaagaaauaggaaauggguguuuugaauucuaucacaaguguaacgaugaaugcauggagaguguaaagaauggaacuuaugacuauccaaaauauuccgaagaaucaaaguuaaacagggagaaaauugauggagugaaauuggaaucaaugggagucuaucagauucuggcgaucuacucaacagucgccaguucucugguucuuuuggucucccugggggcaaucagcuucuggauguguuccaaugggucuuugcaguguagaauaugcaucuaa

SEQ ID NO: 44936 - RNA, 1701 nt, Artificial Sequence
  derived and/or modified CDS sequence (wt) from hemagglutinin__InfluenzaA__AJJ99833
augaaggcaauacuauuaguucugcuauauacauuugcaaccgcaaaugcagacacauuauguauagguuaucaugcgaacaauucaacagacacuguagacacaguacuagaaaagaauguaacaguaacucacucuguuaaccuucuagaagacaagcauaacgggaaacuaugcaaacuaagagggguagccccauugcauuuggguaaauguaacauugcgggcuggauccugggaaauccagagugugaaucacucuccacagcaagcucaugguccuacauuguggaaacaucuagcucagacaauggaacguguuacccaggagauuucaucaauuaugaggagcuaagagagcaauugagcucagugucaucauuugaaagguuugaaauauuccccaagacaaguucauggcccaaucaugacucgaacaaagguguaacggcagcauguccucgugcuggagcaaaaagcuucuacaaaaauuuaauauggcuaguuaaaaaaggaaauucauaccuaaagcucagcaaauccuacauuaaugauaaagggaaagaaguccucgugcuguggggcauucaccauccaucuacuacugcugaccaacaaagucucuaucagaaugcagaugcauauguuuucguggggacaucaagauacagcaagaaguucaagccggaaauagcaauaagacccaaagugagggaucaagaagggagaaugaacuauuacuggacacuaguagagccgggagacaaaauaacauucgaagcaacuggaaaucuauugguaccgagauaugcauucgcaauggaaagaaaugcuggaucugguauuaucauuucagauacaccaguccacgauugcaauacaacuugucagacacccaagggugcuauaaacaccagccucccauuucagaauauacauccgaucacaauuggaaaauguccaaaauauguaaaaagcacaaaauugagacuggccacaggauugaggaaugucccgucuauucaaucuagaggccuauuuggagccauugccggcuucauugaagggggguggacagggaugguagauggaugguacgguuaucaccaucaaaaugagcaggggucaggauaugcagccgaccugaagagcacacagaaugccaucgacaaaauuaccaacaaaguaaauucuguuauugaaaagaugaauacacaguucacagcaguagguaaagaguucaaccaccuggaaaaaagaauagagaauuuaaauaaaaaaguugaugaugguuuccuggacauuuggacuuacaaugccgaacuguugguucuauuggaaaaugaaagaacuuuggacuaccacgauucaaaugugaagaacuuguaugaaaagguaagaaaccaguuaaaaaacaaugccaaggaaauuggaaacggcugcuuugaauuuuaccacaaaugcgauaacacgugcauggaaagugucaaaaaugggacuuaugacuacccaaaauacucagaggaagcaaaauuaaacagagaagaaauagaugggguaaagcuggaaucaacaaggauuuaccagauuuuggcgaucuauucaacugucgccaguucauugguacugguagucucccugggggcaaucaguuucuggaugugcucuaaugggucucuacaguguagaauauguauuuaa

SEQ ID NO: 44937 - RNA, 1701 nt, Artificial Sequence
  derived and/or modified CDS sequence (wt) from hemagglutinin__InfluenzaA__AJJ99844
augaaggcaauacuaguaguuaugcuauauacauuugcaaccgcaaaugcagacacauuauguauagguuaucaugcgaacaauucaacagacacuguagacacaguacuagaaaagaauguaacaguaacacacucuguuaaucuucuagaagacaagcauaacgggaaacuaugcaaacuaagagggguagccccauugcauuuggguaaauguaacauugcuggcuggauccugggaaauccagagugugaaucacucuccacagcaagcucaugguccuacauuguggaaacaucuaguucagacaauggaacguguuacccaggagauuucaucgauuaugaggagcuaagagagcaauugagcucagugucaucauuugaaagguuugagauauuccccaaaacaaguucauggcccaaucaugacucgaacaaagguguaacggcagcauguccucaugcuggagcaaaaggcuucuacaaaaauuuaauauggcuaguuaaaaaaggaaauucauacccaaagcucagcaaauccuacauuaaugauaaagggaaagaaguccucguacuauggggcauucaccauccaucuacuacugcugaccaacaaagucucuaucagaaugcagauacauauguuuuuguggggacaucaagauacagcaagaaguucaagccggaaauagcaauaagacccaaagugagggaucaagaagggagaaugaacuauuacuggacacuaguagaaccgggagacaaaauaacauucgaagcaacuggaaaucuagugguaccgagauaugcauucgcaauggaaagaaaugcuggaucugguauuaucauuucagauacaccaguccacgauugcaauacaacuugucagacacccaagggugcuauaaacaccagccucccauuucagaauauacauccgaucacaauuggaaaauguccaaaauauguaaaaagcacaaaauugagacuggccacaggauugaggaaugucccgucuauucaaucuagaggccuauuuggggccauugccggcuucauugaagggggguggacagggaugguagauggaugguacgguuaucaccaucaaaaugagcaggggucaggauaugcagccgaccugaagagcacacagaaugccauugacaagauuacuaacaaaguaaauucuguuauugaaaagaugaauacacaguucacagcaguagguaaagaguucaaccaccuggaaaaaagaauagagaauuuaaauaaaaaaguugaugaugguuuccuggacauuuggacuuacaaugccgaacuguugguucuauuggaaaaugaaagaacuuuggacuaccaugauucaaaugugaagaacuuauaugaaaagguaagaaaccaguuaaaaaacaaugccaaggaaauuggaaauggcugcuuugaauuuuaccacaaaugcgauaacacgugcauggaaagugucaaaaaugggacuuaugacuacccaaaauacucagaggaagcaaaauuaaacagagaagaaauagaugggguaaagcuggaaucaacaaggauuuaccagauuuuggcgaucuauucaacugucgccaguucauugguacugguagucucccugggggcaaucaguuuuuggaugugcucuaaugggucucuacaguguagaauauguauuuaa

SEQ ID NO: 44938 - RNA, 1701 nt, Artificial Sequence
  derived and/or modified CDS sequence (wt) from hemagglutinin__InfluenzaA__AJJ99855
augaaggcaauacuaguaguucugcuauauacauuugcaaccgcaaaugcagacacauuauguauagguuaucaugcgaacaauucaacagacacuguagacacaguacuagaaaagaauguaacaguaacacacucuguuaaucuucuagaagacaagcauaacgggaaacuaugcaaacuaagagggguagccccauugcauuuggguaaauguaacauugcuggcuggauccugggaaauccagagugugaaucacucuccacagcaagcucaugguccuacauuguggaaacaucuaguucagacaauggaacguguuacccaggagauuucaucgauuaugaggagcuaagagagcaauugagcucagugucaucauuugaaagguuugagauauuccccaagacaaguucauggcccaaucaugacucgaacaaagguguaacggcagcauguccucaugcuggagcaaaaagcuucuacaaaaauuuaauauggcuaguuaaaaaaggaaauucauacccaaagcucagcaaauccuacauuaaugauaaagggaaagaaguccucgugcuauggggcauucaccauccaucuacuacugcugaccaacaaagucucuaucagaaugcagauacauauguuuuuguggggacaucaagauacagcaagaaguucaagccggaaauagcaauaagacccaaagugagggaucaagaagggagaaugaacuauuacuggacacuaguagagccgggagacaaaauaacauucgaagcaacuggaaaucuagugguaccgagauaugcauucgcaauggaaagaaaugcuggaucugguauuaucauuucagauacaccaguccacgauugcaauacaacuugucagacacccaagggugcuauaaacaccagccucccauuucagaauauacauccgaucacaauuggaaaauguccaaaauauguaaaaagcacaaaauugagacuggccacaggauugaggaaugucccgucuauucaaucuagaggccuauuuggggccauugccggcuucauugaagggggguggacagggaugguagauggaugguacgguuaucaccaucaaaaugagcaggggucaggauaugcagccgaccugaagagcacacagaaugccauugacaagauuacuaacaaaguaaauucuguuauugaaaagaugaauacacaguucacagcaguagguaaagaguucaaccaccuggaaaaaagaauagagaauuuaaauaaaaaaguugaugaugguuuccuggacauuuggacuuacaaugccgaacuguugguucuauuggaaaaugaaagaacuuuggacuaccacgauucaaaugugaagaacuuauaugaaaagguaagaaaccaguuaaaaaacaaugccaaggaaauuggaaauggcugcuuugaauuuuaccacaaaugcgauagcacgugcauggaaagugucaaaaaugggacuuaugacuacccaaaauacucagaggaagcaaaauuaaacagagaagaaauagaugggguaaagcuggaaucaacaaggauuuaccagauuuuggcgaucuauucaacugucgccaguucauugguacugguagucucccugggggcaaucaguuuuuggaugugcucuaaugggucucuacaguguagaauauguauuuaa

SEQ ID NO: 44939 - RNA, 1701 nt, Artificial Sequence
  derived and/or modified CDS sequence (wt) from hemagglutinin__InfluenzaA__AJJ99866
augaaggcaauacuaguaguucugcuauauacauuugcaaccgcaaaugcagacacauuauguauagguuaucaugcgaacaauucaacagacacuguagacacaguacuagaaaagaauguaacaguaacacacucuguuaaccuucuagaagacaagcauaacgggaaacuaugcaaacuaaaagggguagccccauugcauuuggguaaauguaacauugcuggcuggauccugggaaauccagagugugaaucacucuccacagcaagcucaugguccuacauuguggaaacaucuaguucagacaauggaacguguuacccaggagauuucaucgauuaugaggagcuaagagagcaauugagcucagugucaucauuugaaagguuugagauauuccccaagacaaguucauggcccaaucaugacucgaacaaagguguaacggcagcauguccucaugcuggagcaaaaagcuucuacaaaaauuuaauauggcuaguuaaaaaaggaaauucauacccaaagcucagcaaauccuacauuaaugacaaagggaaagaaguccucgugcuauggggcauucaccauccaucuacuagugcugaccaacaaagucucuaucagaaugcagaugcauauguuuuuguggggacaucaagauacagcaagaaguucaagccggaaauagcaauaagacccaaagugagggaucaagaagggagaaugaacuauuacuggacacuaguagagccgggagacaaaauaacauucgaagcaacuggaaaucuagugguaccgagauaugcauucgcaauggaaagaaaugcuggaucugguauuaucauuucagauacaccaguccacgauugcaauacaacuugucagacacccaagggugcuauaaacaccagccucccauuucagaauauacauccgaucacaauuggaaaauguccaaaauauguaaaaagcacaaaauugagacuggccacaggauugaggaaugucccgucuauucaaucuagaggccuauuuggggccauugccgguuucauugaagggggguggacagggaugguagauggaugguacgguuaucaccaucaaaaugagcaggggucaggauaugcagccgaccugaagagcacacagaaugccauugacgagauuacuaacaaaguaaauucuguuauugaaaagaugaauacacaguucacagcaguagguaaagaguucaaccaccuggaaaaaagaauagagaauuuaaauaaaaagguugaugaugguuuccuagacauuuggacuuacaaugccgaacuguugguucuauuggaaaaugaaagaacuuuggacuaccacgauucaaaugugaagaacuuauaugaaaagguaagaagccaguuaaaaaacaaugccaaggaaauuggaaacggcugcuuugaauuuuaccacaaaugcgauaacacgugcauggaaagugucaaaaaugggacuuaugacuacccaaaauacucagaggaagcaaaauuaaacagagaagaaauagaugggguaaagcuggaaucaacaaggauuuaccagauuuuggcgaucuauucaacugucgccaguucauugguacugguagucucccugggggcaaucaguuucuggaugugcucuaaugggucucuacaguguagaauauguauuuaa

SEQ ID NO: 44940 - RNA, 1701 nt, Artificial Sequence
  derived and/or modified CDS sequence (wt) from hemagglutinin__InfluenzaA__AJJ99877
auggaggcaauacuaguaguucugcuauauacauuugcaaccgcaaaugcagacacauuauguauagguuaucaugcgaacaauucaacagacacuguagacacaguacuagaaaagaauguaacaguaacacacucuguuaaccuucuagaagacaagcauaacgggaaacuaugcaaacuaagagggguagccccauugcauuuggguaaauguaacauugcuggcuggauccugggaaauccagagugugaaucacucuccacagcaagcucaugguccuacauuguggaaacaucuaguucagacaauggaacguguuacccaggagauuucaucgauuaugaggagcuaagagagcaauugagcucagugucaucauuugaaagguuugagauauuccccaagacaaguucauggcccaaucaugacucgaacaaagguguaacggcagcauguccucaugcuggagcaaaaagcuucuacaaaaauuuaauauggcuaguuaaaaaaggaaauucauacccaaagcucagcaaauccuacauuaaugauaaagggaaagaaguccucgugcuauggggcauucaccauccaucuacuagugcugaccaacaaagucucuaucagaaugcagaugcauauguuuuuguggggucaucaagauacagcaagaaguucaagccggaaauagcaauaagacccaaagugagggaucaagaagggagaaugaacuauuacuggacacuaguagagccgggagacaaaauaacauucgaagcaacuggaaaucuagugguaccgagauaugcauucgcaauggaaagaaaugcuggaucugguauuaucauuucagauacaccaguccacgauugcaauacaacuugucagacacccaagggugcuauaaacaccagccucccauuucacaauauacauccgaucacaauuggaaaauguccaaaauauguaaaaagcacaaaauugagacuggccacaggauugaggaaugucccgucuauucaaucuagaggccuauuuggggccauugccgguuucauugaagggggguggacagggaugguggauggaugguacgguuaucaccaucaaaaugagcaggggucaggauaugcagccgaccugaagagcacacagaaugccauugacgagauuacuaacaaaguaaauucuguuauugaaaagaugaauacacaguucacagcaguagguaaagaguucaaccaccuggaaaaaagaauagagaauuuaaauaaaaaaguugaugaugguuuccuggacauuuggacuuacaaugccgaacuguugguucuauuggaaaaugaaagaacuuuggacuaccacgauucaaaugugaggaacuuauaugaaaagguaagaagccaguuaaaaaacaaugccaaggaaauuggaaacggcugcuuugaauuuuaccacaaaugcgauaacacgugcauggaaagugucaaaaaugggacuuaugacuacccaaaauacucagaggaagcaaaauuaaacagagaagaaauagaugggguaaagcuggaaucaacaaggauuuaccagauuuuggcgaucuauucaacugucgccaguucauugguacugguagucucccugggggcaaucaguuucuggaugugcucuaaugggucucuacaguguagaauauguauuuaa

SEQ ID NO: 44941 - RNA, 1701 nt, Artificial Sequence
  derived and/or modified CDS sequence (wt) from hemagglutinin__InfluenzaA__AJJ99888
augaaggcaauacuaguaguucugcuauauacauuugcaaccgcaaaugcagacacauuauguauagguuaucaugcgaacaauucaacagacacuguagacacaguacuagaaaagaauguaacaguaacacacucuguuaaccuucuagaagacaagcauaacgggaaacuaugcaaacuaagagggguagccccauugcauuuggguaaauguaacauugcuggcuggauccugggaaauccagagugugaaucacucuccacagcaagcucaugguccuacauuguggaaacaucuaguucagacaauggaacguguuacccaggagauuucaucgauuaugaggagcuaagagagcaauugagcucagugucaucauuugaaagguuugagauauuccccaagacaaguucauggcccaaucaugacucgaacaaagguguaacggcagcauguccucaugcuggagcaaaaggcuucuacaaaaauuuaauauggcuaguuaaaaaaggaaauucauacccaaagcucagcaaauccuacauuaaugauaaagggaaagaaguccucgugcuauggggcauucaccauccaucuacuagugcugaccaacaaagucucuaucagaaugcagaugcauauguuuuuguggggacaucaagauacagcaagaaguucaagccggaaauagcaauaagacccaaagugagggaucaagaagggagaaugaacuauuacuggacacuaguagagccgggagacaaaauaacauucgaagcaacuggaaaucuagugguaccgagauaugcauucgcaauggaaagagaugcuggaucugguauuaucauuucagauacaccaguccacgauugcaauacaacuugucagacacccaagggugcuauaaacaccagccucccauuucagaauauacauccgaucacaauuggaaaauguccaaaauauguaaaaagcacaaaauugagacuggccacaggauugaggaaugucccgucuauucaaucuagaggccuauuuggggccauugccgguuucauugaagggggguggacagggaugguagauggaugguacgguuaucaccaucaaaaugagcaggggucaggauaugcagccgaccugaagagcacacagaaugccauugacgagauuacuaacaaaguaaauucuguuauugaaaagaugaauacacaguucacagcaguagguaaagaguucaaccaccuggaaaaaagaauagagaauuuaaauaaaaaaauugaugaugguuuccuggacauuuggacuuacaaugccgaacuguugguucuauuggaaaaugaaagaacuuuggacuaccacgauucaaaugugaagaacuuauaugaaaagguaagaagccaguuaaaaaacaaugccaaggaaauuggaaacggcugcuuugaauuuuaccacaaaugcgauaacacgugcauggaaagugucaaaaaugggacuuaugacuacccaaaauacucagaggaagcaaaauuaaacagagaagaaauagaugggguaaagcuggaaucaacaaggauuuaccagauuuuggcgaucuauucaacugucgccaguucauugguacugguagucucccugggggcaaucaguuucuggaugugcucuaaugggucucuacaguguagaauauguauuuaa

SEQ ID NO: 44942 - RNA, 1701 nt, Artificial Sequence
  derived and/or modified CDS sequence (wt) from hemagglutinin__InfluenzaA__AJJ99899
augaaggcaauacuaguaguucugcuauauacauuugcaaccgcaaaugcagacacauuauguauagguuaucaugcgaacaauucaacagacacuguagacacaguauuagaaaagaauguaacaguaacucacucuguuaaccuucuagaagacaagcauaacgggaaacuaugcaaacuaagagggguagccccauugcauuuggguaaauguaacauugcgggcuggauccugggaaauccagagugugaaucacucuccacagcaagcucaugguccuacauuguggaaacaucuaguucagacaauggaacguguuacccaggagauuucaucaauuaugaggagcuaagagagcaauugagcucagugucaucauuugaaagguuugaaauauuccccaagacaaguucauggcccaaucaugacucgaacaaagguguaacggcagcauguccucgugcuggagcaaaaagcuucuacaaaaauuuaauauggcuaguuaaaaaaggaaauucauacccaaaccucagcaaauccuacauuaaugauaaagggaaagaaguccuugugcuguggggcauucaccauccaucuacuacugcugaccaacaaagucucuaucagaaugcagaugcauauguuuuuguggggacaucaagauacagcaagaaguucaagccggaaauagcaauaagacccaaagugagggaucaagaagggagaaugaacuauuacuggacacuauuagagccgggagacaaaauaacauucgaagcaacuggaaaucuauugguaccgagauaugcauucgcaauggaaagaaaugcuggaucugguauuaucauuucagauacaccaguccacgauugcaauacaacuugucagacacccaagggugcuauaaacaccagccucccauuucagaauauacauccgaucacaauuggaaaauguccaaaauauguaaaaagcacaaaauugagacuggccacaggauugaggaaugucccgucuauucaaucuagaggccuauuuggagccauugccggcuucauugaagggggguggacagggaugguagauggaugguacgguuaucaccaucaaaaugggcaggggucaggauaugcagccgaccugaagagcacacagaaugccguugacaagauuacuaacaaaguaaauucuguuauugaaaagaugaauacacaguucacagcaguagguaaagaguucaaccaccuggaaaaaagaauagagaauuuaaauaaaaaaguugaugaugguuuccuggacauuuggacuuacaaugccgaacuguugguucuauuggaaaaugaaagaacuuuggacuaccacgauucaaaugugaagaacuuguaugaaaagguaagaaaccaguuaaaaaacaaugccaaggaaauuggaaacggcugcuuugaauuuuaccacaaaugcgauaacacgugcauggaaagugucaaaaaugggacuuaugacuacccaaaauacucagaggaagcaaaauuaaacagagaagaaauagaugggguaaagcuggaaucaacaaggauuuaccagauuuuggcgaucuauucaacugucgccaguucauugguacugguagucucccugggggcaaucaguuucuggaugugcucuaaugggucucuacaguguagaauauguauuuaa

SEQ ID NO: 44943 - RNA, 1701 nt, Artificial Sequence
  derived and/or modified CDS sequence (wt) from hemagglutinin__InfluenzaA__AJJ99910
augaaggcaauacuaguaguucugcuauauacauuugcaaccgcaaaugcagacacauuauguauagguuaucaugcgaacaauucaacagacacuguagacacaguacuagaaaagaauguaacaguaacacacucuguuaaucuucuagaagacaagcauaacgggaaacuaugcaaacuaagagggguagccccauugcauuuggguaaauguaacauugcuggcuggauccugggaaauccagagugugaaucacucuccacagcaagcucaugguccuacauuguggaaacaucuaguucagacaauggaacguguuacccaggagauuucaucgauuaugaggaacuaagggagcaauugagcucagugucaucauuugaaagguuugagauauuccccaagacaaguucauggcccaaucaugacucggacaaagguguaacggcagcauguccucaugcuggagcaaaaagcuucuacaaaaauuuaauauggcuaguuaaaaaaggaaauucauacccaaagcucagcaaauccuacauuaaugauaaagggaaagaaguccucgugcuauggggaauucaucauccaucuacuacugcugaccaacaaagucucuaucagaaugcagauacauauguuuuuguggggacaucaagauacagcaagaaguucaagccggaaauagcaauaagacccaaagugagggaucaagaagggagaaugaacuauuacuggacacuaguagagccgggagacaaaauaacauucgaagcaacuggaaaucuagugguaccgagauaugcauucgcaauggaaagaaaugcuggaucugguauuaucauuucagauacaccaguccacgauugcaauacaacuugucagacacccaagggugcuauaaacaccagccucccauuucagaauauacauccgaucacaauuggaaaauguccaaaauauguaaaaagcacaaaauugagacuggccacaggauugaggaaugucccgucuauucaaucuagaggccuauuuggggccauugccggcuucauugaagggggguggacagggaugguagauggaugguacgguuaucaccaucaaaaugagcaggggucaggauaugcagccgaccugaagagcacacagaaugccauugacaagauuacuaacaaaguaaauucaguuauugaaaagaugaauacacaguucacagcaguagguaaagaguucaaccaccuggaaaaaagaauagagaauuuaaauaaaaaaguugaugaugguuuccuggacauuuggacuuacaaugccgaacuguugguucuauuggaaaaugaaagaacuuuggacuaccacgauucaaaugugaagaacuuauaugaaaagguaagaaaccaguuaaaaaacaaugccaaggaaacuggaaauggcugcuuugaauuuuaccacaaaugcgauaacacgugcauggaaagugucaaaaaugggacuuaugacuacccaaaauacucagaggaagcaaaauuaaacagagaaaaaauagaugggguaaagcuggaaucaacaaggauuuaccagauuuuggcgaucuauucaacugucgccaguucauugguacugguagucucccugggggcaaucaguuuuuggaugugcucuaaugggucucuacaguguagaauauguauuuaa

SEQ ID NO: 44944 - RNA, 1701 nt, Artificial Sequence
  derived and/or modified CDS sequence (wt) from hemagglutinin__InfluenzaA__AJJ99921
augaaggcaauacuaguaguuaugcuauauacauuugcaaccgcaaaugcagacacauuauguauagguuaucaugcgaacaauucaacagacacuguagacacaguacuagaaaagaauguaacaguaacacacucuguuaaucuucuagaagacaagcauaacgggaaacuaugcaaacuaagagggguagccccauugcauuuggguaaauguaacauugcuggcuggauccugggaaauccagagugugaaucacucuccacagcaagcucaugguccuacauuguggaaacaucuaguucagacaauggaacguguuacccaggagauuucaucgauuaugaggagcuaagagagcaauugagcucagugucaucauuugaaagguuugagauauuccccaaaacaaguucauggcccaaucaugacucgaacaaagguguaacggcagcauguccucaugcuggagcaaaaggcuucuacaaaaauuuaauauggcuaguuaaaaaaggaaauucauacccaaagcucagcaaauccuacauuaaugauaaagggaaagaaguccucgugcuauggggcauucaccauccaucuacuacugcugaccaacaaagucucuaucagaaugcagauacauauguuuuuguggggacaucaagauacagcaagaaguucaagccggaaauagcaauaagacccaaagugagggaucaagaagggagaaugaacuauuacuggacacuaguagagccgggagacaaaauaacauucgaagcaacuggaaaucuagugguaccgagauaugcauucgcaauggaaagaaaugcuggaucugguauuaucauuucagauacaccaguccacgauugcaauacaacuugucagacacccaagggugcuauaaacaccagccucccauuucagaauauacauccgaucacaauuggaaaaugucccaaauauguaaaaagcacaaaauugagacuggccacaggauugaggaaugucccgucuauucaaucuagaggccuauuuggggccauugccggcuucauugaagggggguggacagggaugguagauggaugguacgguuaccaccaucaaaaugagcaggggucaggauaugcagccgaccugaagagcacacagaaugccauugacaagauuacuaacaaaguaaauucuguuauugaaaagaugaauacacaguucacagcaguagguaaagaguucaaccaccuggaaaaaagaauagagaauuuaaauaaaaaaguugaugaugguuuccuggacauuuggacuuacaaugccgaacuguugguucuauuggaaaaugaaagaacuuuggacuaccacgauucaaaugugaagaacuuauaugaaaagguaagaaaccaguuaaaaaacaaugccaaggaaauuggaaauggcugcuuugaauuuuaccacaaaugcgauaacacgugcauggaaagugucaaaaaugggacuuaugacuacccaaaauacucagaggaagcaaaauuaaacagagaagaaauagaugggguaaagcuggaaucaacaaggauuuaccagauuuuggcgaucuauucaacugucgccaguucauugguacugguagucucccugggggcaaucaguuuuuggaugugcucuaaugggucucuacaguguagaauauguauuuaa

SEQ ID NO: 44945 - RNA, 1701 nt, Artificial Sequence
  derived and/or modified CDS sequence (wt) from hemagglutinin__InfluenzaA__AJJ99932
augaaggcaauacuaguaguucugcuauauacauuugcaaccgcaaaugcagacacauuauguauagguuaucaugcgaacaauucaacagacacuguagacacaguacuagaaaagaauguaacaguaacacacucuguuaaccuucuagaagacaagcauaacgggaaacuaugcaaacuaagagggguagccccauugcauuuggguaaaugugacauugcuggcuggauccugggaaauccagagugugaaucacucuccacagcaagcucaugguccuacauuguggaaacaucuaguucagacaauggaacguguuacccaggagauuucaucgauuaugaggagcuaagagagcaauugagcucagugucaucauuugaaagguuugagauauuccccaagacaaguucauggcccaaucaugacucgaacaaagguguaacggcagcauguccucaugcuggagcaaaaagcuucuacaaaaauuuaauauggcuaguuaaaaaaggaaauucauacccaaagcucagcaaauccuacauuaaugauaaagggaaagaaguccucgugcuauggggcauucaccauccaucuacuacugcugaccaacaaagucucuaucagaaugcagaugcauauguuuuuguggggacaucaagauacagcaagaaguucaagccggaaauagcaauaagacccaaagugagggaucaagaagggagaaugaacuauuacuggacacuaguagagccgggagacaaaauaacauucgaagcaacuggaaaucuagugguaccgagauaugcauucgcaauggaaagaaaugcuggaucugguauuaucauuucagauacaccaguccacgauugcaauacaacuugucagacacccaagggugcuauaaacaccagccucccauuucagaauauacauccgaucacaauuggaaaauguccaaaauauguaaaaagcacaaaauugagacuggccacaggauugaggaaugucccgucuauucaaucuagaggccuauuuggggccauugccggcuucauugaagggggguggacagggaugguagauggaugguacgguuaucaccaucaaaaugagcaggggucaggauaugcagccgaccugaagagcacacagaaugccauugacaagauuacuaacaaaguaaauucuguuauugaaaagaugaauacacaguucacagcaguagguaaagaguucaaccaccuggaaaaaagaauagagaauuuaaauaaaaaaguugaugaugguuuccuggacauuuggacuuacaaugccgaacuguugguucuauuggaaaaugaaagaacuuuggacuaccacgauucaaaugugaagaacuuauaugaaaagguaagaaaccaguuaaaaaacaaugccaaggaaauuggaaauggcugcuuugaauuuuaccacaaaugcgauaacacgugcauggaaagugucaaaaaugggacuuaugacuacccaaaauacucagaggaagcaaaauuaaacagagaagaaauagaugggguaaagcuggaaucaacaaggauuuaccagauuuuggcgaucuauucaacugucgccaguucauugguacugguagucucccugggggcaaucaguuucuggaugugcucuaaugggucucuacaguguagaauauguauuuaa

SEQ ID NO: 44946 - RNA, 1701 nt, Artificial Sequence; identical to SEQ ID NO: 38706
  derived and/or modified CDS sequence (wt) from hemagglutinin__InfluenzaA__AJJ99943

SEQ ID NO: 44947 - RNA, 1701 nt, Artificial Sequence
  derived and/or modified CDS sequence (wt) from hemagglutinin__InfluenzaA__AJJ99954
augaaggcaauacuaguaguucugcuauauacauuugcaaccgcaaaugcagacacauuauguauagguuaucaugcgaacaauucaacagacacuguagacacaguacuagaaaagaauguaacaguaacacacucuguuaaccuucuagaagacaagcauaacgggaaacuaugcaaacuaagagggguagccccauugcauuuggguaaauguaacauugcuggcuggauccugggaaauccagagugugaaucacucuccacagcaagcucaugguccuacauuguggaaacaucuaguucagacaauggaacguguuacccaggagauuucaucgauuaugaggagcuaagggagcaauugagcucagugucaucauuugaaaaguuugagauauuccccaagacaaguucauggcccaaucaugacucgaacaaagguguaacggcagcauguccucaugcuggagcaaaaagcuucuacaaaaauuuaauauggcuaguuaaaaaaggaaauucauacccaaagcucagcaaauccuacauuaaugauaaagggaaagaaguccucgugcuauggggcauucaccauccaucuacuagugcugaccaacagagucucuaucagaaugcagaugcauauguuuuuguggggacaucaagauacagcaagaaguucaagccggaaauagcaauaagacccaaagugagggaucaagaagggagaaugaacuauuacuggacacuaguagagccgggagacaaaauaacauucgaagcaacuggaaaucuagugguaccgagauaugcauucgcaauggaaagaaaugcuggaucugguauuaucacuucagauacaccaguccacgauugcaauacaacuugucagacacccaagggugcuauaaacaccagccucccauuucagaauauacauccgaucacaauuggaaacuguccaaaauauguaaaaagcacaaaauugagacuggccacaggauugaggaaugucccgucuauucaaucuagaggccuauuuggggccauugccgguuucauugaagggggguggacaggaaugguagauggaugguacgguuaucaccaucaaaaugagcaggggucaggauaugcagccgaccugaagagcacacagaaugccauugacaagauuacuaacaaaguaaauucuguuauugaaaagaugaauacacaguucacagcaguagguaaagaguucaaccaccuggaaaaaagaauagagaauuuaaauaaaaaaguugaugaugguuuccuggacauuuggacuuacaaugccgaacuguugguucuauuggaaaaugaaagaacuuuggacuaccacgauucaaaugugaagaacuuauaugaaaagguaagaagccaguuaaaaaacaaugccaaggaaauuggaaacggcugcuuugaauuuuaccacaaaugcgauaacacgugcauggaaagugucaaaaaugggacuuaugacuacccaaaauacucagaggaagcaaaauuaaacagagaagaaauagaugggguaaagcuggaaucaacaaggauuuaccagauuuuggcgaucuauucaacugucgccaguucauugguacugguagucucccugggggcaaucaguuucuggaugugcucuaaugggucuuuacaguguagaauauguauuuaa

SEQ ID NO: 44948 - RNA, 1701 nt, Artificial Sequence; identical to SEQ ID NO: 36785
  derived and/or modified CDS sequence (wt) from hemagglutinin__InfluenzaA__AJJ99965

SEQ ID NO: 44949 - RNA, 1698 nt, Artificial Sequence
  derived and/or modified CDS sequence (wt) from hemagglutinin__InfluenzaA__AJJ99989
augaaaguaaaacuacugguccuguuaugcacauuuacagcuacauaugcagacacaauauguauaggcuaccaugcuaacaacucgaccgacacuguugacacaguacuugaaaggaaugugacagugacacacucugucaaccugcuugagaacagucacaauggaaaacuaugucuauuaaaaggaauagccccacuacaauuggguaauugcagcguugccggguggaucuuaggaaacccagaaugcgaauuacugauuuccaaggagucaugguccuacauuguagaaaaaccaaauccugagaauggaacauguuacccagggcauuucgcugacuaugaggaacugagggagcaauugaguucaguaucuucauuugagagguucgaaauauuccccaaagaaagcucauggcccaaccacaccguaaccggagugucagcaucaugcucccauaauggggaaagcaguuuuuacagaaauuugcuauggcugacggggaagaaugguuuguacccaaaccugagcaaguccuaugcaaacaacaaagaaaaagaaguccuuguacuaugggguguucaucacccgccaaacauaggugaccaaaaggcccucuaucauacagagaaugcuuaugucucuguagugucuucacauuauagcaaaaaauucaccccagaaauagccaaaagacccaaaguaagagaucaagaaggaagaaucaacuacuacuggacucugcuugaacccggggauacaauaauauuugaggcaaauggaaaucuaauagcgccaagauaugcuuucgcacugaguagaggcuuuggaucaggaaucaucaacucaaaugcaccaauggauaaaugugaugcgaagugccaaacaccucagggagcuauaaacagcagucuuccuuuccagaauguacacccagucacaauaggagaguguccaaaguaugucaggagugcaaaauuaaggaugguuacaggacuaaggaacaucccauccauucaauccagagguuuguuuggagccauugccgguuucauugaaggaggguggacuggaaugguagaugguugguaugguuaucaucaucagaaugagcaaggaucuggcuaugcugcagaucaaagaagcacacaaaaugccauuaaugggauuacaaacaaggugaauucuguaauugagaaaaugaacacucaauucacagcagugggcaaagaauucaacaaauuggaaagaagaauggaaaauuugaauaaaaaaguugaugauggguuuauagacauuuggacauauaaugcagaacuguugguucuacuggaaaaugaaaggacuuuggauuuccaugacuccaaugugaagaaucuguaugagaaaguaaaaagccaguuaaagaauaaugccaaagaaauaggaaauggguguuuugaauucuaucacaaguguaacgaugaaugcauggagaguguaaagaauggaacuuaugacuauccaaaauauuccgaagaaucaaaguuaaacagggagaaaauugauggagugaaauuggaaucaaugggagucuaucagauucuggcgaucuacucaacagucgccaguucucugguucuuuuggucucccugggggcaaucagcuucuggauguguuccaaugggucuuugcaguguagaauaugcaucuaa

SEQ ID NO: 44950 - RNA, 1701 nt, Artificial Sequence
  derived and/or modified CDS sequence (wt) from hemagglutinin__InfluenzaA__AJK00001
augaaggcaauacuaguaguucugcuauauacauuugcaaccgcaaaugcagacacacuauguauagguuaucaugcgaacaauucaacagacacuguagacacaguacuagaaaagaauguaacaguaacucacucuguuaaccuucuagaagacaagcauaacgggaaacuaugcaaacuaagagggguagccccauugcauuuggguaaauguaacauugcgggcuggauccugggaaauccagagugugaaucacucuccacagcaagcucaugguccuacauuguggaaacaucuagcucagacaauggaacguguuacccaggagauuucaucaauuaugaggagcuaagagagcaauugagcucagugucaucauuugaaagguuugaaauauuccccaagacaaguucauggcccaaucaugacucgaacaaagguguaacggcagcauguccucgugcuggagaaaaaagcuucuacaaaaauuuaauauggcuaguuaaaaaagggaauucauacccaaagcucagcaaauccuacauuaaugauaaagggaaagaaguccucgugcuguggggcauucaccauccaucuacuacugccgaccaacaaagucucuaucagaaugcagaugcauauguuuuuguggggacaucaagauacagcaagaaguucaaaccggaaauagcaauaagacccaaagugagggaucaagaagggagaaugaacuauuacuggacacuaguagagccgggagacaaaauaacauucgaagcaacuggaaaucuauugguaccgagauaugcauucgcaauggaaagaaaugcuggaucugguauuaucauuucagauacaccaguccacgauugcaauacaacuugucagacacccaagggugcuauaaacaccagccucccauuucagaauauacauccgaucacaauuggaaaauguccaaaauauguaaaaagcacaaaauugagacuggccacaggauugaggaaugucccgucuauucaaucuagaggccuauuuggagccauugccggcuucauugaagggggguggacagggaugguagauggaugguacgguuaucaccaucaaaaugagcaggggucaggauaugcagccgaccugaagagcacacagaaugccaucgacaagauuaccaacaaaguaaauucuguuauugaaaagaugaauacacaguucacagcaguagguaaagaguucaaccaccuggaaaaaagaauagagaauuuaaauaaaaaaguugaugaugguuuccuggacauuuggacuuacaaugccgaacuguugguucuauuggaaaaugaaagaacuuuggacuaccacgauucaaaugugaagaacuuguaugaaaagguaagaaaccaguuaaaaaacaaugccaaggaaauuggaaacggcugcuuugaauuuuaccacaaaugcgauaacacgugcauggaaagugucaaaaaugggacuuaugacuacccaaaauacucagaggaagcaaaauuaaacagagaaaaaauagaugggguaaagcuggaaucaacaaggauuuaccagauuuuggcgaucuauucaacugucgccaguucauugguacugguagucucccugggggcaaucaguuucuggaugugcucuaaugggucucuacaguguagaauauguauuuaa

SEQ ID NO: 44951 - RNA, 1701 nt, Artificial Sequence
  derived and/or modified CDS sequence (wt) from hemagglutinin__InfluenzaA__AJK00012
augaaggcaauacuaguaguuuugcuauguacauuugcaaccgcaaaugcagacacauuauguauagguuaucaugcgaacaauucaacagacacuguagacacaguacuagaaaagaauguaacaguaacacacucuguuaaucuucuagaagacaagcauaacgggaaacuaugcaaacuaagagggguagccccauuacauuugggaaaauguaacauugcuggcuggauccugggaaauccagagugugaaucacucuccacagcaagcucaugguccuacauuguggaaacaucuaguucagacaauggaacguguuacccaggagauuucaucgauuaugaggagcuaagagagcaauugagcucagugucaucauuugaaagguuugagauauuccccaagacaaguucauggcccaaucaugacucgaacaaagguguaacggcagcauguccucaugcuggagcaaaaggcuucuacaaaaauuuaauauggcuaguuaaaaaaggaaauucauacccaaagcucagcaaauccuacauuaaugauaaagggaaagaaguccucgugcuauggggcauucaccauccaucuacuacugcugaccaacaaagucucuaucaaaaugcagauacauauguuuuuguggggacaucaagauacagcaagaaguucaagccggaaauagcaauaagacccaaagugagggaucaagaagggagaaugaacuauuacuggacacuaguagagccgggagacaaaauaacauucgaagcaacuggaaaucuagugguaccgagauaugcauucgcaauggaaagaaaugcuggaucugguauuaucauuucagauacaacaguccacgauugcaauacaacuugucagacacccaagggugcuauaaacaccagccuaccauuucagaauauacauccgaucacaauuggaaaauguccaaaauauguaaaaagcacaaaauugagacuggccacaggauugaggaaugucccgucuauucaaucuagaggccuauuuggggccauugccggcuucauugaagggggguggacagggaugguagauggaugguacgguuaucaccaucaaaaugagcaggggucaggauaugcagccgaccugaagagcacacagaaugccauugacaagauuacuaacaaaguaaauucuguuauugaaaagaugaauacacaguucacagcaguagguaaagaguucaaccaccuggaaaaaagaauagagaauuuaaauaaaaaaguugaugaugguuuccuggacauuuggacuuacaaugccgaacuguugguucuauuggaaaaugaaagaacuuuggacuaccacgauucgaaugugaagaacuuauaugaaaagguaagaaaccaauuaaaaaacaaugccaaggaaauuggagauggcugcuuugaauuuuaccacaaaugcgauaacacgugcauggaaaguguuaaaaaugggacuuaugacuacccaaaauacucagaggaagcaaaauuaaacagagaaaaaauagaugggguaaagcuggaaucaacaaggauuuaccagauuuuggcgaucuauucaacugucgccaguucauugguacugguagucucccugggggcaaucaguuuuuggaugugcucuaaugggucucuacaguguagaauauguauuuaa

SEQ ID NO: 44952 - RNA, 1701 nt, Artificial Sequence
  derived and/or modified CDS sequence (wt) from hemagglutinin__InfluenzaA__AJK00023
augaaggcaauacuaguaguucugcuauauacauuugcaaccgcaaaugcagacacauuauguauagguuaucaugcgaacaauucaacagacacuguagacacaguacuagaaaagaauguaacaguaacucacucuguuaaccuucuagaagacaagcauaacgggaaacuaugcaaacuaagagggguagccccauugcauuuggguaaauguaacauugcgggcuggauccugggaaauccagagugugaaucacucuccacagcaagcucaugguccuacauuguggaaacaucuagcucagacaauggaacguguuacccaggagauuucaucaauuaugaggagcuaagagagcaauugagcucagugucaucauuugaaagguuugaaauauuccccaagacaaguucauggcccaaucaugacucgaacaaagguguaacggcagcauguccucgugcuggagcaaaaagcuucuacaaaaauuuaauauggcuaguuaaaaaaggaaauucauacccaaagcucagcaaauccuacauuaaugauaaagggaaagaaguccucgugcuguggggcauucaccauccaucuacuacugcugaccaacaaagucucuaucagaaugcagaugcauauguuuuuguggggacaucaagauacagcaagaaguucaagccggaaauagcaauaagacccaaagugagggaucaagaagggagaaugaacuauuacuggacacuaguagagccgggagacaaaauaacauucgaagcaacuggaaaucuauugguaccgagauaugcauucgcaauggaaagaaaugcuggaucugguauuaucauuucagauacaccaguccacgauugcaauacaacuugucagacacccaagggugcuauaaacaccagccucccauuucagaauauacauccgaucacaauuggaaaauguccaaaauauguaaaaagcacaaaauugagacuggccacaggauugaggaaugucccgucuauucaaucuagaggccuauuuggagccauugccggcuucauugaagggggguggacagggaugguagauggaugguacgguuaucaccaucaaaaugagcaggggucaggauaugcagccgaccugaagagcacacagaaugccaucgacaagauuaccaacaaaguaaauucuguuauugaaaagaugaauacacaguucacagcaguagguaaagaguucaaccaccuggaaaaaagaauagagaauuuaaauaaaaaaguugaugaugguuuccuggacauuuggacuuacaaugccgaacuguugguuuuauuggaaaaugaaagaacuuuggacuaccacgauucaaaugugaagaacuuguaugaaaagguaagaaaccaguuaaaaaacaaugccaaggaaauuggaaacggcugcuuugaauuuuaccacaaaugcgauaacacgugcauggaaagugucaaaaaugggacuuaugacuacccaaaauacucagaggaagcaaaauuaaacagagaagaaauagaugggguaaagcuggaaucaacaaggauuuaccagauuuuggcgaucuauucaacugucgccaguucacugguacugguagucucccugggggcaaucaguuucuggaugugcucuaaugggucucuacaguguagaauauguauuuaa

SEQ ID NO: 44953 - RNA, 1701 nt, Artificial Sequence
  derived and/or modified CDS sequence (wt) from hemagglutinin__InfluenzaA__AJK00034
augaaggcaauacuaguaguuaugcuauauacauuugcaaccgcaaaugcagacacauuauguauagguuaucaugcgaacaauucaacagacacuguagacacaguacuagaaaagaauguaacaguaacacacucuguuaaucuucuagaagacaagcauaacgggaaacuaugcaaacuaagagggguagccccauugcauuuggguaaauguaacauugcuggcuggauccugggaaauccagagugugaaucacucuccacagcaagcucaugguccuacauuguggaaacaucuaguucagacaauggaacguguuacccaggagauuucaucgauuaugaggagcuaagagagcaauugagcucagugucaucauuugaaagguuugagauauuccccaaaacaaguucauggcccaaucaugacucgaacaaagguguaacggcagcauguccucaugcuggagcaaaaggcuucuacaaaaauuuaauauggcuaguuaaaaaaggaaauucauacccaaagcucagcaaauccuacauuaaugauaaagggaaagaaguccucguacuauggggcauucaccauccaucuacuacugcugaccaacaaagucucuaucagaaugcagauacauauguuuuuguggggacaucaagauacagcaagaaguucaagccggaaauagcaauaagacccaaagugagggaucaagaagggagaaugaacuauuacuggacacuaguagagccgggagacaaaauaacauucgaagcaacuggaaaucuagugguaccgagauaugcauucgcaauggaaagaaaugcuggaucugguauuaucauuucagauacaccaguccacgauugcaauacaacuugucagacacccaagggugcuauaaacaccagccucccauuucagaauauacauccgaucacaauuggaaaauguccaaaauauguaaaaagcacaaaauugagacuggccacaggauugaggaaugucccgucuauucaaucuagaggccuauuuggggccauugccggcuucauugaagggggguggacagggaugguagauggaugguacgguuaucaccaucaaaaugagcaggggucaggauaugcagccgaccugaagagcacacagaaugccauugacaagauuacuaacaaaguaaauucuguuauugaaaagaugaauacacaguucacagcaguagguaaagaguucaaccaccuggaaaaaagaauagagaauuuaaauaaaaaaguugaugaugguuuccuggacauuuggacuuacaaugccgaacuguugguucuauuggaaaaugaaagaacuuuggacuaccacgauucaaaugugaagaacuuauaugaaaagguaagaaaccaguuaaaaaacaaugccaaggaaauuggaaauggcugcuuugaauuuuaccacaaaugcgauaacacgugcauggaaagugucaaaaaugggacuuaugacuacccaaaauacucagaggaagcaaaauuaaacagagaagaaauagaugggguaaagcuggaaucaacaaggauuuaccagauuuuggcgaucuauucaacugucgccaguucauugguacugguagucucccugggggcaaucaguuuuuggaugugcucuaaugggucucuacaguguagaauauguauuuaa

SEQ ID NO: 44954 - RNA, 1701 nt, Artificial Sequence; identical to SEQ ID NO: 39054
  derived and/or modified CDS sequence (wt) from hemagglutinin__InfluenzaA__AJK00045

SEQ ID NO: 44955 - RNA, 1701 nt, Artificial Sequence; identical to SEQ ID NO: 39054
  derived and/or modified CDS sequence (wt) from hemagglutinin__InfluenzaA__AJK00056

SEQ ID NO: 44956 - RNA, 1701 nt, Artificial Sequence; identical to SEQ ID NO: 36785
  derived and/or modified CDS sequence (wt) from hemagglutinin__InfluenzaA__AJK00067

SEQ ID NO: 44957 - RNA, 1698 nt, Artificial Sequence
  derived and/or modified CDS sequence (wt) from hemagglutinin__InfluenzaA__AJK00079
augaaaguaaaacuacugguccuguuaugcacauuuacagcuacauaugcagacacaauauguauaggcuaccaugcuaacaacucgaccgacacuguugacacaguacuugaaaagaaugugacagugacacacucugucaaccugcuugagaacagucacaauggaaaacuaugucuauuaaaaggaauagccccacuacaauuggguaacugcagcguugccggguggaucuuaggaaacccagaaugcgaauuacugauuuccaaggagucaugguccuacauuguagaaaaaccaaauccugagaauggaacauguuacccagggcauuucgcugacuaugaggaacugagggagcaauugaguucaguaucuucauuugagagguucgaaauauuccccaaagaaagcucauggcccaaccacaccguaaccggagugucagcaucaugcucccauaauggggaaaacaguuuuuacagaaauuugcuauggcugacgaggaagaaugguuuguacccaaaccugagcaaguccuaugcaaacaacaaagaaaaagaaguccuuguacuaugggguguucaucacccgccaaacauagcugaccaaaagacccucuaucauacagaaaaugcuuauguuucuguagugucuucacauuauagcagaaaauucaccccagaaauagccaaaagacccaaaguaagagaucaagaaggaagaaucaacuacuacuggacucugcuugaacccggggauacaauaauauuugaggcaaauggaaaucuaauagcgccaagauaugcuuucgcacugaguagaggcuuuggaucaggaaucaucaacucaaaugcaccaauggauaaaugugaugcgaagugccaaacaccucaaggagcuauaaacagcagucuuccuuuccagaacguacacccagucacaauaggagaguguccaaaguaugucaggagugcaaaauuaaggaugguuacaggacuaaggaacaucccauccauucaauccagagguuuguuuggagccauugccgguuucauugaagggggguggacuggaaugguagaugguugguaugguuaucaucaucagaaugagcaaggaucuggcuaugcugcagaucaaaaaagcacacaaaaugccauuaaugggauuacaaacaaggugaauucuguaauugagaaaaugaacacucaauucacagcagugggcaaagaauucaacaaauuggaaagaaggauggaaaacuugaauaaaaaaguugaugauggauuuauagacauuuggacauauaaugcagaacuguugguucuacuggaaaaugaaaggacuuuggauuuccaugacuccaaugugaagaaucuguaugagaaaguaaaaagccaguuaaagaauaaugcuaaagaaauaggaaauggguguuuugaauucuaucacaaguguaacgaugaaugcauggagaguguaaagaauggaacuuaugacuauccaaaauauuccgaagaaucaaaguuaaacagggagaaaauugauggagugaaauuggaaucaaugggagucuaucagauucuggcgaucuacucaacagucgccaguucucugguucucuuggucucccugggggcaaucagcuucuggauguguuccaaugggucuuugcaguguagaauaugcaucuaa

SEQ ID NO: 44958 - RNA, 1698 nt, Artificial Sequence
  derived and/or modified CDS sequence (wt) from hemagglutinin__InfluenzaA__AJK00091
augaaaguaaaacuacugguccuguuaugcacauuuacagcuacauaugcagacacaauauguauaggcuaccaugcuaacaacucgaccgacacuguugacacagugcuugaaaagaaugugacagugacacacucugucaaccugcuugagaacagucacaauggaaaacuaugucuauuaaaaggaauagccccacuacaauuggguaauugcagcguugccggguggaucuuaggaaacccagaaugcgaauuacugauuuccaaggagucaugguccuacauuguagaaaaaccaaauccugagaauggaacauguuacccagggcauuucgcugacuaugaggaacugagggagcaauugaguucaguaucuucguuugagagguucgaaauauuccccaaagaaagcucauggcccaaccacaccauaaccggagugucagcaucaugcucccauaauggggaaagcaguuuuuacagaaauuugcuauggcugacggggaagaaugguuuguacccaaaccugagcaaguccuaugcaaacaacaaagaaaaagaaguccuuguacuaugggguguucaucacccgccaaacauagguguccaaaaggcccucuaucauacagaaaaugcuuaugucucuguagugucuucacauuauagcagaaaauucaccccagaaauagccaaaagacccaaaguaagagaucaagaaggaagaaucaacuacuacuggacucugcuugaacccggggauacuauaauauuugaggcaaauggaaaucuaauagcgccaagauaugcuuucgcacugaguagaggcuuuggaucaggaaucaucaacucaaaugcaccaauggacaaaugugaugcgaagugccaaacaccucagggagcuauaaacagcagucuuccuuuccagaacguacacccaguaacaauaggagaguguccaaaguaugucaggagugcaaaauuaaggaugguuacaggacuaaggaacaucccauccauucaauccagagguuuguuuggagccauugccgguuucauugaagggggguggacuggaaugguagaugguugguaugguuaucaucaucagaaugagcaaggaucuggcuaugcugcagaucaaaaaagcacacaaaaugccauuaaugggauuacaaacaaggugaauucuguaauugagaaaaugaacacucaauucacagcagugggcaaagaauucaacaaauuggaaagaaggauggaaaacuugaauaaaaaaguugaugauggguuuauagacauuuggacauauaaugcagaacuguugguucuacuggaaaaugaaaggacuuuggauuuccaugacuccaaugugaagaaucuguaugagaaaguaaaaagccaguuaaagaauaaugcuaaagaaauaggaaauggguguuuugaauucuaucacaaguguaacgaugaaugcauggagaguguaaagaauggaacuuaugacuauccaaaauauuccgaagaaucaaaguuaaacagggagaaaauugauggagugaaauuggaaucaaugggaguuuaucagauucuagcgaucuacucaacggucgccaguucucugguucuuuuggucucccugggggcagucagcuucuggauguguuccaaugggucuuugcaguguagaguaugcaucuaa

SEQ ID NO: 44959 - RNA, 1698 nt, Artificial Sequence
  derived and/or modified CDS sequence (wt) from hemagglutinin__InfluenzaA__AJK00103
augaaaguaaaacuacugguccuguuaugcacauuuacagcuacauaugcagacacaauauguauaggcuaccaugcuaacaacucgaccgacacuguugacacagugcuugaaaagaaugugacagugacacacucugucaaccugcuugagaacagucacaauggaaaacuaugucuauuaaaaggaauagccccacuacaauuggguaauugcagcguugccggguggaucuuaggaaacccagaaugcgaauuacugauuuccaaggagucaugguccuacauuguagaaaaaccaaauccugagaauggaacauguuacccagggcauuucgcugacuaugaggaacugagggagcaauugaguucaguaucuucguuugagagguucgaaauauuccccaaagaaagcucauggcccaaccacaccguaaccggagugucagcaucaugcucccauaauggggaaagcaguuuuuacagaaauuugcuauggcugacggggaagaaugguuuguacccaaaccugagcaaguccuaugcaaacaacaaagaaaaagaaguccuuguacuaugggguguucaucacccgccaaacauaggugaccaaaaggcccucuaucauacagaaaaugcuuaugucucuguagugucuucacauuauagcagaaaauucaccccagaaauagccaaaagacccaaaguaagagaucaagaaggaagaaucaacuacuacuggacucugcuugaacccggggauacuauaauauuugaggcaaauggaaaucuaauagcgccaagauaugcuuucgcacugaguagaggcuuuggaucaggaaucaucaacucaaaugcaccaauggacaaaugugaugcgaagugccaaacaccucagggagcuauaaacagcagucuuccuuuccagaacguacacccaguaacaauaggagaguguccaaaguaugucaggagugcaaaauuaaggaugguuacaggacuaaggaacaucccauccauucaauccagagguuuguuuggagccauugccgguuucauugaagggggguggacuggaaugguagaugguugguaugguuaucaucaucagaaugagcaaggaucuggcuaugcugcagaucaaaaaagcacacaaaaugccauuaaugggauuacaaacaaggugaauucuguaauugagaaaaugaacacucaauucacagcagugggcaaagaauucaacaaauuggaaagaaggauggaaaacuugaauaaaaaaguugaugauggguuuauagacauuuggacauauaaugcagaacuguugguucuacuggaaaaugaaaggacuuuggauuuccaugacuccaaugugaagaaucuguaugagaaaguaaaaagccaguuaaagaauaaugcuaaagaaauaggaaauggguguuuugaauucuaucacaaguguaacgaugaaugcauggagaguguaaagaauggaacuuaugacuauccaaaauauuccgaagaaucaaaguuaaacagggagaaaauugauggagugaaauuggaaucaaugggagucuaucagauucuagcgaucuacucaacagucgccaguucucugguucuuuuggucucccugggggcaaucagcuucuggauguguuccaaugggucuuugcaguguagaauaugcaucuaa

SEQ ID NO: 44960 - RNA, 1701 nt, Artificial Sequence; identical to SEQ ID NO: 39055
  derived and/or modified CDS sequence (wt) from hemagglutinin__InfluenzaA__AJK00114

SEQ ID NO: 44961 - RNA, 1701 nt, Artificial Sequence
  derived and/or modified CDS sequence (wt) from hemagglutinin__InfluenzaA__AJK00125
augaaggcaauacuaguaguucugcuauauacauuugcaaccgcaaaugcagacacauuauguauagguuaucaugcgaacaauucaacagacacuguagacacaguacuagaaaagaauguaacaguaacacacucuguuaaccuucuagaagacaagcauaacgggaaacuaugcaaacuaagagagguagccccauugcauuuggguaaauguaacauugcuggcuggauccugggaaauccagagugugaaucacucuccacagcaagcucaugguccuacauuguggaaacaucuaguucagacaauggaacguguuacccaggagauuucaucgauuaugaggagcuaagggagcaauugagcucagugucaucauuugaaagguuugagauauuccccaagacaaauucauggcccaaucaugauucgaacaaagguguaacggcagcauguccucaugcuggagcaaaaagcuucuacaaaaauuuaauauggcuaguuaaaaaaggaaauucauacccaaagcucagcaaauccuacauuaaugauaaagggaaagaaguccucgugcuauggggcauucaccauccaucuacuagugcugaccaacaaagucucuaucagaaugcagaugcauauguuuuuguggggacaucaagauacagcaagaaguucaagccggaaauagcaauaagacccaaagugagggaucaagaagggagaaugaacuauuacuggacacuaguagagccgggagacaaaauaacauucgaagcaacuggaaaucuagugguaccgagauaugcauucgcaauggaaagaaaugcuggaucugguauuaucauuucagauacaccagucuacgauugcaauacaacuugucagacacccaagggugcuauaaacaccagccucccauuucagaauauacauccgaucacaauuggaaaauguccaaaauauguaaaaagcacaaaauugagacuggccacaggauugaggaaugucccgucuauucaaucuagaggccuauuuggggccauugccgguuucauugaagggggguggacagggaugguagauggaugguacgguuaucaccaucaaaaugagcaggggucaggauaugcagccgaccugaagagcacacagaaugccauugacgagauuacuaacaaaguaaauucuguuauugaaaagaugaauacacaguucacagcaguagguaaagaguucaaccaccuggaaaaaagaauagagaauuuaaauaaaaaaguugaugaugguuuccuggacauuuggacuuacaaugccgaacuguugguucuauuggaaaaugaaagaacuuuggacuaccacgauucaaaugugaagaacuuauaugaaaagguaagaagccaguuaaaaaacaaugccaaggaaauuggaaacggcugcuuugaauuuuaccacaaaugcgauaacacgugcauggaaagugucaaaaaugggacuuaugacuacccaaaauacucagaggaagcaaaauuaaacagagaaaaaauagaugggguaaagcuggaaucaacaaggauuuaccagauuuuggcgaucuauucaacugucgccaguucauugguacugguagucucccugggggcaaucaguuucuggaugugcucuaaugggucucuacaguguagaauauguauuuaa

SEQ ID NO: 44962 - RNA, 1701 nt, Artificial Sequence
  derived and/or modified CDS sequence (wt) from hemagglutinin__InfluenzaA__AJK00136
augaaggcaauacuaguaguucugcuauauacauuugcaaccgcaaaugcagacacauuauguauagguuaucaugcgaacaauucaacagacacuguagacacaguacuagaaaagaauguaacaguaacacacucuguuaaccuucuagaagacaagcauaacgggaaacuaugcaaacuaagagggguagccccauugcauuuggguaaauguaacauugcuggcuggauccugggaaauccagagugugaaucacucuccacagcaagcucaugguccuacauuguggaaacaucuaguucagacaauggaacguguuacccaggagauuucaucgauuaugaggagcuaagagagcaauugagcucagugucaucauuugaaagguuugagauauuccccaagacaaguucauggcccaaucaugacucgaacaaagguguaacggcagcauguccucaugcuggagcaaaaagcuucuacaaaaauuuaauauggcuaguuaaaaaaggaaauucauacccaaagcucagcaaauccuacauuaaugauaaagggaaagaaguccucgugcuauggggcauucaccauccaucuacuagugcugaccaacaaagucucuaucagaaugcagaugcauauguuuuuguggggacaucaagauacagcaagaaguucaagccggaaauagcaauaagacccaaagugagggaucaagaagggagaaugaacuauuacuggacacuaguagagccgggagacaaaauaacauucgaagcaacuggaaaucuagugguaccgagauaugcauucgcaauggaaagaaaugcuggaucugguauuaucauuucagauacaccaguccacgauugcaauacaacuugucagacacccaagggugcgauaaacacaagccuaccauuucagaauauacauccgaucacaauuggaaaauguccaaaauauguaaaaagcacaaaauugagacuggccacaggauugaggaaugucccgucuauucaaucuagaggccuauuuggggccauugcugguuucauugaagggggguggacagggaugguagauggaugguacgguuaucaccaucaaaaugagcaggggucaggauaugcagccgaccugaagagcacacagaaugccauugacgagauuacuaacaaaguaaauucuguuauugaaaagaugaauacacaguucacagcaguagguaaagaguucaaccaccuggaaaaaagaauagagaauuuaaauaaaaaaguugaugaugguuuccuggacauuuggacuuacaaugccgaacuguugguucuauuggaaaaugaaagaacuuuggacuaccacgauucaaaugugaagaacuuauaugaaaagguaagaagccaguuaaaaaacaaugccaaggaaauuggaaacggcugcuuugaauuuuaccacaaaugcgauaacacgugcauggaaagugucaaaaaugggacuuaugacuacccaaaauacucagaggaagcaaaauuaaacagagaagaaauagaugggguaaagcuggaaucaacaaggauuuaccagauuuuggcgaucuauucaacugucgccaguucauugguacugguagucucccugggggcaaucaguuucuggaugugcucuaaugggucucuacaguguagaauauguauuuaa

SEQ ID NO: 44963 - RNA, 1704 nt, Artificial Sequence
  derived and/or modified CDS sequence (wt) from hemagglutinin__InfluenzaA__AJK00166
auggagaaaauagugcuucuucuugcaauagucagccuuguuaaaagugaucagauuugcauugguuaccaugcaaacaacucgacagagcagguugacacaauaauggaaaagaacguuacuguuacacaugcccaagacauacuggaaaagacacacaacgggaagcucugcgaucuagauggagugaagccucugauuuuaagagauuguaguguagcuggauggcuccucggaaacccaaugugugacgaauucaucaaugugccggaauggucuuacauaguggagaaggccaacccagccaaugaccucuguuacccagggaauuuuaacgacuaugaagaacugaaacaccuauugagcagaauaaaccauuuugagaaaauucagaucauccccaaaaguucuugguccgaucaugaagccucaucaggggugagcucagcauguccauaccagggaaagcccuccuuuuucagaaaugugguauggcuuaucaaaaagaacaauacauacccaacaauaaagagaagcuacaauaauaccaaccaggaagaucuuuugauacugugggggauucaucauucuaaugaugcggcagagcagacaaagcucuaucaaaacccaaccaccuauauuuccguugggacaucaacacuaaaccagagauugguaccaaaaauagcuacuagauccaaaguaaacgggcaaaguggaaggauggauuucuucuggacaauuuuaaaaccgaaugaugcaaucaacuucgagaguaauggaaauuucauugcuccagaauaugcauacaaaauugucaagaaaggggacucagcaauuaugaaaagugaaguggaauaugguaacugcaacacaaagugucaaacuccaauaggggcgauaaacucuaguaugccauuccacaacauacacccucucaccaucggggaaugccccaaauaugugaaaucaaacaaauuaguccuugcgacugggcucagaaauaguccucuaagagaaagaagaagaaaaagaggacuauuuggagcuauagcaggguuuauagagggaggauggcagggaaugguagaugguugguauggguaccaccauagcaaugagcaggggaguggguacgccgcagacaaagaauccacucaaaaggcaauagauggagucaccaauaaggucaacucgaucauugacaaaaugaacacucaguuugaggccguuggaagggaauuuaauaacuuagaaaggagaauagagaauuuaaacaagaaaauggaagacggauuccuagaugucuggacuuauaaugcugaacuucugguucucauggaaaaugagagaacucuagacuuccaugacucaaaugucaagaaccuuuacgacaagguccgacuacagcuuagggauaaugcaaaggagcuggguaacgguuguuucgaguucuaucacaaaugugauaaugaauguauggaaaguguaagaaacggaacguaugacuacccgcaguauucagaagaagcaagauuaaaaagagaggaaauaaguggaguaaaauuggaaucaauaggaacuuaccaaauacugucaauuuauucaacaguugcgaguucucuagcacuggcaaucaugguggcuggucuaucuuuguggaugugcuccaaugggucguuacaaugcagaauuugcauuuaa

SEQ ID NO: 44964 - RNA, 1707 nt, Artificial Sequence
  derived and/or modified CDS sequence (wt) from hemagglutinin__InfluenzaA__AJK00177
auggagaaaauagugcuucuucuugcaguggucagccuuguuaggagugaucagauuugcauugguuaccaugcaaacaacucgacagagcagguugacacaauaauggaaaagaacgucacuguuacacaugcccaagauauacuggaaaagacacacaacgggaagcucugcgaucuagauggagugaagccucugauuuuaagagauuguaguguagcuggguggcuccucggaaacccaaugugugacgaauucaucaaugugccggaauggucuuacauaguggagaaggccaacccagccaaugaccucuguuacccagggaaucucaacgacuaugaagaacugaaacaccuauugagcagaauaaaccauuuugagaaaauucagaucauccccaaaaguucuugguccgaucaugaagccucauuaggggugagcucagcauguccauaccagggaacacccuccuuuuucagaaaugugguauggcuuaucaagaagaacaauacauacccaacaauaaagagaagcuacaauaauaccaaccaggaagaucuuuugauacugugggggauucaucauucuaaugaugaggcagagcagauaaagcucuaccaaaacccaaccaccuauguuuccguugggacaucaacacuaaaccagagauugguaccaaaaauagcuacuagauccaaaguaaacgggcaaaguggaagaauggauuucuucuggacaauuuuaaaaccggacgaugcaaucaacuucgagaguaauggaaauuucauugcuccagaauaugcauacaaaauugucaagaaaggagacucagcaauuaugaaaagugaaguggaauaugguaacugcaacaccaagugucaaacuccaauaggggcgauaaacucuaguaugccauuccacaacauacacccucucacuaucggggaaugccccaaauaugugaaaucaaacaaauuaguccuugcaacuggacucagaaauaguccucuaagagaaaaaagaagaagaaaaagaggacuauuuggagcuauagcagguuuuauagagggaggauggcagggaaugguagaugguugguauggguaccaccauagcaaugaacaggggaguggguacgcugcugacaaagaauccacucaaaaggcaauagauggagucaccaauaaggucaacucaaucauugacaaaaugaacacucaguuugaagccguuggaagggaauuuaauaacuuagaaaggagaauagagaauuuaaacaagaaaauggaagacggauuccuagaugucuggacuuauaaugcugaacuucugguucucauggaaaaugagagaacucuagacuuccaugacucaaaugucaagaaccuuuacgacaagguccgacuacagcuuagggauaaugcaaaggaacuggguaacgguuguuucgaguucuaucacaaaugugauaaugaaugcauggaaaguguaagaaacggaacguaugacuacccgcaguauucagaagaagcaagacuaaaaagagaggaaauaaguggaguaaaauuggaaucaauaggaauuuaccaaauacugucgauuuauucaacaguugcgaguucucuagcauuggcaaucaugguggcuggucuaucuuuauggaugugcuccaaugggucguuacaaugcagaauuugcauuuaa

SEQ ID NO: 44965 - RNA, 1704 nt, Artificial Sequence
  derived and/or modified CDS sequence (wt) from hemagglutinin__InfluenzaA__AJK00188
auggagaaaauagugcuucuucuugcaguggucagccuuguuagaagugaucagauuugcauugguuaccaugcaaacaacucgacagagcagguugacacaauaauggaaaaaaacguuacuguuacgcaugcccaagauauacuggaaaagacacacaacgggaagcucugcgaucuagauggagugaagccucugauuuuaagagauuguaguguagcuggauggcuccucggaaacccaaugugugacgaauucaucaaugugccggaauggucuuacauaguggagaaggccaacccagccaaugaccucuguuacccagggaaucucaacgacuaugaagaacugaaacaccuauugagcagaauaaaccauuuugagaaaauucagaucauccccaaaaguucuugguccgaucaugaagccucauuaggggugagcucagcauguccauaccagggaacacccuccuuuuucagaaaugugguauggcuuaucaagaagaacaauacauacccaacaauaaagagaagcuacaauaauaccaaccaggaagaucuuuugauacugugggggauucaucauucuaaugaugaggcagagcagauaaagcucuaccaaaacccaaccaccuauauuuccguugggacaucaacacuaaaccagagauugguaccaaaaauagcuacuagauccaaaguaaacgggcaaaguggaagaauggauuucuucuggacaauuuuaaaaccggacgaugcaaucaacuucgagaguaauggaaauuucauugcuccagaauaugcauacaaaauugucaagaaaggagacucagcaauuaugaaaagugaaguggaauaugguaacugcaacaccaagugucaaacuccaauaggggcgauaaacucuaguaugccauuccacaacauacacccucucacuaucggggaaugccccaaauauguaaaaucaaacaaauuaguccuugcaacuggacucagaaauaguccucuaagagaaaaaagaagaaaaagaggacuauuuggagcuauagcagguuuuauagagggaggauggcagggaaugguagaugguugguauggguaccaccauagcaaugagcaggggaguggguacgcugcugacaaagaauccacucaaaaggcaauagauggagucaccaauaaggucaacucgaucauugacaaaaugaacacucaguuugaagccguuggaagggaauuuaauaacuuagaaaggagaauagagaauuuaaacaagaaaauggaagacggauuccuagaugucuggacuuauaaugcugaacuucugguucucauggaaaaugagagaacucuagacuuccaugacucaaaugucaagaaccuuuacgacaagguccgacuacagcuuagggauaaugcaaaggaacuggguaacgguuguuucgaguucuaucacaaaugugauaaugaaugcauggaaaguguaagaaacggaacguaugacuacccgcaguauucagaagaagcaagauuaaaaagagaggaaauaaguggaguaaaauuggaaucaauaggaacuuaccaaauacugucgauuuauucaacaguugcgaguucucuagcacuggcaaucaugguggcuggucuaucuuuauggaugugcuccaaugggucguuacaaugcagaauuugcauuuaa

SEQ ID NO: 44966 - RNA, 1704 nt, Artificial Sequence
  derived and/or modified CDS sequence (wt) from hemagglutinin__InfluenzaA__AJK00207
auggagaaaauagugcuucuucuugcaauagucagccuuguuagaagugaucagauuugcauugguuaccaugcaaacaacucgacagagcagguugacacaauaauggaaaagaacguuacuguuacacaugcccaagacauacuggaaaagacacacaacgggaagcucugcgaucuagauggagugaagccuuugauuuuaagagauuguaguguagcuggauggcuccucggaaacccaaugugugacgaauuuaucaaugugccagaauggucuuacauaguggagaaggccaacccagccaaugaccucuguuacccagggaauuucaacgacuaugaagaacugaaacaccuauugagcagaauaaaucauuuugagaaaauucagaucauccccaaaaguucuugguccgaucaugaagccucaucaggggugagcucagcauguccguaucagggaacgcccucuuuuuucaggaauguaguauggcuuaucaaaaagaacaauacauacccaacaauaaagagaagcuacaauaacaccagccaggaagaucuguugguacugugggggauucaccauucuaaugaugcgacagaacagaugaagcucuaucaaaacccaaccaccuauguuuccguuggaacaucaacacuaaaccagagauugguaccaaaaauagcuacuagauccaaaguaaacgggcaaaguggaaggauggauuucuucuggacaauuuuaaaaucgaaugaugcaaucaacuucgaaagcaaugggaauuucauugcuccagaauaugcauacaaaauugucaagaaaggggacucagcaauuaugaaaagugaaguggaauaugguaacugcagcaccaagugucaaacuccgauaggggcgauaaacucuaguaugccauuccacaauauacacccucucaccaucggggaaugccccaaauaugugaaaucaaacaaauuaguccuugcgacugggcucagaaauaguccucuaagagaaaggagaagaaaaagaggacuauuuggagcuauagcaggguuuauagagggaggauggcagggaaugguagaugguugguauggguaccaccauaguaaugagcaggggaguggguacgcugcagacaaagaauccacccaaaaggcaauagauggagucaccaauaaggucaacucuaucauugacaaaaugaacacucaguuugaggccguuggaagggaauuuaauaacuuagaaaggagaauagagaauuuaaacaagaaaauggaagacggauuccuagaugucuggacuuauaaugcugaacuucugguucucauggaaaaugagaggacucuagacuuccaugacucaaaugucaagaaccuuuacgacaagguccgacuacagcugagggauaauacaaaggagcuggguaacgguugcuucgaguucuaucacaaaugugauaaugaauguauggaaaguguaagaaacggaacguaugacuacccgcaguauucagaagaagcaagauuaaaaagagaggaaauuaguggaguaaaauuggaaucaauaggaacuuaccaaauacugucaauuuauucaacaguugcgaguucucuagcgcuggcaaucaugguggcuggucuaucuuuguggaugugcuccaaugggucguuacaaugcagaauuugcauuuaa

SEQ ID NO: 44967 - RNA, 1704 nt, Artificial Sequence
  derived and/or modified CDS sequence (wt) from hemagglutinin__InfluenzaA__AJK00218
auggagaaaauagugcuuuuucuugcaauagucagccuugucagaagugaucagauuugcauugguuaccaugcaaacaacucaacagagcagguugacacaauaauggaaaagaacgucacuguuacacaugcccaagacauacuggaaaagacacacaacgggaagcucugcgaucuagauggagugaagccuuugauuuuaagagauuguaguguagcuggauggcuucucggaaacccaaugugugacgaauuuaucaaugugccagaauggucuuacauaguggagaaggccaacccagccaaugaccucuguuacccagggaauuucaacgacuaugaagaacugaaacaccuauugagcagaauaaaucauuuugagaaaauucggaucauccccaaaaguucuuggcccgaucaugaagccucaucaggggugagcucagcauguccguaucagggaacgcccucuuuuuucaggaauauaguauggcuuaucaaaaagaacaauacauacccaacaauaaagagaagcuacaauaacaccagccaggaagaucuguugguacugugggggauucaucauucuagugaugcgacagaacagauaaagcucuaucaaaacccaaccaccuauguuuccguuggaacaucaacacuaaaccagagauugguaccaaaaauagcuacuagauccaaaguaaacgggcaaaguggaaggauggauuucuucuggacaauuuuaaaaucgaaugaugcaaucaacuucgaaaguaaugggaauuucauugcuccagaauaugcauacaaaauugucaagaaaggggacucagcaauuaugaaaagugaaguggaauaugguaacugcagcaccaagugucaaacuccgauaggggcgauaaacucuaguaugcccuuccacaauauacacccccucaccaucggggaaugccccaaauaugugaaaucaaacaaauuaguccuugcgacugggcucagaaauaguccucuaagagaaaggagaaggaaaagaggacuauuuggagcuauagcaggguuuauagagggaggauggcagggaaugguagaugguugguauggguaccaccauaguaaugagcaggggaguggauacgcugcagacaaagaauccacccaaaaggcaauagauggagucaccaauaaggucaacucuaucauugacaaaaugaacacucaguuugaggccguugggagggaauucaauaacuuagaaaggagaauagagaauuuaaacaagaaaauggaagacggauuccuagaugucuggacuuauaaugcugaacuucugguucucauggaaaaugagaggacucuagacuuccaugacucaaaugucaagaaccuuuacgacaagguccggcuacagcugagggauaaugcaaaggagcuggguaacgguugcuuugaguucuaucacaaaugugauaaugaauguauggaaaguguaagaaacggaacguaugacuacccgcaguauucagaagaagcaagauuaaaaagagaggaaauuaguggaguaaaauuggaaucaauaggaacuuaccaaauacugucaauuuauucaacagcugcgaguucucuagcgcuggcaaucaugguggcuggucuaucuuuguggaugugcuccaaugggucguuacaaugcagaauuugcauuuaa

SEQ ID NO: 44968 - RNA, 1704 nt, Artificial Sequence
  derived and/or modified CDS sequence (wt) from hemagglutinin__InfluenzaA__AJK00239
auggagaaaauagugcuucuucuugcaauagucagccuuguuagaagugaucagaucugcauugguuaccaugcaaacaacucgacagagcagguugacacaauaauggaaaagaacguuacuguuacacaugcccaagacauacuggaaaagacacacaacgggaagcucugcgaucuagauggagugaagccuuugauuuuaagagauuguaguguagcuggauggcuccucggaaacccaaugugugacgaauuuaucaaugugccagaauggucuuacauaguggagaaggccaacccagccaaugaccucuguuacccagggaauuucaacgacuaugaagaacugaaacaccuauugagcagaauaaaucauuuugagaaaauucagaucauucccaaaaguucuugguccgaucaugaagccucaucaggggugagcucagcauguccguaucagggaacgcccucuuuuuucaggaauguaguauggcuuaucaaaaagaacaauacauacccaacaauaaagagaagcuacaauaacaccagccaggaagaucuguugguacugugggggauucaccauucuaaugaugcgacagaacagaugaagcucuaucaaaacccaaccaccuauguuuccguuggaacaucaacacuaaaccagagauugguaccaaaaauagcuacuagauccaaaguaaacgggcaaaguggaaggauggauuucuucuggacaauuuuaaaaucgaaugaugcaaucaacuucgaaagcaaugggaauuucauugcuccagaauaugcauacaaaauugucaagaaaggggacucagcaauuaugaaaagugaaguggaauaugguaacugcagcaccaagugucaaacuccgauaggggcgauaaacucuaguaugccauuccacaauauacacccucucaccaucggggaaugccccaaauaugugaaaucaaacaaauuaguccuugcgacugggcucagaaauaguccucuaagagaaaggagaagaaaaagaggacuauuuggagcuauagcaggguuuauagagggaggauggcagggaaugguagaugguugguauggguaccaccauaguaaugagcaggggaguggguacgcugcagacaaagaauccacccaaaaggcaauagauggaguuaccaauaaggucaacucuaucauugacaaaaugaacacucaguuugaggccguuggaagggaauuuaauaacuuagaaaggagaauagagaauuuaaacaagaaaauggaagacggauuccuagaugucuggacuuauaaugcugaacuucugguucucauggaaaaugagaggacucuagacuuccaugacucaaaugucaagaaccuuuacgacaagguccgacuacagcugagggauaaugcaaaggagcuggguaacgguugcuucgaguucuaucacaaaugugauaaugaauguauggaaaguguaagaaacggaacguaugacuacccgcaguauucagaagaagcaagauuaaaaagagaggaaauuaguggaguaaaauuggaaucaauaggaacuuaccaaauacugucaauuuauucaacaguugcgaguucucuagcgcuggcaaucaugguggcuggucuaucuuuguggaugugcuccaaugggucguuacaaugcagaauuugcauuuaa

SEQ ID NO: 44969 - RNA, 1704 nt, Artificial Sequence
  derived and/or modified CDS sequence (wt) from hemagglutinin__InfluenzaA__AJS18468
auggagaaaauagugcuucuucuugcagugguuagccuuguuaaaagugaucagauuugcauugguuaccaugcaaacaacucgacagagcagguugacacgauaauggaaaaaaacgucacuguuacacaugcccaagacauacuggaaaagacacacaacgggaggcucugcgaucugaauggagugaaaccucugauuuuaaaggauuguaguguagcuggauggcuucuuggaaacccaaugugcgacgaguucaucagagugccggaauggucuuacauaguggagagggcuaacccagccaaugaccucuguuacccagggaaucucaaugacuaugaagaacugaaacaccuauugagcagaauaaaucauuuugagaagacucugaucauccccaagaguucuuggcccaaucaugaaacaucauuaggggugagugcagcauguccauaccagggagugcccuccuuuuucagaaaugugguauggcuuaccaagaagaacgaugcauacccaacaauaaagaugagcuacaauaauaccaauagggaagaucuuuugauacugugggggauucaucauuccaacaaugcagcagagcagacaaaucucuauaaaaacccaaccaccuauguuuccguugggacaucaacauuaaaccagagauuggugccaaaaauagcuacuagaucccaaguaaacgggcaacguggaagaauggauuucuucuggacaauuuuaaaaccgaaugaugcaauccacuucgagaguaauggaaauuuuauugcuccagaauaugcauacaaaauagucaagaaaggggacucaacaauuaugaaaagugaaauggaauauggccacugcaacaccaaaugucaaacuccaauaggggcgauaaacucuaguaugccauuccacaauauacacccucucaccaucggggagugccccaaauacgugaaaucaaacaaauuaguccuugcgacugggcucagaaauaguccucuaagagaaagaagaagaaaaagaggacuauuuggagcuauagcaggguucauagagggaggauggcaaggaaugguagaugguugguauggguaccaccauagcaaugaacaggggaguggguacgcugcagacagagaauccacccaaaaggcaauagauggaguuaccaauaaggucaacucgauaauugacaaaaugaacacucaauuugaggccguuggaagggaguuuaauaacuuagaacggagaauagagaauuuaaauaagaaaauggaagacggauuccuagaugucuggacuuacaaugcugaacuuuuaguucucauggaaaaugagagaacucuagauuuccaugauucaaaugucaagaaccuuuaugacaaaguccgacuacagcuuagggauaaugcaaaggagcuggguaaugguuguuucgaguucuaucacaaaugugauaaugaauguauggaaaguguaagaaaugggacguaugacuacccccaguauucagaagaagcaagauuaaaaagggaagaaauaagcggagugaaauuggaaucaauaggaacuuaccaaauacugucaauuuauucaacaguggcgaguucccuaacacuggcaaucauuguggcuggucuaucuuuauggaugugcuccaaugggucguuacaaugcagaauuugcauuuaa

SEQ ID NO: 44970 - RNA, 1704 nt, Artificial Sequence
  derived and/or modified CDS sequence (wt) from hemagglutinin__InfluenzaA__AJS18479
auggagaaaauagugcuucuucuugcagugguuagccuuguuaaaagugaucagauuugcauugguuaccaugcaaacaacucgacagagcagguugacacgauaauggaaaaaaacgucacuguuacacaugcccaagacauacuggaaaagacacacaacgggaggcucugcgaucugaauggagugaaaccucugauuuuaaaggauuguaguguagcuggauggcuucuuggaaacccaaugugcgacgaguucaucagagugccggaauggucuuacauaguggagagggcuaacccagccaaugaccucuguuacccagggaaccucaaugacuaugaagaacugaaacaccuauugagcagaauaaaucauuuugagaagacucugaucauccccaagaguucuuggcccaaucaugaaacaucauuaggggugagcgcagcauguccauaccagggaaugcccuccuuuuucagaaaugugguauggcuuaccaagaagaacgauacauacccaacaauaaagaugagcuacaauaauaccaauagggaagaucuuuugauacuaugggggauucaucauuccaacaaugcagcagagcagacaaaucucuauaaaaauccaaccaccuauguuuccguugggacagcaacauuaaaccagagauuggugccaaaaauagcuacuagaucccaaguaaacgggcaacguggaagaauggauuucuucuggacaauuuuaaaaccgaaugaugcaauccacuucgagaguaauggaaauuuuauugcuccagaauaugcauacaaaauugucaagaaaggggacucaacaauuaugaaaagugaaauggaauauggccacugcaacaccaaaugucaaacuccaauaggggcgauaaacucuaguaugccauuccacaauauacacccucucacuaucggggagugccccaaauacgugaaaucaaacaaauuaguccuugcgacugggcucagaaauaguccucuaagagaaagaagaagaaaaagaggacuauuuggagcuauagcaggguuuauagagggaggauggcaaggaaugguagaugguugguauggguaccaccauagcaaugaacaggggaguggguacgcugcagacagagaauccacccaaaaggcaauagauggaguuaccaauaaggucaacucgauaauugacaaaaugaacacucaauuugaggccguuggaagggaguuuaauaacuuagaacggagaauagagaacuuaaauaagaaaauggaagacggauuccuagaugucuggacuuauaaugcugaacuuuuaguucucauggaaaaugagagaacucuagauuuccaugacucaaaugucaagaaccuuuaugacaaaguccgacuacagcuuagggauaaugcaaaggagcuggguaaugguuguuucgaguucuaucacaaaugugauaaugaauguauggaaaguguaagaaaugggacguaugacuacccccaguauucagaagaagcaagauuaaaaagggaagaaauaagcggagugaaauuggaaucaauaggaacuuaccaaauacugucaauuuauucaacaguggcgaguucccuagcacuggcaaucauuguggcuggucuaucuuuauggaugugcuccaaugggucguuacaaugcagaauuugcauuuaa

SEQ ID NO: 44971 - RNA, 1704 nt, Artificial Sequence
  derived and/or modified CDS sequence (wt) from hemagglutinin__InfluenzaA__AJY79339
auggagaaaauagugcuucuucuugcaauagucaguauuguuaaaagugaucagauuugcauugguuaccaugcaaacaacucgacagagcagguugacacaauaauggaaaagaacgucacuguuacacacgcccaagacauacuggaaaagacacacaacgggaaacucugcaaucuagauggagugaagccucucauuuuaagagauuguaguguagcuggauggcuccucgggaacccaaugugcgaugaauuccucaaugugccggaauggucuuacauaguggagaaaaucaauccagccaaugaccucuguuauccagggaauuuaaacgacuaugaagaacugaaacaucuauugagcagaauaaaccauuuugagaaaauucagaucauucccaaagauucuuggucagaucaugaagccucaggagugagcucagcaugcccauaccaaggaagauccuccuuuuuuagaaauguuguauggcuuaccaaaaagaacgaugcauacccaacaauaaagaaaaguuacaauaauacuaaccaagaagaucuuuugguacuaugggggauucaccauccaaaugaugcugcagagcagacaaggcuuuaucaaaacccaacuaccuauaucuccguugggacaucaacacuaaaccagagauugguacccaaaauagcuacuagaucuaagguaaacgggcaaaguggaaggauggaguucuuuuggacaauuuuaaaaucgaaugaugcaauaaacuuugagaguaauggaaauuucauugcuccagaaaaugcauacaaaauugucaagaaaggagauucaacaauuaugaaaagugaguuggaauauagcaacugcaacaccaagugucagacuccaauaggggcgauaaacuccaguaugccauuccacaacauccacccucucaccaucggggaaugccccaaauaugugaaaucaaacagauuaguccuugcuacugggcucaggaauagcccucaaggggagaaaagaagaaaaaagagaggacuauucggagccauagcaggcuuuauagagggaggauggcagggaaugguagaugguugguauggguaccaccauagcaacgagcaggggaguggguacgcugcagacaaagaauccacucaaagggcuauagauggagucaccaauaaggucaauucgaucauugacaaaaugaacacucaguuugaggcuguuggaagggaauuuaauaacuuagaaaggagaauagaaaauuuaaacaagaagauggaagacggauuccuagaugucuggacuuauaaugcugaacuucugguucucauggaaaaugagagaacucuagacuuucaugacucaaaugucaagaaucuuuaugacaagguccgacuacagcuuagggauaaugcaaaggagcuugguaacgguuguuucgaguucuaucacagaugugauaaugaauguauggaaaguguaagaaacggaacguaugacuacccucaauauucagaagaagcaagauuaaaaagagaggaaauaaguggaguaaaauuggagucaauaggaacuuaccaaauacugucaauuuauucaacaguggcgagcucccuagcacuggcaaucaugguggcuggucuaucuuuauggaugugcuccaauggaucgcuacaaugcagaauuugcauuuaa

SEQ ID NO: 44972 - RNA, 1704 nt, Artificial Sequence
  derived and/or modified CDS sequence (wt) from hemagglutinin__InfluenzaA__AJY79341
auggagaaaauagugcuucuucuugcaauagucaguauuguuaaaagugaucagauuugcauugguuaccaugcaaacaacucgacagagcagguugacacaauaauggaaaagaacgucacuguuacacacgcccaagacauacuggaaaagacacacaacgggaaacucugcaaucuagauggagugaagccucucauuuuaagagauuguaguguagcuggauggcuccucgggaacccaaugugcgaugaauuccucaaugugccggaauggucuuacauaguggagaaaaucaauccagccaaugaccucuguuauccagggaauuucaacgacuaugaagaacugaaacaccuauugagcagaauaaaccauuuugagaaaauucagaucauucccaaagauuccuggucagaucaugaaaccucaggagugagcucagcaugcccauaccaaggaagauccuccuuuuuuagaaauguuguguggcuuaccaaaaagaacgaugcauacccaacaauaaagaaaaguuacaauaauacuaaccaagaagaucuuuugguacuaugggggauucaccauccaaaugaugcugcagagcagacaaggcuuuaucaaaacccaacuaccuacaucuccguugggacaucaacacuaaaccagagauugguacccaaaauagcuaccagaucuaagguaaacgggcaaaauggaaggauggaguucuuuuggacaauuuuaaaaucgaaugaugcaauaaacuuugagaguaauggaaauuucauugcuccagaaaaugcauacaaaauugucaagaaaggagauucaacaauuaugagaagugaguuggaauauaguaacugcaacaccaagugucagacuccaauaggggcgauaaacuccaguaugccauuccacaacauucacccucucaccaucggggaaugccccaaauaugugaaaucaaacagauuaguccuugcuacugggcucaggaauagcccucaaggagagaaaagaagaaaaaagagaggacuauucggagccauagcaggcuuuauagagggaggauggcagggaaugguagaugguugguauggguaccaucauagcaacgagcaggggaguggguacgcugcagacaaagaauccacucaaagggcuauagauggagucaccaauaaggucaauucgaucauugacaaaaugaacacucaguuugaggcuguuggaagggaauuuaauaacuuagaaaggagaauagaaaauuuaaacaagaagauggaagacggauuccuagaugucuggacuuauaaugcugaacuucugguucucauggaaaaugagagaacucuagacuuucaugacucaaaugucaagaaucuuuaugacaagguccgacuacagcuuagggauaaugcaaaggagcuugguaacgguuguuucgaguucuaucacagaugugauaaugaauguauggaaaguguaagaaacggaacguaugacuacccucaauauucagaagaagcaagauuaaaaagagaggaaauaaguggaguaaaauuggagucaauaggaacuuaccaaauacugucaauuuauucaacaguggcgagcucccuagcacuggcaaucaugguggcuggucuaucuuuauggaugugcuccaauggaucgcuacaaugcagaauuugcauuuaa

SEQ ID NO: 44973 - RNA, 1704 nt, Artificial Sequence
  derived and/or modified CDS sequence (wt) from hemagglutinin__InfluenzaA__AJY79342
auggagaaaauagugcuucuucuugcaauagucaguauugucaaaagugaucagauuugcauugguuaccaugcaaacaacucgacagagcagguugacacaauaauggaaaagaacgucacuguuacacacgcccaagacauacuggaaaagacacacaacgggaaacucugcaaucuagauggagugaagccucucauuuuaagagauuguaguguagcuggauggcuccucgggaacccaaugugcgaugaauuccucaaugugccggaauggucuuacauaguggagaaaaucaauccagccaaugaccucuguuauccagggaauuucaacgacuaugaagaacugaaacaccuauugagcagaauaaaccauuuugagaaaauucagaucauucccaaagauucuuggucagaucaugaagccucaggagugagcucagcaugcccauaccaaggaagauccuccuuuuuuagaaauguuguauggcuuaccaaaaagaacgaugcauacccaacaauaaagaaaaguuacaauaauacuaaccaagaagaucuuuugguacuaugggggauucaccauccaaaugaugcugcagagcagacaaggcuuuaucaaaacccaacuaccuauaucuccguugggacaucaacacuaaaccagagauugguacccaaaauagcuacuagaucuaagguaaacgggcaaaguggaaggauggaguucuuuuggacaauuuuaaaaucgaaugaugcaauaaacuuugagaguaauggaaauuucauugcuccagaaaaugcauacaaaauugucaagaaaggagauucaacaauuaugaaaagugaguuagaauauaguaacugcaacaccaagugucagacuccaauaggggcgauaaacuccaguaugccauuccacaacauccacccucucaccaucggggaaugccccaaauauguaaaaucaaacagauuaguccuugcuacugggcucaggaauagcccucaaggagagaaaagaagaaaaaagagaggacuauucggagccauagcaggcuuuauagagggaggauggcagggaaugguagaugguugguauggguaccaccauagcaacgagcaggggaguggguacgcugcagacaaagaauccacucaaagggcuauagauggagucaccaauaaggucaauucgaucauugacaaaaugaacacucaguuugaggcuguuggaagggaauuuaauaacuuagaaaggagaauagaaaauuuaaacaagaagauggaagacggauuccuagaugucuggacuuauaaugcugaacuucugguucucauggaaaaugagagaacucuagacuuucaugacucaaaugucaagaaucuuuaugacaagguccgacuacagcuuagggauaaugcaaaggagcuugguaacgguuguuucgaguucuaucacagaugugauaaugaauguauggaaaguguaagaaacggaacguaugacuacccucaauauucagaagaagcaagauuaaaaagagaggaaauaaguggaguaaaauuggagucaauaggaacuuaccaaauacugucaauuuauucaacaguggcgagcucccuagcacuggcaaucaugguggcuggucuaucuuuauggaugugcuccaauggaucgcuacaaugcagaauuugcauuuaa

SEQ ID NO: 44974 - RNA, 1704 nt, Artificial Sequence
  derived and/or modified CDS sequence (wt) from hemagglutinin__InfluenzaA__AJY79343
auggagaaaauagugcuucuucuugcaauagucaguauuguuaaaagugaucagaucugcauugguuaccaugcaaacaacucgacagagcagguugacacaauaauggaaaagaaugucacuguuacacacgcccaagacauacuggaaaagacacacaacgggaaacucugcaaucuagauggagugaagccucucauuuugagagauuguaguguagcuggauggcuccucgggaacccaaugugcgaugaauuccucaaugugccggaauggucuuacauaguggagaaaaucaauccagccaaugaccucuguuauccagggaauuucaacgacuaugaagaacugaaacaccuauugagcagaauaaaccauuuugagaaaauucagaucauucccaaagauucuuggucagaucaugaagccucgggagugagcucagcaugcccauaccaaggaagauccuccuuuuuuagaaauguuguauggcuuaccaaaaagaacgaugcauacccaacaauaaagaaaaguuacaauaauacuaaccaagaagaucuuuugguacuaugggggauucaccauccaaaugaugcugcagagcagacaaggcuuuaucaaaacccaacuaccuauaucuccguugggacaucaacacuaaaccagagauugguacccaaaauagcuacuagaucuaagguaaacgggcaaaguggaaggauggaguucuuuuggacaauuuuaaaaucgaaugaugcaauaaacuuugagaguaauggaaauuucauugcuccagaaaaugcauacaaaauugucaagaaaggagauucaacaauuaugaaaagugaguuggaauauaguaacugcaacaccaagugucagacuccaauaggggcgauaaacuccaguaugccauuccacaacauccacccucucaccaucggggaaugccccaaauaugugaaaucaaacagauuaguccuugcuacugggcucaggaauagcccucaaggagagaaaagaagaaaaaagagaggacuauucggagccauagcaggcuuuauagagggaggauggcagggaaugguagaugguugguauggguaccaccauagcaacgagcaggggaguggguacgcugcagacaaagaauccacucaaagggcuauagauggagucaccaauaaggucaauucgaucauugacaaaaugaacacucaguuugaggcuguuggaagggaauuuaauaacuuagaaaggagaauagaaaauuuaaacaagaagauggaagacggauuccuagaugucuggacuuauaaugcugaacuucugguucucauggagaaugagagaacucuagacuuucaugacucaaaugucaagaaucuuuaugacaagguccgacuacagcuuagggauaaugcaaaggagcuugguaacgguuguuucgaguucuaucacagaugugaugaugaauguauggaaaguguaagaaacggaacguaugacuacccucaauauucagaagaagcaagauuaaaaagagaggaaauaaguggaguaaaauuggagucaauaggaacuuaccaaauacugucaauuuauucaacaguggcgagcucccuagcacuggcaaucaugguggcuggucuaucuuuauggaugugcuccaauggaucgcuacaaugcagaauuugcauuuaa

SEQ ID NO: 44975 - RNA, 1704 nt, Artificial Sequence
  derived and/or modified CDS sequence (wt) from hemagglutinin__InfluenzaA__AJY79345
auggagaaaauagugcuucuucuugcaauagucaguauugucaaaagugaucagauuugcauugguuaccaugcaaacaacucgacagagcagguugacacaauaauggaaaagaacgucacuguuacacgcgcccaagacauacuggaaaagacacacaacgggaaacucugcaaucuagauggagugaagccucucauuuuaagagauuguaguguagcuggauggcuccucgggaacccaaugugcgaugaauuccucaaugugccggaauggucuuacauaguggagaaaaucaauccagccaaugaccucuguuauccagggaauuucaacgacuaugaagaacugaaacaccuauugagcagaauaaaccauuuugagaaaauucagaucauucccaaagauucuuggucagaucaugaagccucaggagugagcucagcaugcccauaccaaggaagauccuccuuuuuuagaaauguuguauggcuuaccaaaaagaacgaugcauacccaacaauaaagaaaaguuacaauaauacuaaccaagaagaucuuuugguacuaugggggauucaccauccaaaugaugcugcagagcagacaaggcuuuaucaaaacccaacuaccuauaucuccguugggacaucaacacuaaaccagagauugguacccaaaauagcuacuagaucuaagguaaacgggcaaaguggaaggauggaguucuuuuggacaauuuuaaaaucgaaugaugcaauaaacuuugagaguaauggaaauuucauugcuccagaaaaugcauacaaaauugucaagaaaggagauucaacaauuaugaaaagugaguuggaauauaguaacugcaacaccaagugucagacuccaauaggggcgauaaacuccaguaugccauuccacaacauccacccucucaccaucggggaaugccccaaauaugugaaaucaaacagauuaguccuugcuacugggcucaggaauagcccucaaggagagaaaagaagaaaaaagagaggacuauucggagccauagcaggcuuuauagagggaggauggcagggaaugguagaugguugguauggguaccaccauagcaacgagcaggggaguggguacgcugcagacaaagaauccacucaaagggcuauagauggagucaccaauaaggucaauucgaucauugacaaaaugaacacucaguuugaggcuguuggaagggaauuuaauaacuuagaaaggagaauagaaaauuuaaacaagaagauggaagacggauuccuagaugucuggacuuauaaugcugaacuucugguucucauggaaaaugagagaacucuagacuuucaugacucaaaugucaagaaucuuuaugacaagguccgacuacagcuuagggauaaugcaaaggagcuugguaacgguuguuucgaguucuaucacagaugugauaaugaauguauggaaaguguaagaaacggaacguaugacuauccucaauauucagaagaagcaagauuaaaaagagaggaaauaaguggaguaaaauuggagucaauaggaacuuaccaaauacugucaauuuauucaacaguggcgagcucccuagcacuggcaaucaugguggcuggucuaucuuuauggaugugcuccaauggaucgcuacaaugcagaauuugcauuuaa

SEQ ID NO: 44976 - RNA, 1701 nt, Artificial Sequence
  derived and/or modified CDS sequence (wt) from hemagglutinin__InfluenzaA__AKA54643
augaagacuaucauugcuuugagcuacauucuaugucugguuuucgcucaaaaaauuccuggaaaugacaauagcacggcaacgcugugccuugggcaccaugcaguaccaaacggaacgauagugaaaacaaucacgaaugaccgaauugaaguuacuaaugcuacugagcugguucagaauuccucaauaggugaaauaugcgacaguccucaucagauccuugauggagaaaacugcacacuaauagaugcucuauugggagacccucagugugauggcuuucaaaauaagaaaugggaccuuuuuguugaacgaagcaaagccuacagcaacuguuacccuuaugaugugccggauuaugccucccuuaggucacuaguugccucauccggcacacuggaguuuaacaaugaaagcuucaauuggacuggagucacucaaaacggaacaaguucugcuugcauaaggagaucuaguaguaguuucuuuaguagauuaaauugguugacccacuuaaacuacacauacccagcauugaacgugacuaugccaaacaaugaacaauuugacaaauuguacauuugggggguucaccacccggguacggacaaggaccaaaucuuccuguaugcucaaucaucaggaagaaucacaguaucuaccaaaagaagccaacaagcuguaaucccaaauaucggaucuagacccagaauaagggauaucccuagcagaauaagcaucuauuggacaauaguaaaaccgggagacauacuuuugauuaacagcacagggaaucuaauugcuccuagggguuacuucaaaauacgaagugggaaaagcucaauaaugagaucagaugcacccauugguaaaugcaagucugaaugcaucacuccaaauggaagcauucccaaugacaaaccauuccaaaauguaaacaggaucacauacggggccugucccagauauguuaagcauagcacucugaaauuggcaacaggaaugcgaaauguaccagagaaacaaacuagaggcauauuuggcgcaauagcggguuucauagaaaaugguugggagggaaugguggaugguugguacgguuucaggcaucaaaauucugagggaagaggacaagcagcagaucucaaaagcacucaagcagcaaucgaucaaaucaaugggaagcugaaucgauugaucgggaaaaccaacgagaaauuccaucagauugaaaaagaauucucagaaguagaaggaagaauucaggaccuugagaaauauguugaggacacuaaaauagaucucuggucauacaacgcggagcuucuuguugcccuggagaaccaacauacaauugaucuaacugacucagaaaugaacaaacuguuugaaaaaacaaagaagcaacugagggaaaaugcugaggauaugggaaaugguuguuucaaaauauaccacaaaugugacaaugccugcauaggaucaauaagaaauggaacuuaugaccacaauguguacagggaugaagcauuaaacaaccgguuccagaucaaaggaguugagcugaagucaggguacaaagauuggauccuauggauuuccuuugccauaucauguuuuuugcuuuguguugcuuuguugggguucaucaugugggccugccaaaagggcaacauuaggugcaacauuugcauuuga

SEQ ID NO: 44977 - RNA, 1701 nt, Artificial Sequence
  derived and/or modified CDS sequence (wt) from hemagglutinin__InfluenzaA__AKA54650
augaagacuaucauugcuuugagcuacauucuaugucugguuuucacucaaaaaauuccuggaaaugacaauagcacggcaacgcugugccuugggcaccaugcaguaccaaacggaacgauagugaaaacaaucacgaaugaccgaauugaaguuacuaaugcuacugagcugguucagaauuccucaauaggugaaauaugcgacaguccucaucagauccuugauggagaaaacugcacacuaauagaugcucuauugggagacccucagugugauggcuuucaaaauaagaaaugggaccuuuuuguugaacgaagcaaagccuacagcaacuguuacccuuaugaugugccggauuaugccucccuuaggucacuaguugccucauccggcacacuggaguuuaacaaugaaagcuucaauuggacuggagucacucaaaacggaacaaguucugcuugcauaaggagaucuaguaguaguuucuuuaguagauuaaauugguugacccacuuaaacuacaaauacccagcauugaacgugacuaugccaaacaaugaacaauuugacaaauuguacauuugggggguucaccacccggguacggacaaggaccaaaucuuccuguaugcucaaucaucaggaagaaucacaguaucuaccaaaagaagccaacaagcuguaaucccaaauaucggaucuagacccagaauaagggauaucccuagcagaauaagcaucuauuggacaauaguaaaaccgggagacauacuuuugauuaacagcacagggaaucuaauugcuccuagggguuacuucaaaauacgaagugggaaaagcucaauaaugagaucagaugcacccauuggcaaaugcaaaucugaaugcaucacuccaaauggaagcauucccaaugacaaaccauuccaaaauguaaacaggaucacauacggggccugucccagauauguuaagcauagcacucugaaauuggcaacaggaaugcgaaauguaccagagaaacaaacuagaggcauauuuggcgcaauagcggguuucauagaaaaugguugggagggaaugguggaugguugguacgguuucaggcaucaaaauucugagggaagaggacaagcagcagaucucaaaagcacucaagcagcaaucgaucaaaucaaugggaagcugaaucgauugaucgggaaaaccaacgagaaauuccaucagauugaaaaagaauucucagaaguagaaggaagaauucaggaccuugagaaauauguugaggacacuaaaauagaucucuggucauacaacgcggagcuucuuguugcccuggagaaccaacauacaauugaucuaacugacucagaaaugaacaaacuauuugaaaaaacaaagaagcaacugagggaaaaugcugaggauaugggcaaugguuguuucaaaauauaccacaaaugugacaaugccugcauaggaucaauaagaaauggaacuuaugaccacaauguguacagggaugaagcauuaaacaaccgguuccagaucaagggaguugagcugaagucaggguacaaagauuggauccuauggauuuccuuugccauaucauguuuuuugcuuuguguugcuuuguugggguucaucaugugggccugccaaaaaggcaacauuaggugcaacauuugcauuuga

SEQ ID NO: 44978 - RNA, 1701 nt, Artificial Sequence
  derived and/or modified CDS sequence (wt) from hemagglutinin__InfluenzaA__AKA54651
augaagacuaucauugcuuuuagcugcaucuuaugucagaucuccgcucaaaaacuccccggaagugacaacagcauggcaacgcugugccuggggcaucacgcaguaccaaacggaacguuagugaaaacaauaacagaugaccaaauugaagugacuaaugcuacugagcugguccagaguaccucaaaaggugaaauaugcaguaguccucaccaaauccuugauggaaaaaauuguacacugauagaugcucuauugggagacccucauugugaugacuuccaaaacaagaaaugggaccuuuuuguugaacgaagcacagcuuacagcaacuguuacccuuauuaugugccggauuaugccucccuuaggucacuaguugccucauccggcacccuggaauuuacucaagaaagcuucaauuggacugggguugcucaagacggagcaagcuauucuugcagaagggaaucugaaaacaguuucuuuaguagauugaauugguuauauaguuugaauuacaaauauccagcgcugaacguaacuaugccaaacaaugacaaauuugacaaauuguacauuugggggguacaccacccggguacggacaaggaccaaaccagucuauauauucaagcaucagggagaguuacagucuccaccaaauggagccaacaaacuguaaucccgaauaucgggucuagacccuggauaaggggugucuccagcauaauaagcaucuauuggacaauaguaaaaccgggagacauacuuuugauuaacagcacagggaaucuaauugccccucgggguuacuucaaaauacaaagugggaaaagcucaauaaugaggucagaugcacacauuggcaacugcaacucugaaugcauuaccccaaauggaagcauucccaacgacaaaccuuuucaaaauguaaacagaauaacauauggggccugucccagauauguuaagcaaaacacucugaaauuagcaacaggaaugcggaauguaccagagaaacaaacuagaggcauauucggcgcaaucgcagguuucauagaaaaugguugggaagggaugguggacgguugguaugguuucaggcaucaaaacucugaaggcacagggcaagcagcagaucuuaaaagcacucaagcggcaaucaaccaaaucaccgggaaacuaaauagaguaaucaagaagacgaaugaaaaauuccaucagaucgaaaaagaauucucagaaguagaagggagaauucaggaccuagagagauacguugaagacacuaaaauagaccucuggucuuacaacgcggagcuucuuguugcccuggagaaccaacauacaauugauuuaacugacucagaaaugaacaaacuguucgaaaggacaaggaagcaacugcgggaaaaugcugaggacaugggcaauggaugcuuuaaaauauaucacaaaugugacaaugccugcauaggaucaaucagaaauggaacuuaugaccaugauguauacagagacgaagcaguaaacaaucgguuccagaucaaagguguucagcugaaguuaggauacaaagauuggauccuauggauuuccuuugccauaucaugcuuuuugcuuugugcuguucugcuaggauucauuaugugggcaugccaaaaaggcaacauuaggugcaacauuugcauuuga

SEQ ID NO: 44979 - RNA, 1701 nt, Artificial Sequence
  derived and/or modified CDS sequence (wt) from hemagglutinin__InfluenzaA__AKA59351
augaaggcaauacuaguaauucugcuauauacauuugcagccgcaaaugcagacacaauauguauagguuaucaugcgaacaauucaacagacacuguggacacaguacuagaaaagaauguaacaguaacacacucuguugaccuucuagaagacaagcauaaugggagacuaugcaaacuaagagggguagcuccauuacauuuggguaaauguaacauugcuggcuggauccugggaaauccagagugugaaucacucuccacagcaagcucaugguccuacauuguggaaacauccaguucagacaauggaacguguuacccaggagauuucaucgauuaugaggagcuaagagagcaauugagcucagugucaucauuugaaagguuugagauauuccccaagacaaguucauggccuaaucaugaaucgaacaaaggugugacggcagcauguccucaagcuggagcaaaaaguuucuacaaaaauuuaauauggcuaguuaaaaaagaaaauucauacccaaagcucagcaaauccuacauuaaugauaaagggaaagaaguccucgugcuguggggcauucaccauccaucuacuagugcugaccaacaaagucucuaucagaaugcagaugcauauguuuuugugggaacaucaagauacagcaagaaguucaagccggaaauagcaauaagacccaaagugagggaucaagaaggaagaaugaacuauuacuggacacuaguagagccgggagacaaaauaacauucgaagcaacuggaaaucuagugguaccgagauaugcauucgcaauggaaagaaaugcuggaucugguaucaucauuucagauacaccaguccacgauugcaauacaacuugucagacacccaagggugcuauaaacaccagccuaccauuucagaauauacauccgaucacaauugggaaauguccaaaauauguaaaaagcacaaaauugagacuggccacaggauugaggaaugucccgucuauucagucuagaggccuauuuggggccauugccggcuucauugaagggggguggacagggaugguagauggaugguacgguuaucaccaucaaaaugagcaggggucaggauaugcagccgaccugaagagcacacagaaugccauugacgagauuacuaacaagguaaauucuguuauugaaaagaugaauacacaguucacagcaguagguaaagaauucaaccaccuggaaaaaagaauagagaauuuaaauaaaaaaguugaugaugguuuccuggacauuuggacuuacaaugccgaacuguugguucuauuggaaaaugaaagaacuuuggacuaccacgauucaaaugugaagaacuuauaugaaaagguaagaagccaguuaaaaaacaaugccaaagaaauuggaaacggcugcuuugaauuuuaccacaaaugcgauaacacgugcauggaaagugucaagaaugggacuuaugacuacccaaaauacucagaggaagcaaaauuaaacagagaagaaauagaugggguaaagcuggaaucaacaaggauuuaccagauuuuggcgaucuauucaacugucgccaguucauugguacugguagucucccugggggcaaucaguuucuggaugugcucuaaugggucucuacaguguagaauauguauuuaa

SEQ ID NO: 44980 - RNA, 1701 nt, Artificial Sequence
  derived and/or modified CDS sequence (wt) from hemagglutinin__InfluenzaA__AKA59353
augaaggcaauacuaguaguucugcuauauacauuugcaaccgcaaaugcagacacauuauguauagguuaucaugcgaacaauucaacagacacuguagacacaguacuagaaaagaauguaacaguaacacacucuguuaaucuucuagaagacaagcauaacgggaaacuaugcaaacuaagagggguagccccauugcauuugggugaauguaacauugcuggcuggauccugggaaauccagagugugaaucacucucaacagcaagcucaugguccuacauuguggaaacaccuaguucaaacaauggaacguguuacccaggagauuucaucgauuaugaggagcuaagagagcaauugagcucagugucaucauuugaaagguuugagauauuccccaauacaaguucauggcccaaucaugacucgagcaaagguguaacggcagcauguccucaugcuggagcaaaaagcuucuacaaaaauuuaauauggcuaguuaaaaaaggaaauucauacccaaagcucagcaaauccuacauuaaugauaaagggaaagaaguccucgugcuauggggcauucaccauccuucuacuagugcugaccaacaaaaacucuaucagaaugaagaugcauauguuuuuguggggacaucaagauacagcaagaaauucaagccggaaauagcaauaagacccaaagugagggaucaagaagggagaaugaacuauuacuggacacuaguagagccgggagacaaaauaacauucgaagcaacuggaaauauagugguaccgagauaugcauucgcaauggaaagaaacgcugggucugguauuaucauuucagauacaccaguccacaauugcaauacaacuugucagacacccaagggugcuauaaacaccagccucccauuccagaauguacauccgaucacaauuggaaaauguccaaaauauguaaaaagcacaaaguugagacuggccacaggauugaggaaugucccgucuauucaaucuagaggccuauuuggggccauugccgguuucauugaagggggauggacagggaugguagauggaugguacgguuaucaccaucaaaaugagcaggggucaggauuugcagccgaccugaagagcacacagaaugccauugacgggauuacuaacaaaguaaauucuguuauugaaaagaugaauacacaguucacagcaguagguaaagaguucaaccaccuggaaaaaagaauagagaauuuaaauagaaagauugaugaugguuuccuagacauuuggacuuacaaugccgaacuguugauucuauuggaaaaugaaagaacuuuggacuaccacgauucaaaugugaggaacuuauaugaaaagguaagaagccaguuaaaaaacaaugccaaggaaauuggaaacggcugcuuugaauuuuaccacaaaugcgauaacacgugcauggaaagugucaaaaaugggacuuaugacuacccaaaauacucagaggaagcaaaauuaaacagagaagaaauagauggggugaagcuggaaucaacaaggauuuaccagauuuuggcgaucuauucaacugucgccaguucauugguacugauagucucccugggggcaaucaguuucuggaugugcucuaaugggucgcuacaguguagaauauguauuuaa

SEQ ID NO: 44981 - RNA, 1701 nt, Artificial Sequence
  derived and/or modified CDS sequence (wt) from hemagglutinin__InfluenzaA__AKA59355
augaaggcaauacuaguaguucugcuauauacauuugcaaccgcaaaugcagacacauuauguauaggguaucaugcgaacaauucaacagacacuguagacacaguacuagaaaaaaauguaacaguaacacacucuguuaaccuucuagaagacaagcauaacgggaaacuaugcaaacuaagagggguagccccauugcauuuggguaaauguaacauugcuggcuggauccugggaaauccagagugugaaucacucuccacagcaagcucaugguccuacauuguggaaacgucuaguucagacaauggaacguguuacccaggagauuucaucgauuaugaggagcuaagagagcaauugagcucaguaucaucauuugaaagguuugagauauuccccaagacaaguucauggcccaaucaugauucgaacaaaggaguaacggcagcauguccucaugcuggagcaagaagcuucuacaaaaauuuaauauggcuaguuaaaaaaggaaauucauacccaaagcucaaccaauccuacauuaaugauaaagggaaagaaguccucgugcuauggggcauucaccauccaccuacuagugcugaccaacaaagucucuaucagaaugcagaugcauauguuuuuguggggacaucaagauacagcaagaaguucaagccagaaauagcaauaagacccaaagugagggaucaagaagggagaaugaacuauuacuggacacuaguagagccgggagacaaaauaacauucgaagcaacuggaaaucuagugguaccgagauaugcauucgcaauggaaagaaaugcuggaucugguauuaucauuucagauacaccaguccacgauuguaauacaacuugucagacacccaagggugcuauaaacacaagccucccauuucagaauauacauccgaucacaauuggaaaauguccaaaguauguaaaaaguacaaaauugagacuggccacaggauugaggaaugucccgucuauucaaucuagaggccuauuuggggccaucgccgguuucauugaaggaggguggacaggaaugguggauggaugguacgguuaucaccaucaaaaugagcaagggucaggauaugcagccgaccugaagagcacacagaaugccauugacgagauuacuaacaaaguaaauuugguuauugaaaagaugaauacacaguucacagcagucgguaaagaguucagccaccuggaaaaaagaauagagaauuuaaauaaaaaaguugaugaugguuuccuggacauuuggacuuacaaugccgaacuguugguucuauuggaaaaugaaagaacuuuggacuaccacgauucaaauguaaagaacuuauaugaaaagauaagaagccaguuaaaaaacaaugccaaggaaauuggaaacggcugcuuugaauuuuaccacaagugcgauaacacgugcauggaaagugucaaaaaugggacuuaugauuacccaaaauacucagaggaagcaaaauuaaacagagaagaaauagaugggguaaagcuggaaucaacaaggguuuaccagauuuuggcgaucuauucaacugucgccaguucauugguacugguagucucccugggggcaaucaguuucuggaugugcucuaaugggucucuacaguguagaauauguauuuaa

SEQ ID NO: 44982 - RNA, 1701 nt, Artificial Sequence
  derived and/or modified CDS sequence (wt) from hemagglutinin__InfluenzaA__AKE37137
augaaggcaagacuaguaguucugcuauauacauuugcaaccgcaaaugcagacacauuauguauagguuaucaugcgaacaauucaacagacacuguagacacaguacuagaaaagaauguaacaguaacacacucuguuaaccuucuagaagacaagcauaacgggaaacuaugcaaacuaagagggguagccccauugcauuuggguaaauguaacauagcuggcuggauccugggaaauccagagugugaaucacucuccacagcaagcucaugguccuacauuguggaaacaucuaguucagacaauggaacguguuacccaggagauuucaucgauuaugaggagcuaagagagcaauugagcucagugucaucauuugaaagguuugagauauuccccaagacaaguucauggcccaaucaugacccgaacaaagguguaacggcagcauguccucaugcuggagcaaaaagcuucuacaaaaauuuaauauggcuaguuaaaaaaggaaauucauacccaaagcucagcacauccuacauuaaugauaaagggaaagaaguccuugugcuauggggcauucaccauccaucuacuagugcugaccaacaaagucucuaucagaaugcagaugcauaugcuuuuguggggacaucaagauacagcaagaaguucaagccggaaauagcaauaagacccaaagugagggaucgagaagggagaaugaacuauuacuggacacuaguagagccgggagacaaaauaacauucgaagcaacuggaaaucuagugguaccgagauaugcauucgcaauggaaagaaaugcuggaucugguauuaucauuucagauacaucaguccacgauugcaauacaacuugucagacacccaagggugcuauaaacaccagccucccauuucagaauguacauccgaucacaauuggaaaauguccaaaauauguaaaaagcacaaaauugagacuggccacaggauugaggaaugucccgucuauucaaucucgaggccuauuuggggccauugccgguuucauugaagggggguggacagggaugguagauggaugguacgguuaucaucaucaaaaugagcaggggucaggauaugcagccgaccugaagagcacacagaaugccuuugacgagauuacuaacaaaguaaauucuguuauugaaaagaugaauacacaguucacagcaguagguaaagaguucaaccaccuggaaaaaagaauagagaauuuaaauaaaaaaguugaugaugguuuccuggacauuuggacuuacaaugccgaacuguugguucuauuggaaaaugaaagaacuuuggacuaccacgauucaaaugugaagaacuuauaugaaaagguaagaagccaguuaaaaaacaaugccaaggaaauuggaaacggcugcuuugaauuuuaccacaaaugcgauaacacgugcauggaaagugucaaaaaugggacuuaugacuacccaaaguacucagaggaagcaaaauuaaacagagaagaaauagaugggguaaagcuggaaucaacaaggauuuaccagauuuuggcgaucuauucaacugucgccaguucauugguacugguagucucccugggggcaaucaguuucuggaugugcucuaaugggucucuacaguguagaauauguauuuaa

SEQ ID NO: 44983 - RNA, 1701 nt, Artificial Sequence
  derived and/or modified CDS sequence (wt) from hemagglutinin__InfluenzaA__AKS48035
auggagaaaauggugcuucuucuugcagugguuagccuuguuaaaagugaucagauuugcauugguuaccaugcaaacaacucgacagagcagguugacacgauaauggaaaagaacgucacuguuacacaugcccaagacauacuggaaaagacacacaacgggagacucugcgaucugaauggagugaaaccucugauuuuaaaggauuguaguguagcuggauggcuccuuggaaacccaaugugugacgaguucaucagagugccggaauggucuuacauaguggagagggcuaacccagccaaugaccucuguuauccagggaaccucaaugacuaugaggaacugaaacaccuauugagcagaauaaaucauuuugagaagacucugaucauccccaagaguucuuggcccaaucauacaucaucaggggugagcgcagcauguccauaccagggaaugcccuccuuuuucagaaaugugguauggcuuaccaaaaagaacgaugcauacccaacaauaaagaugagcuacaauaauaccuauagggaagaucuuuugauacugugggggauucaucauuccaacaaugcagcagaacagacaaaucucuauaaaaacccaaccaccuauguuuccguugggacaucaacauuaaaccagagauuggagccaaaaauagcuacuagaucccaaguaaacgggcaacguggaagaauggauuucuucuggaccauuuuaaaaccgaaugaugcaauccacuucgagaguaauggaaauuuuauugcuccagaauaugcauacaaaauugucaagaaaggggacucaacaauuaugaaaagugaaauggaauaugggcacugcaacaccaaaugucaaacuccaauaggggcgauaaacucuaguaugccauuccacaauauacacccucucacuaucggggagugccccaaauacgugaaaucgaacaaauuaguccuugcgacugggcucagaaauaguccucuaagagaaagaagaagaaaaagaggacuauuuggagcuauagcaggguuuauagagggaggauggcaaggaaugguagaugguugguauggguaccaccauagcaaugaacaggggaguggguacgcugcagacagagaauccacccaaaaggcaauagauggaguuaccaauaaggucaacucgauaauagacaaaaugaacacucaauuugaggccguuggaagagaauuuaauaacuuagaacggagaauagagaauuuaaauaagaaaauggaagacggauucuuagaugucuggacuuauaaugcugaacuuuuaguucucauggaaaaugagagaacucuagauuuccaugauucaaaugucaagaaccuuuaugacaagguccgacuacagcuuagggauaaugcaaaggagcuggguaaugguuguuucgaguucuaucacaaaugugauaaugaauguauggaaaguguaagaaaugggacguaugacuacccccaguauucagaagaagcaagauuaaaaagggaagaaauaagcggagugaaauuggaaucaauaggaacuuaccaaauacugucaauuuauucaacaguggcgaguucccuagcacuggcaaucauuguggcuggucuaucuuuauggaugugcuccaaugggucguuacaaugcagaauuugcauuuaa

SEQ ID NO: 44984 - RNA, 1701 nt, Artificial Sequence
  derived and/or modified CDS sequence (wt) from hemagglutinin__InfluenzaA__ALA08472
augaagacuaucauugcuuugagcuacauucuaugucugguuuucgcucaaaaaauuccuggaaaugacaauagcacggcaacgcugugccuugggcaccaugcaguaccaaacggaacgauagugaaaacaaucacaaaugaccgaauugaaguuacuaaugcuacugagcugguucagaauuccucaauaggugaaauaugcgacaguccucaucagauccuugauggagaaaacugcacacuaauagaugcucuauugggagacccucagugugauggcuuucaaaauaagaaaugggaccuuuuuguugaacgaagcaaagccuacagcaacuguuacccuuaugaugugccggauuaugccucccuuaggucacuaguugccucauccggcacacuggaguuuaacaaugaaagcuucaauuggacuggagucacucaaaacggaacaaguucugcuugcauaaggagaucuaguaguaguuucuuuaguagauuaaauugguugacccacuuaaacuacacauacccagcauugaacgugacuaugccaaacaaugaacaauuugacaaauuguacguuugggggguucaccacccggguacggacaaggaccaaaucuuccuguaugcucaaucaucaggaagaaucacaguaucuaccaaaagaagccaacaagcuguaaucccaaauaucggaucuagacccagaauaagggauaucccuagcagaauaagcaucuauuggacaauaguaaaaccgggagacauacuuuugauuaacagcacagggaaucuaauugcuccuagggguuacuucaaaauacgaagugggaaaagcucaauaaugagaucagaugcacccauuggcaaaugcaagucugaaugcaucacuccaaauggaagcauucccaaugacaaaccauuccaaaauguaaacaggaucacauacggggccugucccagauauguuaagcauagcacucugaaauuggcaacaggaaugcgaaauguaccagagaaacaaacuagaggcauauuuggcgcaauagcggguuucauagaaaaugguugggagggaaugguggaugguugguacgguuucaggcaucaaaauucugagggaagaggacaagcagcagaucucaaaagcacucaagcagcaaucgaucaaaucaauggaaagcugaaucgauugaucgggaaaaccaacgagaaauuccaucagauugaaaaagaauucucagaaguagaaggaagaauucaggaccuugagaaauauguugaggacacuaaaauagaucucuggucauacaacgcggagcuucuuguugcccuggagaaccaacauacaauugaucuaacugacucagaaaugaacaaacuguuugaaaaaacaaagaagcaacugagggaaaaugcugaggauaugggaaaugguuguuucaaaauauaccacaaaugugacaaugccugcauaggaucaauaagaaauggaacuuaugaccacaauguguacagggaugaagcauuaaacaaccgguuccagaucaagggaguugagcugaagucaggguacaaagauuggauccuauggauuuccuuugccauaucauguuuuuugcuuuguguugcuuuguugggguucaucaugugggccugccaaaagggcaacauuaggugcaacauuugcauuuga

SEQ ID NO: 44985 - RNA, 1701 nt, Artificial Sequence
  derived and/or modified CDS sequence (wt) from hemagglutinin__InfluenzaA__ALA08475
augaagacuaucauugcuuugagcuacauucuaugucugguuuucgcucaaaaaauuccuggaaaugacaauagcacggcaacgcugugccuugggcaccaugcaguaccaaacggaacgauagugaaaacaaucacaaaugaccgaauugaaguuacuaaugcuacugagcugguucagaauuccucaauaggugaaauaugcgacaguccucaucagauccuugauggagaaaacugcacacuaauagaugcucuauugggagacccucagugugauggcuuucaaaauaagaaaugggaccuuuuuguugaacgaagcaaagccuacagcaacuguuacccuuaugaugugccggauuaugccucccuuaggucacuaguugccucauccggcacacuggaguuuaacaaugaaagcuucaauuggacuggagucacucaaaacggaacaaguucugcuugcauaaggagaucuaguaguaguuucuuuaguagauuaaauugguugacccacuuaaacuacacauacccagcauugaacgugacuaugccaaacaaugagcaauuugacaaauuguacauuugggggguucaccacccggguacggacaaggaccaaaucuuccuguaugcucaaucaucaggaagaauaacaguaucuaccaaaagaagccaacaagcuguaaucccaaauaucggaucuagacccagaauaagggauaucccuagcagaauaagcaucuauuggacaauaguaaaaccgggagacauacuuuugauuaacagcacagggaaucuaauugcuccuagggguuacuucaaaauacgaagugggaaaagcucaauaaugagaucagaugcacccauuggcaaaugcaagucugagugcaucacuccaaauggaagcauucccaaugacaaaccauuccaaaauguaaacaggaucacauacggggccugucccagauauguuaagcauagcacucugaaauuggcaacaggaaugcgaaauguaccagagaaacaaacuagaggcauauuuggcgcaauagcggguuucauagaaaaugguugggagggaaugguggaugguugguacgguuucaggcaucaaaauucugagggaagaggacaagcagcagaucucaaaagcacucaagcagcaaucgaucaaaucaaugggaagcugaaucgauugaucgggaaaaccaacgagaaauuccaucagauugaaaaagaauucucagaaguagaaggaagaauucaggaccuugagaaauauguugaggacacuaaaauagaucucuggucauacaacgcggagcuucuuguugcccuggagaaccaacauacaauugaucuaacugacucagaaaugaacaaauuguuugaaaaaacaaagaagcaacugagggaaaaugcugaggauaugggaaaugguuguuucaaaauauaccacaaaugugacaaugccugcauaggaucaauaagaaauggaacuuaugaccacaauguguacagggaugaagcauuaaacaaccgguuccagaucaagggaguugagcugaagucaggguacaaagauuggauccuauggauuuccuuugccauaucauguuuuuugcuuuguguugcuuuguugggguucaucaugugggccugccaaaagggcaacauuaggugcaacauuugcauuuga

SEQ ID NO: 44986 - RNA, 1701 nt, Artificial Sequence
  derived and/or modified CDS sequence (wt) from hemagglutinin__InfluenzaA__ALA08478
augaagacuaucauugcuuugagcuacauucuaugucugguuuucgcucaaaaacuuccuggaaaugacaauagcacggcaacgcugugccuugggcaccaugcaguaccaaacggaacgauagugaaaacaaucacgaaugaccgaauugaagucacuaaugcuacugagcugguucagaauuccucaauaggugaaauaugcgacaguccucaucagauccuugauggaaaaaacugcacucuaauagaugcucuauugggagacccucagugugauggcuuucaaaauaagagaugggaccuuuuuguugaacgaagcaaagccuacagcaacuguuacccuuaugaugugccggauuaugccucccuuaggucacuaguugccucauccggcacacuggaguuuaacgaugaaagcuucaauugggcuggagucacucaaaacggaacaaguucugcuugcauaaggggaucuaauaguaguuucuuuaguagauugaauugguugacccacucaaacuucaaauacccagcauugaacgugacuaugccaaacaaugaacaauuugacaaauuguacauuugggggguucaccacccggguacagacaaggaccaaaucuuccuguaugcucaaucaucaggaagaaucacaguaucuaccaaaagaagccaacaagcuguaaucccgaauaucggaucuagacccagaauaaggaauaucccuagcagaauaagcaucuauuggacaauaguaaaaccgggagacauacuuuugauuaacagcacagggaaucuaauugcuccuagggguuacuucaaaauacaaagugggaaaagcucaauaaugagaucagaugcacccauuggcaaaugcaagucugaaugcaucacuccaaauggaagcauucccaaugacaaaccauuccaaaauguaaacaggaucacauacggggccugucccagauauguuaagcaaagcacucugaaauuggcaacaggaaugcgaaauguaccagagaaacaaacuagaggcauauuuggcgcaauagcggguuucauagaaaaugguugggagggaaugaaggaugguugguacgguuucaggcaucaaaauucugagggaagaggacaagcagcagaucucaaaagcacucaagcggcaaucgaucaaaucaaugggaagcugaaucgauugaucgggaaaaccaacgagaaauuccaucagauugaaaaagaauucucagaaguagaagggagaauucaggaccuugagaaauauguugaggacacaaaaauagaucucuggucauacaacgcggagcuucuuguugcccuggagaaccaacauacaauugaucuaacugauucagaaaugaacaaacuguuugaaaaaacaaagaagcaacugagggaaaaugcugaggauaugggcaaugguuguuucaaaauauaccacaaaugugacaaugccugcauaggaucaaucagaaauggaacuuaugaccacgauguauacagggaugaagcuuuaaacaaccgguuccagaucaagggaguugagcugaagucaggguacaaagauuggauccuauggauuuccuuugccauaucauguuuuuugcuuuguguugcuuuguugggguucaucaugugggccugccaaaagggcaacauuaggugcaacauuugcauuuga

SEQ ID NO: 44987 - RNA, 1701 nt, Artificial Sequence
  derived and/or modified CDS sequence (wt) from hemagglutinin__InfluenzaA__ALA08479
augaagacuaucauugcuuugagcuacauucuaugucugguuuucgcucaaaaacuuccuggaaaugacaauagcacggcaacgcugugccuugggcaccaugcaguaccaaauggaacgauagugaaaacaaucacgaaugaccgaauugaaguuacuaaugcuacugagcugguucagaauuccucaauaggugaaauaugcgacaguccucaucagauccuugauggagaaaacugcacacuaauagaugcucuauugggagacccucagugugauggcuuucaaaauaagaaaugggaccuuuuuguugaacggagcaaagccuacagcaacuguuacccuuaugaugugccggauuaugccucccuuaggucacuaguugccucauccggcacacuggaguuuaacaaugaaagcuucaauugggcuggagucacccaaaacggaacaaguucugcuugcauaaggggaucuaauaguaguuucuuuaguagauuaaauugguugacccacuuaaacuucaaauacccagcauugaacgugacuaugccaaacaaugaacaauuugacaaauuguacauuuggggaguucaccacccggguacggacaaggaccaaaucuuccuguaugcucaaucgucaggaagaaucacaguaucuaccaaaagaagccaacaagcuguaaucccgaauaucggaucuagacccagaauaaggaauaucccuagcagaauaagcaucuauuggacaauaguaaaaccgggagacauacuuuugauuaacagcacagggaaccuaauugcuccuagggguuacuucaaaauacgaagugggaaaagcucaauaaugagaucagaugcacccauuggcaaaugcaagucagaaugcaucacuccaaauggaagcauucccaaugacaaaccauuccaaaauguaaacaggaucacauacggggccugucccagauauguuaagcaaagcacucugaaauuggcaacaggaaugcgaaauguaccagagaaacaaacuagaggcauauuuggcgcaauagcggguuucauagaaaaugguugggagggaaugguggaugguugguacgguuucaggcaucaaaauucugagggaagaggacaagcagcagaucucaaaagcacucaagcagcaaucgaucaaaucaaugggaagcugaaucgauugaucgggaaaaccaacgagaaauuccaucagauugaaaaagaauucucagaaguagaagggagaauucaggaccuugagaaauauguugaggacacaaaaauagaucucuggucauacaacgcggagcuucuuguugcccuggagaaccaacauacaauugaucuaacugacucagaaaugaacaaacuguuugaaaaaacaaagaaacaacugagggaaaaugcugaggauaugggcaaugguuguuucaaaauauaccacaaaugugacaaugccugcauaggaucaaucagaaauggaacuuaugaccacgauguguacagggaugaagcauuaaacaaccgguuccagaucaagggaguugagcugaagucaggguacaaagauuggauccuauggauuuccuuugccauaucauguuuuuugcuuuguguugcuuuguugggguucaucaugugggccugccaaaagggcaacauuaggugcaacauuugcauuuga

SEQ ID NO: 44988 - RNA, 1701 nt, Artificial Sequence
  derived and/or modified CDS sequence (wt) from hemagglutinin__InfluenzaA__ALA08481
augaagacuaucauugcuuugagcuacauucuaugucugguuuucgcucaaaaacuuccuggaaaugacaauagcacggcaacgcugugccuugggcaccaugcaguaccaaacggaacgauagugaaaacaaucacgaaugaccgaauugaaguuacuaaugcuacugagcugguucagaauuccucaauaggugaaauaugcgacaguccucaucagauccuugauggagaaaacugcacacuaauagaugcucuauugggagacccucagugugauggcuuucaaaauaagaaaugggaccuuuuuguugaacgaagcaaagcccacagcaacuguuacccuuaugaugugccggauuaugccucccuuaggucacuaguugccucauccggcacacuggaguuuaacaaugaaagcuucaauugggcuggagucacucaaaacggaacaaguucuucuugcauaaggggaucuaauaguaguuucuuuaguagauuaaauugguugacccacuuaaacuccaaauacccagcauuaaacgugacuaugccaaacaaugaacaauuugacaaauuguacauuugggggguucaccacccggguacggacaaggaccaaaucuuccuguaugcacaaucaucaggaagaaucacaguaucuaccaaaagaagccaacaagcuguaaucccgaauaucggaucuagacccagaauaagggauaucccuagcagaauaagcaucuauuggacaauaguaaaaccgggagacauacuuuugauuaacagcacagggaaucuaauugcuccuagggguuacuucaaaauacgaagugggaaaagcucaauaaugagaucagaugcacccauuggcaaaugcaagucugaaugcaucacuccaaauggaagcauucccaaugacaaaccauuccaaaauguaaacaggaucacauacggggccugucccagguauguuaagcaaagcacucugaaauuggcaacaggaaugcgaaauguaccagagagacaaacuagaggcauauuuggcgcaauagcggguuucauagaaaaugguugggagggaaugguggaugguugguacggcuucaggcaucaaaauucugagggaagaggacaagcagcagaucucaaaagcacucaagcagcaaucgaucaaaucaaugggaagcugaaucgauugaucgggaaaaccaacgagaaauuccaucagauugaaaaagaauucucagaaguagaagggagaauucaggaccuugagaaauauguugaggacacaaaaauagaucucuggucauacaacgcggagcuucuuguugcccuggagaaccaacauacaauugaucuaacugacucagaaaugaacaaacuguuugaaaaaacaaagaagcaacugagggaaaaugcugaggauauggguaaugguuguuucaaaauauaccacaaaugugacaaugccugcauagggucaaucagaaauggaacuuaugaccaugauguauacagggaugaagcauuaaacaaccgguuccagaucaagggaguugagcugaagucaggguacaaagauuggauccuauggauuuccuuugccauaucauguuuuuugcuuuguguugcuuuguugggguucaucaugugggccugccaaaagggcaacauuaggugcaacauuugcauuuga

SEQ ID NO: 44989 - RNA, 1701 nt, Artificial Sequence
  derived and/or modified CDS sequence (wt) from hemagglutinin__InfluenzaA__ALA08482
augaagacuaucauugcuuugagcuacauucuaugucugguuuucgcucaaaaacuuccuggaaaugacaauagcacggcaacgcugugccuugggcaccaugcaguaccaaacggaacgauagugaaaacaaucacgaaugaccgaauugaaguuacuaaugcuacugagcugguucagaauuccucaauaggugaaauaugcgacaguccucaucagauccuugauggagaaaacugcacacuaauagaugcucuauugggagacccucagugugauggcuuucaaaauaagaaaugggaccuuuuuguugaacgaagcaaagcccacagcaacuguuacccuuaugaugugccggauuaugccucccuuaggucacuaguugccucauccggcacacuggaguuuaacaaugaaagcuucaauugggcuggagucacucaaaacggaacaaguucuucuugcauaaggggaucuaauaguaguuucuuuaguagauuaaauugguugacccacuuaaacuccaaauacccagcauuaaacgugacuaugccaaacaaugaacaauuugacaaauuguacauuugggggguucaccacccggguacggacaaggaccaaaucuuccuguaugcacaaucaucaggaagaaucacaguaucuaccaaaagaagccaacaagcuguaaucccgaauaucggaucuagacccagaauaagggauaucccuagcagaauaagcaucuauuggacaauaguaaaaccgggagacauacuuuugauuaacagcacagggaaucuaauugcuccuagggguuacuucaaaauacgaagugggaaaagcucaauaaugagaucagaugcacccauuggcaaaugcaagucugaaugcaucacuccaaauggaagcauucccaaugacaaaccauuccaaaauguaaacaggaucacauacggggccugucccagguauguuaagcaaagcacucugaaauuggcaacaggaaugcgaaauguaccagagagacaaacuagaggcauauuuggcgcaauagcggguuucauagaaaaugguugggagggaaugguggaugguugguacggcuucaggcaucaaaauucugagggaagaggacaagcagcagaucucaaaagcacucaagcagcaaucgaucaaaucaaugggaagcugaaucgauugaucgggaaaaccaacgagaaauuccaucagauugaaaaagaauucucagaaguagaagggagaauucaggaccuugagaaauauguugaggacacaaaaauagaucucuggucauacaacgcggagcuucuuguugcccuggagaaccaacauacaauugaucuaacugacucagaaaugaacaaacuguuugaaaaaacaaagaagcaacugagggaaaaugcugaggauauggguaaugguuguuucaaaauauaccacaaaugugacaaugccugcauagggucaaucagaaauggaacuuaugaccacgauguauacagggaugaagcauuaaacaaccgguuccagaucaagggaguugagcugaagucaggguacaaagauuggauccuauggauuuccuuugccauaucauguuuuuugcuuuguguugcuuuguugggguucaucaugugggccugccaaaagggcaacauuaggugcaacauuugcauuuga

SEQ ID NO: 44990 - RNA, 1701 nt, Artificial Sequence
  derived and/or modified CDS sequence (wt) from hemagglutinin__InfluenzaA__ALA08483
augaagacuaucauuggcuugagcuacauucuaugucugguuuucgcucaaaaacuuccuggaaaugacaauagcacggcaacgcugugccuugggcaccaugcaguaccaaacggaacgauagugaaaacaaucacgaaugaccgaauugaaguuacuaaugcuacugagcugguucagaauuccucaauaggugaaauaugcgacaguccucaucagauccuugauggggaaaacugcacacuaauagaugcucuauugggagacccucagugugauggcuuucaaaauaagaaaugggaccuuuuuguugaacgaagcaaagccuacagcaacuguuacccuuaugaugugccggauuaugccucccuuaggucacuaguugccucauccggcacacuggaguuuaacaaugaaagcuucaauugggcuggagucacucaaaacggaacaaguucuucuugcauaagggggucuaauaguaguuucuuuaguagauuaaauugguugacccacuuaaacuccaaauacccagcauuaaacgugacuaugccaaacaaugaacaauuugacaaauuguacauuugggggguucaccacccggguacggacaaggaccaaaucuuccuguaugcacaaucaucagggagaaucacaguaucuaccaaaagaagccaacaagcuguaaucccgaauaucggauccagacccagaauaagggauaucccuagcagaauaagcaucuauuggacaauaguaaaaccgggagacauacuuuugauuaacagcacagggaaucuaauugcuccuagggguuacuucaaaauacgaagugggaaaagcucaauaaugagaucagaugcacccauuggcaaaugcaagucugaaugcaucacuccaaauggaagcauucccaaugacaaaccauuccaaaauguaaacaggaucacauacggggccugucccagauauguuaagcaaagcacucugaaauuggcaacaggaaugcgaaauguaccagagagacaaacuagaggcauauuuggcgcaauagcggguuucauagaaaaugguugggagggaaugguggaugguugguacggcuucaggcaucaaaauucugagggaagaggacaagcagcagaucucaaaagcacucaagcagcaaucgaucaaaucaaugggaagcugaaucgauugaucgggaaaaccaacgagaaauuccaucagauugaaaaagaauucucagaaguagaagggagaauucaggaccuugagaaauauguugaggacacaaaaauagaucucuggucauacaacgcggagcuucuuguugcccuggagaaccaacauacaauugaucuaacugacucagaaaugaacaaacuguuugaaaaaacaaagaagcaacugagggaaaaugcugaggauaugggcaaugguuguuucaaaauauaccacaaaugugacaaugccugcauaggaucaaucagaaauggaacuuaugaccacgauguauacagggaugaagcauuaaacaaccgguuccagaucaagggaguugagcugaagucaggguacaaagauuggauccuauggauuuccuuugccauaucauguuuuuugcuuuguguugcuuuguugggguucaucaugugggccugccaaaagggcaacauuaggugcaacauuugcauuuga

SEQ ID NO: 44991 - RNA, 1701 nt, Artificial Sequence
  derived and/or modified CDS sequence (wt) from hemagglutinin__InfluenzaA__ALA08484
augaagacuaucauugcuuugagcuacauucuaugucugguuuucgcucaaaaaauuccuggaaaugacaauagcacggcaacgcugugccuugggcaccaugcaguaccaaacggaacgauagugaaaacaauaacaaaugaccgaauugaaguuacuaaugcuacugagcugguucagaauuccucaauaggugaaauaugcgacaguccucaucagauccuugauggagaaaacugcacacuaauagaugcucuauugggagacccucagugugauggcuuucaaaauaagaaaugggaccuuuuuguugaacgaagcaaagccuacagcaacuguuacccuuaugaugugccggauuaugccucccuuaggucacuaguugccucauccggcacacuggaguuuaacaaugaaagcuucaauuggacuggagucacucaaaacggaacaaguucugcuugcauaaggagaucuaguaguaguuucuuuaguagauuaaauugguugacccacuuaaacuacacauacccagcauugaacgugacuaugccaaacaaugaacaauuugacaaauuguacauuugggggguucaccacccggguacggacaaggaccaaaucuuccuguaugcucaaucaucaggaagaaucacaauaucuaccaaaagaagccaacaagcuguaaucccaaauaucggaucuagacccagaauaagggauaucccuagcagaauaagcaucuauuggacaauaguaaaaccgggggacauacuuuugauuaacagcacagggaaucuaauugcuccuagggguuacuucaaaauacgaagugggaaaagcucaauaaugagaucagaugcacccauuggcaaaugcaagucugaaugcaucacuccaaauggaagcauucccaaugacaaaccauuccaaaauguaaacaggaucacauacggggccugucccagauauguuaagcauagcacucugaaauuggcaacaggaaugcgaaauguaccagagaaacaaacuagaggcauauuuggcgcaauagcggguuucauagaaaaugguugggagggaaugguggaugguugguacgguuucaggcaucaaaauucugagggaagaggacaagcagcagaucucaaaagcacucaagcagcaaucgaucaaaucaaugggaagcugaaucgauugaucgggaaaaccaacgagaaauuccaucagauugaaaaagaauucucagaaguagaaggaagaauucaggaccuugagaaauauguugaggacacuaaaauagaucucuggucauacaacgcggagcuucuuguugcccuggagaaccaacauacaauugaucuaacugacucagaaaugaacaaacuguuugaaaaaacaaagaagcaacugagggaaaaugcugaggauaugggaaaugguuguuucaaaauauaccacaaaugugacaaugccugcauaggaucaauaagaaauggaacuuaugaccacaauguguacagggaugaagcauuaaacaaccgguuccagaucaaaggaguugagcugaagucaggguacaaagauuggauccuauggauuuccuuugccauaucauguuuuuugcuuuguguugcuuuguugggguucaucaugugggccugccaaaagggcaacauuaggugcaacauuugcauuuga

SEQ ID NO: 44992 - RNA, 1701 nt, Artificial Sequence
  derived and/or modified CDS sequence (wt) from hemagglutinin__InfluenzaA__ALA08488
augaagacuauuauugcuuugagcuacauucuaugucugguuuucgcucaaaaaauuccuggaaauggcaauagcacggcaacgcugugccuugggcaccaugcaguaccaaacggaacgauagugaaaacaaucacgaaugaccgaauugaaguuacuaaugcuacugagcuaguucagaauuccucaauaggugaaauaugcgacaguccucaucagauccuugauggagaaaacugcacacuaauagaugcucuauugggagacccucagugugauggcuuucaaaauaagaaaugggaccuuuuuguugaacgaagcaaagccuacagcaacuguuacccuuaugaugugccggauuaugccucccuuaggucacuaguugccucauccggcacacuggaguuuaacaaugaaagcuucaacuggacuggagucacucaaaacggaacaaguucugcuugcauaaggagaucuaguaguaguuucuuuaguagauuaaauugguugacccacuuaaacuacacauacccagcauugaacguaacuaugccaaacaaugaacaauuugacaaauuguacauuugggggguucaccacccggguacggacaaggaccaaaucuuccuguaugcucaaucaucaggaagaaucacaguaucuaccaaaagaagccaacaagcuguaaucccaaauaucggaucuagacccagaauaagggauaucccuagcagaauaagcaucuauuggacaauaguaaaaccgggagacauacuuuugauuaacagcacagggaaucuaauugcuccuagggguuacuucaaaauacgaagugggaaaagcucaauaaugagaucagaugcacccauuggcaaaugcaagucugaaugcaucacuccaaauggaagcauucccaaugacaaaccauuccaaaauguaaacaggaucacauacggggccugucccagauauguuaagcauagcacucugaaauuggcaacaggaaugcgaaauguaccagagaaacaaacuagaggcauauuuggcgcaauagcggguuucauagaaaaugguugggagggaaugguggaugguugguacgguuucaggcaucaaaauucugagggaagaggacaagcagcagaucucaaaagcacucaagcagcaaucgaucaaaucaaugggaagcugaaucgauugaucgggaaaaccaacgagaaauuccaucagauugaaaaagaauucucagaaguagaaggaagaauucaggaccuugagaaauauguugaggacacuaaaauagaucucuggucauacaacgcggagcuucuuguugcccuggagaaccaacauacaauugaucuaacugacucggaaaugaacaaacuguuugaaaaaacaaaaaagcaacugagggaaaaugcugaagauaugggcaaugguuguuucaaaauauaccacaaaugugacaaugccugcauaggaucaauaagaaauggaacuuaugaccacaauguguacagggaugaagcauuaaacaaccgguuucagaucaagggaguugagcugaagucaggguacaaagauuggauccuauggauuuccuuugccauaucauguuuuuugcuuuguguugcuuuguugggguucaucaugugggccugccaaaagggcaacauuaggugcaacauuugcauuuga

SEQ ID NO: 44993 - RNA, 1701 nt, Artificial Sequence
  derived and/or modified CDS sequence (wt) from hemagglutinin__InfluenzaA__ALA08490
augaagacuaucauugcuuugagcuacauucuaugucugguuuucgcucaaaaaauuccuggaaaugacaauagcacggcaacgcugugccuugggcaccaugcaguaccaaacggaacgauagugaaaacaaucacaaaugaccgaauugaaguuacuaaugcuacugagcugguucagaauuccucaauaggugaaauaugcgacaguccucaucagauccuugauggagaaaacugcacacuaauagaugcucuauugggagacccucagugugauggcuuucaaaauaagaaaugggaccuuuuuguugaacgaagcaaagccuacagcaacuguuacccuuaugaugugccggauuaugccucccuuaggucacuaguugccucauccggcacacuggaguucaacaaugaaagcuucaauuggacuggagucacucaaaacggaacaaguucugcuugcauaaggagaucuaguaguaguuucuuuaguagauuaaauugguugacccacuuaaacuacacauacccagcauugaacgugacuaugccgaacaaugaacaauuugacaaauuguacauuugggggguucaccacccggguacggacaaggaccaaaucuuccuguaugcucaaucaucaggaagaaucacaguaucuaccaaaagaagccaacaagcuguaaucccaaauaucggaucuagacccagaauaagggauaucccuagcagaauaagcaucuauuggacaauaguaaaaccgggagacauacuuuugauuaacagcacagggaaucuaauugcuccuagggguuacuucaaaauacgaagugggaaaagcucaauaaugagaucagaugcacccauuggcaaaugcaagucugaaugcaucacuccaaauggaagcauucccaaugacaaaccauuccaaaauguaaacaggaucacauacggggccugucccagauauguuaagcauagcacucugaaauuggcaacaggaaugcgaaauguaccagagaaacaaacuagaggcauauuuggcgcaauagcggguuucauagaaaaugguugggagggaaugguggaugguugguacgguuucaggcaucaaaauucugagggaagaggacaagcagcagaucucaaaagcacucaagcagcaaucgaucaaaucaaugggaagcugaaucgauugaucgggaaaaccaacgagaaauuccaucagauugaaaaagaauucucagaaguagaaggaagaauucaggaccuugagaaauauguugaggacacuaaaauagaucucuggucauacaacgcggagcuucuuguugcccuggagaaccaacauacaauugaucuaacugacucagaaaugaacaaacuguuugaaaaaacaaagaagcaacugagggaaaaugcugaggauaugggaaaugguuguuucaaaauauaccacaaaugugacaaugccugcauaggaucaauaagaaacggaacuuaugaccacaauguguacagggaugaagcauuaaacaaccgguuccagaucaagggaauugagcugaagucaggguacaaagauuggauccuauggauuuccuuugccauaucauguuuuuugcuuuguguugcuuuguugggguucaucaugugggccugccaaaagggcaacauuaggugcaacauuugcauuuga

SEQ ID NO: 44994 - RNA, 1701 nt, Artificial Sequence
  derived and/or modified CDS sequence (wt) from hemagglutinin__InfluenzaA__ALA08491
augaagacuaucauugcuuugagcuacauucuaugucugguuuucgcucaaaaacuuccuggaaaugacaauagcacggcaacgcugugccuugggcaccaugcaguaccaaacggaacgauagugaaaacaaucacgaaugaccgaauugaaguuacuaaugcuacugagcugguucagaauuccucaauaggugaaauaugcgacaguccucaucagauccuugauggagaaaacugcacacuaauagaugcucuauugggagacccucagugugauggcuuucaaaauaagaaaugggaccuuuuuguugaacgaagcaaagccuacagcaacuguuacccuuaugaugugccggauuaugccucccuuaggucacuaguugccucauccggcacacuggaguuuaacaaugaaagcuucaauugggcuggagucacucaaaacggaacaaguucugcuugcauaaggggaucuaauaguaguuucuuuaguagauuaaauugguugacccacuuaaacuucaaauacccagcauugaacaugacuaugccaaacaaugaacaauuugacaaauuguacauuugggggguucaccacccggguacggacaaggaccaaaucuuccuguaugcucaaucaucaggaagaaucacaguaucuaccaaaagaagccaacaagcuguaaucccgaauaucggaucuagacccagaauaaggaauaucccuagcagaauaagcaucuauuggacaauaguaaaaccgggagacauacuuuugauuaacagcacagggaaucuaauugcuccuagggguuacuucaaaauacgaagugggaaaagcucaauaaugagaucagaugcacccauuggcaaaugcaagucugaaugcaucacuccaaauggaagcauucccaaugacaaaccauuccaaaauguaaacaggaucacauacggggccugccccagauauguuaagcaaagcacucugaaauuggcaacaggaaugcgaaauguaccagagaaacaaacuagaggcauauuuggcgcaauagcggguuucauagaaaaugguugggagggaaugaaggaugguugguacgguuucaggcaucaaaauucugagggaagaggacaagcagcagaucucaaaagcacucaagcagcaaucgaucaaaucaaugggaagcugaaucgauugaucgggaaaaccaacgaaaaauuccaucagauugaaaaagaauucucagaaguagaagggagaauucaggaccuugagaaauauguugaggacacaaaaauagaucucuggucauacaacgcggagcuucuuguugcccuggagaaccaacauacaauugaucuaacugacucagaaaugaacaaacuguuugaaaaaacaaagaagcaacugagggaaaaugcugaggauaugggcaaugguuguuucaaaauauaccacaaaugugacaaugccugcauaggaucaaucagaaauggaacuuaugaccacgauguauacagggaugaagcauuaaacaaccgguuccagaucaagggaguugagcugaagucaggguacaaagauuggauccuauggauuuccuuugccauaucauguuuuuugcuuuguguugcuuuguugggguucaucaugugggccugccaaaagggcaacauuaggugcaacauuugcauuuga

SEQ ID NO: 44995 - RNA, 1701 nt, Artificial Sequence
  derived and/or modified CDS sequence (wt) from hemagglutinin__InfluenzaA__ALA08492
augaagacuaucauugcuuugagcuacauucuaugucugguuuucgcucaaaaaauuccuggaaaugacaauagcacggcaacacugugccuugggcaccaugcaguaccaaacggaacgauagugaaaacaaucacaaaugaccgaauugaaguuacuaaugcuacugagcugguucagaauuccucaauaggugaaauaugcgacaguccucaucagauccuugauggagaaaacugcacacuaauagaugcucuauugggagacccucagugugauggcuuucaaaauaagaaaugggaccuuuuuguugaacgaagcaaagccuacagcaacuguuacccuuaugaugugccggauuaugccucccuuaggucacuaguugcaucauccggcacacuggaguucaacaaugaaagcuucaauuggacuggagucacucaaaacggaacaaguucugcuugcauaaggagaucuaguaguaguuucuuuaguagauuaaauugguugacccacuuaaacuacacauacccagcauugaacgugacuaugccaaacaaugaacaauuugacaaauuguacauuugggggguucaccacccggguacggacaaggaccaaaucuuccuguaugcucaaucaucaggaagaaucacaguaucuaccaaaagaagccaacaagcuguaaucccaaauaucggaucuagacccagaauaagggauaucccuagcagaauaagcaucuauuggacaauaguaaaaccgggagacauacuuuugauuaacagcacagggaaucuaauugcuccuagggguuacuucaaaauacgaagugggaaaagcucaauaaugagaucagaugcacccauuggcaaaugcaagucugaaugcaucacuccaaauggaagcauucccaaugacaaaccauuccaaaauguaaacaggaucacauacggggccugucccagauauguuaagcauagcacucugaaauuggcaacaggaaugcgaaauguaccagagaaacaaacuagaggcauauuuggcgcaauagcggguuucauagaaaaugguugggagggaaugguggaugguugguacgguuucaggcaucaaaauucugagggaagaggacaagcagcagaucucaaaagcacucaagcagcaaucgaucaaaucaaugggaagcugaaucgauugaucgggaaaaccaacgagaaauuccaucagauugaaaaagaauucucagaaguagaaggaagaauucaggaccuugagaaauauguugaggacacuaaaauagaucucuggucauacaacgcggagcuucuuguugcccuggagaaccaacauacaauugaucuaacugacucagaaaugaacaaacuguuugaaaaaacaaagaagcaacugagggaaaaugcugaggauaugggaaaugguuguuucaaaauauaccacaaaugugacaaugccugcauaggaucaauaagaaacggaacuuaugaccacaauguguacagggaugaagcauuaaacaaccgguuccagaucaagggaauugagcugaagucaggguacaaagauuggauccuauggauuuccuuugccauaucauguuuuuugcuuuguguugcuuuguugggguucaucaugugggccugccaaaagggcaacauuaggugcaacauuugcauuuga

SEQ ID NO: 44996 - RNA, 1701 nt, Artificial Sequence
  derived and/or modified CDS sequence (wt) from hemagglutinin__InfluenzaA__ALA08493
augaagaccaucauugcuuugagcuacauucuaugucugguuuucgcucaaaaaauuccuggaaaugacaauagcacggcaacgcugugccuugggcaccaugcaguaccaaacggaacgauagugaaaacaaucacaaaugaccgaauugaaguuacuaaugcuacugagcugguucagaauuccucaauaggugaaauaugcgacaguccucaucagauccuugauggagaaaacugcacacuaauagaugcucuauugggagacccucagugugauggcuuucaaaauaagaaaugggaccuuuuuguugaacgaagcaaagccuacagcaacuguuacccuuaugaugugccggauuaugccucccuuaggucacuaguugccucauccggcacacuggaguucaacaaugaaagcuucaauuggacuggagucacucaaaacggaacaaguucugcuugcauaaggagaucuaguaguaguuucuuuaguagauuaaauugguugacccacuuaaacuacacauacccagcauugaacgugacuaugccaaacaaugaacaauuugacaaauuguacauuugggggguucaccacccggguacggacaaggaccaaaucuuccuguaugcucaaucaucaggaagaaucacaguaucuaccaaaagaagccaacaagcuguaaucccaaauaucggaucuagacccagaauaagggauaucccuagcagaauaagcaucuauuggacaauaguaaaaccgggagacauacuuuugauuaacagcacagggaaucuaauugcuccuagggguuacuucaaaauacgaagugggaaaagcucaauaaugagaucagaugcacccauuggcaaaugcaggucugaaugcaucacuccaaauggaagcauucccaaugacaaaccauuccaaaauguaaacaggaucacauacggggccugucccagauauguuaagcauagcacucugaaauuggcaacaggaaugcgaaauguaccagagaaacaaacuagaggcauauuuggcgcaauagcggguuucauagaaaaugguugggagggaaugguggaugguugguacgguuucaggcaucaaaauucugagggaagaggacaagcagcagaucucaaaagcacucaagcagcaaucgaucaaaucaaugggaagcugaaucgauugaucgggaaaaccaacgagaaauuccaucagauugaaaaagaauucucagaaguagaaggaagaauucaggaccuugagaaauauguugaggacacuaaaauagaucucuggucauacaacgcggagcuucuuguugcccuggagaaccaacauacaauugaucuaacugacucagaaaugaacaaacuguuugaaaaaacaaagaagcaacugagggaaaaugcugaggauaugggaaaugguuguuucaaaauauaccacaaaugugacaaugccugcauaggaucaauaagaaacggaacuuaugaccacaauguguacagggaugaagcauuaaacaaccgguuccagaucaagggaauugagcugaagucaggguacaaagauuggauccuauggauuuccuuugccauaucauguuuuuugcuuuguguugcuuuguugggguucaucaugugggccugccaaaagggcaacauuaggugcaacauuugcauuuga

SEQ ID NO: 44997 - RNA, 1701 nt, Artificial Sequence
  derived and/or modified CDS sequence (wt) from hemagglutinin__InfluenzaA__ALA08494
augaagacuaucauugccuugagcuacauucuaugucugguuuucgcucaaaaaauuccuggaaaugauaauagcacggcaacgcugugccuugggcaccaugcaguaccaaacggaacgauagugaaaacaaucacaaaugaccgaauugaaguuacuaaugcuacugagcugguucagaauuccucaauaggugaaauaugcgacaguccucaucagauccuugauggagaaaacugcacacuaauagaugcucuauugggagacccucagugugauggcuuucaaaauaagaaaugggaccuuuuuguugaacgaagcaaagccuacagcaacuguuacccuuaugaugugccggauuaugccucccuuaggucacuaguugccucauccggcacacuggaguuuaacaaugaaagcuucaauuggacuggagucacucaaaacggaacaaguucugcuugcauaaggagaucuaguaguaguuucuuuaguagauuaaauugguugacccacuuaaacuacacauacccagcauugaacgugacuaugccaaacaaugaacaauuugacaaauuguacauuugggggguucaccacccggguacggacaaggaccaaaucuuccuguaugcucaaucaucaggaagaaucacaguaucuaccaaaggaagccaacaagcuguaaucccaaauaucggaucuagacccagaauaagggauaucccuagcagaauaagcaucuauuggacaauaguaaaaccgggagacauacuuuugauuaacagcacagggaaucuaauugcuccuagggguuacuucaaaauacgaagugggaaaagcucaauaaugagaucagaugcacccauuggcaaaugcaagucugaaugcaucacuccaaauggaagcauucccaaugacaaaccauuccaaaauguaaacaggaucacauacggggccugucccagauauguuaagcauagcacucugaaauuggcaacaggaaugcgaaauguaccagagaaacaaacuagaggcauauuuggcgcaauagcggguuucauagaaaaugguugggagggaaugguggaugguugguacgguuucaggcaucaaaauucugagggaagaggacaagcagcagaucucaaaagcacucaagcagcaaucgaucaaaucaaugggaagcugaaucgauugaucgggaaaaccaacgagaaauuccaucagauugaaaaagaauucucagaaguagaaggaagaauucaggaccuugagaaauauguugaggacacuaaaauagaucucuggucauacaacgcggagcuucuuguugcccuggagaaccaacauacaauugaucuaacugacucagaaaugaacaaacuguuugaaaaaacaaagaagcaacugagggaaaaugcugaggauaugggaaaugguuguuucaaaauauaccacaaaugugacaaugccugcauaggaucaauaagaaauggaacuuaugaccacaauguguacagggaugaagcauuaaacaaccgguuccagaucaagggaguugagcugaagucaggguacaaagauuggauccuauggauuuccuuugccauaucauguuuuuugcuuuguguugcuuuguugggguucaucaugugggccugccaaaagggcaacauuaggugcaacauuugcauuuga

SEQ ID NO: 44998 - RNA, 1701 nt, Artificial Sequence
  derived and/or modified CDS sequence (wt) from hemagglutinin__InfluenzaA__ALA08495
augaagacuaucauugccuugagcuacauucuaugucugguuuucgcucaaaaaauuccuggaaaugacaauagcacggcaacgcugugccuugggcaccaugcaguaccaaacggaacgauagugaaaacaaucacaaaugaccgaauugaaguuacuaaugcuacugagcugguucagaauuccucaauaggugaaauaugcgacaguccucaucagauccuugauggagaaaacugcacacuaauagaugcucuauugggagacccucagugugauggcuuucaaaauaagaaaugggaccuuuuuguugaacgaagcaaagccuacagcaacuguuacccuuaugaugugccggauuaugccucccuuaggucacuaguugccucauccggcacacuggaguuuaacaaugaaagcuucaauuggacuggagucacucaaaacggaacaaguucugcuugcauaaggagaucuaguaguaguuucuuuaguagauuaaauugguugacccacuuaaacuacacauacccagcacugaacgugacuaugccaaacaaugaacaauuugacaaauuguacauuugggggguucaccacccggguacggacaaggaccaaaucuuccuguaugcucaaucaucaggaagaaucacaguaucuaccaaaggaagccaacaagcuguaaucccaaauaucggaucuagacccagaauaagggauaucccuagcagaauaagcaucuauuggacaauaguaaaaccgggagacauacuuuugauuaacagcacagggaaucuaauugcuccuagggguuacuucaaaauacgaagugggaaaagcucaauaaugagaucagaugcacccauuggcaaaugcaagucugaaugcaucacuccaaauggaagcauucccaaugacaaaccauuccaaaauguaaacaggaucacauacggggccugucccagauauguuaagcauagcacucugaaauuggcaacaggaaugcgaaauguaccagagaaacaaacuagaggcauauuuggcgcaauagcggguuucauagaaaaugguugggagggaaugguggaugguugguacgguuucaggcaucaaaauucugagggaagaggacaagcagcagaucucaaaagcacucaagcagcaaucgaucaaaucaaugggaaacugaaucgauugaucgggaaaaccaacgagaaauuccaucagauugaaaaagaauucucagaaguagaaggaagaauucaggaccuugagaaauauguugaggacacuaaaauagaucucuggucauacaacgcggagcuucuuguugcccuggagaaccaacauacaauugaucuaacugacucagaaaugaacaaacuguuugaaaaaacaaagaagcaacugagggaaaaugcugaggauaugggaaaugguuguuucaaaauauaccacaaaugugacaaugccugcauaggaucaauaagaaauggaacuuaugaccacaauguguacagggaugaagcauuaaacaaccgguuccagaucaagggaguugagcugaagucaggguacaaagauuggauccuauggauuuccuuugccauaucauguuuuuugcuuuguguugcuuuguugggguucaucaugugggccugccaaaagggcaacauuaggugcaacauuugcauuuga

SEQ ID NO: 44999 - RNA, 1701 nt, Artificial Sequence
  derived and/or modified CDS sequence (wt) from hemagglutinin__InfluenzaA__ALA08496
augaagacuaucauugccuugagcuacauucuaugucugguuuucgcucaaaaaauuccuggaaaugacaauagcacggcaacgcugugccuugggcaccaugcaguaccaaacggaacgauagugaaaacaaucacaaaugaccgaauugaaguuacuaaugcuacugagcugguucagaauuccucaauaggugaaauaugcgacaguccucaucagauccuugauggagaaaacugcacacuaauagaugcucuauugggagacccucagugugauggcuuucaaaauaagaaaugggaccuuuuuguugaacgaagcaaagccuacagcaacuguuacccuuaugaugugccggauuaugccucccuuaggucacuaguugccucauccggcacacuggaguuuaacaaugaaagcuucaauuggacuggagucacucaaaacggaacaaguucugcuugcauaaggagaucuaguaguaguuucuuuaguagauuaaauugguugacccacuuaaacuacacauacccagcauugaacgugacuaugccaaacaaugaacaauuugacaaauuguacauuugggggguucaccacccggguacggacaaggaccaaaucuuccuguaugcucaaucaucaggaagaaucacaguaucuaccaaaggaagccaacaagcuguaaucccaaauaucggaucuagacccagaauaagggauaucccuagcagaauaagcaucuauuggacaauaguaaaaccgggagacauacuuuugauuaacagcacagggaaucuaauugcuccuagggguuacuucaaaauacgaagugggaaaagcucaauaaugagaucagaugcacccauuggcaaaugcaagucugaaugcaucacuccaaauggaagcauucccaaugacaaaccauuccaaaauguaaacaggaucacauacggggccugucccagauauguuaagcauagcacucugaaauuggcaacaggaaugcgaaauguaccagagaaacaaacuagaggcauauuuggcgcaauagcggguuucauagaaaaugguugggagggaaugguggaugguugguacgguuucaggcaucaaaauucugagggaagaggacaagcagcagaucucaaaagcacucaagcagcaaucgaucaaaucaaugggaagcugaaucgauugaucgggaaaaccaacgagaaauuccaucagauugaaaaagaauucucagaaguagaaggaagaauucaggaccuugagaaauauguugaggacacuaaaauagaucucuggucauacaacgcggagcuucuuguugcccuggagaaccaacauacaauugaucuaacugacucagaaaugaacaaacuguuugaaaaaacaaagaagcaacugagggaaaaugcugaggauaugggaaaugguuguuucaaaauauaccacaaaugugacaaugccugcauaggaucaauaagaaauggaacuuaugaccacaauguguacagggaugaagcauuaaacaaccgguuccagaucaagggaguugagcugaagucaggguacaaagauuggauccuauggauuuccuuugccauaucauguuuuuugcuuuguguugcuuuguugggguucaucaugugggccugccaaaagggcaacauuaggugcaacauuugcauuuga

SEQ ID NO: 45000 - RNA, 1701 nt, Artificial Sequence
  derived and/or modified CDS sequence (wt) from hemagglutinin__InfluenzaA__ALA08497
augaagacuaucauugcuuugagcuacauucuaugucugguuuucgcucaaaaaauuccuggaaaugacaauagcacggcaacgcugugccuugggcaccaugcaguaccaaacggaacgauagugaaaacaaucacaaaugaccgaauugaaguuacuaaugcuacugagcugguucagaauuccucaauaggugaaauaugcgacaguccucaucagauccuugauggagaaaacugcacacuaauagaugcucuauugggagacccucagugugauggcuuucaaaauaaaaaaugggaccuuuuuguugaacgaagcaaagccuacagcaacuguuacccuuaugaugugccggauuaugccucccuuaggucacuaguugccucauccggcacacuggaguuuaacaaugaaagcuucaauuggacuggagucacucaaaacggaacaaguucugcuugcauaaggagaucuaguaguaguuucuuuaguagauuaaauugguugacccacuuaaacuacacauacccagcauugaacgugacuaugccaaacaaugaacaauuugacaaauuguacauuugggggguucaccacccggguacggacaaggaccaaaucuuccuguaugcucaaucaucaggaagaaucacaguaucuaccaaaagaagccaacaagcuguaaucccaaauaucggaucuagacccagaauaagggauaucccuagcagaauaagcaucuauuggacaauaguaaaaccgggagacauacuuuugauuaacagcacagggaaucuaauugcuccuagggguuacuucaaaauacgaagugggaaaagcucaauaaugagaucagaugcacccauuggcaaaugcaagucugaaugcaucacuccaaauggaagcauucccaaugacaaaccauuccaaaauguaaacaggaucacauacggggccugucccagauauguuaagcauagcacucugaaauuggcaacaggaaugcgaaauguaccagagaaacaaacuagaggcauauuuggcgcaauagcggguuucauagaaaaugguugggagggaaugguggaugguugguacgguuucaggcaucaaaauucugagggaagaggacaagcagcagaucucaaaagcacucaagcagcaaucgaucaaaucaaugggaagcugaaucgauugaucgggaaaaccaacgagaaauuccaucagauugaaaaagaauucucagaaguagaaggaagaauucaggaccuugagaaauauguugaggacacuaaaauagaucucuggucauacaacgcggagcuucuuguugcccuggagaaccaacauacaauugaucuaacugacucagaaaugaacaaacuguuugaaaaaacaaagaagcaacugagggaaaaugcugaggauaugggaaaugguuguuucaaaauauaccacaaaugugacaaugccugcauaggaucaauaagaaauggaacuuaugaccacaauguguacagggaugaagcauuaaacaaccgguuccagaucaagggaguugagcugaagucaggguacaaagauuggauccuauggauuuccuuugccauaucauguuuuuugcuuuguguugcuuuguugggguucaucaugugggccugccaaaagggcaacauuaggugcaacauuugcauuuga

SEQ ID NO: 45001 - RNA, 1701 nt, Artificial Sequence; identical to SEQ ID NO: 44985
  derived and/or modified CDS sequence (wt) from hemagglutinin__InfluenzaA__ALA08498

SEQ ID NO: 45002 - RNA, 1701 nt, Artificial Sequence
  derived and/or modified CDS sequence (wt) from hemagglutinin__InfluenzaA__ALA08499
augaagacuaucauugcuuugagcuacauucuaugucugguuuucgcucaaaagcuuccugaaaaugacaauagcacggcaacgcugugccuugggcaccaugcaguaccaaacggaacgauagugaaaacaaucacgagugaccgaauugaaguuacuaaugcuacugagcugguucagaauuccucaauaggugaaauaugcgacaguccucaucagauccuugauggaaaaaacugcacacuaauagaugcucuauugggagacccucagugugauggcuuucaaaauaagaaaugggaccuuuuuguugaacgaagcaaagccuacagcaacuguuacccuuaugaugugccggauuaugccucccuuaggucacuaguugccucauccgguacacuggaguuuaacgaugaaagcuucaauugggcuggagucacucaaaacggaacaaguucugcuugcauaaggggaucuaauaguaguuucuuuaguagauuaaauugguugacccacucaaacuucaaauacccagcauugaacgugacuaugccaaacaaugaacaauuugacaaauuguacauuugggggguucaccacccggguacggacaaggaccaaaucuuccuguaugcucaaucaucaggaagaaucacaguauccaccaaaagaagccaacaagcuguaaucccgaauaucggaucuagacccagaauaagggauaucccuagcagaauaagcaucuauuggacaauaguaaaaccgggagacauacuuuugauuaacagcacagggaaucuaauugcuccuagggguuacuucaaaauacgaagugggaaaagcucaauaaugagaucagaugcacccauuggcaaaugcaagucugaaugcaucacuccaaauggaagcauucccaaugacaaaccauuccaaaauguaaacaggaucacauacggggccugucccagauauguuaagcaaagcacucugaaauuggcaacaggaaugcgaaauguaccagagaaacaaacuagaggcauauuuggcgcaauagcggguuucauagaaaaugguugggagggaaugaaggaugguugguacgguuucaggcaucaaaauucugagggaagaggacaagcagcagaucucaaaagcacucaagcagcaaucgaucaaaucaaugggaagcugaaucgauugaucgggaaaaccaacgagaaauuccaucagauugaaaaagaauucucagaaguagaagggagaauucaggaccuugagaaauauguugaggacacaaaaguagaucucuggucauacaacgcggagcuucuuguugcccuggagaaccaacauacaauugaucuaacugacucagaaaugaacaaacuguuugaaaaaacaaagaagcaacugagggaaaaugcugaggauaugggcaaugguuguuucaaaauauaccacaaaugugacaaugccugcauaggaucaaucagaaauggaacuuaugaccacgauguauacagggaugaagcuuuaaacaaccgguuccagaucaagggaguugagcugaagucaggguacaaagauuggauccuauggauuuccuuugccauaucauguuuuuugcuuuguguugcuuuguugggguucaucaugugggccugccaaaagggcaacauuaggugcaacauuugcauuuga

SEQ ID NO: 45003 - RNA, 1701 nt, Artificial Sequence; identical to SEQ ID NO: 44986
  derived and/or modified CDS sequence (wt) from hemagglutinin__InfluenzaA__ALA08501

SEQ ID NO: 45004 - RNA, 1701 nt, Artificial Sequence
  derived and/or modified CDS sequence (wt) from hemagglutinin__InfluenzaA__ALA08502
augaagacuaucauugcuuugagcuacauucuaugucugguuuucgcucaaaagcuuccugaaaaugacaauagcacggcaacgcugugccuugggcaccaugcaguaccaaacggaacgauagugaaaacaaucacgagugaccgaauugaaguuacuaaugcuacugagcugguucagaauuccucaauaggugaaauaugcgacaguccucaucagauccuugauggaaaaaacugcacacuaauagaugcucuauugggagacccucagugugauggcuuucaaaauaagaaaugggaccuuuuuguugaacgaagcaaagccuacagcaacuguuacccuuaugaugugccggauuaugccucccuuaggucacuaguugccucauccgguacacuggaguuuaacgaugaaagcuucaauugggcuggagucacucaaaacggaacaaguucugcuugcauaaggggaucuaauaguaguuucuuuaguagauuaaauugguugacccacucaaacuucaaauacccagcauugaacgugacuaugccaaacaaugaacaauuugacaaauuguacauuugggggguucaccacccggguacggacaaggaccaaaucuuccuguaugcucaaucaucaggaagaaucacaguauccaccaaaagaagccaacaagcuguaaucccgaauaucggaucuagacccagaauaaggaauaucccuagcagaauaagcaucuauuggacaauaguaaaaccgggagacauacuuuugauuaacagcacagggaaucuaauugcuccuagggguuacuucaaaauacgaagugggaaaagcucaauaaugagaucagaugcacccauuggcaaaugcaagucugaaugcaucacuccaaauggaagcauucccaaugacaaaccauuccaaaauguaaacaggaucacauacggggccugucccagauauguuaagcaaagcacucugaaauuggcaacaggaaugcgaaauguaccagagaaacaaacuagaggcauauuuggcgcaauagcggguuucauagaaaaugguugggagggaaugaaggaugguugguacgguuucaggcaucaaaauucugagggaagaggacaagcagcagaucucaaaagcacucaagcagcaaucgaucaaaucaaugggaagcugaaucgauugaucgggaaaaccaacgagaaauuccaucagauugaaaaagaauucucagaaguagaagggagaauucaggaccuugagaaauauguugaggacacaaaaguagaucucuggucauacaacgcggagcuucuuguugcccuggagaaccaacauacaauugaucuaacugacucagaaaugaacaaacuguuugaaaaaacaaagaagcaacugagggaaaaugcugaggauaugggcaaugguuguuucaaaauauaccacaaaugugacaaugccugcauaggaucaaucagaaauggaacuuaugaccacgauguauacagggaugaagcuuuaaacaaccgguuccagaucaagggaguugagcugaagucaggguacaaagauuggauccuauggauuuccuuugccauaucauguuuuuugcuuuguguugcuuuguugggguucaucaugugggccugccaaaagggcaacauuaggugcaacauuugcauuuga

SEQ ID NO: 45005 - RNA, 1701 nt, Artificial Sequence; identical to SEQ ID NO: 45004
  derived and/or modified CDS sequence (wt) from hemagglutinin__InfluenzaA__ALA08503

SEQ ID NO: 45006 - RNA, 1701 nt, Artificial Sequence
  derived and/or modified CDS sequence (wt) from hemagglutinin__InfluenzaA__ALA08504
augaagacuaucauugccuugagcuacauucuaugucugguuuucgcucaaaaaauuccuggaaaugacaauagcacggcaacgcugugccuugggcaccaugcaguaccaaacggaacgauagugaaaacaaucacaaaugaccgaauugaaguuacuaaugcuacugagcugguucagaauuccucaauaggugaaauaugcgacaguccucaucagauccuugauggagaaaacugcacacuaauagaugcucuauugggagacccucagugugauggcuuucaaaauaagaaaugggaccuuuuuguugaacgaagcaaagccuacagcaacuguuacccuuaugaugugccggauuaugccucccuuaggucacuaguugccucauccggcacacuggaguuuaacaaugaaagcuucaauuggacuggagucacucaaaacggaacaaguucugcuugcauaaggagaucuaguaguaguuucuuuaguagauuaaauugguugacccacuuaaacuacacauacccagcauugaacgugacuaugccaaacaaugaacaauuugacaaauuguacauuugggggguucaccacccggguacggacaaggaccaaaucuuccuguaugcucaaucaucaggaagaaucacaguaucuaccaaaagaagccaacaagcuguaaucccaaauaucggaucuagacccagaauaagggauaucccuagcagaauaagcaucuauuggacaauaguaaaaccgggagacauacuuuugauuaacagcacagggaaucuaauugcuccuagggguuacuucaaaauacgaagugggaaaagcucaauaaugagaucagaugcacccauuggcaaaugcaagucugaaugcaucacuccaaauggaagcauucccaaugacaaaccauuccaaaauguaaacaggaucacauacggggccugucccagauauguuaagcauagcacucugaaauuggcaacaggaaugcgaaauguaccagagaaacaaacuagaggcauauuuggcgcaauagcggguuucauagaaaaugguugggagggaaugguggaugguugguacgguuucaggcaucaaaauucugagggaagaggacaagcagcagaucucaaaagcacucaagcagcaaucgaucaaaucaaugggaagcugaaucgauugaucgggaaaaccaacgagaaauuccaucagauugaaaaagaauucucagaaguagaaggaagaauucaggaccuugagaaauauguugaggacacuaaaauagaucucuggucauacaacgcggagcuucuuguugcccuggagaaccaacauacaauugaucuaacugacucagaaaugaacaaacuguuugaaaaaacaaagaagcaacugagggaaaaugcugaggauaugggaaaugguuguuucaaaauauaccacaaaugugacaaugccugcauaggaucaauaagaaauggaacuuaugaccacaauguguacagggaugaagcauuaaacaaccgguuccagaucaagggaguugagcugaagucaggguacaaagauuggauccuauggauuuccuuugccauaucauguuuuuugcuuuguguugcuuuguugggguucaucaugugggccugccaaaagggcaacauuaggugcaacauuugcauuuga

SEQ ID NO: 45007 - RNA, 1701 nt, Artificial Sequence; identical to SEQ ID NO: 45006
  derived and/or modified CDS sequence (wt) from hemagglutinin__InfluenzaA__ALA08505

SEQ ID NO: 45008 - RNA, 1701 nt, Artificial Sequence
  derived and/or modified CDS sequence (wt) from hemagglutinin__InfluenzaA__ALA08506
augaagacuaucauugccuugagcuacauucuaugucugguuuucgcucaaaaaauuccuggaaaugacaauagcacggcaacgcugugccuugggcaccaugcaguaccaaacggaacgauagugaaaacaaucacaaaugaccgaauugaaguuacuaaugcuacugagcugguucagaauuccucaauaggugaaauaugcgacaguccucaucagauccuugauggagaaaacugcacacuaauagaugcucuauugggagacccucagugugauggcuuucaaaauaagaaaugggaccuuuuuguugaacgaagcaaagccuacagcaacuguuacccuuaugaugugccggauuaugccucccuuaggucacuaguugccucauccggcacacuggaguuuaacaaugaaagcuucaauuggacuggagucacucaaaacggaacaaguucugcuugcauaaggagaucuaguaguaguuucuuuaguagauuaaauugguugacccacuuaaacuacacauacccagcauugaacgugacuaugccaaacaaugaacaauuugacaaauuguacauuugggggguucaccacccggguacggacaaggaccaaaucuuccuguaugcucaaucaucaggaagaaucacaguaucuaccaaaagaagccaacaagcuguaaucccaaauaucggaucuagacccagaauaagggauaucccuagcagaauaagcaucuauuggacaauaguaaaaccgggagacauacuuuugauuaacagcacagggaaucuaauugcuccuagggguuacuucaaaauacgaagugggaaaagcucaauaaugagaucagaugcacccauuggcaaaugcaagucugaaugcaucacuccaaauggaagcauucccaaugacaaaccauuccaaaauguaaacagaaucacauacggggccugucccagauauguuaagcauagcacucugaaauuggcaacaggaaugcgaaauguaccagagaaacaaacuagaggcauauuuggcgcaauagcggguuucauagaaaaugguugggagggaaugguggaugguugguacgguuucaggcaucaaaauucugagggaagaggacaagcagcagaucucaaaagcacucaagcagcaaucgaucaaaucaaugggaagcugaaucgauugaucgggaaaaccaacgagaaauuccaucagauugaaaaagaauucucagaaguagaaggaagaauucaggaccuugagaaauauguugaggacacuaaaauagaucucuggucauacaacgcggagcuucuuguugcccuggagaaccaacauacaauugaucuaacugacucagaaaugaacaaacuguuugaaaaaacaaagaagcaacugagggaaaaugcugaggauaugggaaaugguuguuucaaaauauaccacaaaugugacaaugccugcauaggaucaauaagaaauggaacuuaugaccacaauguguacagggaugaagcauuaaacaaccgguuccagaucaagggaguugagcugaagucaggguacaaagauuggauccuauggauuuccuuugccauaucauguuuuuugcuuuguguugcuuuguugggguucaucaugugggccugccaaaagggcaacauuaggugcaacauuugcauuuga

SEQ ID NO: 45009 - RNA, 1701 nt, Artificial Sequence; identical to SEQ ID NO: 45006
  derived and/or modified CDS sequence (wt) from hemagglutinin__InfluenzaA__ALA08507

SEQ ID NO: 45010 - RNA, 1701 nt, Artificial Sequence
  derived and/or modified CDS sequence (wt) from hemagglutinin__InfluenzaA__ALA08508
augaagacuaucauugcuuugagcuacauucuaugucugguuuucgcucaaaagcuuccugaaaaugacaauagcacggcaacgcugugccuugggcaccaugcaguaccaaacggaacgauagugaaaacaaucacgagugaccgaauugaaguuacuaaugcuacugagcugguucagaauuccucaauaggugaaauaugcgacaguccucaucagauccuugauggaaaaaacugcacacuaauagaugcucuauugggagacccucagugugauggcuuucaaaauaagaaaugggaccuuuuuguugaacgaagcaaagccuacagcaacuguuacccuuaugaugugccggauuaugccucccuuaggucacuaguugccucauccgguacacuggaguuuaacgaugaaagcuucaauugggcuggagucacucaaaacggaacaaguucugcuugcauaagggguucuaauaguaguuucuuuaguagauuaaauugguugacccacucaaacuucaaauacccagcauugaacgugaccaugccaaacaaugaacaauuugacaaauuguacauuugggggguucaccacccggguacggacaaggaccaaaucuuccuguaugcucaaucaucaggaagaaucacaguauccaccaaaagaagccaacaagcuguaaucccgaauaucggaucuagacccagaauaaggaauaucccuagcagaauaagcaucuauuggacaauaguaaaaccgggagacauacuuuugauuaacagcacagggaaucuaauugcuccuagggguuacuucaaaauacgaagugggaaaagcucaauaaugagaucagaugcacccauuggcaaaugcaagucugaaugcaucacuccaaauggaagcauucccaaugacaaaccauuccaaaauguaaacaggaucacauacggggccugucccagauauguuaagcaaagcacucugaaauuggcaacaggaaugcgaaauguaccagagaaacaaacuagaggcauauuuggcgcaauagcggguuucauagaaaaugguugggagggaaugaaggaugguugguacgguuucaggcaucaaaauucugagggaagaggacaagcagcagaucucaaaagcacucaagcugcaaucgaucaaaucaaugggaagcugaaucgauugaucgggaaaaccaacgagaaauuccaucagauugaaaaagaauucucagaaguagaagggagaauucaggaccuugagaaauauguugaggacacaaaaauagaucucuggucauacaacgcggagcuucuuguugcccuggagaaccaacauacaauugaucuaacugacucagaaaugaacaaacuguuugaaaaaacaaagaagcaacugagggaaaaugcugaggauaugggcaaugguuguuucaaaauauaccacaaaugugacaaugccugcauaggaucaaucagaaauggaacuuaugaccacgauguauacagggaugaagcuuuaaacaaccgguuccagaucaagggaguugagcugaagucaggguacaaagauuggauccuauggauuuccuuugccauaucauguuuuuugcuuuguguugcuuuguugggguucaucaugugggccugccaaaagggcaacauuaggugcaacauuugcauuuga

SEQ ID NO: 45011 - RNA, 1701 nt, Artificial Sequence
  derived and/or modified CDS sequence (wt) from hemagglutinin__InfluenzaA__ALA08509
augaagacuaucauugccuugagcuacauucuaugucugguuuucgcucaaaaaauuccuggaaaugacaauagcacggcaacgcugugccuugggcaccaugcaguaccaaacggaacgauagugaaaacaaucacaaaugaccgaauugaaguuacuaaugcuacugagcugguucagaauuccucgauaggugaaauaugcgacaguccucaucagauccuugauggagaaaacugcacacuaauagaugcucuauugggagacccucagugugauggcuuucaaaauaagaaaugggaccuuuuuguugaacgaagcaaagccuacagcaacuguuacccuuaugaugugccggauuaugccucccuuaggucacuaguugccucauccggcacacuggaguuuaacaaugaaagcuucaauuggacuggagucacucaaaacggaacaaguucugcuugcauaaggagaucuaguaguaguuucuuuaguagauuaaauugguugacccacuuaaacuacacauacccagcauugaacgugacuaugccaaacaaugaacaauuugacaaauuguacauuugggggguucaccacccggguacggacaaggaccaaaucuuccuguaugcucaaucaucaggaagaaucacaguaucuaccaaaagaagccaacaagcuguaaucccaaauaucggaucuagacccagaauaagggauaucccuagcagaauaagcaucuauuggacaauaguaaaaccgggagacauacuuuugauuaacagcacagggaaucuaauugcuccuagggguuacuucaaaauacgaagugggaaaagcucaauaaugagaucagaugcacccauuggcaaaugcaagucugaaugcaucacuccaaauggaagcauucccaaugacaaaccauuccaaaauguaaacaggaucacauacggggccugucccagauauguuaagcauagcacucugaaauuggcaacaggaaugcgaaauguaccagagaaacaaacuagaggcauauuuggcgcaauagcggguuucauagaaaaugguugggagggaaugguggaugguugguacgguuucaggcaucaaaauucugagggaagaggacaagcagcagaucuuaaaagcacucaagcagcaaucgaucaaaucaaugggaagcugaaucgauugaucgggaaaaccaacgagaaauuccaucagauugaaaaagaauucucagaaguagaaggaagaauucaggaccuugagaaauauguugaggacacuaaaauagaucucuggucauacaacgcggagcuucuuguugcccuggagaaccaacauacaauugaucuaacugacucagaaaugaacaaacuguuugaaaaaacaaagaagcaacugagggaaaaugcugaggauaugggaaaugguuguuucaaaauauaccacaaaugugacaaugccugcauaggaucaauaagaaauggaacuuaugaccacaauguguacagggaugaagcauuaaacaaccgguuccagaucaagggaguugagcugaagucaggguacaaagauuggauccuauggauuuccuuugccauaucauguuuuuugcuuuguguugcuuuguugggguucaucaugugggccugccaaaagggcaacauuaggugcaacauuugcauuuga

SEQ ID NO: 45012 - RNA, 1701 nt, Artificial Sequence; identical to SEQ ID NO: 45006
  derived and/or modified CDS sequence (wt) from hemagglutinin__InfluenzaA__ALA08510

SEQ ID NO: 45013 - RNA, 1701 nt, Artificial Sequence
  derived and/or modified CDS sequence (wt) from hemagglutinin__InfluenzaA__ALA08511
augaagacuaucauugccuugagcuacauucuaugucugguuuucgcucaaaaaauuccuggaaaugacaauagcacggcaacguugugccuugggcaccaugcaguaccaaacggaacgauagugaaaacaaucacaaaugaccgaauugaaguuacuaaugcuacugagcugguucagaauuccucaauaggugaaauaugcgacaguccucaucagauccuugauggagaaaacugcacacuaauagaugcucuauugggagacccucagugugauggcuuucaaaauaagaaaugggaccuuuuuguugaacgaagcaaagccuacagcaacuguuacccuuaugaugugccggauuaugccucccuuaggucacuaguugccucauccggcacacuggaguuuaacaaugaaagcuucaauuggacuggagucacucaaaacggaacaaguucuucuugcauaaggagaucuaguaguaguuucuuuaguagauuaaauugguugacccacuuaaacuacacauacccagcauugaacgugacuaugccaaacaaugaacaauuugacaaauuguacauuugggggguucaccacccgaguacggacaaggaccaaaucuuccuguaugcucaaucaucaggaagaaucacaguaucuaccaaaagaagccaacaagcuguaaucccaaauaucggaucuagacccagaauaagggauaucccuagcagaauaagcaucuauuggacaauaguaaaaccgggagacauacuuuugauuaacagcacagggaaucuaauugcuccuagggguuacuucaaaauacgaagugggaaaagcucaauaaugagaucagaugcacccauuggcaaaugcaagucugaaugcaucacuccaaauggaagcauucccaaugacaaaccauuccaaaauguaaacaggaucacauacggggccugucccagauauguuaagcauagcacucugaaauuggcaacaggaaugcgaaauguaccagagaaacaaacuagaggcauauuuggcgcaauagcggguuucauagaaaaugguugggagggaaugguggaugguugguacgguuucaggcaucaaaauucugagggaagaggacaagcagcagaucucaaaagcacucaagcagcaaucgaucaaaucaaugggaagcugaaucgauugaucgggaaaaccaacgagaaauuccaucagauugaaaaagaauucucagaaguagaaggaagaauucaggaccuugagaaauauguugaggacacuaaaauagaucucuggucauacaacgcggagcuucuuguugcccuggagaaccaacauacaauugaucuaacugacucagaaaugaacaaacuguuugaaaaaacaaagaagcaacugagggaaaaugcugaggauaugggaaaugguuguuucaaaauauaccacaaaugugacaaugccugcauaggaucaauaagaaauggaacuuaugaccacaauguguacagggaugaagcauuaaacaaccgguuccagaucaagggaguugagcugaagucaggguacaaagauuggauccuauggauuuccuuugccauaucauguuuuuugcuuuguguugcuuuguugggguucaucaugugggccugccaaaagggcaacauuaggugcaacauuugcauuuga

SEQ ID NO: 45014 - RNA, 1701 nt, Artificial Sequence; identical to SEQ ID NO: 45006
  derived and/or modified CDS sequence (wt) from hemagglutinin__InfluenzaA__ALA08512

SEQ ID NO: 45015 - RNA, 1701 nt, Artificial Sequence; identical to SEQ ID NO: 45006
  derived and/or modified CDS sequence (wt) from hemagglutinin__InfluenzaA__ALA08514

SEQ ID NO: 45016 - RNA, 1701 nt, Artificial Sequence; identical to SEQ ID NO: 45006
  derived and/or modified CDS sequence (wt) from hemagglutinin__InfluenzaA__ALA08515

SEQ ID NO: 45017 - RNA, 1701 nt, Artificial Sequence; identical to SEQ ID NO: 45006
  derived and/or modified CDS sequence (wt) from hemagglutinin__InfluenzaA__ALA08516

SEQ ID NO: 45018 - RNA, 1701 nt, Artificial Sequence
  derived and/or modified CDS sequence (wt) from hemagglutinin__InfluenzaA__ALA08517
augaagacuaucauugcuuugagcuacauucuaugucugguuuucgcucaaaagcuuccugaaaaugacaauagcacggcaacgcugugccuugggcaccaugcaguaccaaacggaacgauagugaaaacaaucacgagugaccgaauugaaguuacuaaugcuacugagcugguucagaauuccucaauaggugaaauaugcgacaguccucaucagauccuugauggaaaaaacugcacacuaauagaugcucuauugggagacccucagugugauggcuuucaaaauaagaaaugggaccuuuuuguugaacgaagcaaagccuacagcaacuguuacccuuaugaugugccggauuaugccucccuuaggucacuaguugccucauccgguacacuggaguuuaacgaugaaagcuucaauugggcuggagucacucaaaacggaacaaguucugcuugcauaaggggaucuaauaguaguuucuuuaguagauuaaauugguugacccacucaaacuucaaauacccagcauugaacgugacuaugccaaacaaugaacaauuugacaaauuguacauuugggggguucaccacccggguacggacaaggaccaaaucuuccuguaugcucaaucaucaggaagaaucacaguauccaccaaaagaagccaacaagcuguaaucccgaauaucggaucuagacccagaauaaggaauaucccuagcagaauaagcaucuauuggacaauaguaaaaccgggagacauacuuuugauuaacagcacagggaaucuaauugcuccuagggguuacuucaaaauacgaagugggaaaagcucaauaaugagaucagaugcacccauuggcaaaugcaagucugaaugcaucacuccaaauggaagcauucccaaugacaaaccauuccaaaauguaaacaggaucacauacggggccugucccagauauguuaagcaaagcacucugaaauuggcaacaggaaugcgaaauguaccagagaaacaaacuagaggcauauuuggcgcaauagcggguuucauagaaaaugguugggagggaaugaaggaugguugguacgguuucaggcaucaaaauucugagggaagaggacaagcagcagaucucaaaagcacucaagcagcaaucgaucaaaucaaugggaagcugaaucgauugaucgggaaaaccaacgagaaauuccaucagauugaaaaagaauucucagaaguagaagggagaauucaggaccuugagaaauauguugaggacacaaaaauagaucucuggucauacaacgcggagcuucuuguugcccuggagaaccaacauacaauugaucuaacugacucagaaaugaacaaacuguuugaaaaaacaaagaagcaacugagggaaaaugcugaggauaugggcaaugguuguuucaaaauauaccacaaaugugacaaugccugcauaggaucaaucagaaauggaacuuaugaccacgauguauacagggaugaagcuuuaaacaaccgguuccagaucaagggaguugagcugaagucaggguacaaagauuggauccuauggauuuccuuugccauaucauguuuuuugcuuuguguugcuuuguugggguucaucaugugggccugccaaaagggcaacauuaggugcaacauuugcauuuga

SEQ ID NO: 45019 - RNA, 1701 nt, Artificial Sequence; identical to SEQ ID NO: 45006
  derived and/or modified CDS sequence (wt) from hemagglutinin__InfluenzaA__ALA08519

SEQ ID NO: 45020 - RNA, 1701 nt, Artificial Sequence
  derived and/or modified CDS sequence (wt) from hemagglutinin__InfluenzaA__ALA08520
augaagacuaucauugccuugagcuacauucuaugucugguuuucgcucaaaaaauuccuggaaaugacaauagcacggcaacgcugugccuugggcaccaugcaguaccaaacggaacgauagugaaaacaaucacaaaugaccgaauugaaguuacuaaugcuacugagcugguucagaauuccucaauaggugaaauaugcgacaguccucaucagauccuugauggagaaaacugcacacuaauagaugcucuauugggagacccucagugugauggcuuucaaaauaagaaaugggaccuuuuuguugaacgaagcaaagccuacagcaacuguuacccuuaugaugugccggauuaugccucccuuaggucacuaguugccucauccggcacacuggaguuuaacaaugaaagcuucaauuggacuggagucacucaaaacggaacaaguucugcuugcauaaggagaucuaguaguaguuucuuuaguagauuaaauugguugacccacuuaaacuacacauacccagcauugaacgugacuaugccaaacaaugaacaauuugacaaauuguacauuugggggguucaccacccggguacggacaaggaccaaaucuuccuguaugcucaaccaucaggaagaaucacaguaucuaccaaaagaagccaacaagcuguaaucccaaauaucggaucuagacccagaauaagggauaucccuagcagaauaagcaucuauuggacaauaguaaaaccgggagacauacuuuugauuaacagcacagggaaucuaauugcuccuagggguuacuucaaaauacgaaaugggaaaagcucaauaaugagaucagaugcacccauuggcaaaugcaagucugaaugcaucacuccaaauggaagcauucccaaugacaaaccauuccaaaauguaaacaggaucacauacggggccugucccagauauguuaagcauagcacucugaaauuggcaacaggaaugcgaaauguaccagagaaacaaacuagaggcauauuuggcgcaauagcggguuucauagaaaaugguugggagggaaugguggaugguugguacgguuucaggcaucaaaauucugagggaagaggacaagcagcagaucucaaaagcacucaagcagcaaucgaucaaaucaaugggaagcugaaucgauugaucgggaaaaccaacgagaaauuccaucagauugaaaaagaauucucagaaguagaaggaagaauucaggaccuugagaaauauguugaggacacuaaaauagaucucuggucauacaacgcggagcuucuuguugcccuggagaaccaacauacaauugaucuaacugacucagaaaugaacaaacuguuugaaaaaacaaagaagcaacugagggaaaaugcugaggauaugggaaaugguuguuucaaaauauaccacaaaugugacaaugccugcauaggaucaauaagaaauggaacuuaugaccacaauguguacagggaugaagcauuaaacaaccgguuccagaucaagggaguugagcugaagucaggguacaaagauuggauccuauggauuuccuuugccauaucauguuuuuugcuuuguguugcuuuguugggguucaucaugugggccugccaaaagggcaacauuaggugcaacauuugcauuuga

SEQ ID NO: 45021 - RNA, 1701 nt, Artificial Sequence
  derived and/or modified CDS sequence (wt) from hemagglutinin__InfluenzaA__ALA08522
augaagacuaucauugcuuugagcuacauucuaugucugguuuucgcucaaaaacuuccuggaaaugacaauagcacggcaacgcugugccuugggcaccaugcaguaccaaauggaacgauagugaaaacaaucacgaaugaccgaauugaaguuacuaaugcuacugagcugguucagaauuccucaauaggugaaauaugcgacaguccucaucagauccuugauggagaaaacugcacacuaauagaugcucuauugggagacccucagugugauggcuuucaaaauaagaaaugggaccuuuuuguugaacggagcaaagccuacagcaacuguuacccuuaugaugugccggauuaugccucccuuaggucacuaguugccucauccggcacacuggaguuuaacaaugaaagcuucaauugggcuggagucacccaaaacggaacaaguucugcuugcauaaggggaucuaauaguaguuucuuuaguagauuaaauugguugacccacuuaaacuucaaauacccagcauugaacgugacuaugccaaacaaugaacaauuugacaaauuguacauuuggggaguucaccacccggguacggacaaggaccaaaucuuccuguaugcucaaucgucaggaagaaucacaguaucuaccaaaagaagccaacaagcuguaaucccgaauaucggaucuagacccagaauaagggauaucccuagcagaauaagcaucuauuggacaauaguaaaaccgggagacauacuuuugauuaacagcacagggaaccuaauugcuccuagggguuacuucaaaauacgaagugggaaaagcucaauaaugagaucagaugcacccauuggcaaaugcaagucagaaugcaucacuccaaauggaagcauucccaaugacaaaccauuccaaaauguaaacaggaucacauacggggccugucccagauauguuaagcaaagcacucugaaauuggcaacaggaaugcgaaauguaccagagaaacaaacuagaggcauauuuggcgcaauagcggguuucauagaaaaugguugggagggaaugguggaugguugguacgguuucaggcaucaaaauucugagggaagaggacaagcagcagaucucaaaagcacucaagcagcaaucgaucaaaucaaugggaagcugaaucgauugaucgggaaaaccaacgagaaauuccaucagauugaaaaagaauucucagaaguagaagggagaauucaggaccuugagaaauauguugaggacacaaaaauagaucucuggucauacaacgcggagcuucuuguugcccuggagaaccaacauacaauugaucuaacugacucagaaaugaacaaacuguuugaaaaaacaaagaaacaacugagggaaaaugcugaggauaugggcaaugguuguuucaaaauauaccacaaaugugacaaugccugcauaggaucaaucagaaauggaacuuaugaccacgauguguacagggaugaagcauuaaacaaccgguuccagaucaagggaguugagcugaagucaggguacaaagauuggauccuauggauuuccuuugccauaucauguuuuuugcuuuguguugcuuuguugggguucaucaugugggccugccaaaagggcaacauuaggugcaacauuugcauuuga

SEQ ID NO: 45022 - RNA, 1701 nt, Artificial Sequence
  derived and/or modified CDS sequence (wt) from hemagglutinin__InfluenzaA__ALA08523
augaagacuaucauugccuugagcuacauucuaugucugguuuucgcucaaaaaauuccuggaaaugacaauagcacggcaacgcugugccuugggcaccaugcaguaccaaacggaacgauagugaaaacaaucacaaaugaccgaauugaaguuacuaaugcuacugagcugguucagaauuccucaauaggugaaauaugcgacaguccucaucagauccuugauggagaaaacugcacacuaauagaugcucuauugggagacccucagugugauggcuuucaaaauaagaaaugggaccuuuuuguugaacgaagcaaagccuacagcaacuguuacccuuaugaugugccggauuaugccucccuuaggucacuaguugccucauccggcacacuggaguuuaacaaugaaagcuucaauuggacuggagucacucaaaacggaacaaguucugcuugcauaaggagaucuaguaguaguuucuuuaguagauuaaauugguugacccacuuaaacuacacauacccagcauugaacgugacuaugccaaacaaugaacaauuugacaaauuguacauuugggggguucaccacccggguacggacaaggaccaaaucuuccuguaugcucaaucaucaggaagaaucacaguaucuaccaaaagaagccaacaagcuguaaucccaaauaucggaucuagacccagaauaagggauaucccuagcagaauaagcaucuauuggacaauaguaaaaccgggagacauacuuuugauuaacagcauagggaaucuaauugcuccuagggguuacuucaaaauacgaagugggaaaagcucaauaaugagaucagaugcacccauuggcaaaugcaagucugaaugcaucacuccaaauggaagcauucccaaugacaaaccauuccaaaauguaaacagaaucacauacggggccugucccagauauguuaagcauagcacucugaaauuggcaacaggaaugcgaaauguaccagagaaacaaacuagaggcauauuuggcgcaauagcggguuucauagaaaaugguugggagggaaugguggaugguugguacgguuucaggcaucaaaauucugagggaagaggacaagcagcagaucucaaaagcacucaagcagcaaucgaucaaaucaaugggaagcugaaucgauugaucgggaaaaccaacgagaaauuccaucagauugaaaaagaauucucagaaguagaaggaagaauucaggaccuugagaaauauguugaggacacuaaaauagaucucuggucauacaacgcggagcuucuuguugcccuggagaaccaacauacaauugaucuaacugacucagaaaugaacaaacuguuugaaaaaacaaagaagcaacugagggaaaaugcugaggauaugggaaaugguuguuucaaaauauaccacaaaugugacaaugccugcauaggaucaauaagaaauggaacuuaugaccacaauguguacagggaugaagcauuaaacaaccgguuccagaucaagggaguugagcugaagucaggguacaaagauuggauccuauggauuuccuuugccauaucauguuuuuugcuuuguguugcuuuguugggguucaucaugugggccugccaaaagggcaacauuaggugcaacauuugcauuuga

SEQ ID NO: 45023 - RNA, 1701 nt, Artificial Sequence
  derived and/or modified CDS sequence (wt) from hemagglutinin__InfluenzaA__ALA08524
augaagacuaucauugccuugagcuacauucuauguaugguuuucgcucaaaaaauuccuggaaaugacaauagcacggcaacgcugugccuugggcaccaugcaguaccaaacggaacgauagugaaaacaaucacaaaugaccgaauugaaguuacuaaugcuacugagcugguucagaauuccucaauaggugaaauaugcgacaguccucaucagauccuugauggagaaaacugcacacuaauagaugcucuauugggagacccucagugugauggcuuucaaaauaagaaaugggaccuuuuuguugaacgaagcaaagccuacagcaacuguuacccuuaugaugugccggauuaugccucccuuaggucacuaguugccucauccggcacacuggaguuuaacaaugaaagcuucaauuggacuggagucacucaaaacggaacaaguucugcuugcauaaggagaucuaguaguaguuucuuuaguagauuaaauugguugacccacuuaaacuacacauacccagcauugaacgugacuaugccaaacaaugaacaauuugacaaauuguacauuugggggguucaccacccggguacggacaaggaccaaaucuuccuguaugcucaaucaucaggaagaaucacaguaucuaccaaaagaagccaacaagcuguaaucccaaauaucggaucuagacucagaauaagggauaucccuagcagaauaagcaucuauuggacaauaguaaaaccgggagacauacuuuugauuaacagcacagggaaucuaauugcuccuagggguuacuucaaaauacgaagugggaaaagcucaauaaugagaucagaugcacccauuggcaaaugcaagucugaaugcaucacuccaaauggaagcauucccaaugacaaaccauuccaaaauguaaacaggaucacauacggggccugucccagauauguuaagcauagcacucugaaauuggcaacaggaaugcgaaauguaccagagaaacaaacuagaggcauauuuggcgcaauagcggguuucauagaaaaugguugggagggaaugguggaugguugguacgguuucaggcaucaaaauucugagggaagaggacaagcagcagaucucaaaagcacucaagcagcaaucgaucaaaucaaugggaagcugaaucgauugaucgggaaaaccaacgagaaauuccaucagauugaaaaagaauucucagaaguagaaggaagaauucaggaccuugagaaauauguugaggacacuaaaauagaucucuggucauacaacgcggagcuucuuguugcccuggagaaccaacauacaauugaucuaacugacucagaaaugaacaaacuguuugaaaaaacaaagaagcaacugagggaaaaugcugaggauaugggaaaugguuguuucaaaauauaccacaaaugugacaaugccugcauaggaucaauaagaaauggaacuuaugaccacaauguguacagggaugaagcauuaaacaaccgguuccagaucaagggaguugagcugaagucaggguacaaagauuggauccuauggauuuccuuugccauaucauguuuuuugcuuuguguugcuuuguugggguucaucaugugggccugccaaaagggcaacauuaggugcaacauuugcauuuga

SEQ ID NO: 45024 - RNA, 1701 nt, Artificial Sequence; identical to SEQ ID NO: 45006
  derived and/or modified CDS sequence (wt) from hemagglutinin__InfluenzaA__ALA08525

SEQ ID NO: 45025 - RNA, 1701 nt, Artificial Sequence
  derived and/or modified CDS sequence (wt) from hemagglutinin__InfluenzaA__ALA08526
augaagacuaucauugcuuugagcuacauucuaugucugguuuucgcucaaaaaauuccuggaaaugacaauagcacggcaacgcugugccuugggcaccaugcaguaccaaacggaacgauagugaaaacaaucacaaaugaccgaauugaaguuacuaaugcuacugaguugguucagaauuccucaauaggugaaauaugcgacaguccucaucagauccuugauggagagaacugcacacuaauagaugcucuauugggagacccucagugugauggcuuucaaaauaagaaaugggaccuuuuuguugaacgaagcaaagccuacagcaacuguuacccuuaugaugugccggauuaugccucccuuaggucacuaguugccucauccggcacacuggaguuuaacaaugaaagcuucaauuggacuggagucacucaaaacggaacaaguucugcuugcauaaggagaucuaguaguaguuucuuuaguagauuaaauugguugacccacuuaaacuacacauacccagcauugaacgugacuaugccaaacaaugaacaauuugacaaauuguacauuugggggguucaccacccggguacggacaaggaccaaaucuuccuguaugcucaaucaucaggaagaaucacaguaucuaccaaaagaagccaacaagcuguaaucccaaauaucggaucuagacccagaauaagggauaucccuagcagaauaagcaucuauuggacaauaguaaaaccgggagacauacuuuugauuaacagcacagggaaucuaauugcuccuagggguuacuucaaaauacgaagugggaaaagcucaauaaugagaucagaugcacccauuggcaaaugcaagucugaaugcaucacuccaaauggaagcauucccaaugacaaaccauuccaaaauguaaacaggaucacauacggggccugucccagauauguuaagcauagcacucugaaauuggcaacaggaaugcgaaauguaccagagaaacaaacuagaggcauauuuggcgcaauagcggguuucauagaaaaugguugggagggaaugguggaugguugguacgguuucaggcaucaaaauucugagggaagaggacaagcagcagaucucaaaagcacucaagcagcaaucgaucaaaucaaugggaagcugaaucgguugaucgggaaaaccaacgagaaauuccaucagauugaaaaagaauucucagaaguagaaggaagaauucaggaccuugagaaauauguugaggacacuaaaauagaucucuggucauauaacgcggagcuucuuguugcccuggagaaccaacauacaauugaucuaacugacucagaaaugaacaaacuguuugaaaaaacaaagaagcaacugagggaaaaugcugaggauaugggaaaugguuguuucaaaauauaccacaaaugugacaaugccugcauaggaucaauaagaaauggaacuuaugaccacaauguguacagggaugaagcauuaaacaaccgguuccagaucaaggggguugagcugaagucaggguacaaagauuggauccuauggauuuccuuugccauaucauguuuuuugcuuuguguugcuuuguugggguucaucaugugggccugccaaaagggcaacauuaggugcaacauuugcauuuga

SEQ ID NO: 45026 - RNA, 1701 nt, Artificial Sequence; identical to SEQ ID NO: 45018
  derived and/or modified CDS sequence (wt) from hemagglutinin__InfluenzaA__ALA08527

SEQ ID NO: 45027 - RNA, 1701 nt, Artificial Sequence
  derived and/or modified CDS sequence (wt) from hemagglutinin__InfluenzaA__ALA08528
augaagacuaucauugcuuugagcuacauucuaugucugguuuucgcucaaaagcuuccugaaaaugacaauagcacggcaacgcugugccuugggcaccaugcaguaccaaacggaacgauagugaaaacaaucacgagugaccgaauugaaguuacuaaugcuacugagcugguucagaauuccucaauaggugaaauaugcgacaguccucaucagauccuugauggaaaaaacugcacacuaauagaugcucuauugggagacccucagugugauggcuuucaaaauaagaaaugggaccuuuuuguugaacgaagcaaagccuacagcaacuguuacccuuaugaugugccggauuaugccucccuuaggucacuaguugccucauccgguacacuggaguuuaacgaugaaagcuucaauugggcuggagucacucaaaacggaacaaguucugcuugcauaaggggaucuaauaguaguuucuuuaguagauuaaauugguugacccacucaaacuucaaauacccagcauugaacgugacuaugccaaacaaugaacaauuugacaaauuguacauuugggggguucaccacccggguacggacaaggaccaaaucuaccuguaugcucaaucaucaggaagaaucacaguauccaccaagagaagccaacaagcuguaaucccgaauaucggaucuagacccagaauaaggaauaucccuagcagaauaagcaucuauuggacaauaguaaaaccgggagacauacuuuugauuaacagcacagggaaucuaauugcuccuagggguuacuucaaaauacgaagugggaaaagcucaauaaugagaucagaugcacccauuggcaaaugcaagucugaaugcaucacuccaaauggaagcauucccaaugacaaaccauuccaaaauguaaacaggaucacauacggggccugucccagauauguuaagcaaagcacucugaaauuggcaacaggaaugcgaaauguaccagagaaacaaacuagaggcauauuuggcgcaauagcggguuucauagaaaaugguugggagggaaugaaggaugguugguacgguuucaggcaucaaaauucugagggaagaggacaagcagcagaucucaaaagcacucaagcagcaaucgaucaaaucaaugggaagcugaaucgauugaucgggaaaaccaacgagaaauuccaucagauugaaaaagaauucucagaaguagaagggagaauucaggaccuugagaaauauguugaggacacaaaaauagaucucuggucauacaacgcggagcuucuuguugcccuggagaaccaacauacaauugaucuaacugacucagaaaugaacaaacuguuugaaaaaacaaagaagcaaaugagggaaaaugcugaggauaugggcaaugguuguuucaaaauauaccacaaaugugacaaugccugcauaggaucaaucagaaauggaacuuaugaccacgauguauacagggaugaagcuuuaaacaaccgguuccagaucaagggaguugagcugaagucaggguacaaagauuggauccuauggauuuccuuugccauaucauguuuuuugcuuuguguugcuuuguugggguucaucaugugggccugccaaaagggcaacauuaggugcaacauuugcauuuga

SEQ ID NO: 45028 - RNA, 1701 nt, Artificial Sequence
  derived and/or modified CDS sequence (wt) from hemagglutinin__InfluenzaA__ALA08529
augaagacuaucauugcuuugagcuacauucuaugucugguuuucgcucaaaaaauuccuggaaaugacaauagcacggcaacgcugugccuugggcaccaugcaguaccaaacggaacgauagugaaaacaaucacaaaugaccgaauugaaguuacuaaugcuacugagcugguucagaauuccucaauaggugaaauaugcgacaguccucaucagauccuugauggagaaaacugcacacuaauagaugcucuauugggagacccucagugugauggcuuucaaaauaagaaaugggaccuuuuuguugaacgaagcaaagccuacagcaacuguuacccuuaugaugugccggauuaugccucccuuaggucacuaguugccucauccggcacacuggaguuuaacaaugaaagcuucaauuggacuggagucacucaaaacggaacaaguucugcuugcauaaggagaucuaguaguaguuucuuuaguagauuaaauugguugacccacuuaaacuacacauacccagcauugaacgugacuaugccaaacaaugaacaauuugacaaauuguacauuugggggguucaccacccggguacggacaaggaccaaaucuuccuguaugcucaaucaucaggaagaaucacaguaucuaccaaaagaagccaacaagcuguaaucccaaauaucggaucuagacccagaauaagggauaucccuagcagaauaagcaucuauuggacaauaguaaaaccgggagacauacuuuugauuaacagcacagggaaucuaauugcuccuagggguuacuucaaaauacgaagugggaaaagcucaauaaugagaucagaugcacccauuggcaaaugcaagucugaaugcaucacuccaaauggaagcauucccaaugacaaaccauuccaaaauguaaacaggaucacauacggggccugucccagauauguuaagcauagcacucugaaauuggcaacaggaaugcgaaauguaccagagaaacaaacuagaggcauauuuggcgcaauagcggguuucauagaaaaugguugggagggaaugguggaugguugguacgguuucaggcaucaaaauucugagggaagaggacaagcagcagaucucaaaagcacucaagcagcaaucgaucaaaucaauggaaagcugaaucgauugaucgggaaaaccaacgagaaauuccaucagauugaaaaagaauucucagaaguagaaggaagaauucaggaccuugagaaauauguugaggacacuaaaauagaucucuggucauacaacgcggagcuucuuguugcccuggagaaccaacauacaauugaucuaacugacucagaaaugaacaaacuguuugaaaaaacaaagaagcaacugagggaaaaugcugaggauaugggaaaugguuguuucaaaauauaccacaaaugugacaaugccugcauaggaucaauaagaaauggaacuuaugaccacaauguguacagggaugaagcauuaaacaaccgguuccagaucaagggaguugagcugaagucaggguacaaagauuggauccuauggauuuccuuugccauaucauguuuuuugcuuuguguugcuuuguugggguucaucaugugggccugccaaaagggcaacauuaggugcaacauuugcauuuga

SEQ ID NO: 45029 - RNA, 1701 nt, Artificial Sequence; identical to SEQ ID NO: 45025
  derived and/or modified CDS sequence (wt) from hemagglutinin__InfluenzaA__ALA08530

SEQ ID NO: 45030 - RNA, 1701 nt, Artificial Sequence
  derived and/or modified CDS sequence (wt) from hemagglutinin__InfluenzaA__ALA08531
augaagacuaucauugcuuugagcuacauucuaugucugguuuucgcucaaaagcuuccugaaaaugacaauagcacggcaacgcugugccuugggcaccaugcaguaccaaacggaacgauagugaaaacaaucacgagugaccgaauugaaguuacuaaugcuacugagcugguucagaauuccucaauaggugaaauaugcgacaguccucaucagauccuugauggaaaaaacugcacacuaauagaugcucuauugggagacccucagugugauggcuuucaaaauaagaaaugggaccuuuuuguugaacgaagcaaagccuacagcaacuguuacccuuaugaugugccggauuaugccucccuuaggucacuaguugccucauccgguacacuggaguuuaacgaugaaagcuucaauugggcuggagucacucaaaacggaacaaguucugcuugcauaaggggaucuaauaguaguuucuuuaguagauuaaauugguugacccacucaaacuucaaauacccagcauugaacgugacuaugccaaacaaugaacaauuugacaaauuguacauuugggggguucaccacccggguacggacaaggaccaaaucuuccuguaugcucaaucaucaggaagaaucacaguauccaccaaaagaagccaacaagcuguaaucccgaauaucggaucuagacccagaauaaggaauauaccuagcagaauaagcaucuauuggacaauaguaaaaccgggagacauacuuuugauuaacagcacagggaaucuaauugcuccuagggguuacuucaaaauacgaagugggaaaagcucaauaaugagaucagaugcacccauuggcaaaugcaagucugaaugcaucacuccaaauggaagcauucccaaugacaaaccauuccaaaauguaaacaggaucacauacggggccugucccagauauguuaagcaaagcacucugaaauuggcaacaggaaugcgaaauguaccagagaaacaaacuagaggcauauuuggcgcaauagcggguuucauagaaaaugguugggagggaaugaaggaugguugguacgguuucaggcaucaaaauucugagggaagaggacaagcagcagaucucaaaagcacucaagcagcaaucgaucaaaucaaugggaagcugaaucgauugaucgggaaaaccaacgagaaauuccaucagauugaaaaagaauucucagaaguagaagggagaauucaggaccuugagaaauauguugaggacacaaaaauagaucucuggucauacaacgcggagcuucuuguugcccuggagaaccaacauacaauugaucuaacugacucagaaaugaacaaacuguuugaaaaaacaaagaagcaacugagggaaaaugcugaggauaugggcaaugguuguuucaaaauauaccacaaaugugacaaugccugcauaggaucaaucagaaauggaacuuauaaccacgauguauacagggaugaagcuuuaaacaaccgguuccagaucaagggaguugagcugaagucaggguacaaagauuggauccuauggauuuccuuugccauaucauguuuuuugcuuuguguugcuuuguugggguucaucaugugggccugccaaaagggcaacauuaggugcaacauuugcauuuga

SEQ ID NO: 45031 - RNA, 1701 nt, Artificial Sequence
  derived and/or modified CDS sequence (wt) from hemagglutinin__InfluenzaA__ALA08532
augaagacuaucauugcuuugagcuacauucuaugucugguuuucgcucaaaaaauuccuggaaaugacaauagcacggcaacgcugugccuugggcaccaugcaguaccaaacggaacgauagugaaaacaaucacaaaugaccgaauugaaguuacuaaugcuacugagcugguucagaauuccucaauaggugaaauaugcgacaguccucaucagauccuugauggagaaaacugcacacuaauagaugcucuauugggagauccucagugugauggcuuucaaaauaagaaaugggaccuuuuuguugaacgaagcaaagccuacagcaacuguuacccuuaugaugugccggauuaugccucccuuaggucacuaguugccucauccggcacacuggaguuuaacaaugaaagcuucaauuggacuggagucacucaaaacggaacaaguucugcuugcauaaggagaucuaguaguaguuucuuuaguagauuaaauugguugacccacuuaaacuacacauacccagcauugaacgugacuaugccaaacaaugaacaauuugacaaauuguacauuugggggguucaccacccggguacggacaaggaccaaaucuuccuguaugcucaaucaucaggaagaaucacaguaucuaccaaaagaagccaacaagcuguaaucccaaauaucggaucuagacccagaauaagggauaucccuagcagaauaagcaucuauuggacaauaguaaaaccgggagacauacuuuugauuaacagcacagggaaucuaauugcuccuagggguuacuucaaaauacgaagugggaaaagcucaauaaugagaucagaugcacccauuggcaaaugcaagucugaaugcaucacuccaaauggaagcauucccaaugacaaaccauuccaaaauguaaacaggaucacauacggggccugucccagauauguuaagcauagcacucugaaauuggcaacaggaaugcgaaauguaccagagaaacaaacuagaggcauauuuggcgcaauagcggguuucauagaaaaugguugggagggaaugguggaugguugguacgguuucaggcaucaaaauucugagggaagaggacaagcagcagaucucaaaagcacucaagcagcaaucgaucaaaucaaugggaagcugaaucgauugaucgggaaaaccaacgagaaauuccaucagauugaaaaagaauucucagaaguagaaggaagaauucaggaccuugagaaauauguugaggacacuaaaauagaucucuggucauacaacgcggagcuucuuguugcccuggagaaccaacauacaauugaucuaacugacucagaaaugaacaaacuguuugaaaaaacaaagaagcaacugagggaaaaugcugaggauaugggaaaugguuguuucaaaauauaccacaaaugugacaaugccugcauaggaucaauaagaaauggaacuuaugaccacaauguguacagggaugaagcauuaaacaaccgguuccagaucaagggaguugagcugaagucaggguacaaagauuggauccuauggauuuccuuugccauaucauguuuuuugcuuuguguugcuuuguugggguucaucaugugggccugccaaaagggcaacauuaggugcaacauuugcauuuga

SEQ ID NO: 45032 - RNA, 1701 nt, Artificial Sequence
  derived and/or modified CDS sequence (wt) from hemagglutinin__InfluenzaA__ALA08533
augaagacuaucauugcuuugagcuacauucuaugucugguuuucgcucaaaaaauuccuggaaaugacaauagcacggcaacgcugugccuugggcaccaugcaguaccaaacggaacgauagugaaaacaaucacaaaugaccgaauugaaguuacuaaugcuacugagcugguucagaauuccucaauaggugaaauaugcgacaguccucaucagauccuugauggagaaaacugcacacuaauagaugcucuauugggagauccucagugugauggcuuucaaaauaagaaaugggaccuuuuuguugaacgaagcaaagccuacagcaacuguuacccuuaugaugugccggauuaugccucccuuaggucacuaguugccucauccggcacacuggaguuuaacaaugaaagcuucaauuggacuggagucacucaaaacggaacaaguucugcuugcauaaggagaucuaguaguaguuucuuuaguagauuaaauugguugacccacuuaaacuacacauacccagcauugaacgugacuaugccaaacaaugaacaauuugacaaauuguacauuugggggguucaccacccggguacggacaaggaccaaaucuuccuguaugcucaaucaucaggaagaaucacaguaucuaccaaaagaagccaacaagcuguaaucccaaauaucggaucuagacccagaauaagggauaucccuagcagaauaagcaucuauuggacaauaguaaaaccgggagacauacuuuugauuaacagcacagggaaucuaauugcuccuagggguuacuucaaaauacgaagugggaaaagcucaauaaugagaucagaugcacccauugguaaaugcaagucugaaugcaucacuccaaauggaagcauucccaaugacaaaccauuccaaaauguaaacaggauuacauacggggccugucccagauauguuaagcauagcacucugaaauuggcaacaggaaugcgaaauguaccagagaaacaaacuagaggcauauuuggcgcaauagcggguuucauagaaaaugguugggagggaaugguggaugguugguacgguuucaggcaucaaaauucugagggaagaggacaagcagcagaucucaaaagcacucaagcagcaaucgaucaaaucaaugggaagcugaaucgauugaucgggaaaaccaacgagaaauuccaucagauugaaaaagaauucucagaaguagaaggaagaauucaggaccuugagaaauauguugaggacacuaaaauagaucucuggucauacaacgcggagcuucuuguugcccuggagaaccaacauacaauugaucuaacugacucagaaaugaacaaacuguuugaaaaaacaaagaagcaacugagggaaaaugcugaggauaugggaaaugguuguuucaaaauauaccacaaaugugacaaugccugcauaggaucaauaagaaauggaacuuaugaccacaauguguacagggaugaagcauuaaacaaccgguuccagaucaagggaguugagcugaagucaggguacaaagauuggauccuauggauuuccuuugccauaucauguuuuuugcuuuguguugcuuuguugggguucaucaugugggccugccaaaagggcaacauuaggugcaacauuugcauuuga

SEQ ID NO: 45033 - RNA, 1701 nt, Artificial Sequence
  derived and/or modified CDS sequence (wt) from hemagglutinin__InfluenzaA__ALA08534
augaagacuaucauugcuuugagcuacauucuaugucugguuuucgcucaaaaaauuccuggaaaugacaauagcacggcaacgcugugccuugggcaccaugcaguaccaaacggaacgauagugaaaacaaucacaaaugaccgaauugaaguuacuaaugcuacugagcugguucagaauuccucaauaggugaaauaugcgacaguccucaucagauccuugauggagaaaacugcacacuaauagaugcucuauugggagacccucagugugauggcuuucaaaauaagaaaugggaccucuuugucgaacgaagcaaagccuacagcaacuguuacccuuaugaugugccggauuaugccucccuuaggucacuaguugccucauccggcacacuggaguuuaacaaugaaagcuucaauuggacuggagucacucaaaacggaacaaguucugcuugcauaaggagaucuaguaguaguuucuuuaguagauuaaauugguugacccacuuaaacuacacauacccagcauugaacgugacuaugccaaacaaugaacaauuugacaaauuguacauuugggggguucaccacccggguacggacaaggaccaaaucuuccuguaugcucaaucaucaggaagaaucacaguaucuaccaaaagaagccaacaagcuguaaucccaaauaucggaucuagacccagaauaagggauaucccuagcagaauaagcaucuauuggacaauaguaaaaccgggagacauacuuuugauuaacagcacagggaaucuaauugcuccuagggguuacuucaaaauacgaagugggaaaagcucaauaaugagaucagaugcacccauuggcaaaugcaagucugaaugcaucacuccaaauggaagcauucccaaugacaaaccauuccaaaauguaaacaggaucacauacggggccugucccagauauguuaagcauagcacucugaaauuggcaacaggaaugcgaaauguaccagagaaacaaacuagaggcauauuuggcgcaauagcggguuucauagaaaaugguugggagggaaugguggaugguugguacgguuucaggcaucaaaauucugagggaagaggacaagcagcagaucucaaaagcacucaagcagcaaucgaucaaaucaaugggaagcugaaucgauugaucgggaaaaccaacgagaaauuccaucagauugaaaaagaauucucagaaguagaaggaagaauucaggaccuugagaaauauguugaggacacuaaaauagaucucuggucauacaacgcggagcuucuuguugcccuggagaaccaacauacaauugaucuaacugacucagaaaugaacaaacuguuugaaaaaacaaagaagcaacugagggaaaaugcugaggauaugggaaaugguuguuucaaaauauaccacaaaugugacaaugccugcauaggaucaauaagaaauggaacuuaugaccacaauguguacagggaugaagcauuaaacaaccgguuccagaucaagggaguugagcugaagucaggguacaaagauuggauccuauggauuuccuuugccauaucauguuuuuugcuuuguguugcuuuguugggguucaucaugugggccugccaaaagggcaacauuaggugcaacauuugcauuuga

SEQ ID NO: 45034 - RNA, 1701 nt, Artificial Sequence
  derived and/or modified CDS sequence (wt) from hemagglutinin__InfluenzaA__ALA08535
augaagacuaucauugcuuugagcuacauucuaugucugguuuucgcucaaaaaauuccuggaaaugacaauagcacggcaacgcugugccuugggcaccaugcaguaccaaacgggacgauagugaaaacaaucacaaaugaccgaauugaaguuacuaaugcuacugagcugguucagaauuccucaauaggugaaauaugcgacaguccucaucagauccuugauggagaaaacugcacacuaauagaugcucuauugggagacccucagugugauggcuuucaaaauaagaaaugggaccuuuuuguugaacgaagcaaagccuacagcaacuguuacccuuaugaugugccggauuaugccucccuuaggucacuaguugccucauccggcacacuggaguuuaacaaugaaagcuucaauuggacuggagucacucaaaacggaacaaguucugcuugcauaaggagaucuaguaguaguuucuuuaguagauuaaauugguugacccacuuaaacuacacauacccagcauugaacgugacuaugccaaacaaugagcaauuugacaaauuguacauuugggggguucaccacccggguacggacaaggaccaaaucuuccuguaugcucaaucaucaggaagaauaacaguaucuaccaaaagaagccaacaagcuguaaucccaaauaucggaucuagacccagaauaagggauauuccuagcagaauaagcaucuauuggacaauaguaaaaccgggagacauacuuuugauuaacagcacagggaaucuaauugcuccuagggguuacuucaaaauacgaagugggaaaagcucaauaaugagaucagaugcacccauuggcaaaugcaagucugagugcaucacuccaaacggaagcauucccaaugacaaaccauuccaaaauguaaacaggaucacauacggggccugucccagauauguuaagcauagcacucugaaauuggcaacaggaaugcgaaauguaccagagaaacaaacuagaggcauauuuggcgcaauagcggguuucauagaaaaugguugggagggaaugguggaugguugguacgguuucaggcaucaaaauucugagggaagaggacaagcagcagaucucaaaagcacucaagcagcaaucgaucaaaucaaugggaagcugaaucgauugaucgggaaaaccaacgagaaauuccaucagauugaaaaagaauucucagaaguagaaggaagaauucaggaccuugagaaauauguugaggacacuaaaauagaucucuggucauacaacgcggagcuucuuguugcccuggagaaccaacauacaauugaucuaacugacucagaaaugaacaaacuguuugaaaaaacaaagaagcaacugagggaaaaugcugaggauaugggaaaugguuguuucaaaauauaccacaaaugugacaaugccugcauaggaucaauaagaaauggaacuuaugaccacaauguguacagggaugaagcauuaaacaaccgguuccagaucaagggaguugagcugaagucaggguacaaagauuggauccuauggauuuccuuugccauaucauguuuuuugcuuuguguugcuuuguugggguucaucaugugggccugccaaaagggcaacauuaggugcaacauuugcauuuga

SEQ ID NO: 45035 - RNA, 1701 nt, Artificial Sequence
  derived and/or modified CDS sequence (wt) from hemagglutinin__InfluenzaA__ALA08536
augaagacuaucauugcuuugagcuacauucuaugucugguuuucgcucaaaagcuuccugaaaaugacaauagcacggcaacgcugugccuugggcaccaugcaguaccaaacggaacgauagugaaaacaaucacgagugaccgaauugaaguuacuaaugcuacugagcugguucagaauuccucaauaggugaaauaugcgacaguccucaucagauccuugauggaaaaaacugcacacuaauagaugcucuauugggagacccucagugugauggcuuucaaaauaagaaaugggaccuuuuuguugaacgaagcaaagccuacagcaacuguuacccuuaugaugugccggauuaugccucccuuaggucacuaguugccucauccgguacacuggaguuuaacgaugaaagcuucaauugggcuggagucacucaaaacggaacaaguucugcuugcauaaggggaucuaauaguaguuucuuuaguagauuaaauugguugacccacucaaacuucaaauacccagcauugaacgugacuaugccaaacaaugaacaauuugacaaauuguacauuugggggguucaccacccggguacggacaaggaccaaaucuuccuguaugcucaaucaucaggaagaaucacaguauccaccaaaagaagccaacaagcuguaaucccgaauaucggaucuagacccagaauaaggaauaucccuagcagaauaagcaucuauuggacaauaguaaaaccgggagacauacuuuugauuaacagcacagggaaucuaauugcuccuagggguuacuucaaaauacgaagugggaaaagcucaauaaugagaucagaugcacccauuggcaaaugcaagucugaaugcaucacuccaaauggaagcauucccaaugacaaaccauuccaaaauguaaacaggaucacauacggggccugucccagauauguuaagcaaagcacucugaaauuggcaacaggaaugcgaaauguaccagagaaacaaacuagaggcauauuuggcgcaauagcggguuucauagaaaaugguugggagggaaugaaggaugguugguacgguuucaggcaucaaaauucugagggaagaggacaagcagcagaucucaaaagcacucaagcagcaaucgaucaaaucaaugggaagcugaaucgauugaucgggaaaaccaacgagaaauuccaucagauugaaaaagaauucucagaaguagaagggagaauucaggaccuugagaaauauguugaggacacaaaaauagaucucuggucauacaacgcggagcuucuuguugcccuggagaaccaacauacaauugaucugacugacucagaaaugaacaaacuguuugaaaaaacaaagaagcaacugagggaaaaugcugaggauaugggcaaugguuguuucaaaauauaccacaaaugugacaaugccugcauaggaucaaucagaaauggaacuuaugaccacgauguauacagggaugaagcuuuaaacaaccgguuccagaucaagggaguugagcugaagucaggguacaaagauuggauccuauggauuuccuuugccauaucauguuuuuugcuuuguguugcuuuguugggguucaucaugugggccugccaaaagggcaacauuaggugcaacauuugcauuuga

SEQ ID NO: 45036 - RNA, 1701 nt, Artificial Sequence
  derived and/or modified CDS sequence (wt) from hemagglutinin__InfluenzaA__ALA08537
augaagacuaucauugcuuugagcuacauucuaugucugguuuucgcucaaaagcuuccugaaaaugacaauagcacggcaacgcugugccuugggcaccaugcaguaccaaacggaacgauagugaagacaaucacgagugaccgaauugaaguuacuaaugcuacugagcugguucagaauuccucaauaggugaaauaugcgacaguccucaucagauccuugauggaaaaaacugcacacuaauagaugcucuauugggagacccucagugugauggcuuucaaaauaagaaaugggaccuuuuuguugaacgaagcaaagccuacagcaacuguuacccuuaugaugugccggauuaugccucccuuaggucacuaguugccucauccgguacacuggaguuuaacgaugaaagcuucaauugggcuggagucacucaaaacggaacaaguucugcuugcauaaggggaucuaauaguaguuucuuuaguagauuaaauugguugacccacucaaacuucaaauacccagcauugaacgugacuaugccaaacaaugaacaauuugacaaauuguacauuugggggguucaccacccggguacggacaaggaccaaaucuuccuguaugcucaaucaucaggaagaaucacaguauccaccaaaagaagccaacaagcuguaaucccgaauaucggaucuagacccagaauaaggaauaucccuagcagaauaagcaucuauuggacaauaguaaaaccgggagacauacuuuugauuaacagcacagggaaucuaauugcuccuagggguuacuucaaaauacgaagugggaaaagcucaauaaugagaucagaugcacccauuggcaaaugcaagucugaaugcaucacuccaaauggaagcauucccaaugacaaaccauuccaaaauguaaacaggaucacauacggggccugucccagauauguuaagcaaagcacucugaaauuggcaacaggaaugcgaaauguaccagagaaacaaacuagaggcauauuuggcgcaauagcggguuucauagaaaaugguugggagggaaugaaggaugguugguacgguuucaggcaucaaaauucugagggaagaggacaagcagcagaucucaaaagcacucaagcagcaaucgaucaaaucaaugggaagcugaaucgauugaucgggaaaaccaacgagaaauuccaucagauugaaaaagaauucucagaaguagaagggagaauucaggaccuugagaaauauguugaggacacaaaaauagaucucuggucauacaacgcggagcuucuuguugcccuggagaaccaacauacaauugaucuaacugacucagaaaugaacaaacuguuugaaaaaacaaagaagcaacugagggaaaaugcugaggauaugggcaaugguuguuucaaaauauaccacaaaugugacaaugccugcauaggaucaaucagaaauggaacuuaugaccacgauguauacagggaugaagcuuuaaacaaccgguuccagaucaagggaguugagcugaagucaggguacaaagauuggauccuauggauuuccuuugccauaucauguuuuuugcuuuguguugcuuuguugggguucaucaugugggccugccaaaagggcaacauuaggugcaacauuugcauuuga

SEQ ID NO: 45037 - RNA, 1701 nt, Artificial Sequence; identical to SEQ ID NO: 45035
  derived and/or modified CDS sequence (wt) from hemagglutinin__InfluenzaA__ALA08538

SEQ ID NO: 45038 - RNA, 1701 nt, Artificial Sequence; identical to SEQ ID NO: 45006
  derived and/or modified CDS sequence (wt) from hemagglutinin__InfluenzaA__ALA08539

SEQ ID NO: 45039 - RNA, 1701 nt, Artificial Sequence; identical to SEQ ID NO: 45018
  derived and/or modified CDS sequence (wt) from hemagglutinin__InfluenzaA__ALA08540

SEQ ID NO: 45040 - RNA, 1701 nt, Artificial Sequence; identical to SEQ ID NO: 45036
  derived and/or modified CDS sequence (wt) from hemagglutinin__InfluenzaA__ALA08541

SEQ ID NO: 45041 - RNA, 1701 nt, Artificial Sequence
  derived and/or modified CDS sequence (wt) from hemagglutinin__InfluenzaA__ALA08542
augaagacuaucauugcuuugagcuacauucuaugucugguuuucgcucaaaagcuuccugaaaaugacaauagcacggcaacgcugugccuugggcaccaugcaguaccaaacggaacgauagugaaaacaaucacgagugaccgaauugaaguuacuaaugcuacugagcugguucagaauuccucaauaggugaaauaugcgacaguccucaucagauccuugauggaaaaaacugcacacuaauagaugcucuauugggggacccucagugugauggcuuucaaaauaagaaaugggaccuuuuuguugaacgaagcaaagccuacagcaacuguuacccuuaugaugugccggauuaugccucccuuaggucacuaguugccucauccgguacacuggaguuuaacgaugaaagcuucaauugggcuggagucacucaaaacggaacaaguucugcuugcauaaggggaucuaauaguaguuucuuuaguagauuaaauugguugacccacucaaacuucaaauacccagcauugaacgugacuaugccaaacaaugaacaauuugacaaauuguacauuugggggguucaccacccggguacggacaaggaccaaaucuuccuguaugcucaaucaucaggaagaaucacaguauccaccaaaagaagccaacaagcuguaaucccgaauaucggaucuagacccagaauaaggaauaucccuagcagaauaagcaucuauuggacaauaguaaaaccaggagacauacuuuugauuaacagcacagggaaucuaauugcuccuagggguuacuucaaaauacgaagugggaaaagcucaauaaugagaucagaugcacccauuggcaaaugcaagucugaaugcaucacuccaaauggaagcauucccaaugacaaaccauuccaaaauguaaacaggaucacauacggggccugucccagauauguuaagcaaagcacucugaaauuggcaacaggaaugcgaaauguaccagagaaacaaacuagaggcauauuuggcgcaauagcggguuucauagaaaaugguugggagggaaugaaggaugguugguacgguuucaggcaucaaaauucugagggaagaggacaagcagcagaucucaaaagcacucaagcagcaaucgaucaaaucaaugggaagcugaaucgauugaucgggaaaaccaacgagaaauuccaucagauugaaaaagaauucucagaaguagaagggagaauucaggaccuugagaaauauguugaggacacaaaaauagaucucuggucauacaacgcggagcuucuuguugcccuggagaaccaacauacaauugaucuaacugacucagaaaugaacaaacuguuugaaaaaacaaagaagcaacugagggaaaaugcugaggauaugggcaaugguuguuucaaaauauaccacaaaugugacaaugccugcauaggaucaaucagaaauggaacuuaugaccacgauguauauagggaugaagcuuuaaacaaccgguuccagaucaagggaguugagcugaagucaggguacaaagauuggauccuauggauuuccuuugccauaucauguuuuuugcuuuguguugcuuuguugggguucaucaugugggccugccaaaagggcaacauuaggugcaacauuugcauuuga

SEQ ID NO: 45042 - RNA, 1701 nt, Artificial Sequence
  derived and/or modified CDS sequence (wt) from hemagglutinin__InfluenzaA__ALA08543
augaagacuaucauugcuuugagcuacauucuaugucugguuuucgcucaaaaaauuccuggaaaugacaauagcacggcaacgcugugccuugggcaccaugcaguaccaaacggaacgauagugaaaacaaucacaaaugaccgaauugaaguuacuaaugcuacugagcugguucagaauuccucaauaggugaaauaugcgacaguccucaucagauccuugauggagaaaacugcacacuaauagaugcucuauugggagacccucagugugauggcuuucaaaauaagaaaugggaccuuuuuguugaacgaagcaaagccuacagcaacuguuacccuuaugaugugccggauuaugccucccuuaggucacuaguugccucauccggcacacuggaguuuaacaaugaaagcuucaauuggacuggagucacucaaaacggaacaaguucugcuugcauaaggagaucuaguaguaguuucuuuaguagauuaaauugguugacccacuuaaacuacacauacccagcauugaacgugacuaugccaaacaaugaacaauuugacaaauuguacauuugggggguucaccacccggguacggacaaggaccaaaucuuccuguaugcucaaucaucaggaagaaucacaguaucuaccaaaagaagccaacaagcugcaaucccaaauaucggaucuagacccagaauaagggauaucccuagcagaauaagcaucuauuggacaauaguaaaaccgggggacauacuuuugauuaacagcacagggaaucuaauugcuccuagggguuacuucaaaauacgaagugggaaaagcucaauaaugagaucagaugcacccauuggcaaaugcaagucugaaugcaucacuccaaauggaagcauucccaaugacaaaccauuccaaaauguaaacaggaucacauacggggccugucccagauauguuaagcauagcacucugaaauuggcaacaggaaugcgaaauguaccagagaaacaaacuagaggcauauuuggcgcaauagcggguuucauagaaaaugguugggagggaaugguggaugguugguacgguuucaggcaucaaaauucugagggaagaggacaagcagcagaucucaaaagcacucaagcagcaaucgaucaaaucaaugggaagcugaaucgauugaucgggaaaaccaacgagaaauuccaucagauugaaaaagaauucucagaaguagaaggaagaauucaggaccuugagaaauauguugaggacacuaaaauagaucucuggucauacaacgcggagcuucuuguugcccuggagaaccaacauacaauugaucuaacugacucagaaaugaacaaacuguuugaaaaaacaaagaagcaacugagggaaaaugcugaggauaugggaaaugguuguuucaaaauauaccacaaaugugacaaugccugcauaggaucaauaagaaauggaacuuaugaccacaauguguacagggaugaagcauuaaacaaccgguuccagaucaaaggaguugagcugaagucaggguacaaagauuggauccuauggauuuccuuugccauaucauguuuuuugcuuuguguugcuuuguugggguucaucaugugggccugccaaaagggcaacauuaggugcaacauuugcauuuga

SEQ ID NO: 45043 - RNA, 1701 nt, Artificial Sequence
  derived and/or modified CDS sequence (wt) from hemagglutinin__InfluenzaA__ALA08545
augaagacuaucauugcuuugagcuacauucuaugucugguuuucgcucaaaaaauuccuggaaaugacaauagcacggcaacgcugugccuugggcaccaugcaguaccaaacggaacgauagugaaaacaaucacaaaugaccgaauugaaguuacuaaugcuacugagcugguucagaauuccucaauaggugaaauaugcgacaguccucaucagauccuugauggagaaaacugcacacuaauagaugcucuauugggagacccucagugugauggcuuucaaaauaagaaaugggaccuuuuuguugaacgaagcaaagccuacagcaacuguuacccuuaugaugugccggauuaugccucccuuaggucacuaguugccucauccggcacacuggaguuuaacaaugaaagcuucaauuggacuggagucacucaaaacggaacaaguucugcuugcauaaggagaucuaguaguaguuucuuuaguagauuaaauugguugacccacuuaaacuacacauacccagcauugaacgugacuaugccaaacaaugaacaauuugacaaauuguacauuugggggguucaccacccggguacggacaaggaccaaaucuuccuguaugcucaaucaucaggaagaaucacaguaucuaccaaaagaagccaacaagcuguaaucccaaauaucggaucuagacccagaauaagggauaucccuagcagaauaagcaucuauuggacaauaguaaaaccgggggacauacuuuugauuaacagcacagggaaucuaauugcuccuagggguuacuucaaaauacgaagugggaaaagcucaauaaugagaucagaugcacccauuggcaaaugcaagucugaaugcaucacuccaaauggaagcauucccaaugacaaaccauuccaaaauguaaacaggaucacauacggggccugucccagauauguuaagcauagcacucugaaauuggcaacaggaaugcgaaauguaccagagaaacaaacuagaggcauauuuggcgcaauagcggguuucauagaaaaugguugggagggaaugguggaugguugguacgguuucaggcaucaaaauucugagggaagaggacaagcagcagaucucaaaagcacucaagcagcaaucgaucaaaucaaugggaagcugaaucgauugaucgggaaaaccaacgagaaauuccaucagauugaaaaagaauucucagaaguagaaggaagaauucaggaccuugagaaauauguugaggacacuaaaauagaucucuggucauacaacgcggagcuucuuguugcccuggagaaccaacauacaauugaucuaacugacucagaaaugaacaaacuguuugaaaaaacaaagaagcaacugagggaaaaugcugaggauaugggaaaugguuguuucaaaauauaccacaaaugugacaaugccugcauaggaucaauaagaaauggaacuuaugaccacaauguguacagggaugaagcauuaaacaaccgguuccagaucaaaggaguugagcugaagucaggguacaaagauuggauccuauggauuuccuuugccauaucauguuuuuugcuuuguguugcuuuguugggguucaucaugugggccugccaaaagggcaacauuaggugcaacauuugcauuuga

SEQ ID NO: 45044 - RNA, 1701 nt, Artificial Sequence; identical to SEQ ID NO: 45043
  derived and/or modified CDS sequence (wt) from hemagglutinin__InfluenzaA__ALA08546

SEQ ID NO: 45045 - RNA, 1701 nt, Artificial Sequence
  derived and/or modified CDS sequence (wt) from hemagglutinin__InfluenzaA__ALA08548
augaagacuaucauugcuuugagcuacauucuaugucugguuuucgcucaaaagcuuccugaaaaugacaauagcacggcaacgcugugccuugggcaccaugcaguaccaaacggaacgauagugaaaacaaucacgagugaccgaauugaaguuacuaaugcuacugagcugguucagaauuccucaauaggugaaauaugcgacaguccucaucagauccuugauggaaaaaacugcacacuaauagaugcucuauugggagacccucagugugauggcuuucaaaauaagaaaugggaccuuuuuguugaacgaagcaaagccuacagcaacuguuacccuuaugaugugccggauuaugccucccuuaggucacuaguugccucauccgguacacuggaguuuaacgaugaaagcuucaauugggcuggagucgcucaaaacggaacaaguucugcuugcauaaggggaucuaauaguaguuucuuuaguagauuaaauugguugacccacucaaacuucaaauauccagcauugaacgugacuaugccaaacaaugaacaauuugacaaauuguacauuugggggguucaccacccggguacggacaaggaccaaaucuuccuguaugcucaaucaucaggaagaaucacaguauccaccaaaagaagccaacaagcuguaaucccgaauaucggaucuagacccagaauaaggaauaucccuagcagaauaagcaucuauuggacaauaguaaaaccgggagacauacuuuugauuaacagcacagggaaucuaauugcuccuagggguuacuucaaaauacgaagugggaaaagcucaauaaugagaucagaugcacccauuggcaaaugcaagucugaaugcaucacuccaaauggaagcauucccaaugacaaaccauuccaaaauguaaacaggaucacauacggggccugucccagauauguuaagcaaagcacucugaaauuggcaacaggaaugcgaaauguaccagagaaacaaacuagaggcauauuuggcgcaauagcggguuucauagaaaaugguugggagggaaugaaggaugguugguacgguuucaggcaucaaaauucugagggaagaggacaagcagcagaucucaaaagcacucaagcagcaaucgaucaaaucaaugggaagcugaaucgauugaucgggaaaaccaacgagaaauuccaucagauugaaaaagaauucucagaaguagaagggagaauucaggaccuugagaaauauguugaggacacaaaaauagaucucuggucauacaacgcggagcuucuuguugcccuggagaaccaacauacaauugaucuaacugacucagaaaugaacaaacuguuugaaaaaacaaagaagcaacugagggaaaaugcugaggauaugggcaaugguuguuucaaaauauaccacaaaugugacaaugccugcauaggaucaaucagaaauggaacuuaugaccacgauguauacagggaugaagcuuuaaacaaccgguuccagaucaagggaguugagcugaagucaggguacaaagauuggauccuauggauuuccuuugccauaucauguuuuuugcuuuguguugcuuuguugggguucaucaugugggccugccaaaagggcaacauuaggugcaacauuugcauuuga

SEQ ID NO: 45046 - RNA, 1701 nt, Artificial Sequence
  derived and/or modified CDS sequence (wt) from hemagglutinin__InfluenzaA__ALA08549
augaagacuaucauugccuugagcuacauucuaugucugguuuucgcucaaaaaauuccuggaaaugacaauagcacggcaacgcugugccuugggcaccaugcaguaccaaacggaacgauagugaaaacaaucacaaaugaccgaauugaaguuacuaaugcuacugagcugguucagaauuccucaacagguguaauaugcgacaguccucaucagauccuugauggagaaaacugcacacuaauagaugcucuauugggagacccucagugugauggcuuucaaaauaagaaaugggaccuuuuuguugaacgaagcaaagccuacagcaacuguuacccuuaugaugugccggauuaugccucccuuaggucacuaguugccucauccggcacacuggaguuuaacaaugaaagcuucaauuggacuggagucacucaaaacggaacaaguucugcuugcauaaggagaucuaguaguaguuucuuuaguagauuaaauugguugacccacuuaaacuacacauacccagcauugaacgugacuaugccaaacaaugaacaauuugacaaauuguacauuugggggguucaccacccggguacggacaaggaccaaaucuuccuguaugcucaaucaucaggaagaaucacaguaucuaccaaaggaagccaacaagcuguaaucccaaauaucggaucuagacccagaauaagggauaucccuagcagaauaagcaucuauuggacaauaguaaaaccgggagacauacuuuugauuaacagcacggggaaucuaauugcuccuagggguuacuucaaaauacgaagugggaaaagcucaauaaugagaucagaugcacccauuggcaaaugcaagucugaaugcaucacuccaaauggaagcauucccaaugacaaaccauuccaaaauguaaacaggaucacauacggggccugucccagauauguuaagcauagcacucugaaauuggcaacaggaaugcgaaauguaccagagaaacaaacuagaggcauauuuggcgcaauagcggguuucauagaaaaugguugggagggaaugguggaugguugguacgguuucaggcaucaaaauucugagggaagaggacaagcagcagaucucaaaagcacucaagcagcaaucgaucaaaucaaugggaagcugaaucgauugaucgggaaaaccaacgagaaauuccaucagauugaaaaagaauucucagaaguagaaggaagaauucaggaccuugagaaauauguugaggacacuaaaauagaucucuggucauacaacgcggagcuucuuguugcccuggagaaccaacauacaauugaucuaacugacucagaaaugaacaaacuguuugaaaaaacaaggaagcaacugagggaaaaugcugaggauaugggaaaugguuguuucaaaauauaccacaaaugugacaaugccugcauaggaucaauaagaaauggaacuuaugaccacaauguguacagggaugaagcauuaaacaaccgguuccagaucaagggaguugagcugaagucaggguacaaagauuggauccuauggauuuccuuugccauaucauguuuuuugcuuuguguugcuuuguugggguucaucaugugggccugccaaaagggcaacauuaggugcaacauuugcauuuga

SEQ ID NO: 45047 - RNA, 1701 nt, Artificial Sequence; identical to SEQ ID NO: 45035
  derived and/or modified CDS sequence (wt) from hemagglutinin__InfluenzaA__ALA08550

SEQ ID NO: 45048 - RNA, 1701 nt, Artificial Sequence
  derived and/or modified CDS sequence (wt) from hemagglutinin__InfluenzaA__ALA08551
augaagacuaucauugcuuugagcuacauucuaugucugguuuucgcucaaaagcuucuugaaaaugacaauagcacggcaacgcugugccuugggcaccaugcaguaccaaacggaacgauagugaaaacaaucacgagugaccgaauugaaguuacuaaugcuacugagcugguucagaauuccucaauaggugaaauaugcgacaguccucaucagauccuugauggaaaaaacugcacacuaauagaugcucuauugggagacccucagugugauggcuuucaaaauaagaaaugggaccuuuuuguugaacgaagcaaagccuacagcaacuguuacccuuaugaugugccggauuaugccucccuuaggucacuaguugccucauccgguacacuggaguuuaacgaugaaagcuucaauugggcuggagucacucaaaacggaacaaguucugcuugcauaaggggaucuaauaguaguuucuuuaguagauuaaauugguugacccacucaaacuucaaauacccagcauugaacgugacuaugccaaacaaugaacaauuugacaaauuguacauuugggggguucaccacccggguacggacaaggaccaaaucuuccuguaugcucaaucaucaggaagaaucacaguauccaccaaaagaagccaacaagcuguaaucccgaauaucggaucuagacccagaauaaggaauaucccuagcagaauaagcaucuauuggacaauaguaaaaccgggagacauacuuuugauuaacagcacagggaaucuaauugcuccuagggguuacuucaaaauacgaagugggaaaagcucaauaaugagaucagaugcacccauuggcaaaugcaagucugaaugcaucacuccaaauggaagcauucccaaugacaaaccauuccaaaauguaaacaggaucacauacggggccugucccagauauguuaagcaaagcacucugaaauuggcaacaggaaugcgaaauguaccagagaaacaaacuagaggcauauuuggcgcaauagcggguuucauagaaaaugguugggagggaaugaaggaugguugguacgguuucaggcaucaaaauucugagggaagaggacaagcagcagaucucaaaagcacucaagcagcaaucgaucaaaucaaugggaagcugaaucgauugaucgggaaaaccaacgagaaauuccaucagauugaaaaagaauucucagaaguagaagggagaauucaggaccuugagaaauauguugaggacacaaaaauagaucucuggucauacaacgcggagcuucuuguugcccuggagaaccaacauacaauugaucuaacugacucagaaaugaacaaacuguuugaaaaaacaaagaagcaacugagggaaaaugcugaggauaugggcaaugguuguuucaaaauauaccacaaaugugacaaugccugcauaggaucaaucagaaauggaacuuaugaccacaauguauacagggaugaagcuuuaaacaaccgguuccagaucaagggaguugagcugaagucaggguacaaagauuggauccuauggauuuccuuugccauaucauguuuuuugcuuuguguugcuuuguugggguucaucaugugggccugccaaaagggcaacauuaggugcaacauuugcauuuga

SEQ ID NO: 45049 - RNA, 1701 nt, Artificial Sequence; identical to SEQ ID NO: 45018
  derived and/or modified CDS sequence (wt) from hemagglutinin__InfluenzaA__ALA08552

SEQ ID NO: 45050 - RNA, 1701 nt, Artificial Sequence; identical to SEQ ID NO: 45018
  derived and/or modified CDS sequence (wt) from hemagglutinin__InfluenzaA__ALA08553

SEQ ID NO: 45051 - RNA, 1701 nt, Artificial Sequence
  derived and/or modified CDS sequence (wt) from hemagglutinin__InfluenzaA__ALA08554
augaagacuaucauugcuuugagcuacauucuaugucugguuuucgcucaaaaaauuccuggaaaugacaauagcacggcaacgcugugccuugggcaccaugcaguaccaaacggaacgauagugaaaacaaucacaaaugaccgaauugaaguuacuaaugcuacugagcugguucagaauuccucaauaggugaaauaugcgacaguccucaucagauccuugauggagaaaacugcacacuaauagaugcucuauugggagacccucagugugauggcuuucaaaauaagaaaugggaccuuuuuguugaacgaagcaaagccuacagcaacuguuacccuuaugaugugccggauuaugccucccuuaggucacuaguugccucauccggcacacuggaguuuaacaaugaaagcuucaauuggacuggagucacucaaaacggaacaaguucugcuugcauaaggagaucuaguaguaguuucuuuaguagauuaaauugguugacccacuuaaacuacacauacccagcauugaacgugacuaugccaaacaaugaacaauuugacaaauuguacauuugggggguucaccacccggguacggacaaggaccaaaucuuccuguaugcucaaucaucaggaagaaucacaguaucuaccaaaagaagccaacaagcuguaaucccaaauaucggaucuagacccagaauaagggauaucccuagcagaauaagcaucuauuggacaauaguaaaaccgggggacauacuuuugauuaacagcacagggaaucuaauugcuccuagggguuacuucaaaauacgaagugggaaaagcucaauaaugagaucagaugcacccauuggcaaaugcaagucugaaugcaucacuccaaauggaagcauucccaaugacaaaccauuccaaaauguaaacaggaucacauacggggccugucccagauauguuaagcauagcacucugaaauuggcaacaggaaugcgaaauguaccagagaaacaaacuagaggcauauuuggcgcaauagcggguuucauagaaaaugguugggagggaaugguggaugguugguacgguuucaggcaucaaaauucugagggaagaggacaagcagcagaucucaaaagcacucaagcagcaaucgaucaaaucaaugggaagcugaaucgauugaucgggaaaaccaacgagaaauuccaucagauugaaaaagaauucucagaaguagaaggaagaauucaggaccuugagaaauauguugaggacacuaaaauagaucucuggucauacaacgcggagcuucuuguugcccuggagaaccaacauacaauugaucuaacugacucagaaaugaacaaacuguuugaaaaaacaaagaagcaacugagggaaaaugcugaggauaugggaaaugguuguuucaaaauauaccacaaaugugacaaugccugcauaggaucaauaagaaauggaacuuaugaccacaauguguacagggaugaagcauuaaacaaccgguuccagaucaaaggaguugagcugaugucaggguacaaagauuggauccuauggauuuccuuugccauaucauguuuuuugcuuuguguugcuuuguugggguucaucaugugggccugccaaaagggcaacauuaggugcaacauuugcauuuga

SEQ ID NO: 45052 - RNA, 1701 nt, Artificial Sequence
  derived and/or modified CDS sequence (wt) from hemagglutinin__InfluenzaA__ALA08555
augaagacuaucauugcuuugagcuacauucuaugucugguuuucgcucaaaagcuuccugaaaaugacaauagcacggcaacgcugugccuugggcaccaugcaguaccaaacggaacgauagugaaaacaaucacgagugaccaaauugaaguuacuaaugcuacugagcugguucagaauuccucaauaggugaaauaugcgacaguccucaucagauccuugauggaaaaaacugcacacuaauagaugcucuauugggagacccucagugugauggcuuucaaaauaagaaaugggaccuuuuuguugaacgaagcaaagccuacagcaacuguuacccuuaugaugugccggauuaugccucccuuaggucacuaguugccucauccgguacacuggaguuuaacgaugaaagcuucaauugggcuggagucacucaaaacggaacaaguucugcuugcauaaggggaucuaauaguaguuucuuuaguagauuaaauugguugacccacucaaacuucaaauacccagcauugaacgugacuaugccaaacaaugaacaauuugacaaauuguacauuugggggguucaccacccggguacggacaaggaccaaaucuuccuguaugcucaaucaucaggaagaaucacaguauccaccaaaagaagccaacaagcuguaaucccgaguaucggaucuagacccagaauaaggaauaucccuagcagaauaagcaucuauuggacaauaguaaaaccgggagacauacuuuugauuaacagcacagggaaucuaauugcuccuagggguuacuucaaaauacgaagugggaaaagcucaauaaugagaucagaugcacccauuggcaaaugcaagucugaaugcaucacuccaaauggaagcauucccaaugacaaaccauuccaaaauguaaacaggaucacauacggggccugucccagauauguuaagcaaagcacucugaaauuggcaacaggaaugcgaaauguaccagagaaacaaacuagaggcauauuuggcgcaauagcggguuucauagaaaaugguugggagggaaugaaggaugguugguacgguuucaggcaucaaaauucugagggaagaggacaagcagcagaucucaaaagcacucaagcagcaaucgaucaaaucaaugggaagcugaaucgauugaucgggaaaaccaacgagaaauuccaucagauugaaaaagaauucucagaaguagaagggagaauucaggaccuugagaaauauguugaggacacaaaaauagaucucuggucauacaacgcggagcuucuuguugcccuggagaaccaacauacaauugaucuaacugacucagaaaugaacaaacuguuugaaaaaacaaagaagcaacugagggaaaaugcugaggauaugggcaaugguuguuucaaaauauaccacaaaugugacaaugccugcauaggaucaaucagaaauggaacuuaugaccacaauguauacagggaugaagcuuuaaacaaccgguuccagaucaagggaguugagcugaagucaggguacaaagauuggauccuauggauuuccuuugccauaucauguuuuuugcuuuguguugcuuuguugggguucaucaugugggccugccaaaagggcaacauuaggugcaacauuugcauuuga

SEQ ID NO: 45053 - RNA, 1701 nt, Artificial Sequence
  derived and/or modified CDS sequence (wt) from hemagglutinin__InfluenzaA__ALA08556
augaagacuaucauugcuuuaagcuacauucuaugucugguuuucgcucaaaaaauuccuggaaaugacaauagcacggcaacgcugugccuugggcaccaugcaguaccaaacggaacgauagugaaaacaaucacaaaugaccgaauugaaguuacuaaugcuacugagcugguucagaauuccucaauaggugaaauaugcgacaguccucaucagauccuugauggagaaaacugcacacuaauagaugcucuauugggagacccucagugugauggcuuucaaaauaagaaaugggaccuuuuuguugaacgaagcaaagccuacagcaacuguuacccuuaugaugugccggauuaugccucccuuaggucacuaguugccucauccggcacacuggaguuuaacaaugaaagcuucaauuggacuggaaucacucaaaacggaacaaguucugcuugcauaaggagaucuaguaguaguuucuuuaguagauuaaauugguugacccacuuaaacuacacauacccagcauugaacgugacuaugccaaacaaugaacaauuugacaaauuguacauuugggggguucaccacccggguacggacaaggaccaaaucuuccuguaugcucaaucaucaggaagaaucacaguaucuaccaaaagaagccaacaagcuguaaucccaaauaucggaucuagacccagaauaagggauaucccuagcagaauaagcaucuauuggacaauaguaaaaccgggggacauacuuuugauuaacagcacagggaaucuaauugcuccuagggguuacuucaaaauacgaagugggaaaagcucaauaaugagaucagaugcacccauuggcaaaugcaagucugaaugcaucacuccaaauggaagcauucccaaugacaaaccauuccaaaauguaaacaggaucacauacggggccugucccagauauguuaagcauagcacucugaaauuggcaacaggaaugcgaaauguaccagagaaacaaacuagaggcauauuuggcgcaauagcggguuucauagaaaaugguugggagggaaugguggaugguugguacgguuucaggcaucaaaauucugagggaagaggacaagcagcagaucucaaaagcacucaagcagcaaucgaucaaaucaaugggaagcugaaucgauugaucgggaaaaccaacgagaaauuccaucagauugaaaaagaauucucagaaguagaaggaagaauucaggaccuugagaaauauguugaggacacuaaaauagaucucuggucauacaacgcggagcuucuuguugcccuggagaaccaacauacaauugaucuaacugacucagaaaugaacaaacuguuugaaaaaacaaagaagcaacugagggaaaaugcugaggauaugggaaaugguuguuucaaaauauaccacaaaugugacaaugccugcauaggaucaauaagaaauggaacuuaugaccacaauguguacagggaugaagcauuaaacaaccgguuccagaucaaaggaguugagcugaagucaggguacaaagauuggauccuauggauuuccuuugccauaucauguuuuuugcuuuguguugcuuuguugggguucaucaugugggccugccaaaagggcaacauuaggugcaacauuugcauuuga

SEQ ID NO: 45054 - RNA, 1701 nt, Artificial Sequence; identical to SEQ ID NO: 45018
  derived and/or modified CDS sequence (wt) from hemagglutinin__InfluenzaA__ALA08557

SEQ ID NO: 45055 - RNA, 1701 nt, Artificial Sequence
  derived and/or modified CDS sequence (wt) from hemagglutinin__InfluenzaA__ALA08558
augaagacuaucauugcuuugagcuacauucuaugucugguuuucgcucaaaagcuuccugaaaaugacaauagcacggcaacgcugugccuugggcaccaugcaguaccaaacggaacgauagugaaaacaaucacgagugaccgaauugaaguuacuaaugcuacugagcugguucagaauuccucaauaggugaaauaugcgacaguccucaucagauccuugauggaaaaaacugcacacuaauagaugcucuauugggagacccucagugugauggcuuucaaaauaagaaaugggaccuuuuuguugaacgaagcaaagccuacagcaacuguuacccuuaugaugugccggauuaugccucccuuaggucacuaguugccucauccgguacacuggaguuuaacgaugaaagcuucaauugggcuggagucacucaaaacggaacaaguucugcuugcauaaggggaucuaauaguaguuucuuuaguagauuaaauugguugacccacucaaacuucaaauacccagcauugaacgugacuaugccaaacaaugaacaauuugacaaauuguacauuugggggguucaccacccggguacggacaaggaccaaaucuuccuguaugcucaaucaucaggaagaaucacaguauccaccaaaagaagccaacaagcuguaaucccgaauaucggaucuagacccagaauaaggaauaucccuagcagaauaagcaucuauuggacaauaguaaaaccgggagacauacuuuugauuaacagcacagggaaucuaauugcuccuagggguuacuucaaaauacgaagugggaaaagcucaauaaugagaucagaugcacccauuggcaaaugcaagucugaaugcaucacuccaaauggaagcauucccaaugacaaaccauuccaaaauguaaacaggaucacauacggggccugucccagauauguuaagcaaagcacucugaaauuggcaacaggaaugcgaaauguaccagagaaacaaacuagaggcauauuuggcgcaauagcggguuucauagaaaaugguugggagggaaugaaggaugguugguacgguuucagacaucaaaauucugagggaagaggacaagcagcagaucucaaaagcacucaagcagcaaucgaucaaaucaaugggaagcugaaucgauugaucgggaaaaccaacgagaaauuccaucagauugaaaaagaauucucagaaguagaagggagaauucaggaccuugagaaauauguugaggacacaaaaauagaucucuggucauacaacgcggagcuucuuguugcccuggagaaccaacauacaauugaucugacugacucagaaaugaacaaacuguuugaaaaaacaaagaagcaacugagggaaaaugcugaggauaugggcaaugguuguuucaaaauauaccacaaaugugacaaugccugcauaggaucaaucagaaauggaacuuaugaccacgauguauacagggaugaagcuuuaaacaaccgguuccagaucaagggaguugagcugaagucaggguacaaagauuggauccuauggauuuccuuugccauaucauguuuuuugcuuuguguugcuuuguugggguucaucaugugggccugccaaaagggcaacauuaggugcaacauuugcauuuga

SEQ ID NO: 45056 - RNA, 1701 nt, Artificial Sequence
  derived and/or modified CDS sequence (wt) from hemagglutinin__InfluenzaA__ALA08559
augaagaccaucauugcccugagcuacauucuaugucugguuuucgcucaaaaaauuccuggaaaugacaauagcacggcaacgcugugccuugggcaccaugcaguaccaaacggaacgauagugaaaacaaucacaaaugaccgaauugaaguuacuaaugcuacugagcugguucagaauuccucaauaggugaaauaugcgacaguccucaucagauccuugauggagaaaacugcacacuaauagaugcucuauugggagacccucagugugauggcuuucaaaauaagaaaugggaccuuuuuguugaacgaagcaaagccuacagcaacuguuacccuuaugaugugccggauuaugccucccuuaggucacuaguugccucauccggcacacuggaguuuaacaaugaaagcuucaauuggacuggagucacucaaaacggaacaaguucugcuugcauaaggagaucuaguaguaguuucuuuaguagauuaaauugguugacccacuuaaacuacacauacccagcauugaacgugacuaugccaaacaaugaacaauuugacaaauuguacauuugggggguucaccacccggguacggacaaggaccaaaucuuccuguaugcucgaucaucaggaagaaucacaguaucuaccaaaggaagccaacaagcuguaaucccaaauaucggaucuagacccagaauaagggauaucccuagcagaauaagcaucuauuggacaauaguaaaaccgggagacauacuuuugauuaacagcgcagggaaucuaauugcuccuagggguuacuucaaaauacgaagugggaaaagcucaauaaugagaucagaugcacccauuggcaaaugcaagucugaaugcaucacuccaaauggaagcauucccaaugacaaaccauuccaaaauguaaacaggaucacauacggggccugucccagauauguuaagcauagcacucugaaauuggcaacgggaaugcgaaauguaccagagaaacaaacuagaggcauauuuggcgcaauagcggguuucauagaaaaugguugggagggaaugguggaugguugguacgguuucaggcaucaaaauucugagggaagaggacaagcagcagaucucaaaagcacucaagcagcaaucgaucaaaucaaugggaagcugaaucgauugaucgggaaaaccaacgagaaauuccaucagauugaaaaagaauucucagaaguagaaggaagaauucaggaccuugagaaauauguugaggacacuaaaauagaucucuggucauacaacgcggagcuucuuguugcccuggagaaccaacauacaauugaucuaacugacucagaaaugaacaaacuguuugaaaaaacaaagaagcaacugagggaaaaugcugaggauaugggaaaugguuguuucaaaauauaccacaaaugugacaaugccugcauaggaucaauaagaaauggaacuuaugaccacaauguguacagggaugaagcauuaaacaaccgguuccagaucaagggaguugagcugaagucaggguacaaagauuggauccuauggauuuccuuugccauaucauguuuuuugcuuuguguugcuuuguugggguucaucaugugggccugccaaaagggcaacauuaggugcaacauuugcauuuga

SEQ ID NO: 45057 - RNA, 1701 nt, Artificial Sequence; identical to SEQ ID NO: 45043
  derived and/or modified CDS sequence (wt) from hemagglutinin__InfluenzaA__ALA08560

SEQ ID NO: 45058 - RNA, 1701 nt, Artificial Sequence
  derived and/or modified CDS sequence (wt) from hemagglutinin__InfluenzaA__ALA08561
augaagacuaucauugcuuugagcuacauucuaugucugguuuucgcucaaaaaauuccuggaaaugacaauagcacggcaacgcugugccuugggcaccaugcaguaccaaacggaacgauagugaaaacaaucacaaaugaccgaauugaaguuacuaaugcuacugagcugguucagaauuccucaauaggugaaauaugcgacaguccucaucagauccuugauggagaaaacugcacacuaauagaugcucuauugggagacccucagugugauggcuuucaaaauaagaaaugggaccuuuuuguugaacgaagcaaagccuacagcaacuguuacccuuaugaugugccggauuaugccucccuuaggucacuaguugccucauccggcacacuggaguuuaacaaugaaagcuucaauuggacuggagucacucaaaacggaacaaguucugcuugcauaaggagaucuaguaguaguuucuuuaguagauuaaauugguugacccacuuaaacuacaaauacccagcauugaacgugacuaugccaaacaaggaacaauuugacaaauuguacauuugggggguucaccacccggguacggacaaggaccaaaucuuccuguaugcucaaucaucaggaagaaucacaguaucuaccaaaagaagccaacaagcuguaaucccaaauaucggaucuagacccagaauaagggauaucccuagcagaauaagcaucuauuggacaauaguaaaaccgggagacauacuuuugauuaacagcacagggaaucuaauugcuccuagggguuacuucaaaauacgaagugggaaaagcucaauaaugagaucagaugcacccauuggcaaaugcaagucugaaugcaucacuccaaauggaagcauucccaaugacaaaccauuccaaaauguaaacaggaucacauacggggccugucccagauauguuaagcauagcacucugaaauuggcaacaggaaugcgaaauguaccagagaaacaaacuagaggcauauuuggcgcaauagcggguuucauagaaaaugguugggagggaaugguggaugguugguacgguuucaggcaucaaaauucugagggaagaggacaagcagcagaucucaaaagcacucaagcagcaaucgaucaaaucaaugggaagcugaaucgauugaucgggaaaaccaacgagaaauuccaucagauugaaaaagaauucucagaaguagaaggaagaauucaggaccuugagaaauauguugaggacacuaaaauagaucucuggucauacaacgcggagcuucuuguugcccuggagaaccaacauacaauugaucuaacugacucagaaaugaacaaacuguuugaaaaaacaaagaagcaacugagggaaaaugcugaggauaugggaaaugguuguuucaaaauauaccacaaaugugacaaugccugcauaggaucaauaagaaauggaacuuaugaccacaauguguacagggaugaagcauuaaacaaccgguuccagaucaagggaguugagcugaagucaggguacaaagauuggauccuauggauuuccuuugccauaucauguuuuuugcuuuguguugcuuuguugggguucaucaugugggccugccaaaagggcaacauuaggugcaacauuugcauuuga

SEQ ID NO: 45059 - RNA, 1701 nt, Artificial Sequence
  derived and/or modified CDS sequence (wt) from hemagglutinin__InfluenzaA__ALA08563
augaagacuaucauugcuuugagcuacauucuaugucugguuuucgcucaaaaaauuccuggaaaugacaauagcacggcaacgcugugccuugggcaccaugcaguaccaaacggaacgauagugaaaacaaucacaaaugaccgaauugaaguuacuaaugcuacugaguugguucagaauuccucaauaggugaaauaugcgacaguccucaucagauccuugauggagaaaacugcacacuaauagaugcucuauugggagacccucagugugauggcuuucaaaauaagaaaugggaccuuuuuguugaacgaagcaaagccuacagcaacuguuacccuuaugaugugccggauuaugccucccuuaggucacuaguugccucauccggcacacuggaguuuaacaaugaaagcuucaauuggacuggagucacucaaaacggaacaaguucugcuugcauaaggagaucuaguaguaguuucuuuaguagauuaaauugguugacccacuuaaacuacacauacccagcauugaacgugacuaugccaaacaaugaacaauuugacaaauuguacauuugggggguucaccacccggguacggacaaggaccaaaucuuccuguaugcucaaucaucaggaagaaucacaguaucuaccaaaagaagccaacaagcuguaaucccaaauaucggaucuagacccagaauaagggauaucccuagcagaauaagcaucuauuggacaauaguaaaaccgggagacauacuuuugauuaacagcacagggaaucuaauugcuccuagggguuacuucaaaauacuaagugggaaaagcucaauaaugagaucagaugcacccauuggcaaaugcaagucugaaugcaucacuccaaauggaagcauucccaaugacaaaccauuccaaaauguaaacaggaucacauacggggccugucccagauauguuaagcauagcacucugaaauuggcaacaggaaugcgaaauguaccagagaaacaaacuagaggcauauuuggcgcaauagcggguuucauagaaaaugguugggaaggaaugguggaugguugguacgguuucaggcaucaaaauucugagggaagaggacaagcagcagaucucaaaagcacucaagcagcaaucgaucaaaucaaugggaagcugaaucgguugaucgggaaaaccaacgagaaauuccaucagauugaaaaagaauucucagaaguagaaggaagaauucaggaccuugagaaauauguugaggacacuaaaauagaucucuggucauauaacgcggagcuucuuguugcccuggagaaccaacauacaauugaucuaacugacucagaaaugaacaaacuguuugaaaaaacaaagaagcaacugagggaaaaugcugaggauaugggaaaugguuguuucaaaauauaccacaaaugugacaaugccugcauaggaucaauaagaaauggaacuuaugaccacaauguguacagggaugaagcauuaaacaaccgguuccagaucaaggggguugagcugaagucaggguacaaagauuggauccuauggauuuccuuugccauaucauguuuuuugcuuuguguugcuuuguugggguucaucaugugggccugccaaaagggcaacauuaggugcaacauuugcauuuga

SEQ ID NO: 45060 - RNA, 1701 nt, Artificial Sequence
  derived and/or modified CDS sequence (wt) from hemagglutinin__InfluenzaA__ALA08571
augaagacuaucauugcuuugagcuacauucuaugucugguuuucgcucaaaaaauuccuggaaaugacaauagcacggcaacgcugugccuugggcaccaugcaguaccaaacggaacgauagugaaaacaaucacaaaugaccgaauugaaguuacuaaugcuacugagcugguucagaauuccucaauaggugaaauaugcgacaguccucaucagauccuugauggagaaaacugcacacuaauagaugcucuauugggagauccucagugugauggcuuucaaaauaagaaaugggaccuuuuuguugaacgaagcaaagccuacagcaacuguuacccuuaugaugugccggauuaugccucccuuaggucacuaguugccucauccggcacacuggaguuuaacaaugaaagcuucaauuggacuggagucacucaaaacggaacaaguucugcuugcauaaggagaucuaguaguaguuucuuuaguagauuaaauugguugacccacuuaaacuacacauacccagcauugaacgugacuaugccaaacaaugaacaauuugacaaauuguacauuugggggguucaccacccggguacggacaaggaccaaaucuuccuguaugcucaaucaucaggaagaaucacaguaucuaccaaaagaagccaacaagcuguaaucccaaauaucggaucuagacccagaauaagggauaucccuagcagaauaagcaucuauuggacaauaguaaaaccgggagacauacuuuugauuaacagcacagggaaucuaauugcuccuagggguuacuucaaaauacgaagugggaaaagcucaauaaugagaucagaugcacccauuggcaaaugcaagucugaaugcaucacuccaaauggaagcauucccaaugacaaaccauuccaaaauguaaacaggaucacauacggggccugucccagauauguuaagcauagcacucugaaauuggcaacaggaaugcgaaauguaccagagaaacaaacuagaggcauauuuggcgcaauagcggguuucauagaaaaugguugggagggaaugguggaugguugguacgguuucaggcaucaaaauucugagggaagaggacaagcagcagaucucaaaagcacucaagcagcaaucgaucaaaucaaugggaagcugaaucgauugaucgggaaaaccaacgagaaauuccaucagauugaaaaagaauucucagaaguagaaggaagaauucaggaccuugagaaauauguugaggacacuaaaauagaucucuggucauacaacgcggagcuucuuguugcccuggagaaccaacauacaauugaucuaacugacucagaaaugaacaaacuguuugaaaaaacaaagaagcaacugagggaaaaugcugaggauaugggaaaugguuguuucaaaauauaccacaaaugugacaaugccugcauaggaucaauaagaaauggaacuuaugaccacaauguguacagggaugaagcauuaaacaaccgguuccagaucaagggaguugagcugaagucaggguacaaagauuggauccuauggauuuccuuugccacaucauguuuuuugcuuuguguugcuuuguugggguucaucaugugggccugccaaaagggcaacauuaggugcaacauuugcauuuga

SEQ ID NO: 45061 - RNA, 1701 nt, Artificial Sequence
  derived and/or modified CDS sequence (wt) from hemagglutinin__InfluenzaA__ALA08572
augaagacuaucauugcuuugagcuacauucuaugucugguuuucgcucaaaaaauuccuggaaaugacaauagcacggcaacgcugugccuugggcaccaugcaguaccaaacggaacgauagugaaaacaaucacaaaugaccgaauugaaguuacuaaugcuacugagcugguucagaauuccucaauaggugaaauaugcgacaguccucaucagauccuugauggagaaaacugcacacuaauagaugcucuauugggagacccucagugugauggcuuucaaaauaagaaaugggaccuuuuuguugaacgaagcaaagccuacagcaacuguuacccuuaugaugugccggauuaugccucccuuaggucacuaguugccucauccggcacacuggaguucaacaaugaaagcuucaauuggacuggagucacucaaaacggaacaaguucugcuugcauaaggagaucuaguaguaguuucuuuaguagauuaaauugguugacccacuuaaacuacacauacccagcauugaacgugacuaugccaaacaaugaacaauuugacaaauuguacauuugggggguucaccacccggguacggacaaggaccaaaucuuccuguaugcucaaucaucaggaagaaucacaguaucuaccaaaagaagccaacaagcuguaaucccaaauaucggaucuagacccagaauaagggauaucccuagcagaauaagcaucuauuggacaauaguaaaaccgggagacauacuuuugauuaacagcacagggaaucuaauugcuccuagggguuacuucaaaauacgaagugggaaaagcucaauaaugagaucagaugcacccauuggcaaaugcaggucugaaugcaucacuccaaauggaagcauucccaaugacaaaccauuccaaaauguaaacaggaucacauacggggccugucccagauauguuaagcauagcacucugaaauuggcaacaggaaugcgaaauguaccagagaaacaaacuagaggcauauuuggcgcaauagcggguuucauagaaaaugguugggagggaaugguggaugguugguacgguuucaggcaucaaaauucugagggaagaggacaagcagcagaucucaaaagcacucaagcagcaaucgaucaaaucaaugggaagcugaaucgauugaucgggaaaaccaacgagaaauuccaucagauugaaaaagaauucucagaaguagaaggaagaauucaggaccuugagaaauauguugaggacacuaaaauagaucucuggucauacaacgcggagcuucuuguugcccuggagaaccaacauacaauugaucuaacugacucagaaaugaacaaacuguuugaaaaaacaaagaagcaacugagggaaaaugcugaggauaugggaaaugguuguuucaaaauauaccacaaaugugacaaugccugcauaggaucaauaagaaacggaacuuaugaccacaauguguacagggaugaagcauuaaacaaccgguuccagaucaagggaauugagcugaagucaggguacaaagauuggauccuauggauuuccuuugccauaucauguuuuuugcuuuguguugcuuuguugggguucaucaugugggccugccaaaagggcaacauuaggugcaacauuugcauuuga

SEQ ID NO: 45062 - RNA, 1701 nt, Artificial Sequence
  derived and/or modified CDS sequence (wt) from hemagglutinin__InfluenzaA__ALA08573
augaagacuaucauugcuuugagcuacauucuaugucugguuuucgcucaaaaaauuccuggaaaugacaauagcacggcaacgcugugccuugggcaccaugcaguaccaaacggaacgauagugaaaacaaucacaaaugaccgaauugaaguuacuaaugcuacugagcugguucagaauuccucaauaggugaaauaugcgacaguccucaucagauccuugauggagaaaacugcacacuaauagaugcucuauugggagacccucagugugauggcuuucaaaauaagaaaugggaccuuuuuguugaacgaagcaaagccuacagcaacuguuacccuuaugaugugccggauuaugccucccuuaggucacuaguugccucauccggcacacuggaguucaacaaugaaagcuucaauuggacuggagucacucaaaacggaacaaguucugcuugcauaaggagaucuaguaguaguuucuuuaguagauuaaauugguugacccacuuaaacuacacauacccagcauugaacgugacuaugccaaacaaugaacaauuugacaaauuguacauuugggggguucaccacccggguacggacaaggaccaaaucuuccuguaugcucaaucaucaggaagaaucacaguaucuaccaaaagaagccaacaagcuguaaucccaaauaucggaucuagacccagaauaagggauaucccuagcagaauaagcaucuauuggacaauaguaaaaccgggagacauacuuuugauuaacagcacagggaaucuaauugcuccuagggguuacuucaaaauacgaagugggaaaagcucaauaaugagaucagaugcacccauuggcaaaugcaagucugaaugcaucacuccaaauggaagcauucccaaugacaaaccauuccaaaauguaaacaggaucacauacggggccugucccagauauguuaagcauagcacucugaaauuggcaacaggaaugcgaaauguaccagagaaacaaacuagaggcauauuuggcgcaauagcggguuucauagaaaaugguugggagggaaugguggaugguugguacgguuucaggcaucaaaauucugagggaagaggacaagcagcagaucucaaaagcacucaagcagcaaucgaucaaaucaaugggaagcugaaucgauugaucgggaaaaccaacgagaaauuccaucagauugaaaaagaauucucagaaguagaaggaagaauucaggaccuugagaaauauguugaggacacuaaaauagaucucuggucauacaacgcggagcuucuuguugcccuggagaaccaacauacaauugaucuaacugacucagaaaugaacaaacuguuugaaaaaacaaagaagcaacugagggaaaaugcugaggauaugggaaaugguuguuucaaaauauaccacaaaugugacaaugccugcauaggaucaauaagaaacggaacuuaugaccacaauguguacagggaugaagcauuaaacaaccgguuccagaucaagggaauugagcugaagucaggguacaaagauuggauccuauggauuuccuuugccauaucauguuuuuugcuuuguguugcuuuguugggguucaucaugugggccugccaaaagggcaacauuaggugcaacauuugcauuuga

SEQ ID NO: 45063 - RNA, 1701 nt, Artificial Sequence
  derived and/or modified CDS sequence (wt) from hemagglutinin__InfluenzaA__ALA08574
augaagacuaucauugcuuugagcuacauucuaugucugguuuucgcucaaaaaauuccuggaaaugacaauagcacggcaacgcugugccuugggcaccaugcaguaccaaacggaacgauagugaaaacaaucacaaaugaccgaauugaaguuacuaaugcuacugagcugguucagaauuccucaauaggugaaauaugcgacaguccucaucagauccuugauggagaaaacugcacacuaauagaugcucuauugggagacccucagugugauggcuuucaaaauaagaaaugggaccuuuuuguugaacgaagcaaagccuacagcaacuguuacccuuaugaugugccggauuaugccucccuuaggucacuaguugccucauccggcacacuggaguuuaacaaugaaagcuucaauuggacuggagucacucaaaacggaacaaguucugcuugcauaaggagaucuaguaguaguuucuuuaguagauuaaauugguugacccacuuaaacuacacauacccagcauugaacgugacuaugccaaacaaugaacaauuugacaaauuguacauuugggggguucaccacccggguacggacaaggaccaaaucuuccuguaugcucaaucaucaggaagaaucacaguaucuaccaaaagaagccaacaagcuguaaucccaaauaucggaucuagacccagaauaagggauaucccuagcagaauaagcaucuauuggacaauaguaaaaccgggagacauacuuuugauuaacagcacagggaaucuaauugcuccuagggguuacuucaaaauacgaagugggaaaagcucaauaaugagaucagaugcacccauuggcaaaugcaagucugaaugcaucacuccaaauggaagcauucccaaugacaaaccauuccaaaauguaaacaggaucacauacggggccugucccagauauguuaagcauagcacucugaaauuggcaacaggaaugcgaaauguaccagagaaacaaacuagaggcauauuuggcgcaauagcggguuucauagaaaaugguugggagggaaugguggaugguugguacgguuucaggcaucaaaauucugagggaagaggacaagcagcagaucucaaaagcacucaagcagcaaucgaucaaaucagugggaagcugaaucgauugaucgggaaaaccaacgagaaauuccaucagauugaaaaagaauucucagaaguagaaggaagaauucaggaccuugagaaauauguugaggacacuaaaauagaucucuggucauacaacgcggagcuucuuguugcccuggagaaccaacauacaauugaucuaacugacucagaaaugaacaaacuguuugaaaaaacaaagaagcaacugagggaaaaugcugaggauaugggaaaugguuguuucaaaauauaccacaaaugugacaaugccugcauaggaucaauaagaaauggaacuuaugaccacaauguguacagggaugaagcauuaaacaaccgguuccagaucaagggaguugagcugaagucaggguacaaagauuggauccuauggauuuccuuugccauaucauguuuuuugcuuuguguugcuuuguugggguucaucaugugggccugccaaaagggcaacauuaggugcaacauuugcauuuga

SEQ ID NO: 45064 - RNA, 1701 nt, Artificial Sequence
  derived and/or modified CDS sequence (wt) from hemagglutinin__InfluenzaA__ALA08575
augaagacuaucauugcuuugagcuacauucuaugucugguuuucgcucaaaaaauuccuggaaaugacaauagcacggcaacgcugugccuugggcaccaugcaguaccaaacggaacgauagugaaaacaaucacaaaugaccgaauugaaguuacuaaugcuacugagcugguucagaauuccucaauaggugaaauaugcgacaguccucaucagauccuugauggagaaaacugcacacuaauagaugcucuauugggagacccucagugugauggcuuucaaaauaagaaaugggaccuuuuuguugaacgaagcaaagccuacagcaacuguuacccuuaugaugugccggauuaugccucccuuaggucacuaguugccucauccggcacacuggaguuuaacaaugaaagcuucaauuggacuggagucacucaaaacggaacaaguucugcuugcauaaggagaucuaguaguaguuucuuuaguagauuaaauugguugacccacuuaaacuacacauacccagcauugaacgugacuaugccaaacaaugaacaauuugacaaauuguacauuugggggguucaccacccggguacggacaaggaccaaaucuuccuguaugcucaaucaucaggaagaaucacaguaucuaccaaaagaagccaacaagcuguaaucccaaauaucggaucuagacccagaauaagggauaucccuagcagaauaagcaucuauuggacaauaguaaaaccgggagacauacuuuugauuaacagcacagggaaucuaauugcuccuagggguuacuucaaaauacgaagugggaaaagcucaauaaugagaucagaugcacccauuggcaaaugcaagucugaaugcaucacuccaaauggaagcauucccaaugacaaaccauuccaaaauguaaacaggaucacauacggggccugucccagauauguuaagcagagcacucugaaauuggcaacaggaaugcgaaauguaccagagaaacaaacuagaggcauauuuggcgcaauagcggguuucauagaaaaugguugggagggaaugguggaugguugguacgguuucaggcaucaaaauucugagggaagaggacaagcagcagaucucaaaagcacucaagcagcaaucgaucaaaucaaugggaagcugaaucgauugaucgggaaaaccaacgagaaauuccaucagauugaaaaagaauucucagaaguagaaggaagaauucaggaccuugagaaauauguugaagacacuaaaauagaucucuggucauacaacgcggagcuucuuguugcccuggagaaccaacauacaauugaucuaacugacucagaaaugaacaaacuguuugaaaaaacaaagaagcaacugagggaaaaugcugaggauaugggaaaugguuguuucaaaauauaccacaaaugugacaaugccugcauaggaucaauaagaaauggaacuuaugaccacaauguguacagggaugaagcauuaaacaaccgguuccagaucaagggaguugagcugaagucaggguacaaagauuggauccuauggauuuccuuugccauaucauguuuuuugcuuuguguugcuuuguugggguucaucaugugggccugccaaaagggcaacauuaggugcaacauuugcauuuga

SEQ ID NO: 45065 - RNA, 1701 nt, Artificial Sequence
  derived and/or modified CDS sequence (wt) from hemagglutinin__InfluenzaA__ALA08576
augaagacuaucauugcuuugagcuacauucuaugucugguuuucgcucaaaaaauuccuggaaaugacaauagcacggcaacgcugugccuugggcaccaugcaguaccaaacggaacgauagugaaaacaaucacaaaugaccgaauugaaguuacuaaugcuacugaguugguucagaauuccucaauaggugaaauaugcgacaguccucaucagauccuugauggagaaaacugcacacuaauagaugcucuauugggagacccucagugugauggcuuucaaaauaagaaaugggaccuuuuuguugaacgaagcaaagccuacagcaacuguuacccuuaugaugugccggauuaugccucccuuaggucacuaguugccucauccggcacacuggaguuuaacaaugaaagcuucaauuggacuggagucacucaaaacggaacaaguucugcuugcauaaggagaucuaguaguaguuucuuuaguagauuaaauugguugacccacuuaaacuacacauacccagcauugaacgugacuaugccaaacaaugaacaauuugacaaauuguacauuugggggguucaccacccggguacggacaaggaccaaaucuuccuguaugcucaaucaucaggaagaaucacaguaucuaccaaaagaagccaacaagcuguaaucccaaauaucggaucuagacccagaauaagggauaucccuagcagaauaagcaucuauuggacaauaguaaaaccgggagacauacuuuugauuaacagcacagggaaucuaauugcuccuagggguuacuucaaaauacgaagugggaaaagcucaauaaugagaucagaugcacccauuggcaaaugcaagucugaaugcaucacuccaaauggaagcauucccaaugacaaaccauuccaaaauguaaacaggaucacauacggggccugucccagauauguuaagcauagcacucugaaauuggcaacaggaaugcgaaauguaccagagaaacaaacuagaggcauauuuggcgcaauagcggguuucauagaaaaugguugggagggaaugguggaugguugguacgguuucaggcaucaaaauucugagggaagaggacaagcagcagaucucaaaagcacucaagcagcaaucgaucaaaucaaugggaagcugaaucgguugaucgggaaaaccaacgagaaauuccaucagauugaaaaagaauucucagaaguagaaggaagaauucaggaccuugagaaauauguugaggacacuaaaauagaucucuggucauacaacgcggagcuucuuguugcccuggagaaccaacauacaauugaucuaacugacucagaaaugaacaaacuguuugaaaaaacaaagaagcaacugagggaaaaugcugaggauaugggaaaugguuguuucaaaauauaccacaaaugugacaaugccugcauaggaucaauaagaaauggaacuuaugaccacaauguguacagggaugaagcauuaaacaaccgguuucagaucaagggaguugagcugaagucaggguacaaagauuggauccuauggauuuccuuugccauaucauguuuuuugcuuuguguugcuuuguugggguucaucaugugggccugccaaaaaggcaacauuaggugcaacauuugcauuuga

SEQ ID NO: 45066 - RNA, 1701 nt, Artificial Sequence; identical to SEQ ID NO: 45006
  derived and/or modified CDS sequence (wt) from hemagglutinin__InfluenzaA__ALA08577

SEQ ID NO: 45067 - RNA, 1701 nt, Artificial Sequence
  derived and/or modified CDS sequence (wt) from hemagglutinin__InfluenzaA__ALA08579
augaagacuaucauugcuuugagcuacauucuaugucugauuuucgcucaaaaaauuccuggaaaugacaauagcacggcaacgcugugccuugggcaccaugcaguaccaaacggaacgauagugaaaacaaucacaaaugaccgaauugaaguuacuaaugcuacugagcugguucagaauuccucaauaggugaaauaugcgacaguccucaucagauccuugauggagaaaacugcacacuaauagaugcucuauugggagacccucagugugauggcuuucaaaauaagaaaugggaccuuuuuguugaacgaagcaaagccuacagcaacuguuacccuuaugaugugccggauuaugccucccuuaggucacuaguugccucauccggcacacuggaguuuaacaaugaaagcuucaauuggacuggagucacucaaaacggaacaaguucugcuugcauaaggaaaucuaguaguaguuucuuuaguagauuaaauugguugacccacuuaaacuacacauacccagcauugaacgugacuaugccaaacaaugaacaauuugacaaauuguacauuugggggguucaccacccggguacggacaaggaccaaaucuuccuguaugcucgaucaucaggaagaaucacaguaucuaccaaaagaagccaacaagcuguaaucccaaauaucggaucuagacccagaauaagggauaucccuagcagaauaagcaucuauuggacaauaguaaaaccgggagacauacuuuugauuaacagcacagggaaucuaauugcuccuagggguuacuucaaaauacgaagugggaaaagcucaauaaugagaucagaugcacccauuggcaaaugcaagucugaaugcaucacuccaaauggaagcauucccaaugacaaaccauuccaaaauguaaacaggaucacauacggggccugucccagauauguuaagcauagcacucugaaauuggcaacaggaaugcgaaauguaccagagaaacaaacuagaggcauauuuggcgcaauagcggguuucauagaaaaugguugggagggaaugguggaugguugguacgguuucaggcaucaaaauucugaggggagaggacaagcagcagaucucaaaagcacucaagcagcaaucgaucaaaucaaugggaagcugaaucgauugaucgggaaaaccaacgagaaauuccaucagauugaaaaagaauucucagaaguagaaggaagaauucaggaccuugagaaauauguugaggacacuaaaauagaucucuggucauacaacgcggagcuucuuguugcccuggagaaucaacauacaauugaucuaacugacucagaaaugaacaaacuguuugaaaaaacaaagaagcaacugagggaaaaugcugaggauaugggaaaugguuguuucaaaauauaccacaaaugugacaaugccugcauaggaucaauaagaaauggaacuuaugaccacaauguguacagggaugaagcauuaaacaaccgguuccagaucaagggaguugagcugaagucaggguacaaagauuggauccuauggauuuccuuugccauaucauguuuuuugcuuuguguugcuuuguugggguucaucaugugggccugccaaaagggcaacauuaggugcaacauuugcauuuga

SEQ ID NO: 45068 - RNA, 1701 nt, Artificial Sequence
  derived and/or modified CDS sequence (wt) from hemagglutinin__InfluenzaA__ALA08580
augaagacuaucauugccuugagcuacauucuaugucugguuuucgcucaaaaaauuccuggaaaugacaauagcacggcaacgcugugccuugggcaccaugcaguaccaaacggaacgauagugaaaacaaucacaaaugaccgaauugaaguuacuaaugcuacugagcugguucagaauuccucaauaggugaaauaugcgacaguccucaucagauccuugauggagaaaacugcacacuaauagaugcucuauugggagacccucagugugauggcuuucaaaauaagaaaugggaccuuuuuguugaacgaagcaaagccuacagcaacuguuacccuuaugaugugccggauuaugccucccuuaggucacuaguugccucauccggcacacuggaguuuaacaaugaaagcuucaauuggacuggagucacucaaaacggaacaaguucugcuugcauaaggagaucuaguaguaguuucuuuaguagauuaaauugguugacccacuuaaacuacacauacccagcauugaacgugacuaugccaaacaaugaacaauuugacaaauuguacauuugggggguucaccacccggguacggacaaggaccaaaucuuccuguaugcucgaucaucaggaagaaucacaguaucuaccaaaggaagccaacaagcuguaaucccaaauaucggaucuagacccagaauaagggauaucccuagcagaauaagcaucuauuggacaauaguaaaaccgggagacauacuuuugauuaacagcacagggaaucuaauugcuccuagggguuacuucaaaauacgaagugggaaaagcucaauaaugagaucagaugcacccauuggcaaaugcaagucugaaugcaucacuccaaauggaagcauucccaaugacaaaccauuccaaaauguaaacaggaucacauacggggccugucccagauauguuaagcauagcacucugaaauuggcaacaggaaugcgaaauguaccagagaaacaaacuagaggcauauuuggcgcaauagcggguuucauagaaaaugguugggagggaaugguggaugguugguacgguuucaggcaucaaaauucugagggaagaggacaagcagcagaucucaaaagcacucaagcagcaaucgaucaaaucaaugggaagcugaaucgauugaucgggaaaaccaacgagaaauuccaucagauugaaaaagaauucucagaaguagaaggaagaauucaggaccuugagaaauauguugaggacacuaaaauagaucucuggucauacaacgcggagcuucuuguugcccuggagaaccaacauacaauugaucuaacugacucagaaaugaacaaacuguuugaaaaaacaaagaagcaacugagggaaaaugcugaggauaugggaaaugguuguuucaaaauauaccacaaaugugacaaugccugcauaggaucaauaagaaauggaacuuaugaccacaauguguacagggaugaagcauuaaacaaccgguuccagaucaagggaguugagcugaagucaggguacaaagauuggauccuauggauuuccuuugccauaucauguuuuuugcuuuguguugcuuuguugggguucaucaugugggccugccaaaagggcaacauuaggugcaacauuugcauuuga

SEQ ID NO: 45069 - RNA, 1701 nt, Artificial Sequence
  derived and/or modified CDS sequence (wt) from hemagglutinin__InfluenzaA__ALA08582
augaagacuaucauugcuuugagcuacauucuaugucugguuuucgcucaaaaacuuccugaaaaugacaauagcacggcaacgcugugccuugggcaccaugcaguaccaaacggaacgauagugaaaacaaucacgaaugaccgaauugaaguuacuaaugcuacugagcuaguucagaauuccucaauaggugaaauaugcgacaguccucaucagauccuugauggaaaaaacugcacacuaauagaugcucuauugggagacccucagugugauggcuuucaaaauaagaaaugggaccuuuuuguugaacgaagcaaagccuacagcaacuguuacccuuaugaugugccggauuaugccucccuuaggucacuaguugccucauccgguacacuggaguuuaacgaugaaagcuucaauugggcuggagucacucaaaacggaacaaguucugcuugcauaaggggaucuaauaguaguuucuuuaguagauuaaauugguugacccacucaaacuucaaauacccagcauugaacgugacuaugccaaacaaugaacaauuugacaaauuguacauuugggggguccaccacccggguacggacaaggaccaaaucuuccuguaugcucaaucaucaggaagaaucacaguauccaccaaaagaagccaacaagcuguaaucccgaauaucggaucuagacccagaauaaggaauaucccuagcagaauaagcaucuauuggacaauaguaaaaccgggagacauacuuuugauuaacagcacagggaaucuaauugcuccuagggguuacuucaaaauacgaagugggaaaagcucaauaaugagaucagaugcacccauuggcaaaugcaagucugaaugcaucacuccaaauggaagcauucccaaugacaaaccauuccaaaauguaaacaggaucacauacggggccugucccagauauguuaagcaaagcacucugaaauuggcaacaggaaugcgaaauguaccagagaaacaaacuagaggcauauuuggcgcaauagcggguuucauagaaaaugguugggagggaaugaaggaugguugguacgguuucaggcaucaaaauucugagggaagaggacaagcagcagaucucaaaagcacucaagcagcaaucgaucaaaucaaugggaagcugaaucgauugaucgggaaaaccaacgagaaauuccaucagauugaaaaagaauucucagaaguagaagggagaauucaggaccuugagaaauauguugaggacacaaaaauagaucuuuggucauacaacgcggagcuucuuguugcccuggagaaccaacauacaauugaucuaacugacucagaaaugaacaaacuguuugaaaaaacaaagaagcaacugagggaaaaugcugaggauaugggcaaugguuguuucaaaauauaccacaaaugugacaaugccugcauaggaucaaucagaaauggaacuuaugaccacgauguauacagggaugaagcuuuaaacaaccgguuccagaucaagggaguugagcugaagucaggguacaaagauuggauccuauggauuuccuuugccauaucauguuuuuugcuuuguguugcuuuguugggguucaucaugugggccugccaaaagggcaacauuaggugcaacauuugcauuuga

SEQ ID NO: 45070 - RNA, 1701 nt, Artificial Sequence
  derived and/or modified CDS sequence (wt) from hemagglutinin__InfluenzaA__ALA08583
augaagacuaucauugcuuugagcuacauucuaugucugguuuucgcucaaaaacuuccugaaaaugacaauagcacggcaacgcugugccuugggcaccaugcaguaccaaacggaacgauagugaaaacaaucacgaaugaccgaauugaaguuacuaaugcuacugagcuaguucagaauuccucaauaggugaaauaugcgacaguccucaucagauccuugauggaaaaaacugcacacuaauagaugcucuauugggagacccucagugugauggcuuucaaaauaagaaaugggaccuuuuuguugaacgaagcaaagccuacagcaacuguuacccuuaugaugugccggauuaugccucccuuaggucacuaguugccucauccgguacacuggaguuuaacgaugaaagcuucaauugggcuggagucacucaaaacggaacaaguucugcuugcauaaggggaucuaauaguaguuucuuuaguagauuaaauugguugacccacucaaacuucaaauacccagcauugaacgugacuaugccaaacaaugaacaauuugacaaauuguacauuugggggguccaccacccggguacggacaaggaccaaaucuuccuguaugcucaaucaucaggaagaaucacaguauccaccaaaagaagccaacaagcuguaauuccgaauaucggaucuagacccagaauaaggaauaucccuagcagaauaagcaucuauuggacaauaguaaaaccgggagacauacuuuugauuaacagcacagggaaucuaauugcuccuagggguuacuucaaaauacgaagugggaaaagcucaauaaugagaucagaugcacccauuggcaaaugcaagucugaaugcaucacuccaaauggaagcauucccaaugacaaaccauuccaaaauguaaacaggaucacauacggggccugucccagauauguuaagcaaagcacucugaaauuggcaacaggaaugcgaaauguaccagagaaacaaacuagaggcauauuuggcgcaauagcggguuucauagaaaaugguugggagggaaugaaggaugguugguacgguuucaggcaucaaaauucugagggaagaggacaagcagcagaucucaaaagcacucaagcagcaaucgaucaaaucaaugggaagcugaaucgauugaucgggaaaaccaacgagaaauuccaucagauugaaaaagaauucucagaaguagaagggagaauucaggaccuugagaaauauguugaggacacaaaaauagaucuuuggucauacaacgcggagcuucuuguugcccuggagaaccaacauacaauugaucuaacugacucagaaaugaacaaacuguuugaaaaaacaaagaagcaacugagggaaaaugcugaggauaugggcaaugguuguuucaaaauauaccacaaaugugacaaugccugcauaggaucaaucagaaauggaacuuaugaccacgauguauacagggaugaagcuuuaaacaaccgguuccagaucaagggaguugagcugaagucaggguacaaagauuggauccuauggauuuccuuugccauaucauguuuuuugcuuuguguugcuuuguugggguucaucaugugggccugccaaaagggcaacauuaggugcaacauuugcauuuga

SEQ ID NO: 45071 - RNA, 1701 nt, Artificial Sequence
  derived and/or modified CDS sequence (wt) from hemagglutinin__InfluenzaA__ALA08584
augaagacuaucauugcuuugagcuacauucuaugucugguuuucgcucaaaaacuuccugaaaaugacaauagcacggcaacgcugugccuugggcaccaugcaguaccaaacggaacgauagugaaaacaaucacgaaugaccgaauugaaguuacuaaugcuacugagcuaguucagaauuccucaauaggugaaauaugcgacaguccucaucagauccuugauggaaaaaacugcacacuaauagaugcucuauugggagacccucagugugauggcuuucaaaauaagaaaugggaccuuuuuguugaacgaagcaaagccuacagcaacuguuacccuuaugaugugccggauuaugccucccuuaggucacuaguugccucauccgguacacuggaguuuaacgaugaaagcuucaauugggcuggagucacucaaaacggaacaaguucugcuugcauaaggggaucuaauaguaguuucuuuaguagauuaaauugguugacccacucaaacuucaaauacccagcauugaacgugacuaugccaaacaaugaacaauuugacaaauuguacauuugggggguccaccacccggguacggacaaggaccaaaucuuccuguaugcucaaucaucaggaagaaucacaguauccaccaaaagaagccaacaagcuguaaucccgaauaucggaucuagacccagaauaaggaauaucccuagcagaauaagcaucuauuggacaauaguaaaaccgggagacauacuuuugauuaacagcacagggaaucuaauugcuccuagggguuacuucaaaauacgaagugggaaaagcucaauaaugagaucagaugcacccauuggcaaaugcaagucugaaugcaucacuccaaauggaagcauucccaaugacaaaccauuccaaaauguaaacaggaucacauacggggccugucccagauauguuaagcaaagcacucugaaauuggcaacaggaaugcgaaauguaccagagaaacaaacuagaggcauauuuggcgcaauagcggguuucauagaaaaugguugggagggaaugaaggaugguugguacgguuucaggcaucaaaauucugagggaagaggacaagcagcagaucucaaaagcacucaagcagcaaucgaucaaaucaaugggaagcugaaucgauugaucgggaaaaccaacgagaaauuccaucagauugaaaaagaauucucagaaguagaagggagaauucaggaccuugagaaauauguugaggacacaaaaauagaucuuuggucauacaacgcggagcuucuuguugcccuggagaaccaacauacaauugaucuaacugacucagaaaugaacaaacuguuugaaaaaacaaagaagcaauugagggaaaaugcugaggauaugggcaaugguuguuucaaaauauaccacaaaugugacaaugccugcauaggaucaaucagaaauggaacuuaugaccacgauguauacagggaugaagcuuuaaacaaccgguuccagaucaagggaguugagcugaagucaggguacaaagauuggauccuauggauuuccuuugccauaucauguuuuuugcuuuguguugcuuuguugggguucaucaugugggccugccaaaagggcaacauuaggugcaacauuugcauuuga

SEQ ID NO: 45072 - RNA, 1701 nt, Artificial Sequence
  derived and/or modified CDS sequence (wt) from hemagglutinin__InfluenzaA__ALA08585
augaagacuaucauugcuuugagcuacauucuaugucugguuuucgcucaaaaacuuccugaaaaugacaauagcacggcaacgcugugccuugggcaccaugcaguaccaaacggaacgauagugaaaacaaucacgaaugaccgaauugaaguuacuaaugcuacugagcuaguucagaauuccucaauaggugaaauaugcgacaguccucaucagauccuugauggaaaaaacugcacacuaauagaugcucuauugggagacccucagugugauggcuuucaaaauaagaaaugggaccuuuuuguugaacgaagcaaagccuacagcaacuguuacccuuaugaugugccggauuaugccucccuuaggucacuaguugccucauccgguacacuggaguuuaacgaugaaagcuucaauugggcuggagucacucaaaacggaacaaguucugcuugcauaaggggaucuaauaguaguuucuuuaguagauuaaauugguugacccacucaaacuucaaauacccagcauuaaacgugacuaugccaaacaaugaacaauuugacaaauuguacauuugggggguccaccacccggguacggacaaggaccaaaucuuccuguaugcucaaucaucaggaagaaucacaguauccaccaaaagaagccaacaagcuguaaucccgaauaucggaucuagacccagaauaaggaauaucccuagcagaauaagcaucuauuggacaauaguaaaaccgggagacauacuuuugauuaacagcacagggaaucuaauugcuccuagggguuacuucaaaauacgaagugggaaaagcucaauaaugagaucagaugcacccauuggcaaaugcaagucugaaugcaucacuccaaauggaagcauucccaaugacaaaccauuccaaaauguaaacaggaucacauacggggccugucccagauauguuaagcaaagcacucugaaauuggcaacaggaaugcgaaauguaccagagaaacaaacuagaggcauauuuggcgcaauagcggguuucauagaaaaugguugggagggaaugaaggaugguugguacgguuucaggcaucaaaauucugagggaagaggacaagcagcagaucucaaaagcacucaagcagcaaucgaucaaaucaaugggaagcugaaucgauugaucgggaaaaccaacgagaaauuccaucagauugaaaaagaauucucagaaguagaagggagaauucaggaccuugagaaauauguugaggacacaaaaauagaucuuuggucauacaacgcggagcuucuuguugcccuggagaaccaacauacaauugaucuaacugacucagaaaugaacaaacuguuugaaaaaacaaagaagcaacugagggaaaaugcugaggauaugggcaaugguuguuucaaaauauaccacaaaugugacaaugccugcauaggaucaaucagaaauggaacuuaugaccacgauguauacagggaugaagcuuuaaacaaccgguuccagaucaagggaguugagcugaagucaggguacaaagauuggauccuauggauuuccuuugccauaucauguuuuuugcuuuguguugcuuuguugggguucaucaugugggccugccaaaagggcaacauuaggugcaacauuugcauuuga

SEQ ID NO: 45073 - RNA, 1701 nt, Artificial Sequence
  derived and/or modified CDS sequence (wt) from hemagglutinin__InfluenzaA__ALA08586
augaagacuaucauugcuuugagcuacauucuaugucugguuuucgcucaaaaaauuccuggaaaugacaauagcacggcaacgcugugccuugggcaccaugcaguaccaaacggaacgauagugaaaacaaucacaaaugaccgaauugaaguuacuaaugcuacugagcugguucagaauuccucaauaggugaaauaugcgacaguccucaucagauccuugauggagaaaacugcacacuaauagaugcucuauugggagacccucagugugauggcuuucaaaauaagaaaugggaccuuuuugucgaacgaagcaaagccuacagcaacuguuacccuuaugaugugccggauuaugccucccuuaggucacuaguugccucauccggcacacuggaguuuaacaaugaaagcuucaauuggacuggagucacucaaaacggaacaaguucugcuugcauaaggagaucuaguaguaguuucuuuaguagauuaaauugguugacccacuuaaacuacacauacccagcauugaacgugacuaugccaaacaaugaacaauuugacaaauuguacauuugggggguucaccacccggguacggacaaggaccaaaucuuccuguaugcucaaucaucaggaagaaucacaguaucuaccaaaagaagccaacaagcuguaaucccaaauaucggaucuagacccagaauaagggauaucccuagcagaauaagcaucuauuggacaauaguaaaaccgggagacauacuuuugauuaacagcacagggaaucuaauugcuccuagggguuacuucaaaauacgaagugggaaaagcucaauaaugagaucagaugcacccauuggcaaaugcaagucugaaugcaucacuccaaauggaagcauucccaaugacaaaccauuccaaaauguaaacaggaucacauacggggccugucccagauauguuaagcauagcacucugaaauuggcaacaggaaugcgaaauguaccagagaaacaaacuagaggcauauuuggcgcaauagcggguuucauagaaaaugguugggagggaaugguggaugguugguacgguuucaggcaucaaaauucugagggaagaggacaagcagcagaucucaaaagcacucaagcagcaaucgaucaaaucaauggaaagcugaaucgauugaucgggaaaaccaacgagaaauuccaucagauugaaaaagaauucucagaaguagaaggaagaauucaggaccuugagaaauauguugaggacacuaaaauagaucucuggucauacaacgcggagcuucuuguugcccuggagaaccaacauacaauugaucuaacugacucagaaaugaacaaacuguuugaaaaaacaaagaagcaacugagggaaaaugcugaggauaugggaaaugguuguuucaaaauauaccacaaaugugacaaugccugcauaggaucaauaagaaauggaacuuaugaccacaauguguacagggaugaagcauuaaacaaccgguuccagaucaagggaguugagcugaagucaggguacaaagauuggauccuauggauuuccuuugccauaucauguuuuuugcuuuguguugcuuuguugggguucaucaugugggccugccaaaagggcaacauuaggugcaacauuugcauuuga

SEQ ID NO: 45074 - RNA, 1701 nt, Artificial Sequence
  derived and/or modified CDS sequence (wt) from hemagglutinin__InfluenzaA__ALA08587
augaagacuaucauugcuuugagcuacauucuaugucugguuuucgcucaaaaacuuccugaaaaugacaauagcacggcaacgcugugccuugggcaccaugcaguaccaaacggaacgauagugaaaacaaucacgaaugaccgaauugaaguuacuaaugcuacugagcuaguucagaauuccucaauaggugaaauaugcgacaguccucaucagauccuugauggaaaaaacugcacacuaauagaugcucuauugggagacccucagugugauggcuuucaaaauaagaaaugggaccuuuuuguugaacgaagcaaagccuacagcaacuguuacccuuaugaugugccggauuaugccucccuuaggucacuaguugccucauccgguacacuggaguuuaacgaugaaagcuucaauugggcuggagucacucaaaacggaacaaguucugcuugcauaaggggaucuaauaguaguuucuuuaguagauuaaauugguugacccacucaaacuucaaauacccagcauugaacgugacuaugccaaacaaugaacaauuugacaaauuguacauuugggggguccaccacccggguacggacaaggaccaaaucuuccuguaugcucaaucaucaggaagaaucacaguauccaccaaaagaagccaacaagcuguaaucccgaauaucggaucuagacccagaauaaggaauaucccuagcagaauaagcaucuauuggacaauaguaaaaccgggagacauacuuuugauuaacagcacagggaaucuaauugcuccuagggguuacuucaaaauacgaagugggaaaagcucaauaaugagaucagaugcacccauuggcaaaugcaagucugaaugcaucacuccaaauggaagcauucccaaugacaaaccauuccaaaauguaaacaggaucacauacggggccugucccagauauguuaagcaaagcacucugaaauuggcaacaggaaugcgaaauguaccagagaaacaaacuagaggcauauuuggcgcaauagcggguuucauagaaaauggcugggagggaaugaaggaugguugguacgguuucaggcaucaaaauucugagggaagaggacaagcagcagaucucaaaagcacucaagcagcaaucgaucaaaucaaugggaagcugaaucgauugaucgggaaaaccaacgagaaauuccaucagauugaaaaagaauucucagaaguagaagggagaauucaggaccuugagaaauauguugaggacacaaaaauagaucuuuggucauacaacgcggagcuucuuguugcccuggagaaccaacauacaauugaucuaacugacucagaaaugaacaaacuguuugaaaaaacaaagaagcaacugagggaaaaugcugaggauaugggcaaugguuguuucaaaauauaccacaaaugugacaaugccugcauaggaucaaucagaaauggaacuuaugaccacgauguauacagggaugaagcuuuaaacaaccgguuccagaucaagggaguugagcugaagucaggguacaaagauuggauccuauggauuuccuuugccauaucauguuuuuugcuuuguguugcuuuguugggguucaucaugugggccugccaaaagggcaacauuaggugcaacauuugcauuuga

SEQ ID NO: 45075 - RNA, 1701 nt, Artificial Sequence; identical to SEQ ID NO: 45043
  derived and/or modified CDS sequence (wt) from hemagglutinin__InfluenzaA__ALA08588

SEQ ID NO: 45076 - RNA, 1701 nt, Artificial Sequence
  derived and/or modified CDS sequence (wt) from hemagglutinin__InfluenzaA__ALA08589
augaagacuaucauugcuuugagcuacauucuaugucugguuuucgcucaaaaaauuccuggaaaugacaauagcacggcaacgcugugccuugggcaccaugcaguaccaaacggaacgauagugaaaacaaucacaaaugaccgaauugaaguuacuaaugcuacugaguugguucagaauuccucaauaggugaaauaugcgacaguccucaucagauccuugauggagaaaacugcacacuaauagaugcucuauugggagacccucagugugauggcuuucaaaauaagaaaugggaccuuuuuguugaacgaagcaaagccuacagcaacuguuacccuuaugaugugccggauuaugccucccuuaggucacuaguugccucauccggcacacuggaguuuaacaaugaaagcuucaauuggacuggagucacucaaaacggaacaaguucugcuugcauaaggagaucuaguaguaguuucuuuaguagauuaaauugguugacccacuuaaacuacacauacccagcauugaacgugacuaugccaaacaaugaacaauuugacaaauuguacauuugggggguucaccacccggguacggacaaggaccaaaucuuccuguaugcucaaucaucaggaagaaucacaguaucuaccaaaagaagccaacaagcuguaaucccaaauaucggaucuagacccagaauaagggauaucccuagcagaauaagcaucuauuggacaauaguaaaaccgggagacauacuuuugauuaacagcacagggaaucuaauugcuccuagggguuacuucaaaauacgaagugggaaaagcucaauaaugagaucagaugcacccauuggcaaaugcaagucugaaugcaucacuccaaauggaagcauucccaaugacaaaccauuccaaaauguaaacaggaucacauacggggccugucccagauauguuaagcauagcacucugaaauuggcaacaggaaugcgaaauguaccagagaaacaaacuagaggcauauuuggcgcaauagcggguuucauagaaaaugguugggagggaaugguggaugguugguacgguuucaggcaucaaaauucugagggaagaggacaagcagcagaucucaaaagcacucaagcagcaaucgaucaaaucaaugggaagcugaaucgguugaucgggaaaaccaacgagaaauuccaucagauugaaaaagaauucucagaaguagaaggaagaauucaggaccuugagaaauauguugaggacacuaaaauagaucucuggucauauaacgcggagcuucuuguugcccuggagaaccaacauacaauugaucuaacugacucagaaaugaacaaacuguuugaaaaaacaaagaagcaacugagggaaaaugcugaggauaugggaaaugguuguuucaaaauauaccacaaaugugacaaugccugcauaggaucaauaagaaauggaacuuaugaccacaauguguacagggaugaagcauuaaacaaccgguuccagaucaaggggguugagcugaagucaggguacaaagauuggauccuauggauuuccuuugccauaucauguuuuuugcuuuguguugcuuuguugggguucaucaugugggccugccaaaagggcaacauuaggugcaacauuugcauuuga

SEQ ID NO: 45077 - RNA, 1701 nt, Artificial Sequence; identical to SEQ ID NO: 45069
  derived and/or modified CDS sequence (wt) from hemagglutinin__InfluenzaA__ALA08590

SEQ ID NO: 45078 - RNA, 1701 nt, Artificial Sequence
  derived and/or modified CDS sequence (wt) from hemagglutinin__InfluenzaA__ALA08591
augaagacuaucauugcuuugagcuacauucuaugucugguuuucgcucaaaaaauuccuggaaaugacaauagcacggcaacgcugugccuugggcaccaugcaguaccaaacggaacgauagugaaaacaaucacaaaugaccgaauugaaguuacuaaugcuacugagcugguucagaauuccucaauaggugaaauaugcgacaguccucaucagauccuugauggagaaaacugcacacuaauagaugcucuauugggagacccucagugugauggcuuucaaaauaagaaaugggaccuuuuuguugaacgaagcaaagccuacagcaacuguuacccuuaugaugugccggauuaugccucccuuaggucacuaguugccucauccggcacacuggaguuuaacaaugaaagcuucaauuggacuggagucacucaaaacggaacaaguucugcuugcauaaggagaucuaguaguaguuucuuuaguagauuaaauugguugacccacuuaaacuacacauacccagcauugaacgugacuaugccaaacaaugaacaauuugacaaauuguacauuugggggguucaccacccggguacggacaaggaccaaaucuuccuguaugcucaaucaucaggaagaaucacaguaucuaccaaaagaagccaacaagcuguaaucccaaauaucggaucuagacccagaauaagggauaucccuagcagaauaagcaucuauuggacaauaguaaaaccgggagacauacuuuugauuaacagcacagggaaucuaauugcuccuagggguuacuucaaaauacgaagugggaaaagcucaauaaugagaucagaugcacccauuggcaaaugcaagucugaaugcaucacuccaaauggaagcauucccaaugacaaaccauuccaaaauguaaacaggaucacauacggggccugucccagauauguuaagcauagcacucugaaauuggcaacaggaaugcgaaauguaccagagaaacaaacuagaggcauauuuggcgcaauagcggguuucauagaaaaugguugggagggaaugguggaugguugguacgguuucaggcaucaaaauucugagggaagaggacaagcagcagaucucaaaagcacucaagcagcaaucgaucaaaucaaugggaagcugaaucgauugaucgggaaaaccaacgagaaauuccaucagauugaaaaagaauucucagaaguagaaggaagaauucaggaccuugagaaauauguugaggacacuaaaauagaucucuggucauacaacgcggagcuucuuguugcccuggagaaccaacauacaauugaucuaacugacucagaaaugaacaaacuguuugaaaaaacaaagaagcaacugagggaaaaugcugaggauaugggaaaugguuguuucaaaauauaccacaaaugugacaaugccugcauaggaucaauaagaaauggaacuuaugaccacaauguguacagggaugaagcauuaaacaaccgguuccagaucaagggaguugagcugaagucaggguacaaagauuggauccuauggauuuccuuugccauaucauguuuuuugcuuuguguugcuuuguugggguucaucaugugggccugccaaaagggcaacauuagaugcaacauuugcauuuga

SEQ ID NO: 45079 - RNA, 1701 nt, Artificial Sequence; identical to SEQ ID NO: 45018
  derived and/or modified CDS sequence (wt) from hemagglutinin__InfluenzaA__ALA08592

SEQ ID NO: 45080 - RNA, 1701 nt, Artificial Sequence
  derived and/or modified CDS sequence (wt) from hemagglutinin__InfluenzaA__ALA08594
augaagacuaucauugcuuugagcuacauucuaugucugguuuucgcucaaaagcuuccugaaaaugacaauagcacggcaacgcugugccuugggcaccaugcaguaccaaacggaacgauagugaaaacaaucacgagugaccgaauugaaguuacuaaugcuacugagcugguucagaauuccucaauaggugaaauaugcgacaguccucaucagauccuugauggaaaaaacugcacacuaauagaugcucuauugggagacccucagugugauggcuuucaaaauaagaaaugggaccuuuuuguugaacgaagcaaagccuacagcaacuguuacccuuaugaugugccggauuaugccucccuuaggucacuaguugccucauccgguacacuggaguuuaacgaugaaagcuucaauugggcuggagucacucaaaacgggacaaguucugcuugcauaaggggaucuaauaguaguuucuuuaguagauuaaauugguugacccacucaaacuucaaauacccagcauugaacgugacuaugccaaacaaugaacaauuugacaaauuguacauuugggggguccaccacccggguacggacaaggaccaaaucuuccuguaugcucaaucaucaggaagaaucacaguauccaccaaaagaagccaacaagcuguaaucccgaauaucggaucuagacccagaauaaggaauaucccuagcagaauaagcaucuauuggacaauaguaaaaccgggagacauacuuuugauuaacagcacagggaaucuaauugcuccuagggguuacuucaaaauacgaagugggaaaagcucaauaaugagaucagaugcacccauuggcaaaugcaagucugaaugcaucacuccaaauggaagcauucccaaugacaaaccauuccaaaauguaaacaggaucacauacggggccugucccagauauguuaagcaaagcacucugaaauuggcaacaggaaugcgaaauguaccagagaaacaaacuagaggcauauuuggcgcaauagcggguuucauagaaaaugguugggagggaaugaaggaugguugguacgguuucaggcaucaaaauucugagggaagaggacaagcagcagaucucaaaagcacucaagcagcaaucgaucaaaucaaugggaagcugaaucgauugaucgggaaaaccaacgagaaauuccaucagauugaaaaagaauucucagaaguagaagggagaauucaggaccuugagaaauauguugaggacacaaaaauagaucucuggucauacaacgcggagcuucuuguugcccuggagaaccaacauacaauugaucuaacugacucagaaaugaacaaacuguuugaaaaaacaaagaagcaacugagggaaaaugcugaggauaugggcaaugguuguuucaaaauauaccacaaaugugacaaugccugcauaggaucaaucagaaauggaacuuaugaccacgauguauacagggaugaagcuuuaaacaaccgguuccagaucaagggaguugagcugaagucaggguacaaagauuggauccuauggauuuccuuugccaugucauguuuuuugcuuuguguugcuuuguugggguucaucaugugggccugccaaaagggcaacauuaggugcaacauuugcauuuga

SEQ ID NO: 45081 - RNA, 1701 nt, Artificial Sequence; identical to SEQ ID NO: 45076
  derived and/or modified CDS sequence (wt) from hemagglutinin__InfluenzaA__ALA08595

SEQ ID NO: 45082 - RNA, 1701 nt, Artificial Sequence; identical to SEQ ID NO: 45006
  derived and/or modified CDS sequence (wt) from hemagglutinin__InfluenzaA__ALA08596

SEQ ID NO: 45083 - RNA, 1701 nt, Artificial Sequence
  derived and/or modified CDS sequence (wt) from hemagglutinin__InfluenzaA__ALA08597
augaagacuaucauugcuuugagcuacauucuaugucugguuuucgcucaaaaaauuccuggaaaugacaauagcacggcaacgcugugccuugggcaccaugcaguaccaaacggaacgauagugaaaacaaucacaaaugaccgaauugaagucacuaaugcuacugagcugguucagaauuccucaauaggugaaauaugcgacaguccucaucagauccuugauggagaaaacugcacacuaauagaugcucuauugggagacccucagugugauggcuuucaaaauaagaaaugggaccuuuuuguugaacgaagcaaagccuacagcaacuguuacccuuaugaugugccggauuaugccucccuuaggucacuaguugccucauccggcacacuggaguuuaacaaugaaagcuucaauuggacuggagucacucaaaacggaacaaguucugcuugcauaaggagaucuaguaguaguuucuuuaguagauuaaauugguugacccacuuaaacuacacauacccagcauugaacgugacuaugccaaacaaugaacaauuugacaaauuguacauuugggggguucaccacccggguacggacaaggaccaaaucuuccuguaugcucaaucaucaggaagaaucacaguaucuaccaaaagaagccaacaagcuguaaucccaaauaucggaucuagacccagaauaagggauaucccuagcagaauaagcaucuauuggacaauaguaaaaccgggagacauacuuuugauuaacagcacagggaaucuaauugcuccuagggguuacuucaaaauacgaagugggaaaagcucaauaaugagaucagaugcacccauuggcaaaugcaagucugaaugcaucacuccaaauggaagcauucccaaugacaaaccauuccaaaauguaaacaggaucacauacggggccugucccagauauguuaagcauagcacucugaaauuggcaacaggaaugcgaaauguaccagagaaacaaacuagaggcauauuuggcgcaauagcggguuucauagaaaaugguugggagggaaugguggaugguugguacgguuucaggcaucaaaauucugagggaagaggacaagcagcagaucucaaaagcacucaagcagcaaucgaucaaaucaaugggaagcugaaucgauugaucgggaaaaccaacgagaaauuccaucagauugaaaaagaauucucagaaguagaaggaagaauucaggaccuugagaaauauguugaggacacuaaaauagaucucuggucauacaacgcggagcuucuuguugcccuggagaaccaacauacaauugaucuaacugacucagaaaugaacaaacuguuugaaaaaacaaagaagcaacugagggaaaaugcugaggauaugggaaaugguuguuucaaaauauaccacaaaugugacaaugccugcauaggaucaauaagaaauggaacuuaugaccacaauguguacagggaugaagcauuaaacaaccgguuccagaucaagggaguugagcugaagucaggguacaaagauuggauccuauggauuuccuuugccauaucauguuuuuugcuuuguguugcuuuguugggguucaucaugugggccugccaaaauggcaacauuaggugcaacauuugcauuuga

SEQ ID NO: 45084 - RNA, 1701 nt, Artificial Sequence
  derived and/or modified CDS sequence (wt) from hemagglutinin__InfluenzaA__ALA08598
augaagacuaucauugccucgagcuacauucuauguuugguuuucgcucaaaaaauuccuggaaaugacaauagcacggcaacgcugugccuugggcaccaugcaguaccaaacggaacgauagugaaaacaaucacaaaugaccgaauugaaguuacuaaugcuacugagcugguucagaauuccucaauaggugaaauaugcgacaguccucaucagauccuugauggagaaaacugcacacuaauagaugcucuauugggagacccucagugugauggcuuucaaaauaagaaaugggaccuuuuuguugaacgaagcaaagccuacagcaacuguuacccuuaugaugugccggauuaugccucccuuaggucacuaguugccucauccggcacacuggaguuuaacaaugaaagcuucaauuggacuggagucacucaaaacggaacaaguucugcuugcauaaggagaucuaguaguaguuucuuuaguagauuaaauugguugacccacuuaaacuacacauacccagcauugaacgugacuaugccaaacaaugaacaauuugacaaauuguacauuugggggguucaccacccggguacggacaaggaccaaaucuuccuguaugcucaaucaucaggaagaaucacaguaucuaccaaaagaagccaacaagcuguaaucccaaauaucggaucuagacccagaauaagggauaucccuagcagaauaagcaucuauuggacaauaguaaaaccgggagacauacuuuugauuaacagcacagggaaucuaauugcuccuagggguuacuucaaaauacgaagugggaaaagcucaauaaugagaucagaugcacccauuggcaaaugcaagucugaaugcaucacuccaaauggaagcauucccaaugacaaaccauuccaaaauguaaacaggaucacauacggggccugucccagauauguuaagcauagcacucugaaauuggcaacaggaaugcgaaauguaccagagaaacaaacuagaggcauauuuggcgcaauagcggguuucauagaaaaugguugggagggaaugguggaugguugguacgguuucaggcaucaaaauucugagggaagaggacaagcagcagaucucaaaagcacucaagcagcaaucgaucaaaucaaugggaagcugaaucgauugaucgggaaaaccaacgagaaauuccaucagauugaaaaagaauucucagaaguagaaggaagaauucaggaccuugagaaauauguugaggacacuaaaauagaucucuggucauacaacgcggagcuucuuguugcccuggagaaccaacauacaauugaucuaacugacucagaaaugaacaaacuguuugaaaaaacaaagaagcaacugagggaaaaugcugaggauaugggaaaugguuguuucaaaauauaccacaaaugugacaaugccugcauaggaucaauaagaaauggaacuuaugaccacaauguguacagggaugaagcauuaaacaaccgguuccagaucaagggaguugagcugaagucaggguacaaagauuggauccuauggauuuccuuugccauaucauguuuuuugcuuuguguugcuuuguugggguucaucaugugggccugccaaaagggcaacauuaggugcaacauuugcauuuga

SEQ ID NO: 45085 - RNA, 1701 nt, Artificial Sequence; identical to SEQ ID NO: 45006
  derived and/or modified CDS sequence (wt) from hemagglutinin__InfluenzaA__ALA08599

SEQ ID NO: 45086 - RNA, 1701 nt, Artificial Sequence
  derived and/or modified CDS sequence (wt) from hemagglutinin__InfluenzaA__ALA08600
augaagacuaucauugccuugagcuacauucuaugucugguuuucgcucaaaaaauuccuggaaaugacaauagcacggcaacgcugugccuugggcaccaugcaguaccaaacggaacgauagugaaaacaaucacaaaugaccgaauugaaguuacuaaugcuacugagcugguucagaauuccucaauaggugaaauaugcgacaguccucaucagauccuugauggagaaaacugcacacuaauagaugcucuauugggagacccucagugugauggcuuucaaaauaagaaaugggaccuuuuuguugaacgaagcaaagccuacagcaacuguuacccuuaugaugugccggauuaugccucccuuaggucacuaguugccucauccggcacacuggaguuuaacaaugaaagcuucaauuggacuggagucacucaaaacggaacaaguucugcuugcauaaggagaucuaguaguaguuucuuuaguagauuaaauugguugacccacuuaaacuacagauacccagcauugaacgugacuaugccaaacaaugaacaauuugacaaauuguacauuugggggguucaccacccggguacggacaaggaccaaaucucccuguaugcucaaucaucaggaagaaucacaguaucuaccaaaagaagccaacaagcuguaaucccaaauaucggaucuagacccagaauaagggauaucccuagcagaauaagcaucuauuggacaauaguaaaaccgggagacauacuuuugauuaacagcacagggaaucuaauugcuccuagggguuacuucaaaauacgaagugggaaaagcucaauaaugagaucagaugcacccauuggcaaaugcaagucugaaugcaucacuccaaauggaagcauucccaaugacaaaccauuccaaaauguaaacaggaucacauacggggccugucccagauauguuaagcauagcacucugaaauuggcaacaggaaugcgaaauguaccagagaaacaaacuagaggcauauuuggcgcaauagcggguuucauagaaaaugguugggagggaaugguggaugguugguacgguuucaggcaucaaaauucugagggaagaggacaagcagcagaucucaaaagcacucaagcagcaaucgaucaaaucaaugggaagcugaaucgauugaucgggaaaaccaacgagaaauuccaucagauugaaaaagaauucucagaaguagaaggaagaauucaggaccuugagaaauauguugaggacacuaaaauagaucucuggucauacaacgcggagcuucuuguugcccuggagaaccaacauacaauugaucuaacugacucagaaaugaacaaacuguuugaaaaaacaaagaagcaacugagggaaaaugcugaggauaugggaaaugguuguuucaaaauauaccacaaaugugacaaugccugcauaggaucaauaagaaauggaacuuaugaccacaauguguacagggaugaagcauuaaacaaccgguuccagaucaagggaguugagcugaagucaggguacaaagauuggauccuauggauuuccuuugccauaucauguuuuuugcuuuguguugcuuuguugggguucaucaugugggccugccaaaagggcaacauuaggugcaacauuugcauuuga

SEQ ID NO: 45087 - RNA, 1701 nt, Artificial Sequence
  derived and/or modified CDS sequence (wt) from hemagglutinin__InfluenzaA__ALA08601
augaagacuaucauugcuuugagcuacauucuaugucugguuuucgcucaaaaaauuccuggaaaugacaauagcacggcaacgcugugccuugggcaccaugcaguaccaaacggaacgauagugaaaacaaucacaaaugaccgaauugaaguuacuaaugcuacugagcugguucagaauuccucaauaggugaaauaugcgacaguccucaucagauccuugauggagaaaacugcacacuaauagaugcucuauugggagacccucagugugauggcuuucaaaauaagaaaugggaccuuuuuguugaacgaagcaaagccuacagcaacuguuacccuuaugaugugccggauuaugccucccuuaggucacuaguugccucauccggcacacuggaguuuaacaaugaaagcuucaauuggacuggagucacucaaaacggaacaaguucugcuugcauaaggagaucuaguaguaguuucuuuaguagauuaaauugguugacccacuuaaacuacacauacccagcauugaacgugacuaugccaaacaaugaacaauuugacaaauuguacauuugggggguucaccacccggguacggacaaggaccaaaucuuccuguaugcucaaucaucaggaagaaucacaguaucuaccaaaagaagccaacaagcuguaaucccaaauaucggaucuagacccagaauaagggauaucccuagcagaauaagcaucuauuggacaauaguaaaaccgggagacauacuuuugauuaacagcacagggaaucuaauugcuccuagggguuacuucaaaauacgaagugggaaaagcucaauaaugagaucagaugcacccauuggcaaaugcaagucugaaugcaucacuccaaauggaagcauucccaaugacaaaccauuccaaaauguaaacaggaucacauacggggccugucccagauauguuaagcauagcacucugaaauuggcaacaggaaugcgaaauguaccagagaaacaaacuagaggcauauuuggcgcaauagcggguuucauagaaaaugguugggagggaaugguggaugguugguacgguuucaggcaucaaaauucugagggaagaggacaagcagcagaucucaaaagcacucaagcagcaaucgaucaaaucaauggaaagcuaaaucgauugaucgggaaaaccaacgagaaauuccaucagauugaaaaagaauucucagaaguagaaggaagaauucaggaccuugagaaauauguugaggacacuaaaauagaucucuggucauacaacgcggagcuucuuguugcccuggagaaccaacauacaauugaucuaacugacucagaaaugaacaaacuguuugaaaaaacaaagaagcaacugagggaaaaugcugaggauaugggaaaugguuguuucaaaauauaccacaaaugugacaaugccugcauaggaucaauaagaaauggaacuuaugaccacaauguguacagggaugaagcauuaaacaaccgguuccagaucaagggaguugagcugaagucaggguacaaagauuggauccuauggauuuccuuugccauaucauguuuuuugcuuuguguugcuuuguugggguucaucaugugggccugccaaaagggcaacauuaggugcaacauuugcauuuga

SEQ ID NO: 45088 - RNA, 1701 nt, Artificial Sequence
  derived and/or modified CDS sequence (wt) from hemagglutinin__InfluenzaA__ALA08602
augaagacuaucauugcuuugagcuacauucuaugucugguuuucgcucaaaaaauuccuggaaaugacaauagcacggcaacgcugugccuugggcaccaugcaguaccaaacggaacgauagugaaaacaaucacaaaugaccgaauugaaguuacuaaugcuacugagcugguucagaauuccucaauaggugaaauaugcgacaguccucaucagauccuugauggagaaaacugcacacuaauagaugcucuauugggagacccucagugugaugacuuucaaaauaagaaaugggaccuuuuuguugaacgaagcaaagccuacagcaacuguuacccuuaugaugugccggauuaugccucccuuaggucacuaguugccucauccggcacacuggaguuuaacaaugaaagcuucaauuggacuggagucacucaaaacggaacaaguucugcuugcauaaggagaucuaguaguaguuucuuuaguagauuaaauugguugacccacuuaaacuacacauacccagcauugaacgugacuaugccaaacaaugaacaauuugacaaauuguacauuugggggguucaccacccggguacggacaaggaccaaaucucccuguaugcucaaucaucaggaagaaucacaguaucuaccaaaagaagccaacaagcuguaaucccaaauaucggaucuagacccagaauaagggauaucccuagcagaauaagcaucuauuggacaauaguaaaaccgggagacauacuuuugauuaacagcacagggaaucuaauugcuccuagggguuacuucaaaauacgaagugggaaaagcucaauaaugagaucagaugcacccauuggcaaaugcaagucugaaugcaucacuccaaauggaagcauucccaaugacaaaccauuccaaaauguaaacaggaucacauacggggccugucccagauauguuaagcauagcacucugaaauuggcaacaggaaugcgaaauguaccagagaaacaaacuagaggcauauuuggcgcaauagcggguuucauagaaaaugguugggagggaaugguggaugguugguacgguuucaggcaucaaaauucugagggaagaggacaagcagcagaucucaaaagcacucaagcagcaaucgaucaaaucaauggaaagcugaaucgauugaucgggaaaaccaacgagaaauuccaucagauugaaaaagaauucucagaaguagaaggaagaauucaggaccuugagaaauauguugaggacacuaaaauagaucucuggucauacaacgcggagcuucuuguugcccuggagaaccaacauacaauugaucuaacugacucagaaaugaacaaacuguuugaaaaaacaaagaagcaacugagggaaaaugcugaggacaugggaaaugguuguuucaaaauauaccacaaaugugacaaugccugcauaggaucaauaagaaauggaacuuaugaccacaauguguacagggaugaagcauuaaacaaccgguuccagaucaagggaguugagcugaagucaggguacaaagauuggauccuauggauuuccuuugccauaucauguuuuuugcuuuguguugcuuuguugggguucaucaugugggccugccaaaagggcaacauuaggugcaacauuugcauuuga

SEQ ID NO: 45089 - RNA, 1701 nt, Artificial Sequence
  derived and/or modified CDS sequence (wt) from hemagglutinin__InfluenzaA__ALA08603
augaagacuaucauugccuugagcuacauucuaugucugguuuucgcucaaaaaauuccuggaaaugacaauagcacggcaacgcugugccuugggcaccaugcaguaccaaacggaacgauagugaaaacaaucacaaaugaccgaauugaaguuacuaaugcuacugagcugguucagaauuccucaauaggugaaauaugcgacaguccucaucagauccuugauggagaaaacugcacacuaauagaugcucuauugggagacccucagugugauggcuuucaaaauaagaaaugggaccuuuuuguugaacgaagcaaagccuacagcaacuguuacccuuaugaugugccggauuaugccucccuuaggucacuaguugccucauccggcacacuggaguuuaacaaugaaagcuucaauuggacuggagucacucaaaacggaacaaguucugcuugcauaaggagaucuaguaguaguuucuuuaguagauuaaauugguugacccacuuaaacuacauauacccagcauugaacgugacuaugccaaacaaugaacaauuugacaaauuguacauuugggggguucaccacccggguacggacaaggaccaaaucuuccuguaugcucaaucaucaggaagaaucacaguaucuaccaaaagaagccaacaagcuguaaucccaaauaucggaucuagacccagaauaagggauaucccuagcagaauaagcaucuauuggacaauaguaaaaccgggagacauacuuuugauuaacagcacagggaaucuaauugcuccuagggguuacuucaaaauacgaagugggaaaagcucaauaaugagaucagaugcacccauuggcaaaugcaagucugaaugcaucacuccaaauggaagcauucccaaugacaaaccauuccaaaauguaaacaggaucacauacggggccugucccagauauguuaagcauagcacucugaaauuggcaacaggaaugcgaaauguaccagagaaacaaacuagaggcauauuuggcgcaauagcggguuucauagaaaaugguugggagggaaugguggaugguugguacgguuucaggcaucaaaauucugagggaagaggacaagcagcagaucucaaaagcacucaagcagcaaucgaucaaaucaaugggaagcugaaucgauugaucgggaaaaccaacgagaaauuccaucagauugaaaaagaauucucagaaguagaaggaagaauucaggaccuugagaaauauguugaggacacuaaaauagaucucuggucauacaacgcggagcuucuuguugcccuggagaaccaacauacaauugaucuaacugacucagaaaugaacaaacuguuugaaaaaacaaagaagcaacugagggaaaaugcugaggauaugggaaaugguuguuucaaaauauaccacaaaugugacaaugccugcauaggaucaauaagaaauggaacuuaugaccacaauguguacagggaugaagcauuaaacaaccgguuccagaucaagggaguugagcugaagucaggguacaaagauuggauccuauggauuuccuuugccauaucauguuuuuugcuuuguguugcuuuguugggguucaucaugugggccugccaaaagggcaacauuaggugcaacauuugcauuuga

SEQ ID NO: 45090 - RNA, 1701 nt, Artificial Sequence; identical to SEQ ID NO: 45006
  derived and/or modified CDS sequence (wt) from hemagglutinin__InfluenzaA__ALA08605

SEQ ID NO: 45091 - RNA, 1701 nt, Artificial Sequence; identical to SEQ ID NO: 45028
  derived and/or modified CDS sequence (wt) from hemagglutinin__InfluenzaA__ALA08606

SEQ ID NO: 45092 - RNA, 1701 nt, Artificial Sequence; identical to SEQ ID NO: 45068
  derived and/or modified CDS sequence (wt) from hemagglutinin__InfluenzaA__ALA08607

SEQ ID NO: 45093 - RNA, 1701 nt, Artificial Sequence
  derived and/or modified CDS sequence (wt) from hemagglutinin__InfluenzaA__ALA08609
augaagacuaucauugcuuugggcuacauucuaugucugguuuucgcucaaaaaauuccuggaaaugacaauagcacggcaacgcugugccuugggcaccaugcaguaccaaacggaacgauagugaaaacaaucacaaaugaccgaauugaaguuacuaaugcuacugagcugguucagaauuccucaauaggugaaauaugcgacaguccucauaagauccuugauggagaaaacugcacacuaauagaugcucuauugggagacccucagugugauggcuuucaaaauaagaaaugggaccuuuuuguugaacgaagcaaagccuacagcaacuguuacccuuaugaugugccggauuaugccucccuuaggucacuaguugccucauccggcacacuggaguuuaacaaugaaagcuucaauuggacuggagucacucaaaacggaacaaguucugcuugcauaaggagaucuaguaguaguuucuuuaguagauuaaauugguugacccacuuaaacuacacauacccagcauugaacgugacuaugccaaacaaugaacaauuugacaaauuguacauuugggggguucaccacccggguacggacaaggaccaaaucuuccuguaugcucaaucaucaggaagaaucacaguaucuaccaaaagaagccaacaagcuguaaucccaaauaucggaucuagacccagaauaagggauaucccuagcagaauaagcaucuauuggacaauaguaaaaccgggagacauacuuuugauuaacagcacagggaaucuaauugcuccuagggguuacuucaaaauacgaagugggaaaagcucaauaaugagaucagaugcacccauuggcaaaugcaagucugaaugcaucacuccaaauggaagcauucccaaugacaaaccauuccaaaauguaaacaggaucacauacggggccugucccagauauguuaagcauagcacucugaaauuggcaacaggaaugcgaaauguaccagagaaacaaacuagaggcauauuuggcgcaauagcggguuucauagaaaaugguugggagggaaugguggaugguugguacgguuucaggcaucaaaauucugagggaagaggacaagcagcagaucucaaaagcacucaagcagcaaucgaucaaaucaaugggaagcugaaucgauugaucgggaaaaccaacgagaaauuccaucagauugaaaaagaauucucagaaguagaaggaagaauucaggaccuugauaaauauguugaggacacuaaaauagaucucuggucauacaacgcggagcuucuuguugcccuggagaaccaacauacaauugaucuaacugacucagaaaugaacaaacuguuugaaaaaacaaagaagcaacugagggaaaaugcugaggauaugggaaaugguuguuucaaaauauaccacaaaugugacaaugccugcauaggaucaauaagaaauggaacuuaugaccacaauguguacagggaugaagcauuaaacaaccgguuccagaucaagggaguugagcugaagucaggguacaaagauuggauccuauggauuuccuuugccauaucauguuuuuugcuuuguguugcuuuguugggguucaucaugugggccugccaaaagggcaacauuaggugcaacauuugcauuuga

SEQ ID NO: 45094 - RNA, 1701 nt, Artificial Sequence
  derived and/or modified CDS sequence (wt) from hemagglutinin__InfluenzaA__ALA08610
augaagacuaucauugcuuugagcuacauucuaugucugguuuucgcucaaaagcuuccugaaaaugacaauagcacggcaacgcugugccuugggcaccaugcaguaccaaacggaacgauagugaaaacaaucacgagugacagaauugaaguuacuaaugcuacugagcugguucagaauuccucaauaggugaaauaugcgacaguccucaucagauccuugauggaaaaaacugcacacuaauagaugcucuauugggagacccucagugugauggcuuucaaaauaagaaaugggaccuuuuuguugaacgaagcaaagccuacagcaacuguuacccuuaugaugugccggauuaugccucccuuaggucacuaguugccucauccgguacacuggaguuuaacgaugaaagcuucaauugggcuggagucacucaaaacggaacaaguucugcuugcauaaggggaucuaauaguaguuucuuuaguagauuaaauugguugacccacucaaacuucaaauacccagcauugaacgugacuaugccaaacaaugaacaauuugacaaauuguacauuugggggguucaccacccggguacggacaaggaccaaaucuuccuguaugcucaaucaucaggaagaaucacaguauccaccaaaagaagccaacaagcuguaaucccgaauaucggaucuagacccagaauaaggaauaucccuagcagaauaagcaucuauuggacaauaguaaaaccgggagacauacuuuugauuaacagcacagggaaucuaauugcuccuagggguuacuucaaaauacgaagugggaaaagcucaauaaugagaucagaugcacccauuggcaaaugcaagucugaaugcaucacuccaaauggaagcauucccaaugacaaaccauuccaaaauguaaacaggaucacauacggggccugucccagauauguuaagcaaagcacucugaaauuggcaacaggaaugcgaaauguaccagagaaacaaacuagaggcauauuuggcgcaauagcggguuucauagaaaaugguugggagggaaugaaggaugguugguacgguuucaggcaucaaaauucugagggaagaggacaagcagcagaucucaaaagcacucaagcugcaaucgaucaaaucaaugggaagcugaaucgauugaucgggaaaaccaacgagaaauuccaucagauugaaaaagaauucucagaaguagaagggagaauucaggaccuugagaaauauguugaggacacaaaaauagaucucuggucauacaacgcggagcuucuuguugcccuggagaaccaacauacaauugaucuaacugacucagaaaugaacaaacuguuugaaaaaacaaagaagcaacugagggaaaaugcugaggauaugggcaaugguuguuucaaaauauaccacaaaugugacaaugccugcauaggaucaaucagaaauggaacuuaugaccacgauguauacagggaugaagcuuuaaacaaccgguuccagaucaagggaguugagcugaagucaggguacaaagauuggauccuauggauuuccuuugccauaucauguuuuuugcuuuguguugcuuuguugggguucaucaugugggccugccaaaagggcaacauuaggugcaacauuugcauuuga

SEQ ID NO: 45095 - RNA, 1701 nt, Artificial Sequence
  derived and/or modified CDS sequence (wt) from hemagglutinin__InfluenzaA__ALA08611
augaagauuaucauugcuuugagcuacauucuaugucugguuuucgcucaaaaaauuccuggaaaugacaauagcacggcaacgcugugccuugggcaccaugcaguaccaaacggaacgauagugaaaacaaucacaaaugaccgaauugaaguuacuaaugcuacugagcugguucagaauuccucaauaggugaaauaugcgacaguccucaucggauccuugauggagaaaacugcacacuaauagaugcucuauugggagacccucagugugauggcuuucaaaauaagaaaugggaccuuuuuguugaacgaagcaaagccuacagcaacuguuacccuuaugaugugccggauuaugccucccuuaggucacuaguugccucauccggcacacuggaguuuaacaaugaaagcuucaauuggacuggagucacucaaaacggaacaaguucugcuugcauaaggagaucuaguaguaguuucuuuaguagauuaaauugguugacccacuuaaacuacacauacccagcauugaacgugacuaugccaaacaaugagcaauuugacaaauuguacauuugggggguucaccacccggguacggacaaggaccaaaucuuccuguaugcucaaucaucaggaagaaucacaguaucuaccaaaagaagccaacaagcuguaaucccaaauaucggaucuagacccagaauaagggauaucccuagcagaauaagcaucuauuggacaauaguaaaaccgggagacauacuuuugauuaacagcacagggaaucuaauugcuccuagggguuacuucaaaauacgaaguggaaaaagcucaauaaugagaucagaugcacccauuggcaaaugcaagucugagugcaucacuccaaauggaagcauucccaaugacaaaccauuccaaaauguaaacaggaucacauacggggccugucccagauauguuaagcauagcacucugaaauuggcaacaggaaugcgaaauguaccagagaaacaaacuagaggcauauuuggcgcaauagcggguuucauagaaaaugguugggagggaaugguggaugguugguacgguuucaggcaucaaaauucugagggaagaggacaagcagcagaucucaaaagcacucaagcagcaaucgaucaaaucaaugggaagcugaaucgauugaucgggaaaaccaacgagaaauuccaucagauugaaaaagaauucucagaaguagaaggaagaauucaggaccuugagaaauauguugaggacacuaaaauagaucucuggucauacaacgcggagcuucuuguugcccuggagaaccaacauacaauugaucuaacugacucagaaaugaacaaacuguuugaaaaaacaaagaagcaacugagggaaaaugcugaggauaugggaaaugguuguuucaaaauauaccacaaaugugacaaugccugcauaggaucaauaagaaauggaacuuaugaccacaauguguacagggaugaagcauuaaacaaccgguuccagaucaagggaguugagcugaagucaggguacaaagauuggauccuauggauuuccuuugccauaucauguuuuuugcuuuguguugcuuuguugggguucaucaugugggccugccaaaagggcaacauuaggugcaacauuugcauuuga

SEQ ID NO: 45096 - RNA, 1701 nt, Artificial Sequence; identical to SEQ ID NO: 45068
  derived and/or modified CDS sequence (wt) from hemagglutinin__InfluenzaA__ALA08612

SEQ ID NO: 45097 - RNA, 1701 nt, Artificial Sequence; identical to SEQ ID NO: 45031
  derived and/or modified CDS sequence (wt) from hemagglutinin__InfluenzaA__ALA08614

SEQ ID NO: 45098 - RNA, 1701 nt, Artificial Sequence
  derived and/or modified CDS sequence (wt) from hemagglutinin__InfluenzaA__ALA08615
augaagacuaucauugcuuugagcuacauucuaugucugguuuucgcucaaaaaauuccuggaaaugacaauagcacggcaacgcugugccuugggcaccaugcaguaccaaacggaacgauagugaaaacaaucacaaaugaccgaauugaaguuacuaaugcuacugagcugguucagaauuccucgauaggugaaauaugcgacaguccucaucagauccuugauggagaaaacugcacacuaauagaugcucuauugggagauccucagugugauggcuuucaaaauaagaaaugggaccuuuuuguugaacgaagcaaagccuacagcaacuguuacccuuaugaugugccggauuaugccucccuuaggucacuaguugccucauccggcacacuggaguuuaacaaugaaagcuucaauuggacuggagucacucaaaacggaacaaguucugcuugcauaaggagaucuaguaguaguuucuuuaguagauuaaauugguugacccacuuaaacuacacauacccagcauugaacgugacuaugccaaacaaugaacaauuugacaaauuguacauuugggggguucaccacccggguacggacaaggaccaaaucuuccuguaugcucaaucaucaggaagaaucacaguaucuaccaaaagaagccaacaagcuguaaucccaaauaucggaucuagacccagaauaagggauaucccuagcagaauaagcaucuauuggacaauaguaaaaccgggagacauacuuuugauuaacagcacagggaaucuaauugcuccuagggguuacuucaaaauacgaagugggaaaagcucaauaaugagaucagaugcacccauuggcaaaugcaagucugaaugcaucacuccaaauggaagcauucccaaugacaaaccauuccaaaauguaaacaggaucacauacggggccugucccagauauguuaagcauagcacucugaaauuggcaacaggaaugcgaaauguaccagagaaacaaacuagaggcauauuuggcgcaauagcggguuucauagaaaaugguugggagggaaugguggaugguugguacgguuucaggcaucaaaauucugagggaagaggacaagcagcagaucucaaaagcacucaagcagcaaucgaucaaaucaaugggaagcugaaucgauugaucgggaaaaccaacgagaaauuccaucagauugaaaaagaauucucagaaguagaaggaagaauucaggaccuugagaaauauguugaggacacuaaaauagaucucuggucauacaacgcggagcuucuuguugcccuggagaaccaacauacaauugaucuaacugacucagaaaugaacaaacuguuugaaaaaacaaagaagcaacugagggaaaaugcugaggauaugggaaaugguuguuucaaaauauaccacaaaugugacaaugccugcauaggaucaauaagaaauggaacuuaugaccacaauguguacagggaugaagcauuaaacaaccgguuccagaucaagggaguugagcugaagucaggguacaaagauuggauccuauggauuuccuuugccauaucauguuuuuugcuuuguguugcuuuguugggguucaucaugugggccugccaaaagggcaacauuaggugcaacauuugcauuuga

SEQ ID NO: 45099 - RNA, 1701 nt, Artificial Sequence
  derived and/or modified CDS sequence (wt) from hemagglutinin__InfluenzaA__ALA08616
augaagacuaucauugcuuugagcuacauucuaugucugguuuucgcucaaaaaauuccuggaaaugacaauagcacggcaacgcugugccuugggcaccaugcaguaccaaacggaacgauagugaaaacaaucacaaaugaccgaauugaaguuacuaaugcuacugagcugguucagaauuccucaauaggugaaauaugcgacaguccucaucagauccuugauggagaaaacugcacacuaauagaugcucuauugggagacccucagugugauggcuuucaaaauaagaaaugggaccuuuuuguugaacgaagcaaagccuacagcaacuguuaccccuaugaugugccggauuaugccucccuuaggucacuaguugccucauccggcacacuggaguuuaacaaugaaagcuucaauuggacuggagucacucaaaacggaacaaguucugcuugcauaaggagaucuaguaguagcuucuuuaguagauuaaauugguugacccacuuaaacuacacauacccagcauugaacgugacuaugccaaacaaugaacaauuugacaaauuguacauuugggggguucaccacccggguacggacaaggaccaaaucuuccuguaugcucaaucaucaggaagaaucacaguaucuaccaaaagaagccaacaagcuguaaucccaaauaucggaucuagacccagaauaagggauaucccuagcagaauaagcaucuauuggacaauaguaaaaccgggagacauacuuuugauuaacagcacagggaaucuaauugcuccuagggguuacuucaaaauacgaaguggaaaaagcucaauaaugagaucagaugcacccauuggcaaaugcaagucugaaugcaucacuccaaauggaagcauucccaaugacaaaccauuccaaaauguaaacaggaucacauacggggccugucccagauauguuaagcauagcacucugaaauuggcaacaggaaugcgaaauguaccagagaaacaaacuagaggcauauuuggcgcaauagcggguuucauagaaaaugguugggagggaaugguggaugguugguacgguuucaggcaucaaaauucugagggaagaggacaagcagcagaucucaaaagcacucaagcagcaaucgaucaaaucaaugggaagcugaaucgauugaucgggaaaaccaacgagaaauuccaucagauugaaaaagaauucucagaaguagaaggaagaauucaggaccuugagaaauauguugaggacacuaaaauagaucucuggucauacaacgcggagcuucuuguugcccuggagaaccaacauacaauugaucuaacugacucagaaaugaacaaacuguuugaaaaaacaaagaagcaacugagggaaaaugcugaggauaugggaaaugguuguuucaaaauauaccacaaaugugacaaugccugcauaggaucaauaagaaauggaacuuaugaccacaauguguacagggaugaagcauuaaacaaccgguuccagaucaagggaguugagcugaagucaggguacaaagauuggauccuauggauuuccuuugccauaucauguuuuuugcuuuguguugcuuuguugggguucaucaugugggccugccaaaagggcaacauuaggugcaacauuugcauuuga

SEQ ID NO: 45100 - RNA, 1701 nt, Artificial Sequence; identical to SEQ ID NO: 45062
  derived and/or modified CDS sequence (wt) from hemagglutinin__InfluenzaA__ALA08617

SEQ ID NO: 45101 - RNA, 1701 nt, Artificial Sequence
  derived and/or modified CDS sequence (wt) from hemagglutinin__InfluenzaA__ALA08619
augaagacugucauugcuuugagcuacauucuaugucugguuuucgcucaaaaaauuccuggaaaugacaauagcacggcaacgcugugccuugggcaccaugcaguaccaaacggaacgauagugaaaacaaucacaaaugaccgaauugaaguuacuaaugcuacugagcugguucagaauuccucaauaggugaaauaugcgacaguccucaucagauccuugauggagaaaacugcacacuaauagaugcucuauugggagacccucagugugauggcuuucaaaauaagaaaugggaccuuuuuguugaacgaagcaaagccuacagcaacuguuacccuuaugaugugccggauuaugccucccuuaggucacuaauugccucauccggcacacuggaguuuaacaaugaaagcuucaauuggacuggagucacucaaaacggaacaaguucugcuugcauaaggaaaucuaguaguaguuucuuuaguagauuaaauugguugacccacuuaaacuacacauacccagcauugaacgugacuaugccaaacaaugaacaauuugacaaauuguacauuugggggguucaccacccggguacggacaaggaccaaaucuuccuguaugcucgaucaucaggaagaaucacaguaucuaccaaaagaagccaacaagcuguaaucccaaauaucggaucuagacccagaauaagggauaucccuagcagaauaagcaucuauuggacaauaguaaaaccgggagacauacuuuugauuaacagcacagggaaucuaauugcuccuagggguuacuucaaaauacgaagugggaaaagcucaauaaugagaucagaugcacccauuggcaaaugcaagucugaaugcaucacuccaaauggaagcauucccaaugagaaaccauuccaaaauguaaacaggaucacauacggggccugucccagauauguuaagcauagcacucugaaauuggcaacaggaaugcgaaauguaccagagaaacaaacuagaggcauauuuggcgcaauagcggguuucauagaaaaugguugggagggaaugguggaugguugguacgguuucaggcaucaaaauucugaggggagaggacaagcagcagaucucaaaagcacucaagcagcaaucgaucaaaucaaugggaagcugaaucgauugaucgggaaaaccaacgagaaauuccaucagauugaaaaagaauucucagaaguagaaggaagaauucaggaccuugagaaauauguugaggacacuaaaauagaucucuggucauacaacgcggagcuucuuguugcccuggagaaucaacauacaauugaucuaacugacucagaaaugaacaaacuguuugaaaaaacaaagaagcaacugagggaaaaugcugaggauaugggaaaugguuguuucaaaauauaccacaaaugugacaaugccugcauaggaucaauaagaaauggaauuuaugaccacaauguguacagggaugaagcauuaaacaaccgguuccagaucaagggaguugagcugaagucaggguacaaagauuggauccuauggauuuccuuugccauaucauguuuuuugcuuuguguugcuuuguugggguucaucaugugggccugccaaaagggcaacauuaggugcaacauuugcauuuga

SEQ ID NO: 45102 - RNA, 1701 nt, Artificial Sequence; identical to SEQ ID NO: 45068
  derived and/or modified CDS sequence (wt) from hemagglutinin__InfluenzaA__ALA08620

SEQ ID NO: 45103 - RNA, 1701 nt, Artificial Sequence; identical to SEQ ID NO: 45059
  derived and/or modified CDS sequence (wt) from hemagglutinin__InfluenzaA__ALA08621

SEQ ID NO: 45104 - RNA, 1701 nt, Artificial Sequence
  derived and/or modified CDS sequence (wt) from hemagglutinin__InfluenzaA__ALA08622
augaagacuaucauugcuuugagcuacauucuaugucugguuuucgcucaaaaaauuccuggaaaugacaauagcacggcaacgcugugccuugggcaccaugcaguaccaaacggaacgauagugaaaacaaucacaaaugaccgaauugaaguuacuaaugcuacugagcugguucagaauuccucaauaggugaaauaugcgacaguccucaucagauccuugauggagaaaacugcacacuaauagaugcucuauugggagacccucagugugauggcuuucaaaauaagaaaugggaccuuuuuguugaacgaagcaaagccuacagcaacuguuacccuuaugaugugccggauuaugccucccuuaggucacuaguugccucauccggcacacuggaguuuaacaaugaaagcuucaauuggacuggagucacucaaaacggaacaaguucugcuugcauaaggagaucuaguaguaguuucuuuaguagauuaaauugguugacccacuuaaacuacaaauacccagcauugaacgugacuaugccaaacaaugaacaauuugacaaauuguacauuugggggguucaccacccggguacggacaaggaccaaaucuuccuguaugcucaaucaucaggaagaaucacaguaucuaccaaaagaagccaacaagcuguaaucccaaauaucggaucuagacccagaauaagggauaucccuagcagaauaagcaucuauuggacaauaguaaaaccgggagacauacuuuugauuaacagcacagggaaucuaauugcuccuagggguuacuucaaaauacgaagugggaaaagcucaauaaugagaucagaugcacccauuggcaaaugcaagucugaaugcaucacuccaaauggaagcauucccaaugacaaaccauuccaaaauguaaacaggaucacauacggggccugucccagauauguuaagcauagcacucugaaauuggcaacaggaaugcgaaauguaccagagaaacaaacuagaggcauauuuggcgcaauagcggguuucauagaaaaugguugggagggaaugguggaugguugguacgguuucaggcaucaaaauucugagggaagaggacaagcagcagaucucaaaagcacucaagcagcaaucgaucaaaucaauggaaagcugaaucgauugaucgggaaaaccaacgagaaauuccaucagauugaaaaagaauucucagaaguagaaggaagaauucaggaccuugagaaauauguugaggacacuaaaauagaucucuggucauacaacgcggagcuucuuguugcccuggagaaccaacauacaauugaucuaacugacucagaaaugaacaaacuguuugaaaaaacaaagaagcaacugagggaaaaugcugaggauaugggaaaugguuguuucaaaauauaccacaaaugugacaaugccugcauaggaucaauaagaaauggaacuuaugaccacaauguguacagggaugaagcauuaaacaaccgguuccagaucaagggaguugagcugaagucaggguacaaagauuggauccuauggauuuccuuugccauaucauguuuuuugcuuuguguugcuuuguugggguucaucaugugggccugccaaaagggcaacauuaggugcaacauuugcauuuga

SEQ ID NO: 45105 - RNA, 1701 nt, Artificial Sequence
  derived and/or modified CDS sequence (wt) from hemagglutinin__InfluenzaA__ALA08623
augaagacuaucauugcuuugagcuacauucuaugucugguuuucgcucaaaaaauuccuggaaaugacaauagcacggcaacgcugugccuugggcaccaugcaguaccaaacggaacgauagugaaaacaaucacaaaugaccgaauugaaguuacuaaugcuacugaguugguucagaauuccucaauaggugaaauaugcgacaguccucaucagauccuugauggagaaaacugcacacuaauagaugcucuauugggagacccucagugugauggcuuucaaaauaagaaaugggaccuuuuuguugaacgaagcaaagccuacagcaacuguuacccuuaugaugugccggauuaugccucccuuaggucacuaguugccucauccggcacacuggaguuuaacaaugaaagcuucaacuggacuggagucacucaaaacggaacaaguucugcuugcauaaggagaucuaguaguaguuucuuuaguagauuaaauugguugacccacuuaaacuacacauacccagcauugaacgugacuaugccaaacaaugaacaauuugacaaauuguacauuugggggguucaccacccggguacggacaaggaccaaaucuuccuguaugcucaaucaucaggaagaaucacaguaucuaccaaaagaagccaacaagcuguaaucccaaauaucggaucuagacccagaauaagggauaucccuagcagaauaagcaucuauuggacaauaguaaaaccgggagacauacuuuugauuaacagcacagggaaucuaauugcuccuagggguuacuucaaaauacgaagugggaaaagcucaauaaugagaucagaugcacccauuggcaaaugcaagucugaaugcaucacuccaaauggaagcauucccaaugacaaaccauuccaaaauguaaacaggaucacauacggggccugucccagauauguuaagcauagcacucugaaauuggcaacaggaaugcgaaauguaccagagaaacaaacuaggggcauauuuggcgcaauagcggguuucauagaaaaugguugggagggaaugguggaugguugguacgguuucaggcaucaaaauucugagggaagaggacaagcagcagaucucaaaagcacucaagcagcaaucgaucaaaucaaugggaagcugaaucgguugaucgggaaaaccaacgagaaauuccaucagauugaaaaagaauucucagaaguagaaggaagaauucaggaccuugagaaauauguugaggacacuaaaauagaucucuggucauacaacgcggagcuucuuguugcccuggagaaccaacauacaauugaucuaacugacucagaaaugaacaaacuguuugaaaaaacaaagaagcaacugagggaaaaugcugaggauaugggaaaugguuguuucaaaauauaccacaaaugugacaaugccugcauaggaucaauaagaaauggaacuuaugaccacaauguguacagggaugaagcauuaaacaaccgguuucagaucaagggaguugagcugaagucaggguacaaagauuggauccuauggauuuccuuugccauaucauguuuuuugcuuuguguugcuuuguugggguucaucaugugggccugccaaaaaggcaacauuaggugcaacauuugcauuuga

SEQ ID NO: 45106 - RNA, 1701 nt, Artificial Sequence; identical to SEQ ID NO: 45059
  derived and/or modified CDS sequence (wt) from hemagglutinin__InfluenzaA__ALA08624

SEQ ID NO: 45107 - RNA, 1701 nt, Artificial Sequence; identical to SEQ ID NO: 45033
  derived and/or modified CDS sequence (wt) from hemagglutinin__InfluenzaA__ALA08625

SEQ ID NO: 45108 - RNA, 1701 nt, Artificial Sequence
  derived and/or modified CDS sequence (wt) from hemagglutinin__InfluenzaA__ALA08626
augaagacuaucauugcuuugagcuacauucuaugucugguuuucgcucaaaaaauuccuggaaaugacaauagcacggcaacgcugugccuugggcaccaugcaguaccaaacggaacgauagugaaaacaaucacaaaugaccgaauugaaguuacuaaugcuacugagcugguucagaauuccucaauaggugaaauaugcgacaguccucaucagauccuugauggagaaaacugcacacuaauagaugcucuauugggagacccucagugugauggcuuucaaaauaagaaaugggaccuuuuuguugaacgaagcaaagccuacagcaacuguuacccuuaugaugugccggauuaugccucccuuaggucacuaguugccucauccggcacacuggaguuuaacaaugaaagcuucaauuggacuggagucacucaaaacggaacaaguucugcuugcauaaggagaucuaguaguaguuucuuuaguagauuaaauugguugacccacuuaaacuacacauacccagcauugaacgugacuaugccaaacaaugagcaauuugacaaauuguacauuugggggguucaccacccggguacggacaaggaccaaaucuuccuguaugcucaaucaucaggaagaauaacaguaucuaccaaaagaagccaacaagcuguaaucccaaauaucggaucuagacccagaauaagggauaucccuagcagaauaagcaucuauuggacaauaguaaaaccgggagacauacuuuugauuaacagcacagggaaucuaauugcuccuagggguuacuucaaaauacgaagugggaaaagcucaauaaugagaucagaugcacccauuggcaaaugcaagucugagugcaucacuccaaauggaagcauucccaaugacaaaccauuccaaaauguaaacaggaucacauacggggccugucccagauauguuaagcauagcacucugaaauuggcaacaggaaugcgaaauguaccagagaaacaaacuagaggcauauuuggcgcaauagcggguuucauagaaaaugguugggagggaaugguggaugguugguacgguuucaggcaucaaaauucugagggaagaggacaagcagcagaucucaaaagcacucaagcagcaaucgaucaaaucaaugggaagcugaaucgauugaucgggaaaaccaacgagaaauuccaucagauugaaaaagaauucucagaaguagaaggaagaauucaggaccuugagaaauauguugaggacacuaaaauagaucucuggucauacaacgcggagcuucuuguugcccuggagaaccaacauacaauugaucuaacugacucagaaaugaacaaacuguuugaaaaaacaaagaagcaacugagggaaaaugcugaggauaugggaaaugguuguuucaaaauauaccacaaaugugacaaugccugcauaggaucaauaagaaauggaacuuaugaccacaauguguacagggaugaagcauuaaacaaccgguuccagaucaagggaguugagcugaagucaggguacaaagauuggauccuauggauuuccuuugccauaucauguuuuuugcuuuguguugcuuuguugggguucaucaugugggccugccaaaagggcaacauuaggugcaacauuugcauuuga

SEQ ID NO: 45109 - RNA, 1701 nt, Artificial Sequence
  derived and/or modified CDS sequence (wt) from hemagglutinin__InfluenzaA__ALA08627
augaagacuaucauugccuugagcuacauucuaugucugguuuucgcucaaaaaauuccuggaaaugacaauagcacggcaacgcugugccuugggcaccaugcaguaccaaacggaacgauagugaaaacaaucacaaaugaccgaauugaaguuacuaaugcuacugagcugguucagaauuccucaauaggugaaauaugcgacaguccucaucagauccuugauggagaaaacugcacacuaauagaugcucuauugggagacccucagugugauggcuuucaaaauaagaaaugggaccuuuuuguugaacgaagcaaagccuacagcaacuguuacccuuaugaugugccggauuaugccucccuuaggucacuaguugccucauccggcacacuggaguuuaacaaugaaagcuucaauuggacuggagucacucaaaacggaacaaguucugcuugcauaaggagaucuaguaguaguuucuuuaguagauuaaauugguugacccacuuaaacuacacauacccagcauugaacgugacuaugccaaacaaugaacaauuugacaaauuguacauuugggggguucaccacccggguacggacaaggaccaaaucuuccuguaugcucaaucaucaggaagaaucacaguaucuaccaaaagaagccaacaagcuguaaucccaaauaucggaucuagacccagaauaagggauaucccuagcagaauaagcaucuauuggacaauaguaaaaccgggagacauacuuuugauuaacagcacagggaaucuaauugcuccuagagguuacuucaaaauacgaagugggaaaagcucaauaaugagaucagaugcacccauuggcaaaugcaagucugaaugcaucacuccaaauggaagcauucccaaugacaaaccauuccaaaauguaaacaggaucacauacggggccugucccagauauguuaagcauagcacucugaaauuggcaacaggaaugcgaaauguaccagagaaacaaacuagaggcauauuuggcgcaauagcggguuucauagaaaaugguugggagggaaugguggaugguugguacgguuucaggcaucaaaauucugagggaagaggacaagcagcagaucucaaaagcacucaagcagcaaucgaucaaaucaaugggaagcugaaucgauugaucgggaaaaccaacgagaaauuccaucagauugaaaaagaauucucagaaguagaaggaagaauucaggaccuugagaaauauguugaggacacuaaaauagaucucuggucauacaacgcggagcuucuuguugcccuggagaaccaacauacaauugaucuaacugacucagaaaugaacaaacuguuugaaaaaacaaagaagcaacugagggaaaaugcugaggauaugggaaaugguuguuucaaaauauaccacaaaugugacaaugccugcauaggaucaauaagaaauggaacuuaugaccacaauguguacagggaugaagcauuaaacaaccgguuccagaucaagggaguugagcugaagucaggguacaaagauuggauccuauggauuuccuuugccauaucauguuuuuugcuuuguguugcuuuguugggguucaucaugugggccugccaaaagggcaacauuaggugcaacauuugcauuuga

SEQ ID NO: 45110 - RNA, 1701 nt, Artificial Sequence
  derived and/or modified CDS sequence (wt) from hemagglutinin__InfluenzaA__ALA08629
augaagacuaucauugccuugagcuacauucuaugucugguuuucgcucaaaaaauuccuggaaaugacaauagcacggcaacgcugugccuugggcaccaugcaguaccaaacggaacgauagugaaaacaaucacaaaugaccgaauugaaguuacuaaugcuacugagcugguucagaauuccucaauaggugaaauaugcgacaguccucaucagauccuugauggagaaaacugcacacuaauagaugcucuauugggagauccucagugugauggcuuucaaaauaagaaaugggaccuuuuuguugaacgaagcaaagccuacagcaacuguuacccuuaugaugugccggauuaugccucccuuaggucacuaguugccucauccggcacacuggaguuuaacaaugaaagcuucaauuggacuggagucacucaaaacggaacaaguucugcuugcauaaggagaucuaguaguaguuucuuuaguagauuaaauugguugacccacuuaaacuacacauacccagcauugaacgugacuaugccaaacaaugaacaauuugacaaauuguacauuugggggguucaccacccggguacggacaaggaccaaaucuuccuguaugcucaaucaucaggaagaaucacaguaucuaccaaaggaagccaacaagcuguaaucccaaauaucggaucuagacccagaauaagggauaucccuagcagaauaagcaucuauuggacaauaguaaaaccgggagacauacuuuugauuaacagcacagggaaucuaauugcuccuagggguuacuucaaaauacgaagugggaaaagcucaauaaugagaucagaugcacccauuggcaaaugcaagucugaaugcaucacuccaaauggaagcauucccaaugacaaaccauuccaaaauguaaacaggaucacauacggggccugucccagauauguuaagcauagcacucugaaauuggcaacaggaaugcgaaauguaccagagaaacaaacuagaggcauauuuggcgcaauagcggguuucauagaaaaugguugggagggaaugguggaugguugguacgguuucaggcaucaaaauucugagggaagaggacaagcagcagaucucaaaagcacucaagcagcaaucgaucaaaucaaugggaagcugaaucgauugaucgggaaaaccaacgagaaauuccaucagauugaaaaagaauucucagaaguagaaggaagaauucaggaccuugagaaauauguugaggacacuaaaauagaucucuggucauacaacgcggagcuucuuguugcccuggagaaccaacauacaauugaucuaacugacucagaaaugaacaaacuguuugaaaaaacaaagaagcaacugagggaaaaugcugaggauaugggaaaugguuguuucaagauauaccacaaaugugacaaugccugcauaggaucaauaagaaauggaacuuaugaccacaauguguacagggaugaagcauuaaacaaccgguuccagaucaagggaguugagcugaagucaggguacaaagauuggauccuauggauuuccuuugccauaucauguuuuuugcuuuguguugcuuuguugggguucaucaugugggccugccaaaagggcaacauuaggugcaacauuugcauuuga

SEQ ID NO: 45111 - RNA, 1701 nt, Artificial Sequence
  derived and/or modified CDS sequence (wt) from hemagglutinin__InfluenzaA__ALA08630
augaagacuaucauugcuuugagcuacauucuaugucugguuuucgcucaaaaaauuccuggaaaugacaauagcacggcaacgcugugccuugggcaccaugcaguaccaaacggaacgauagugaaaacaaucacaaaugaccgaauugaaguuacuaaugcuacugagcugguucagaauuccucaauaggugaaauaugcgacaguccucaucagauccuugauggagaaaacugcacacuaauagaugcucuauugggagacccucagugugauggcuuucaaaauaagaaaugggaccuuuuuguugaacgaagcaaagccuacagcaacuguuacccuuaugaugugccggauuaugccucccuuaggucacuaguugccucauccggcacacuggaguuuaacaaugaaagcuucaauuggacuggagucacucaaaacggaacaaguucugcuugcauaaggaaaucuaguaguaguuucuuuaguagauuaaauugguugacccacuuaaacuacacauacccagcauugaacgugacuaugccaaacaaugaacaauuugacaaauuguacauuugggggguucaccacccggguacggacaaggaccaaaucuuccuguaugcucgaucaucaggaagaaucacaguaucuaccaaaagaagccaacaagcuguaaucccaaauaucggaucuagacccagaauaagggauaucccuagcagaauaagcaucuauuggacaauaguaaaaccgggagacauacuuuugauuaacagcacagggaaucuaauugcuccuagggguuacuucaaaauacgaagugggaaaagcucaauaaugagaucagaugcacccauuggcaaaugcaagucugaaugcaucacuccaaauggaagcauucccaaugacaaaccauuccaaaauguaaacaggaucacauacggggccugucccagauauguuaagcauagcacucugaaauuggcaacaggaaugcgaaauguaccagagaaacaaacuagaggcauauuuggcgcaauagcggguuucauagaaaaugguugggagggaaugguggaugguugguacgguuucaggcaucaaaauucugaggggagaggacaagcagcagaucucaaaagcacucaagcagcaaucgaucaaaucaaugggaagcugaaucgauugaucgggaaaacaaacgagaaauuccaucagauugaaaaagaauucucagaaguagaaggaagaauucaggaccuugagaaauauguugaggacacuaaaauagaucucuggucauacaacgcggagcuucuuguugcccuggagaaucaacauacaauugaucuaacugacucagaaaugaacaaacuguuugaaaaaacaaagaagcaacugagggaaaaugcugaggauaugggaaaugguuguuucaaaauauaccacaaaugugacaaugccugcauaggaucaauaagaaauggaacuuaugaccacaauguguacagggaugaagcauuaaacaaccgguuccagaucaagggaguugagcugaagucaggguacaaagauuggauccuauggauuuccuuugccauaucauguuuuuugcuuuguguugcuuuguugggguucaucaugugggccugccaaaagggcaacauuaggugcaacauuugcauuuga

SEQ ID NO: 45112 - RNA, 1701 nt, Artificial Sequence
  derived and/or modified CDS sequence (wt) from hemagglutinin__InfluenzaA__ALA08631
augaagacuaucauugcuuugagcuacauucuaugucugguuuucgcucaaaaaauuccuggaaaugacaauagcacggcaacgcugugccuugggcaccaugcaguaccaaacggaacgauagugaaaacaaucacaaaugaccgaauugaaguuacuaaugcuacugagcugguucagaauuccucaauaggugaaauaugcgacaguccucaucagauccuugauggagaaaacugcacacuaauagaugcucuauugggagacccucagugugauggcuuucaaaauaagaaaugggaccuuuuuguugaacgaagcaaagccuacagcaacuguuacccuuaugaugugccggauuaugccucccuuaggucacuaguugccucauccggcacacuggaguuuaacaaugaaagcuucaauuggacuggagucacucaaaacggaacaaguucugcuugcauaaggagaucuaguaguaguuucuuuaguagauuaaauugguugacccacuuaaacuacacauacccagcauugaacgugacuaugccaaacaaggaacaauuugacaaauuguacauuugggggguucaccacccggguacggacaaggaccaaaucuuccuguaugcucaaucaucaggaagaaucacaguaucuaccaaaagaagccaacaagcuguaaucccaaauaucggaucuagacccagaauaagggauaucccuagcagaauaagcaucuauuggacaauaguaaaaccgggagacauacuuuugauuaacagcacagggaaucuaauugcuccuagggguuacuucaaaauacgaagugggaaaagcucaauaaugagaucagaugcacccauuggcaaaugcaagucugaaugcaucacuccaaauggaagcauucccaaugacaaaccauuccaaaauguaaacaggaucacauacggggccugucccagauauguuaagcauagcacucugaaauuggcaacaggaaugcgaaauguaccagagaaacaaacuagaggcauauuuggcgcaauagcggguuucauagaaaaugguugggagggaaugguggaugguugguacgguuucaggcaucaaaauucugagggaagaggacaagcagcagaucucaaaagcacucaagcagcaaucgaucaaaucaaugggaagcugaaucgauugaucgggaaaaccaacgagaaauuccaucagauugaaaaagaauucucagaaguagaaggaagaauucaggaccuugagaaauauguugaggacacuaaaauagaucucuggucauacaacgcggagcuucuuguugcccuggagaaccaacauacaauugaucuaacugacucagaaaugaacaaacuguuugaaaaaacaaagaagcaacugagggaaaaugcugaggauaugggaaaugguuguuucaaaauauaccacaaaugugacaaugccugcauaggaucaauaagaaauggaacuuaugaccacaauguguacagggaugaagcauuaaacaaccgguuccagaucaagggaguugagcugaagucaggguacaaagauuggauccuauggauuuccuuugccauaucauguuuuuugcuuuguguugcuuuguugggguucaucaugugggccugccaaaagggcaacauuaggugcaacauuugcauuuga

SEQ ID NO: 45113 - RNA, 1701 nt, Artificial Sequence
  derived and/or modified CDS sequence (wt) from hemagglutinin__InfluenzaA__ALA08632
augaagacuaucauugccuugagcuacauucuaugucugguuuucgcucaaaaaauuccuggaaaugacaauagcacggcaacgcugugccuugggcaccaugcaguaccaaacggaacgauagugaaaacaaucacaaaugaccgaauugaaguuacuaaugcuacugagcugguucagaauuccucaauaggugaaauaugcgacaguccucaucagauccuugauggagaaaacugcacacuaauagaugcucuauugggagacccucaaugugauggcuuucaaaauaagaaaugggaccuuuuuguugaacgaagcaaagccuacagcaacuguuacccuuaugaugugccggauuaugccucccuuaggucacuaguugccucauccggcacacuggaguuuaacaaugaaagcuucaauuggacuggagucacucaaaacggaacaaguucugcuugcauaaggagaucuaguaguaguuucuuuaguagauuaaauugguugacccacuuaaacuacacauacccagcauugaacgugacuaugccaaacaaugaacaauuugacaaauuguacauuugggggguucaccacccggguacggacaaggaccaaaucuuccuguaugcucaaucaucaggaagaaucacaguaucuaccaaaggaagccaacaagcuguaaucccaaaugucggaucuagacccagaauaagggauaucccuagcagaauaagcaucuauuggacaauaguaaaaccgggagacauacuuuugauuaacagcacagggaaucuaauugcuccuagggguuacuucaaaauacgaagugggaaaagcucaauaaugagaucagaugcacccauuggcaaaugcaagucugaaugcaucacuccaaauggaagcauucccaaugacaaaccauuccaaaauguaaacaggaucacauacggggccugucccagauauguuaagcauagcacucugaaauuggcaacaggaaugcgaaauguaccagagaaacaaacuagaggcauauuuggcgcaauagcggguuucauagaaaaugguugggagggaaugguggaugguugguacgguuucaggcaucaaaauucugagggaagaggacaagcagcagaucucaaaagcacucaagcagcaaucgaucaaaucaaugggaagcugaaucgauugaucgggaaaaccaacgagaaauuccaccagauugaaaaagaauucucagaaguagaaggaagaauucaggaccuugagaaauauguugaggacacuaaaauagaucucuggucauacaacgcggagcuucuuguugcccuggagaaccaacauacaauugaucuaacugacucagaaaugaacaaacuguuugaaaaaacaaagaagcaacugagggaaaaugcugaggauaugggaaaugguuguuucaaaauauaccacaaaugugacaaugccugcauaggaucaauaagaaauggaacuuaugaccacaauguguacagggaugaagcauuaaacaaccgguuccagaucaaaggaguugagcugaagucaggguacaaagauuggauccuauggauuuccuuugccauaucauguuuuuugcuuuguguugcuuuguugggguucaucaugugggccugccaaaagggcaacauuaggugcaacauuugcauuuga

SEQ ID NO: 45114 - RNA, 1701 nt, Artificial Sequence; identical to SEQ ID NO: 45018
  derived and/or modified CDS sequence (wt) from hemagglutinin__InfluenzaA__ALA08634

SEQ ID NO: 45115 - RNA, 1701 nt, Artificial Sequence
  derived and/or modified CDS sequence (wt) from hemagglutinin__InfluenzaA__ALA08635
augaagacuaucauugcuuugagcuacauucuaugucugguuuucgcucaaaaaauuccuggaaaugacaauagcacggcaacgcugugccuugggcaccaugcaguaccaaacggaacgauagugaaaacaaucacaaaugaccgaauugaaguuacuaaugcuacugagcugguucagaauuccucaauaggugaaauaugcgacaguccucaucagauccuugauggagaaaacugcacacuaauagaugcucuauugggagacccucagugugauggcuuucaaaauaagaaaugggaccuuuuuguugaacgaagcaaagccuacagcaacuguuacccuuaugaugugccggauuaugccucccuuaggucacuaguugccucauccggcacacuggaguuuaacaaugaaagcuucaauuggacuggagucacucaaaacggaacaaguucugcuugcauaaggagaucuaguaguaguuucuuuaguagauuaaauugguugacccacuuaaacuacacauacccagcauugaacgugacuaugccaaacaaugaacaauuugacaaauuguacauuugggggguucaccacccggguacggacaaggaccaaaucuuccuguaugcucaaucaucaggaagaaucacaguaucuaccaaaagaagccaacaagcuguaaucccaaauaucggaucuagacccagaauaagggauaucccuagcagaauaagcaucuauuggacaauaguaaaaccgggagacauacuuuugauuaacagcacagggaaucuaauugcuccuagggguuacuucaaaauacgaagugggaaaagcucaauaaugagaucagaugcacccauuggcaaaugcaagucugaaugcaucacuccaaauggaagcauucccaaugacaaaccauuccaaaauguaaacaggaucacauacggggccugucccagauauguuaagcauagcacucugaaauuggcaacaggaaugcgaaauguaccagagaaacaaacuagaggcauauuuggcgcaauagcggguuucauagaaaaugguugggagggaaugguggaugguugguacgguuucaggcaucaaaauucugagggaagaggacaagcagcagaucucaaaagcacucaagcagcaaucgaucaaaucaaugggaagcugaaucgauugaucgggaaaaccaacgagaaauuccaucagauugaaaaagaauucucagaaguagaaggaagaauucaggaccuugagaaauauguugaggacacuaaaauagaucucuggucauacaacgcggagcuucuuguugcccuggagaaccaacauacaauugaucuaacugacucagaaaugaacaaacuguuugaaaaaacaaagaagcaacugagggaaaaugcugaggauaugggaaaugguuguuucaaaauauaccacaaaugugacaaugccugcauaggaucaauaagaaauggaacuuaugaccacaauguguacagggaugaagcauuaaacaaccgguuccagaucaagggaguugagcugaagucaggguacaaagauuggauccuauggauuuccuuugccauaucauguuuuuugcuuuguguugcuuuguugggguucaucaugugggccugccaaaagggcaacauuaggugcaacauuugcauuuga

SEQ ID NO: 45116 - RNA, 1701 nt, Artificial Sequence
  derived and/or modified CDS sequence (wt) from hemagglutinin__InfluenzaA__ALA08636
augaagacuaucauugcuuugagcuacauucuaugucugguuuucgcucaaaaaauuccuggaaaugacaauagcacggcaacgcugugccuugggcaccaugcaguaccaaacggaacgauagugaaaacaaucacaaaugaccgaauugaaguuacuaaugcuacugagcugguucagaauuccucaauaggugaaauaugcgacaguccucaucagauccuugauggagaaaacugcacacuaauagaugcucuauugggagauccucagugugauggcuuucaaaauaagaaaugggaccuuuuuguugaacgaagcaaagccuacagcaacuguuacccuuaugaugugccggauuaugccucccuuaggucacuaguugccucauccggcacacuggaguuuaacaaugaaagcuucaauuggacuggagucacucaaaacggaacaaguucugcuugcauaaggagaucuaguaguaguuucuuuaguagauuaaauugguugacccacuuaaacuacacauacccagcauugaacgugacuaugccaaacaaugaacaauuugacaaauuguacauuugggggauucaccacccggguacggacaaggaccaaaucuuccuguaugcucaaucaucaggaagaaucacaguaucuaccaaaagaagccaacaagcuguaaucccaaauaucggaucuagacccagaauaagggauaucccuagcagaauaagcaucuauuggacaauaguaaaaccgggagacauacuuuugauuaacagcacagggaaucuaauugcuccuagggguuacuucaaaauacgaagugggaaaagcucaauaaugagaucagaugcacccauuggcaaaugcaagucugaaugcaucacuccaaauggaagcauucccaaugacaaaccauuccaaaauguaaacaggaucacauacggggccugucccagauauguuaagcauagcacucugaaauuggcaacaggaaugcgaaauguaccagagaaacaaacuagaggcauauuuggcgcaauagcggguuucauagaaaaugguugggagggaaugguggaugguugguacgguuucaggcaucaaaauucugagggaagaggacaagcagcagaucucaaaagcacucaagcagcaaucgaucaaaucaaugggaagcugaaucgauugaucgggaaaaccaacgagaaauuccaucagauugaaaaagaauucucagaaguagaaggaagaauucaggaccuugagaaauauguugaggacaccaaaauagaucucuggucauacaacgcggagcuucuuguugcccuggagaaccaacauacaauugaucuaacugacucagaaaugaacaaacuguuugaaaaaacaaagaagcaacugagggaaaaugcugaggauaugggaaaugguuguuucaaaauauaccacaaaugugacaaugccugcauaggaucaauaagaaauggaacuuaugaccacaauguguacagggaugaagcauuaaacaaccgguuccagaucaagggaguugagcugaagucaggguacaaagauuggauccuauggauuuccuuugccauaucauguuuuuugcuuuguguugcuuuguugggguucaucaugugggccugccaaaagggcaacauuaggugcaacauuugcauuuga

SEQ ID NO: 45117 - RNA, 1701 nt, Artificial Sequence; identical to SEQ ID NO: 45018
  derived and/or modified CDS sequence (wt) from hemagglutinin__InfluenzaA__ALA08637

SEQ ID NO: 45118 - RNA, 1701 nt, Artificial Sequence
  derived and/or modified CDS sequence (wt) from hemagglutinin__InfluenzaA__ALA08638
augaagacuaucauugcuuugagcuacauucuaugucugguuuucgcucaaaaaauuccuggaaaugacaauagcacggcaacgcugugccuugggcaccaugcaguaccaaacggaacgauagugaaaacaaucacaaaugaccgaauugaaguuacuaaugcuacugagcugguucagaauuccucaauaggugaaauaugcgacaguccucaucagauccuugauggagaaaacugcacacuaauagaugcucuauugggagacccucagugugauggcuuucaaaauaagaaaugggaccuuuuuguugaacgaagcaaagccuacagcaacuguuacccuuaugaugugccggauuaugccucccuuaggucacuaguugccucauccggcacacuggaguuuaacaaugaaagcuucaauuggacuggagucacucaaaacggaacaaguucugcuugcauaaggggaucuaauaguaguuucuuuaguagauuaaauugguugacccacucaaacuucaaauacccagcauugaacgugacuaugccaaacaaugaacaauuugacaaauuguacauuugggggguucaccacccggguacggacaaggaccaaaucuuccuguaugcucaaucaucaggaagaaucacaguaucuaccaaaagaagccaacaagcuguaaucccaaauaucggaucuagacccagaauaagggauaucccuagcagaauaagcaucuauuggacaauaguaaaaccgggggacauacuuuugauuaacagcacagggaaucuaauugcuccuagggguuacuucaaaauacgaagugggaaaagcucaauaaugagaucagaugcacccauuggcaaaugcaagucugaaugcaucacuccaaauggaagcauucccaaugacaaaccauuccaaaauguaaacaggaucacauacggggccugucccagauauguuaagcauagcacucugaaauuggcaacaggaaugcgaaauguaccagagaaacaaacuagaggcauauuuggcgcaauagcggguuucauagaaaaugguugggagggaaugguggaugguugguacgguuucaggcaucaaaauucugagggaagaggacaagcagcagaucucaaaagcacucaagcagcaaucgaucaaaucaaugggaagcugaaucgauugaucgggaaaaccaacgagaaauuccaucagauugaaaaagaauucucagaaguagaaggaagaauucaggaccuugagaaauauguugaggacacuaaaauagaucucuggucauacaacgcggagcuucuuguugcccuggagaaccaacauacaauugaucuaacugacucagaaaugaacaaacuguuugaaaaaacaaagaagcaacugagggaaaaugcugaggauaugggaaaugguuguuucaaaauauaccacaaaugugacaaugccugcauaggaucaauaagaaauggaacuuaugaccacaauguguacagggaugaagcauuaaacaaccgguuccagaucaaaggaguugagcugaagucaggguacaaagauuggauccuauggauuuccuuugccauaucauguuuuuugcuuuguguugcuuuguugggguucaucaugugggccugccaaaagggcaacauuaggugcaacauuugcauuuga

SEQ ID NO: 45119 - RNA, 1701 nt, Artificial Sequence; identical to SEQ ID NO: 45018
  derived and/or modified CDS sequence (wt) from hemagglutinin__InfluenzaA__ALA08639

SEQ ID NO: 45120 - RNA, 1701 nt, Artificial Sequence; identical to SEQ ID NO: 45035
  derived and/or modified CDS sequence (wt) from hemagglutinin__InfluenzaA__ALA08640

SEQ ID NO: 45121 - RNA, 1701 nt, Artificial Sequence; identical to SEQ ID NO: 45018
  derived and/or modified CDS sequence (wt) from hemagglutinin__InfluenzaA__ALA08641

SEQ ID NO: 45122 - RNA, 1701 nt, Artificial Sequence; identical to SEQ ID NO: 45018
  derived and/or modified CDS sequence (wt) from hemagglutinin__InfluenzaA__ALA08642

SEQ ID NO: 45123 - RNA, 1701 nt, Artificial Sequence; identical to SEQ ID NO: 45018
  derived and/or modified CDS sequence (wt) from hemagglutinin__InfluenzaA__ALA08643

SEQ ID NO: 45124 - RNA, 1701 nt, Artificial Sequence; identical to SEQ ID NO: 45043
  derived and/or modified CDS sequence (wt) from hemagglutinin__InfluenzaA__ALA08644

SEQ ID NO: 45125 - RNA, 1701 nt, Artificial Sequence
  derived and/or modified CDS sequence (wt) from hemagglutinin__InfluenzaA__ALA08645
augaagacuaucauugcuuugagcuacauucuaugucugguuuucgcucaaaagcuuccugaaaaugacaauagcacggcaacgcugugccuugggcaccaugcaguaccaaacggaacgauagugaaaacaaucacgagugaccgaauugaaguuacuaaugcuacugagcugguucagaauuccucaauaggugaaauaugcgacaguccucaucagauccuugauggaaaaaacugcacacuaauagaugcucuauugggagacccucagugugauggcuuucaaaauaagaaaugggaccuuuuuguugaacgaagcaaagccuacagcaacuguuacccuuaugaugugccggauuaugccucccuuaggucacuaguugccucauccgguacacuggaguuuaacgaugaaagcuucaauugggcuggagucacucaaaacggaacaaguucugcuugcauaaggggaucuaauaguaguuucuuuaguagauugaauugguugacccacucaaacuucaaauacccagcauugaacgugacuaugccaaacaaugaacaauuugacaaauuguacauuugggggguucaccacccggguacggacaaggaccaaaucuuccuguaugcucaaucaucaggaagaaucacaguauccaccaaaagaagccaacaagcuguaaucccgaauaucggaucuagacccagaauaaggaauaucccuagcagaauaagcaucuauuggacaauaguaaaaccgggagacauacuuuugauuaacagcacagggaaucuaauugcuccuagggguuacuucaaaauacgaagugggaaaagcucaauaaugagaucagaugcacccauuggcaaaugcaagucugaaugcaucacuccaaauggaagcauucccaaugacaaaccauuccaaaauguaaacaggaucacauacggggccugucccagauauguuaagcaaagcacucugaaauuggcaacaggaaugcgaaauguaccagagaaacaaacuagaggcauauuuggcgcaauagcggguuucauagaaaaugguugggagggaaugaaggaugguugguacgguuucaggcaucaaaauucugagggaagaggacaagcagcagaucucaaaagcacucaagcagcaaucgaucaaaucaaugggaagcugaaucgauugaucgggaaaaccaacgagaaauuccaucagauugaaaaagaauucucagaaguagaagggagaauucaggaccuugagaaauauguugaggacacaaaaauagauaucuggucauacaacgcggagcuucuuguugcccuggagaaccaacauacaauugaucuaacugacucagaaaugaacaaacuguuugaaaaaacaaagaagcaacugagggaaaaugcugaggauaugggcaaugguuguuucaaaauauaccacaaaugugacaaugccugcauaggaucaaucagaaauggaacuuaugaccacgauguauacagggaugaagcuuuaaacaaccgguuccagaucaagggaguugagcugaagucaggguacaaagauuggauccuauggauuuccuuugccauaucauguuuuuugcucuguguugcuuuguugggguucaucaugugggccugccaaaagggcaacaucaggugcaacauuugcauuuga

SEQ ID NO: 45126 - RNA, 1701 nt, Artificial Sequence; identical to SEQ ID NO: 45006
  derived and/or modified CDS sequence (wt) from hemagglutinin__InfluenzaA__ALA08646

SEQ ID NO: 45127 - RNA, 1701 nt, Artificial Sequence; identical to SEQ ID NO: 45108
  derived and/or modified CDS sequence (wt) from hemagglutinin__InfluenzaA__ALA08647

SEQ ID NO: 45128 - RNA, 1701 nt, Artificial Sequence; identical to SEQ ID NO: 45018
  derived and/or modified CDS sequence (wt) from hemagglutinin__InfluenzaA__ALA08648

SEQ ID NO: 45129 - RNA, 1701 nt, Artificial Sequence
  derived and/or modified CDS sequence (wt) from hemagglutinin__InfluenzaA__ALA08650
augaagacuaucauugcuuugagcuacauucuaugucugguuuucgcucaaaaaauuccuggaaaugacaauagcacggcaacgcugugccuugggcaccaugcaguaccaaacggaacgauagugaaaacaaucacaaaugaacgaauugaaguuacuaaugcuacugagcugguucagaauuccucaauaggugaaauaugcgacaguccucaucagauccuugauggagaaaacugcacacuaauagaugcucuauugggagacccucagugugauggcuuucaaaauaagaaaugggaccucuuugucgaacgaagcaaagccuacagcaacuguuacccuuaugaugugccggauuaugccucccuuaggucacuaguugccucauccggcacacuggaguuuaacaaugaaagcuucaauuggacuggagucacucaaaacggaacaaguucugcuugcauaaggagaucuaguaguaguuucuuuaguagauuaaauugguugacccacuuaaacuacacauacccagcauugaacgugacuaugccaaacaaugaacaauuugacaaauuguacauuugggggguucaccacccggguacggacaaggaccaaaucuuccuguaugcucaaucaucaggaagaaucacaguaucuaccaaaagaagccaacaagcuguaauuccaaauaucggaucuagacccagaauaagggauaucccuagcagaauaagcaucuauuggacaauaguaaaaccgggagacauacuuuugauuaacagcacagggaaucuaauugcuccuagggguuacuucaaaauacgaagugggaaaagcucaauaaugagaucagaugcacccauuggcaaaugcaagucugaaugcaucacuccaaauggaagcauucccaaugacaaaccauuccaaaauguaaacaggaucacauacggggccugucccagauauguuaagcauagcacucugaaauuggcaacaggaaugcgaaauguaccagagaaacaaacuagaggcauauuuggcgcaauagcggguuucauagaaaaugguugggagggaaugguggaugguugguacgguuucaggcaucaaaauucugagggaagaggacaagcagcagaucucaaaagcacucaagcagcaaucgaucaaaucaaugggaagcugaaucgauugaucgggaaaaccaacgagaaauuccaucagauugaaaaagaauucucagaaguagaaggaagaauucaggaccuugagaaauauguugaggacacuaaaauagaucucuggucauacaacgcggagcuucuuguugcccuggagaaccaacauacaauugaucuaacugacucagaaaugaacaaacuguuugaaaaaacaaagaagcaacugagggaaaaugcugaggauaugggaaaugguuguuucaaaauauaccacaaaugugacaaugccugcauaggaucaauaagaaauggaacuuaugaccacaauguguacagggaugaagcauuaaacaaccgguuccagaucaagggaguugagcugaagucaggguacaaagauuggauccuauggauuuccuuugccauaucauguuuuuugcuuuguguugcuuuguugggguucaucaugugggccugccaaaagggcaacauuaggugcaacauuugcauuuga

SEQ ID NO: 45130 - RNA, 1701 nt, Artificial Sequence; identical to SEQ ID NO: 45018
  derived and/or modified CDS sequence (wt) from hemagglutinin__InfluenzaA__ALA08652

SEQ ID NO: 45131 - RNA, 1701 nt, Artificial Sequence; identical to SEQ ID NO: 45043
  derived and/or modified CDS sequence (wt) from hemagglutinin__InfluenzaA__ALA08653

SEQ ID NO: 45132 - RNA, 1701 nt, Artificial Sequence
  derived and/or modified CDS sequence (wt) from hemagglutinin__InfluenzaA__ALA08654
augaagacuaucauugcuuugagcuacauucuaugucugguuuucgcucaaaaaauuccuggaaaugacaauagcacggcaacgcugugccuugggcaccaugcaguaccaaacggaacgauagugaaaacaaucacaaaugaccgaauugaaguuacuaaugcuacugagcugguucagaauuccucaauaggugaaauaugcgacaguccucaucagauccuugauggagaaaacugcacacuaauagaugcucuauugggagacccucagugugauggcuuucaaaauaagaaaugggaccuuuuuguugaacgaagcaaagccuacagcaacuguuacccuuaugaugugccggauuaugccucccuuaggucacuaguugccucauccggcacacuggaguuuaacaaugaaagcuucaauuggacuggagucacucaaaacggaacaaguucugcuugcauaaggagaucuaguaguaguuucuuuaguagauuaaauugguugacccacuuaaacuacacauacccagcauugaacgugacuaugccaaacaaugagcaauuugacaaauuguacauuugggggguucaccacccggguacggacaaggaccaaaucuuccuguaugcucaaucaucaggaagaauaacaguaucuaccaaaagaagccaacaagcuguaaucccaaauaucggaucuagacccagaauaagggauaucccuagcagaauaagcaucuauuggacaauaguaaaaccgggagacauacuuuugauuaacagcacagggaaucuaauugcuccuagggguuacuucaaaauacgaagugggaaaagcucaauaaugagaucagaugcacccauuggcaaaugcaagucugagugcaucacuccaaauggaagcauucccaaugacaaaccauuccaaaauguaaacaggaucacauacggggccugucccagauauguuaagcauagcacucugaaauuggcaacaggaaugcgaaauguaccagagaaacaaacuagaggcauauuuggcgcaauagcggguuucauagaaaaugguugggagggaaugguggaugguugguacgguuucaggcaucaaaauucugagggaagaggacaagcagcagaucucaaaagcacucaagcagcaaucgaucaaaucaaugggaagcugaaucgauugaucgggaaaaccaacgagaaauuccaucagauugaaaaagaauucucagaaguagaaggaagaauucaggaccuugagaaauauguugaggacacuaaaauagaucucuggucauacaacgcggagcuucuuguugcccuggagaaccaacauacaauugaucuaacugacucagaaaugaacaaacuguuugaaaaaacaaagaagcaacugagggaaaaugcugaggauaugggaaaugguuguuucaaaauauaccacaaaugugacaaugcuugcauaggaucaauaagaaauggaacuuaugaccacaauguguacagggaugaagcauuaaacaaccgguuccagaucaagggaguugagcugaagucaggguacaaagauuggauccuauggauuuccuuugccaaaucauguuuuuugcuuuguguugcuuuguugggguucaucaugugggccugccaaaagggcaacauuaggugcaacauuugcauuuga

SEQ ID NO: 45133 - RNA, 1701 nt, Artificial Sequence; identical to SEQ ID NO: 45018
  derived and/or modified CDS sequence (wt) from hemagglutinin__InfluenzaA__ALA08655

SEQ ID NO: 45134 - RNA, 1701 nt, Artificial Sequence
  derived and/or modified CDS sequence (wt) from hemagglutinin__InfluenzaA__ALA08656
augaagacuaucauugcuuugagcuacauucuaugucugguuuucgcucaaaagcuuccugaaaaugacaauagcacggcaacgcugugccuugggcaccaugcaguaccaaacggaacgauagugaaaacaaucacgagugaccgaauugaaguuacuaaugcuacugagcugguucagaauuccucaauaggugaaauaugcgacaguccucaucagauccuugauggaaaaaacugcacacuaauagaugcucuauugggagacccucagugugauggcuuucaaaauaagaaaugggaccuuuuuguugaacgaagcaaagccuauagcaacuguuacccuuaugaugugccggauuaugccucccuuaggucacuaguugccucauccgguacacuggaguuuaacgaugaaagcuucaauugggcuggagucacucaaaacggaacaaguucugcuugcauaaggggaucuaauaguaguuucuuuaguagauuaaauugguugacccacucaaacuucaaauacccagcauugaacgugacuaugccaaacaaugaacaauuugacaaauuguacauuugggggguucaccacccggguacggacaaggaccaaaucuuccuguaugcucaaucaucaggaagaaucacaguauccaccaaaagaagccaacaagcuguaaucccgaauaucggaucuagacccagaauaaggaauaucccuagcagaauaagcaucuauuggacaauaguaaaaccgggagacauacuuuugauuaacagcacagggaaucuaauugcuccuagggguuacuucaaaauacgaagugggaaaagcucaauaaugagaucagaugcacccauuggcaaaugcaagucugaaugcaucacuccaaauggaagcauucccaaugacaaaccauuccaaaauguaaacaggaucacauacggggccugucccagauauguuaagcaaagcacucugaaauuggcaacaggaaugcgaaauguaccagagaaacaaacuagaggcauauuuggcgcaauagcggguuucauagaaaaugguugggagggaaugaaggaugguugguacgguuucaggcaucaaaauucugagggaagaggacaagcagcagaucucaaaagcacucaagcagcaaucgaucaaaucaaugggaagcugaaucgauugaucgggaaaaccaacgagaaauuccaucagauugaaaaagaauucucagaaguagaagggagaauucaggaccuugagaaauauguugaggacacaaaaauagaucucuggucauacaacgcggagcuucuuguugcccuggagaaccaacauacaauugaucugacugacucagaaaugaacaaacuguuugaaaaaacaaagaagcaacugagggaaaaugcugaggauaugggcaaugguuguuucaaaauauaccacaaaugugacaaugccugcauaggaucaaucagaaauggaacuuaugaccacgauguauacagggaugaagcuuuaaacaaccgguuccagaucaagggaguugagcugaagucaggguacaaagauuggauccuauggauuuccuuugccauaucauguuuuuugcuuuguguugcuuuguugggguucaucaugugggccugccaaaagggcaacauuaggugcaacauuugcauuuga

SEQ ID NO: 45135 - RNA, 1701 nt, Artificial Sequence
  derived and/or modified CDS sequence (wt) from hemagglutinin__InfluenzaA__ALA08657
augaagacuaucauugcuuugagcuacauucuaugucugguuuucgcucaaaagcuuccugaaaaugacaauagcacggcaacgcugugccuugggcaccaugcaguaccaaacggaacgauagugaaaacaaucacgagugaccgaauugaaguuacuaaugcuacugagcugguucaaaauuccucaauaggugaaauaugcgacaguccucaucagauccuugauggaaaaaacugcacacuaauagaugcucuauugggagacccucagugugauggcuuucaaaauaagaaaugggaccuuuuuauugaacgaagcaaagccuacagcaacuguuacccuuaugaugugccggauuaugccucccuuaggucacuaguugccucauccgguacacuggaguuuaacgaugaaagcuucaauugggcuggagucacucaaaacggaacaaguucugcuugcauaaggggaucuaauaguaguuucuuuaguagauuaaauugguugacccacucaaacuucaaauacccagcauugaacgugacuaugccaaacaaugaacaauuugacaaauuguacauuugggggguucaccacccggguacggacaaggaccaaaucuuccuguaugcucaaucaucaggaagaaucacaguauccaccaaaagaagccaacaagcuguaaucccgaauaucggaucuagacccagaauaaggaauaucccuagcagaauaagcaucuauuggacaauaguaaaaccgggagacauacuuuugauuaacagcacagggaaucuaauugcuccuagggguuacuucaaaauacgaagugggaaaagcucaauaaugagaucagaugcacccauuggcaaaugcaagucugaaugcaucacuccaaauggaagcauucccaaugacaaaccauuccaaaauguaaacaggaucacauacggggccugucccagauauguuaagcaaagcacucugaaauuggcaacaggaaugcgaaauguaccagagaaacaaacuagaggcauauuuggcgcaauagcggguuucauagaaaaugguugggagggaaugaaggaugguugguacgguuucaggcaucaaaauucugagggaagaggacaagcagcagaucucaaaagcacucaagcagcaaucgaucaaaucaaugggaagcugaaucgauugaucgggaaaaccaacgagaaauuccaucagauugaaaaagaauucucagaaguagaagggagaauucaggaccuugagaaauauguugaggacacaaaaauagaucucuggucauacaacgcggagcuucuuguugcccuggagaaccaacauacaauugaucuaacugacucagaaaugaacaaacuguuugaaaaaacaaagaagcaacugagggaaaaugcugaggauaugggcaaugguuguuucaaaauauaccacaaaugugacaaugccugcauaggaucaaucagaaauggaacuuaugaccacgauguauacagggaugaagcuuuaaacaaccgguuccagaucaagggaguugagcugaagucaggguacaaagauuggauccuauggauuuccuuugccauaucauguuuuuugcuuuguguugcuuuguugggguucaucaugugggccugccaaaagggcaacauuaggugcaacauuugcauuuga

SEQ ID NO: 45136 - RNA, 1701 nt, Artificial Sequence; identical to SEQ ID NO: 45018
  derived and/or modified CDS sequence (wt) from hemagglutinin__InfluenzaA__ALA08658

SEQ ID NO: 45137 - RNA, 1701 nt, Artificial Sequence
  derived and/or modified CDS sequence (wt) from hemagglutinin__InfluenzaA__ALA08659
augaagacuaucauugccuugagcuacauucuaugucugguuuucgcucaaaaaauuccuggaaaugacaauagcacggcaacgcugugccuugggcaccaugcaguaccaaacggaacgauagugaaaacaaucacaaaugaccgaauugaaguuacuaaugcuacugagcugguucagaauuccucaauaggugaaauaugcgacaguccucaucagauccuugauggagaaaacugcacacuaauagaugcucuauugggagauccucagugugauggcuuucaaaauaagaaaugggaccuuuuuguugaacgaagcaaagccuacagcaacuguuacccuuaugaugugccggauuaugccucccuuaggucacuaguugccucauccggcacacuggaguuuaacaaugaaagcuucaauuggacuggagucacucaaaacggaacaaguucugcuugcauaaggagaucuaguaguaguuucuuuaguagauuaaauugguugacccacuuaaacuacacauacccagcauugaacgugacuaugccaaacaaugaacaauuugacaaauuguacauuugggggguucaccacccggguacggacaaggaccaaaucuuccuguaugcucaaucaucaggaagaaucacaguaucuaccaaaggaagccaacaagcuguaaucccaaauaucggaucuagacccagaauaagggauaucccuagcagaauaagcaucuauuggacaauaguaaaaccgggagacauacuuuugauuaacagcacagggaaucuaauugcuccuagggguuacuucaaaauacgaagugggaaaagcucaauaaugagaucagaugcacccauuggcaaaugcaagucugaaugcaucacuccaaauggaagcauucccaaugacaaaccauuccaaaauguaaacaggaucacauacggggccugucccagauauguuaagcauagcacucugaaauuggcaacaggaaugcgaaauguaccagagaaacaaacuagaggcauauuuggcgcaauagcggguuucauagaaaaugguugggagggaaugguggaugguugguacgguuucaggcaucaaaauucugagggaagaggacaagcagcagaucucaaaagcacucaagcagcaaucgaucaaaucaaugggaagcugaaucgauugaucgggaaaaccaacgagaaauuccaucagauugaaaaagaauucucagaaguagaaggaagaauucaggaccuugagaaauauguugaggacacuaaaauagaucucuggucauacaacgcggagcuucuuguugcccuggagaaccaacauacaauugaucuaacugacucagaaaugaacaaacuguuugaaaaaacaaagaagcaacugagggaaaaugcugaggauaugggaaaugguuguuucaaaauauaccacaaaugugacaaugccugcauaggaucaauaagaaauggaacuuaugaccacaauguguacagggaugaagcauuaaacaaccgguuccagaucaagggaguugagcugaagucaggguacaaagauuggauccuauggauuuccuuugccauaucauguuuuuugcuuuguguugcuuuguugggguucaucaugugggccugccaaaagggcaacauuaggugcaacauuugcauuuga

SEQ ID NO: 45138 - RNA, 1701 nt, Artificial Sequence
  derived and/or modified CDS sequence (wt) from hemagglutinin__InfluenzaA__ALA08660
augaagacuaucauugcuuugagcuacauucuaugucugguuuucgcucaaaaaauuccuggaaaugacaauagcacggcaacgcugugccuugggcaccaugcaguaccaaacggaacgauagugaaaacaaucacaaaugaccgaauugaaguuacuaaugcuacugagcugguucagaauuccucaauaggugaaauaugcgacaguccucaucagauccuugauggagaaaacugcacacuaauagaugcucuauugggagacccucagugugauggcuuucaaaauaagaaaugggaccuuuuuguugaacgaagcaaagccuacagcaacuguuacccuuaugaugugccggauuaugccucccuuaggucacuaguugccucauccggcacacuggaguuuaacaaugaaagcuucaauuggacuggagucacucaaaacggaacaaguucugcuugcauaaggagaucuaguaguaguuucuuuaguagauuaaauugguugacccacuuaaacuacacauacccagcauugaacgugacuaugccaaacaaugaacaauuugacaaauuguacauuugggggguucaccacccggguacggacaaggaccaaaucuuccuguaugcucaaucaucaggaagaaucacaguaucuaccaaaagaagccaacaagcuguaaucccaaauaucggaucuagacccagaauaagggauaucccuagcagaauaagcaucuauuggacaauaguaaaaccgggagacauacuuuugauuaacagcacagggaaucuaauugcuccuagggguuacuucaaaauacgaagugggaaaagcucaauaaugagaucagaugcacccauuggcaaaugcaagucugaaugcaucacuccaaauggaagcauucccaaugacaaaccauuccaaaauguaaacaggaucacauacggggccugucccagauauguuaagcauggcacucugaaauuggcaacaggaaugcgaaauguaccagagaaacaaacuagaggcauauuuggcgcaauagcggguuucauagaaaaugguugggagggaaugguggaugguugguacgguuucaggcaucaaaauucugagggaagaggacaagcagcagaucucaaaagcacucaagcagcaaucgaucaaaucaaugggaagcugaaucgauugaucgggaaaaccaacgagaaauuccaucagauugaaaaagaauucucagaaguagaaggaagaauucaggaccuugagaaauauguugaggacacuaaaauagaucucuggucauacaacgcggagcuucuuguugcccuggagaaccaacauacaauugaucuaacugacucagaaaugaacaaacuguuugaaaaaacaaagaagcaacugagggaaaaugcugaggacaugggaaaugguuguuucaaaauauaccacaaaugugacaaugccugcauaggaucaauaagaaauggaacuuaugaccacaauguguacagggaugaagcauuaaacaaccgguuccagaucaagggaguugagcugaagucaggguacaaagauuggauccuauggauuuccuuugccauaucauguuuuuugcuuuguguugcuuuguugggguucaucaugugggccugccaaaagggcaacaucaggugcaacauuugcauuuga

SEQ ID NO: 45139 - RNA, 1701 nt, Artificial Sequence
  derived and/or modified CDS sequence (wt) from hemagglutinin__InfluenzaA__ALA08662
augaagacuaucauugcuuugagcuacauucuaugucugguuuucgcucaaaaaauuccuggaaaugacaauagcacggcaacgcugugccuugggcaccaugcaguaccaaacggaacgauagugaaaacaaucacaaaugaccgaauugaaguuacuaaugcuacugaguugguucagaauuccucaauaggugaaauaugcgacaguccucaucagauccuugauggagaaaacugcacacuaauagaugcucuauugggagacccucagugugauggcuuucaaaauaagaaaugggaccuuuuuguugaacgaagcaaagccuacagcaacuguuacccuuaugaugugccggauuaugccucccuuaggucacuaguugccucauccggcacacuggaguuuaacaaugaaagcuucaauuggacuggagucacucaaaacggaacaaguucugcuugcauaaggagaucuaguaguaguuucuuuaguagauuaaauugguugacccacuuaaacuacacauacccagcauugaacgugacuaugccaaacaaugaacaauuugacaaauuguacauuugggggguucaccacccggguacggacaaggaccaaaucuuccuguaugcucaaucaucaggaagaaucacaguaucuaccaaaagaagccaacaagcuguaaucccaaauaucggaucuagacccagaauaagggauaucccuagcagaauaagcaucuauuggacaauaguaaaaccgggagacauacuuuugauuaacagcacagggaaucuaauugcuccuagggguuacuucaaaauacuaagugggaaaagcucaauaaugagaucagaugcacccauuggcaaaugcaagucugaaugcaucacuccaaauggaagcauucccaaugacaaaccauuccaaaauguaaacaggaucacauacggggccugucccagauauguuaagcauagcacucugaaauuggcaacaggaaugcgaaauguaccagagaaacaaacuagaggcauauuuggcgcaauagcggguuucauagaaaaugguugggaaggaaugguggaugguugguacgguuucaggcaucaaaauucugagggaagaggacaagcagcagaucucaaaagcacucaagcagcaaucgaucaaaucaaugggaagcugaaucgguugaucgggaaaaccaacgagaaauuccaucagauugaaaaagaauucucagaaguagaaggaagaauucaggaccuugagaaauauguugaggacucuaaaauagaucucuggucauauaacgcggagcuucuuguugcccuggagaaccaacauacaauugaucuaacugacucagaaaugaacaaacuguuugaaaaaacaaagaagcaacugagggaaaaugcugaggauaugggaaaugguuguuucaaaauauaccacaaaugugacaaugccugcauaggaucaauaagaaauggaacuuaugaccacaauguguacagggaugaagcauuaaacaaccgguuccagaucaaggggguugagcugaagucaggguacaaagauuggauccuauggauuuccuuugccauaucauguuuuuugcuuuguguugcuuuguugggguucaucaugugggccugccaaaagggcaacauuaggugcaacauuugcauuuga

SEQ ID NO: 45140 - RNA, 1701 nt, Artificial Sequence
  derived and/or modified CDS sequence (wt) from hemagglutinin__InfluenzaA__ALA08663
augaagacuaucauugcuuugagcuacauucuaugucugguuuucgcucaaaaaauuccuggaaaugacaauagcacggcaacgcugugccuugggcaccaugcaguaccaaacggaacgauagugaaaacaaucacaaaugaccgaauugaaguuacuaaugcuacugagcugguucagaauuccucaauaggugaaauaugcgacaguccucaucagauccuugauggagaaaacugcacacuaauagaugcucuauugggagacccucagugugauggcuuucaaaauaagaaaugggaccuuuuuguugaacgaagcaaagccuacagcaacuguuacccuuaugaugugccggauuaugccucccuuaggucacuaguugccucauccggcacacuggaguuuaacaaugaaagcuucaauuggacuggagucacucaaaacggaacaaguucugcuugcauaaggaaaucuaguaguaguuucuuuaguagauuaaauugguugacccacuuaaacuacacauacccagcauugaacgugacuaugccaaacaaugaacaauuugacaaauuguacauuugggggguucaccacccggguacggacaaggaccaaaucuuccuguaugcucgaucaucaggaagaaucacaguaucuaccaaaagaagccaacaagcuguaaucccaaauaucggaucuagacccagaauaagggauaucccuagcagaauaagcaucuauuggacaauaguaaaaccgggagacauacuuuugauuaacagcacagggaaucuaauugcuccuagggguuacuucaaaauacgaagugggaaaagcucaauaaugagaucagaugcacccauuggcaaaugcaagucugaaugcaucacuccaaauggaagcauucccaaugacaaaccauuccaaaauguaaacaggaucacauacggggccugucccagauauguuaagcauagcacucugaaauuggcaacaggaaugcgaaauguaccagagaaacaaacuagaggcauauuuggcgcaauagcggguuucauagaaaaugguugggagggaaugguggaugguugguacgguuucaggcaucaaaauucugaggggagaggacaagcagcagaucucaaaagcacucaagcagcaaucgaucaaaucaaugggaagcugaaucgauugaucgggaaaaccaacgagaaauuccaucagauugaaaaagaauucucagaaguagaaggaagaauucaggaccuugagaaauauguugaggacacuaaaauagaucucuggucauacaacgcggagcuucuuguugcccuggagaaucaacauacaauugaucuaacugacucagaaaugaacaaacuguuugaaaaaacaaagaagcaacugagggaaaaugcugaggauaugggaaaugguuguuucaaaauauaccacaaaugugacaaugccugcauaggaucaauaagaaauggaacuuaugaccacaauguguacagggaugaagcauuaaacaaccgguuccagaucaagggaguugagcugaagucaggguacaaagauuggauccuauggauuuccuuugccauaucauguuuuuugcuuuguguugcuuuguugggguucaucaugugggccugccaaaagggcaacauuaggugcaacauuugcauuuga

SEQ ID NO: 45141 - RNA, 1701 nt, Artificial Sequence; identical to SEQ ID NO: 45139
  derived and/or modified CDS sequence (wt) from hemagglutinin__InfluenzaA__ALA08665

SEQ ID NO: 45142 - RNA, 1701 nt, Artificial Sequence
  derived and/or modified CDS sequence (wt) from hemagglutinin__InfluenzaA__ALA08666
augaagacuaucauugcuuugagcuacauucuaugucugguuuucgcucaaaaacuuccuggaaaugacaauagcacggcaacgcugugccuugggcaccaugcaguaccaaauggaacgauagugaaaacaaucacgaaugaccgaauugaaguuacuaaugcuacugagcugguucagaauuccucaauaggugaaauaugcgacaguccucaucagauccuugauggagaaaacugcacacuaauagaugcucuauugggagacccucaaugugauggcuuucaaaauaagaaaugggaccuuuuuguugaacggagcaaagccuacagcaacuguuacccuuaugaugugccggauuaugccucccuuaggucacuaguugccucauccggcacacuggaguuuaacaaugaaagcuucaauugggcuggagucacucaaaacggaacaaguucugcuugcauaaggggaucuaauaguaguuucuuuaguagauuaaauugguugacccacuuaaacuucaaauacccagcauugaacgugacuaugccaaacaaugaacaauuugacaaauuguacauuuggggaguucaccacccggguacggacaaggaccaaaucuuccuguaugcucaaucgucaggaagaaucacaguaucuaccaaaagaagccaacaagcuguaaucccgaauaucggaucuagacccagaauaaggaauaucccuagcagaauaagcaucuauuggacaauaguaaaaccgggagacauacuuuugauuaacagcacagggaaccuaauugcuccuagggguuacuucaaaauacgaagugggaaaagcucaauaaugagaucagaugcacccauuggcaaaugcaagucugaaugcaucacuccaaauggaagcauucccaaugacaaaccauuccaaaauguaaacaggaucacauacggggccugucccagauauguuaagcaaagcacucugaaauuggcaacaggaaugcgaaauguaccagagaaacaaacuagaggcauauuuggcgcaauagcggguuucauagaaaaugguugggagggaaugguggaugguugguacgguuucaggcaucaaaauucugagggaagaggacaagcagcagaucucaaaagcacucaagcagcaaucgaucaaaucaaugggaagcugaaucgauugaucgggaaaaccaacgagaaauuccaucagauugaaaaagaauucucagaaguagaagggagaauucaggaccuugagaaauauguugaagacacaaaaauagaucucuggucauacaacgcagagcuucuuguugcccuggagaaccaacauacaauugaucuaacugacucagaaaugaacaaacuguuugaaaaaacaaagaaacaacugagggaaaaugcugaggauaugggcaaugguuguuucaaaauauaccacaaaugugacaaugccugcauaggaucaaucagaaauggaacuuaugaccacgauguguacagggaugaagcauuaaacaaccgguuccagaucaagggaguugagcugaagucaggguacaaagauuggauccuauggauuuccuuugccaugucauguuuuuugcuuuguguugcuuuguugggguucaucaugugggccugccaaaagggcaacauuaggugcaacauuugcauuuga

SEQ ID NO: 45143 - RNA, 1701 nt, Artificial Sequence
  derived and/or modified CDS sequence (wt) from hemagglutinin__InfluenzaA__ALA08667
augaagacuaucauugcuuugagcuacauucuaugucugguuuucgcucaaaaaauuccuggaaaugacaauagcacggcaacgcugugccuugggcaccaugcaguaccaaacggaacgauagugaaaacaaucacaaaugaccgaauugaaguuacuaaugcuacugagcugguucagaauuccucaauaggugaaauaugcgacaguccucaucagauccuugauggagaaaacugcacacuaauagaugcucuauugggagacccucagugugauggcuuucaaaauaagaaaugggaccuuuuuguugaacgaagcaaagccuacagcaacuguuacccuuaugaugugccggauuaugccucccuuaggucacuaguugccucauccggcacacuggaguuuaacaaugaaagcuucaauuggacuggagucacucaaaacggaacaaguucugcuugcauaaggaaaucuaguaguaguuucuuuaguagauuaaauugguugacccacuuaaacuacaaauacccagcauugaacgugacuaugccaaacaaugaacaauuugacaaauuguacauuugggggguucaccacccggguacggacaaggaccaaaucuuccuguaugcucgaucaucaggaagaaucacaguaucuaccaaaagaagccaacaagcuguaaucccaaauaucggaucuagacccagaauaagggauaucccuagcagaauaagcaucuauuggacaauaguaaaaccgggagacauacuuuugauuaacagcacagggaaucuaauugcuccuagggguuacuucaaaauacgaagugggaaaagcucaauaaugagaucagaugcacccauuggcaaaugcaagucugaaugcaucacuccaaauggaagcauucccaaugacaaaccauuccaaaauguaaacaggaucacauacggggccugucccagauauguuaagcauagcacucugaaauuggcaacaggaaugcgaaauguaccagagaaacaaacuagaggcauauuuggcgcaauagcggguuucauagaaaaugguugggagggaaugguggaugguugguacgguuucaggcaucaaaauucugaggggagaggacaagcagcagaucucaaaagcacucaagcagcaaucgaucaaaucaaugggaagcugaaucgauugaucgggaaaaccaacgagaaauuccaucagauugaaaaagaauucucagaaguagaaggaagaauucaggaccuugagaaauauguugaggacacuaaaauagaucucuggucauacaacgcggagcuucuuguugcccuggagaaucaacauacaauugaucuaacugacucagaaaugaacaaacuguuugaaaaaacaaagaagcaacugagggaaaaugcugaggauaugggaaaugguuguuucaaaauauaccacaaaugugacaaugccugcauaggaucaauaagaaauggaacuuaugaccacaauguguacagggaugaagcauuaaacaaccgguuccagaucaagggaguugagcugaagucaggguacaaagauuggauccuauggauuuccuuugccauaucauguuuuuugcuuuguguugcuuuguugggguucaucaugugggccugccaaaagggcaacauuaggugcaacauuugcauuuga

SEQ ID NO: 45144 - RNA, 1701 nt, Artificial Sequence
  derived and/or modified CDS sequence (wt) from hemagglutinin__InfluenzaA__ALA08668
augaagacuaucauugcuuugagcuacauucuaugucugguuuucgcucaaaaaauuccuggaaaugacaauagcacggcaacgcugugccuugggcaccaugcaguaccaaacggaacgauagugaaaacaaucacaaaugaccgaauugaaguuacuaaugcuacugagcugguucagaauuccucaauaggugaaauaugcgacaguccucaucagauccuugauggagaaaacugcacacuaauagaugcucuauugggagacccucagugugauggcuuucaaaauaagaaaugggaccuuuuuguugaacgaagcaaagccuacagcaacuguuacccuuaugaugugccggauuaugccucccuuaggucacuaguugccucauccggcacacuggaguuuaacaaugaaagcuucaauuggacuggagucacucaaaacggaacaaguucugcuugcauaaggagaucuaguaguaguuucuuuaguagauuaaauugguugacccacuuaaacuacacauacccagcauugaacgugacuaugccaaacaaugaacaauuugacaaauuguacauuugggggguucaccacccggguacggacaaggaccaaaucuuccuguaugcucaaucaucaggaagaaucacaguaucuaccaaaagaagccaacaagcuguaaucccaaauaucggaucuagacccagaauaagggauaucccuagcagaauaagcaucuauuggacaauaguaaaaccgggagacauacuuuugauuaacagcacagggaaucuaauugcuccuagggguuacuucaaaauacgaagugggaaaagcucaauaaugagaucagaugcacccauuggcaaaugcaagucugaaugcaucacuccaaauggaagcauucccaaugacaaaccauuccaaaauguaaacaggaucacauacggggccugucccagauauguuaagcauagcacucugaaauuggcaacaggaaugcgaaauguaccagagaaacaaacuagaggcauauuuggcgcaauagcggguuucauagaaaaugguugggagggaaugguggaugguugguacgguuucaggcaucaaaauucugagggaagaggacaagcagcagaucucaaaagcacucaagcagcaaucgaucaaaucaauggaaagcugaaucgauugaucgggaaaaccaacgagaaauuccaucagauugaaaaagaauuuucagaaguagaaggaagaauucaggaccuugagaaauauguugaggacacuaaaauagaucucuggucauacaacgcggagcuucuuguugcccuggagaaccaacauacaauugaucuaacugacucagaaaugaacaaacuguuugaaaaaacaaagaagcaacugagggaaaaugcugaggauaugggaaaugguuguuucaaaauauaccacaaaugugacaaugccugcauaggaucaauaagaaauggaacuuaugaccacaauguguacagggaugaagcaauaaacaaccgguuccagaucaagggaguugagcugaagucaggguacaaagauuggauccuauggauuuccuuugccauaucauguuuuuugcuuuguguugcuuuguugggguucaucaugugggccugccaaaagggcaacauuaggugcaacauuugcauuuga

SEQ ID NO: 45145 - RNA, 1701 nt, Artificial Sequence
  derived and/or modified CDS sequence (wt) from hemagglutinin__InfluenzaA__ALA08669
augaagacuaucauugcuuugagcuacauucuaugucugguuuucgcucaaaaaauuccuggaaaugacaauagcacggcaacgcugugccuugggcaccaugcaguaccaaacggaacgauagugaaaacaaucacaaaugaccgaauugaaguuacuaaugcuacugagcugguucagaauuccucaauaggugaaauaugcgacaguccucaucagauccuugauggagaaaacugcacacuaauagaugcucuauugggagacccucagugugauggcuuucaaaauaagaaaugggaccuuuuuguugaacgaagcaaagccuacagcaacuguuacccuuaugaugugccggauuaugccucccuuaggucacuaguugccucauccggcacacuggaguuuaacaaugaaagcuucaauuggacuggagucacucaaaacggaacaaguucugcuugcauaaggaaaucuaguaguaguuucuuuaguagauuaaauugguugacccacuuaaacuacacauacccagcauugaacgugacuaugccaaacaaugaacaauuugacaaauuguacauuugggggguucaccacccggguacggacaaggaccaaaucuuccuguaugcucgaucaucaggaagaaucacaguaucuaccaaaagaagccaacaagcuguaaucccaaauaucggaucuagacccagaauaagggauaucccuagcagaauaagcaucuauuggacaauaguaaaaccgggagacauacuuuugauuaacagcacagggaaucuaauugcuccuagggguuacuucaaaauacgaagugggaaaagcucaauaaugagaucagaugcacccauuggcaaaugcaagucugaaugcaucacuccaaauggaagcauucccaaugacaaaccauuccaaaauguaaacaggaucacauacggggccugucccagauauguuaagcauagcacucugaaauuggcaacaggaaugcgaaauguaccagagaaacaaacuagaggcauauuuggcgcaauagcggguuucauagaaaaugguugggagggaaugguggaugguugguacgguuucaggcaucaaaauucugagggaagaggacaagcagcagaucucaaaagcacucaagcagcaaucgaucaaaucaaugggaagcugaaucgauugaucgggaaaaccaacgagaaauuccaucagauugaaaaagaauucucagaaguagaaggaagaauucaggaccuugagaaauauguugaggacacuaaaauagaucucuggucauacaacgcggagcuucuuguugcccuggagaaucaacauacaauugaucuaacugacucagaaaugaacaaacuguuugaaaaaacaaagaagcaacugagggaaaaugcugaggauaugggaaaugguuguuucaaaauauaccacaaaugugacaaugccugcauaggaucaauaagaaauggaacuuaugaccacaauguguacagggaugaagcauuaaacaaccgguuccagaucaagggaguugagcugaagucaggguacaaagauuggauccuauggauuuccuuugccauaucauguuuuuugcuuuguguugcuuuguugggguucaucaugugggccugccaaaagggcaacauuaggugcaacauuugcauuuga

SEQ ID NO: 45146 - RNA, 1701 nt, Artificial Sequence; identical to SEQ ID NO: 45004
  derived and/or modified CDS sequence (wt) from hemagglutinin__InfluenzaA__ALA08670

SEQ ID NO: 45147 - RNA, 1701 nt, Artificial Sequence; identical to SEQ ID NO: 45145
  derived and/or modified CDS sequence (wt) from hemagglutinin__InfluenzaA__ALA08671

SEQ ID NO: 45148 - RNA, 1701 nt, Artificial Sequence
  derived and/or modified CDS sequence (wt) from hemagglutinin__InfluenzaA__ALA08672
augaagacuaucauugcuuugagcuacauucuaugucugguuuucgcucaaaaaauuccuggaaaugacaauagcacggcaacgcugugccuugggcaccaugcaguaccaaacggaacgauagugaaaacaaucacaaaugaccgaauugaaguuacuaaugcuacugagcugguucagaauuccucaauaggugaaauaugcgacaguccucaucagauccuugauggagaaaacugcacacuaauagaugcucuauugggagacccucagugugauggcuuucaaaauaagaaaugggaccuuuuuguugaacgaagcaaagccuacagcaacuguuacccuuaugaugugccggauuaugccucccuuaggucacuaguugccucauccggcacacuggaguuuaacaaugaaagcuucaauuggacuggagucacucaaaacggaacaaguucugcuugcauaaggaaaucuaguaguaguuucuuuaguagauuaaauugguugacccacuuaaacuacacauacccagcauugaacgugacuaugccaaacaaugaacaauuugacaaauuguacauuugggggguucaccacccggguacggacaaggaccaaaucuuccuguaugcucgaucaucaggaagaaucacaguaucuaccaaaagaagccaacaagcuguaaucccaaauaucggaucuagacccagaauaagggauaucccuagcagaauaagcaucuauuggacaauaguaaaaccgggagacauacuuuugauuaacagcacagggaaucuaauugcuccuagggguuacuucaaaauacgaagugggaaaagcucaauaaugagaucagaugcacccauuggcaaaugcaagucugaauguaucacuccaaauggaagcauucccaaugacaaaccauuccaaaauguaaacaggaucacauacggggccugucccagauauguuaagcauagcacucugaaauuggcaacaggaaugcgaaauguaccagagaaacaaacuagaggcauauuuggcgcaauagcggguuucauagaaaaugguugggagggaaugguggaugguugguacgguuucaggcaucaaaauucugaggggagaggacaagcagcagaucucaaaagcacucaagcagcaaucgaucaaaucaaugggaagcugaaucgauugaucgggaaaaccaacgagaaauuccaucagauugaaaaagaauucucagaaguagaaggaagaauucaggaccuugagaaauauguugaggacacuaaaauagaucucuggucauacaacgcggagcuucuuguugcccuggagaaucaacauacaauugaucuaacugacucagaaaugaacaaacuguuugaaaaaacaaagaagcaacugagggaaaaugcugaggauaugggaaaugguuguuucaaaauauaccacaaaugugacaaugccugcauaggaucaauaagaaauggaacuuaugaccacaauguguacagggaugaagcauuaaacaaccgguuccagaucaagggaguugagcugaagucaggguacaaagauuggauccuauggauuuccuuugccauaucauguuuuuugcuuuguguugcuuuguugggguucaucaugugggccugccaaaagggcaacauuaggugcaacauuugcauuuga

SEQ ID NO: 45149 - RNA, 1701 nt, Artificial Sequence; identical to SEQ ID NO: 45004
  derived and/or modified CDS sequence (wt) from hemagglutinin__InfluenzaA__ALA08673

SEQ ID NO: 45150 - RNA, 1701 nt, Artificial Sequence; identical to SEQ ID NO: 45145
  derived and/or modified CDS sequence (wt) from hemagglutinin__InfluenzaA__ALA08674

SEQ ID NO: 45151 - RNA, 1701 nt, Artificial Sequence; identical to SEQ ID NO: 45108
  derived and/or modified CDS sequence (wt) from hemagglutinin__InfluenzaA__ALA08675

SEQ ID NO: 45152 - RNA, 1701 nt, Artificial Sequence; identical to SEQ ID NO: 45140
  derived and/or modified CDS sequence (wt) from hemagglutinin__InfluenzaA__ALA08676

SEQ ID NO: 45153 - RNA, 1701 nt, Artificial Sequence; identical to SEQ ID NO: 45140
  derived and/or modified CDS sequence (wt) from hemagglutinin__InfluenzaA__ALA08677

SEQ ID NO: 45154 - RNA, 1701 nt, Artificial Sequence; identical to SEQ ID NO: 45140
  derived and/or modified CDS sequence (wt) from hemagglutinin__InfluenzaA__ALA08678

SEQ ID NO: 45155 - RNA, 1701 nt, Artificial Sequence
  derived and/or modified CDS sequence (wt) from hemagglutinin__InfluenzaA__ALA08679
augaagacuaucauugcuuugagcuacauucuaugucugguuuucgcucaaaaaauuccuggaaaugacaauagcacggcaacgcugugccuugggcaccaugcaguaccaaacggaacgauagugaaaacaaucacaaaugaccgaauugaaguuacuaaugcuacugagcugguucagaauuccucaauaggugaaauaugcgacaguccucaucagauccuugauggagaaaacugcacacuaauagaugcucuauugggagauccucagugugauggcuuucaaaauaagaaaugggaccuuuuuguugaacgaagcaaagccuacagcaacuguuacccuuaugaugugccggauuaugccucccuuaggucacuaguugccucauccggcacacuggaguuuaacaaugaaagcuucaauuggacuggagucacucaaaacggaacaaguucugcuugcauaaggaaaucuaguaguaguuucuuuaguagauuaaauugguugacccacuuaaacuacacauacccagcauugaacgugacuaugccaaacaaugaacaauuugacaaauuguacauuugggggguucaccacccggguacggacaaggaccaaaucuuccuguaugcucgaucaucaggaagaaucacaguaucuaccaaaagaagccaacaagcuguaaucccaaauaucggaucuagacccagaauaagggauaucccuagcagaauaagcaucuauuggacaauaguaaaaccgggagacauacuuuugauuaacagcacagggaaucuaauugcuccuagggguuacuucaaaauacgaagugggaaaagcucaauaaugagaucagaugcacccauuggcaaaugcaagucugaaugcaucacuccaaauggaagcauucccaaugacaaaccauuccaaaauguaaacaggaucacauacggggccugucccagauauguuaagcauagcacucugaaauuggcaacaggaaugcgaaauguaccagagaaacaaacuagaggcauauuuggcgcaauagcggguuucauagaaaaugguugggagggaaugguggaugguugguacgguuucaggcaucaaaauucugaggggagaggacaagcagcagaucucaaaagcacucaagcagcaaucgaucaaaucaaugggaagcugaaucgauugaucgggaaaaccaacgagaaauuccaucagauugaaaaagaauucucagaaguagaaggaagaauucaggaccuugagaaauauguugaggacacuaaaauagaucucuggucauacaacgcggagcuucuuguugcccuggagaaucaacauacaauugaucuaacugacucagaaaugaacaaacuguuugaaaaaacaaagaagcaacugagggaaaaugcugaggauaugggaaaugguuguuucaaaauauaccacaaaugugacaaugccugcauaggaucaauaagaaauggaacuuaugaccacaauguguacagggaugaagcauuaaacaaccgguuccagaucaagggaguugagcugaagucaggguacaaagauuggauccuauggauuuccuuugccauaucauguuuuuugcuuuguguugcuuuguugggguucaucaugugggccugccaaaagggcaacauuaggugcaacauuugcauuuga

SEQ ID NO: 45156 - RNA, 1701 nt, Artificial Sequence; identical to SEQ ID NO: 45145
  derived and/or modified CDS sequence (wt) from hemagglutinin__InfluenzaA__ALA08680

SEQ ID NO: 45157 - RNA, 1701 nt, Artificial Sequence; identical to SEQ ID NO: 45018
  derived and/or modified CDS sequence (wt) from hemagglutinin__InfluenzaA__ALA08681

SEQ ID NO: 45158 - RNA, 1701 nt, Artificial Sequence
  derived and/or modified CDS sequence (wt) from hemagglutinin__InfluenzaA__ALA08682
augaagacuaucauugcuuugagcuacauucuaugucugguuuucgcucaaaaaauuccuggaaaugacaauagcacggcaacgcugugccuugggcaccaugcaguaccaaacggaacgauagugaaaacaaucacaaaugaccgaauugaaguuacuaaugcuacugagcugguucagaauuccucaauaggugaaauaugcgacaguccucaucagauccuugauggagaaaacugcacacuaauagaugcucuauugggagacccucagugugauggcuuucaaaauaagaaaugggaccuuuuuguugaacgaagcaaagccuacagcaacuguuacccuuaugaugugccggauuaugccucccuuaggucacuaguugccucauccggcacacuggaguuuaacaaugaaagcuucaauuggacuggagucacucaaaacggaacaaguucugcuugcauaaggagaucuaguaguaguuucuuuaguagauuaaauugguugacccacuuaaacuacauauacccagcauugaacgugacuaugccaaacaaugaacaauuugacaaauuguacauuugggggguucaccacccggguacggacaaggaccaaaucuuccuguaugcucaaucaucaggaagaaucacaguaucuaccaaaagaagccaacaagcuguaaucccaaauaucggaucuagacccagaauaagggauaucccuagcagaauaagcaucuauuggacaauaguaaaaccgggagacauacuuuugauuaacagcacagggaaucuaauugcuccuagggguuacuucaaaauacgaagugggaaaagcucaauaaugagaucagaugcacccauuggcaaaugcaagucugaaugcaucacuccaaauggaagcauucccaaugacaaaccauuccaaaauguaaacaggaucacauacggggccugucccagauauguuaagcauagcacucugaaauuggcaacaggaaugcgaaauguaccagagaaacaaacuagaggcauauuuggcgcaauagcggguuucauagaaaaugguugggagggaaugguggaugguugguacgguuucaggcaucaaaauucugagggaagaggacaagcagcagaucucaaaagcacucaagcagcaaucgaucaaaucaauggaaagcugaaucgauugaucgggaaaaccaacgagaaauuccaucagauugaaaaagaauucucagaaguagaaggaagaauucaggaccuugagaaauauguugaggacacuaaaauagaucucuggucauacaacgcggagcuucuuguugcccuggagaaccaacauacaauugaucuaacugacucagaaaugaacaaacuguuugaaaaaacaaagaagcaacugagggaaaaugcugaggauaugggaaaugguuguuucaaaauauaccacaaaugugacaaugccugcauaggaucaauaagaaauggaacuuaugaccacaauguguacagggaugaagcauuaaacaaccgguuccagaucaagggaguugagcugaagucaggguacaaagauuggauccuauggauuuccuuugccauaucauguuuuuugcuuuguguugcuuuguugggguucaucaugugggccugccaaaagggcaacauuaggugcaacauuugcauuuga

SEQ ID NO: 45159 - RNA, 1701 nt, Artificial Sequence; identical to SEQ ID NO: 45018
  derived and/or modified CDS sequence (wt) from hemagglutinin__InfluenzaA__ALA08683

SEQ ID NO: 45160 - RNA, 1701 nt, Artificial Sequence
  derived and/or modified CDS sequence (wt) from hemagglutinin__InfluenzaA__ALA08684
augaagacuaucauugccuugagccacauucuaugucugguuuucgcucaaaaaauuccuggaaaugacaauagcacggcaacgcugugccuugggcaccaugcaguaccaaacggaacgauagugaaaacaaucacaaaugaccgaauugaaguuacuaaugcuacugagcugguucagaauuccucaauaggugaaauaugcgacaguccucaucagauccuugauggagaaaacugcacacuaauagaugcucuauugggagacccucagugugauggcuuucaaaauaagaaaugggaccuuuuuguugaacgaagcaaagccuacagcaacuguuacccuuaugaugugccggauuaugccucccuuaggucauuaguugccucauccggcacacuggaguuuaacaaugaaagcuucaauuggacuggagucacucaaaacggaacaaguucugcuugcauaaggagaucuaguaguaguuucuuuaguagauuaaauugguugacccacuuaaacuacaaauacccagcauugaacgugacuaugccaaacaaugaacaauuugacaaauuguacauuugggggguucaccacccggguacggacaaggaccaaaucuuccuguaugcucaaucaucaggaagaaucacaguaucuaccaaaggaagccaacaagcuguaaucccaaauaucggaucuagacccagaauaagggauaucccuagcagaauaagcaucuauuggacaauaguaaaaccgggagacauacuuuugauuaacagcacagggaaucuaauugcuccuagggguuacuucaaaauacgaagugggaaaagcucaauaaugagaucagaugcacccauuggcaaaugcaagucugaaugcaucacuccaaauggaagcauucccaaugacaaaccauuccaaaauguaaacaggaucacauacggggccugucccagauauguuaagcauagcacucugaaauuggcaacaggaaugcgaaauguaccagagaaacaaacuagaggcauauuuggcgcaauagcggguuucauagaaaaugguugggagggaaugguggaugguugguacgguuucaggcaucaaaauucugagggaagaggacaagcagcagaucucaagagcacucaagcagcaaucgaucaaaucaaugggaagcugaaucgauugaucgggaaaaccaacgagaaauuccaucagauugaaaaagaauucucagaaguagaaggaagaauucaggaccuugagaaauauguugaggacacuaaaauagaucucuggucauacaacgcagagcuucuuguugcccuggagaaccaacauacaauugaucuaacugacucagaaaugaacaaacuguuugaaaaaacaaagaagcaacugagggaaaaugcugaggauaugggaaaugguuguuucaaaauauaccacaaaugugacaaugccugcauaggaucaauaagaaauggaacuuaugaccacaauguguacagggaugaagcauuaaacaaccgguuccagaucaagggaauugagcugaagucaggguacaaagauuggauccuauggauuuccuuugccauaucauguuuuuugcuuuguguugcuuuguugggguucaucaugugggccugccaaaagggcaacauuaggugcaacauuugcauuuga

SEQ ID NO: 45161 - RNA, 1701 nt, Artificial Sequence; identical to SEQ ID NO: 45006
  derived and/or modified CDS sequence (wt) from hemagglutinin__InfluenzaA__ALA08686

SEQ ID NO: 45162 - RNA, 1701 nt, Artificial Sequence
  derived and/or modified CDS sequence (wt) from hemagglutinin__InfluenzaA__ALA08687
augaagacuaucauugcuuugagcuacauucuaugucugguuuucgcucaaaaaauuccuggaaaugacaauagcacggcaacgcugugccuugggcaccaugcaguaccaaacggaacgauagugaaaacaaucacaaaugaccgaauugaaguuacuaaugcuacugagcugguucagaauuccucaauaggugaaauaugcgacaguccucaucagauccuugauggagaaaacugcacacuaauagaugcucuauugggagacccucagugugauggcuuucaaaauaagaaaugggaccuuuuuguugaacgaagcaaagccuacagcaacuguuacccuuaugaugugccggauuaugccucccuuaggucacuaauugccucauccggcacacuggaguuuaacaaugaaagcuucaauuggacuggagucacucaaaacggaacaaguucugcuugcauaaggagaucuaguaguaguuucuuuagcagauuaaauugguugacccacuuaaacuacacauacccagcauugaacgugacuaugccaaacaaugaacaauuugacaaauuguacauuugggggguucaccacccggguacggacaaggaccaaaucuuccuguaugcucaaucaucaggaagaaucacaguaucuaccaaaagaagccaacaagcuguaaucccaaauaucggaucuagacccagaauaagggauaucccuagcagaauaagcaucuauuggacaauaguaaaaccgggagacauacuuuugauuaacagcacagggaaucuaauugcuccuagggguuacuucaaaauacgaagugggaaaagcucaauaaugagaucagaugcacccauuggcaaaugcaagucugaaugcaucacuccaaauggaagcauucccaaugacaaaccauuccaaaauguaaacaggaucacauacggggccugucccagauauguuaagcauagcacucugaaauuggcaacaggaaugcgaaauguaccagagaaacaaacuagaggcauauuuggcgcaauagcggguuucauagaaaaugguugggagggaaugguggaugguugguacgguuucaggcaucaaaauucugagggaagaggacaagcagcagaucucaaaagcacucaagcagcaauugaucaaaucaaugggaagcugaaucgauugaucgggaaaaccaacgagaaauuccaucagauugaaaaagaauucucagaaguagaaggaagaauucaggaccuugagaaauauguugaggacacuaaaauagaucucuggucauacaacgcggagcuucuuguugcccuggagaaccaacauacaauugaucuaacugacucagaaaugaacaaacuguuugaaaaaacaaagaagcaacugagggaaaaugcugaggauaugggaaaugguuguuucaaaauauaccacaaaugugacaaugccugcauaggaucaauaagaaauggaacuuaugaccacaauguguacagggaugaagcauuaaacaaccgguuccagaucaagggaguugagcugaagucaggguacaaagauuggauccuauggauuuccuuugccauaucauguuuuuugcuuuguguugcuuuguugggguucaucaugugggccugccaaaagggcaacauuaggugcaacauuugcauuuga

SEQ ID NO: 45163 - RNA, 1701 nt, Artificial Sequence
  derived and/or modified CDS sequence (wt) from hemagglutinin__InfluenzaA__ALA08688
augaagacuaucauugcuuugagcuacauucuaugucugguuuucgcucaaaaaauuccuggaaaugacaauagcacggcaacgcugugccuugggcaccaugcaguaccaaacggaacgauagugaaaacaaucacaaaugaccgaauugaaguuacuaaugcuacugagcugguucagaauuccucaauaggugaaauaugcgacaguccucaucagauccuugauggagaaaacugcacacuaauagaugcucuauugggggacccucagugugauggcuuucaaaauaagaaaugggaccuuuuuguugaacgcagcaaagccuacagcaacuguuacccuuaugaugugccggauuaugccucccuuaggucacuaguugccucauccggcacacuggaguuuaacaaugaaagcuucaauuggacuggagucacucaaaacggaacaaguucugcuugcauaaggagaucuaguaguaguuucuuuaguagauuaaauugguugacccacuuaaacuacaaauacccagcauugaacgugacuaugccaaacaaugaacaauuugacaaauuguacauuugggggguucaccacccggguacggacaaggaccaaaucuuccuguaugcucaaucaucaggaagaaucacaguaucuaccaaaagaagccaacaagcuguaaucccaaauaucggaucuagacccagaauaagggauaucccuagcagaauaagcaucuauuggacaauaguaaaaccgggagacauacuuuugauuaacagcacagggaaucuaauugcuccuagggguuacuucaaaauacgaagugggaaaagcucaauaaugagaucagaugcacccauuggcaaaugcaagucugaaugcaucacuccaaauggaagcauucccaaugacaaaccauuccaaaauguaaacaggaucacauacggggccugucccagauauguuaagcauagcacucugaaauuggcaacaggaaugcgaaauguaccagagaaacaaacuagaggcauauuuggcgcaauagcagguuucauagaaaaugguugggagggaaugguggaugguugguacgguuucaggcaucaaaauucugagggaagaggacaagcagcagaucucaaaagcacucaagcagcaaucgaucaaaucaaugggaagcugaaucgauugaucgggaaaaccaacgagaaauuccaucagauugaaaaagaauucucagaaguagaaggaagaauucaggaccuugagaaauauguugaggacacuaaaauagaucucuggucauacaacgcggagcuucuuguugcccuggagaaccaacauacaauugaucuaacugacucagaaaugaacaaacuguuugaaaaaacaaagaagcaacugagggaaaaugcugaggauaugggaaaugguuguuucaaaauauaccacaaaugugacaaugccugcauaggaucaauaagaaauggaacuuaugaccacaauguguacagggaugaagcauuaaacaaccgguuccagaucaagggaguugagcugaagucaggguacaaagauuggauccuauggauuuccuuugccauaucauguuuuuugcuuuguguugcuuuguugggguucaucaugugggccugccaaaagggcaacauuaggugcaacauuugcauuuga

SEQ ID NO: 45164 - RNA, 1701 nt, Artificial Sequence
  derived and/or modified CDS sequence (wt) from hemagglutinin__InfluenzaA__ALE31612
augaagacuaucauugcuuugagcuacauucuaugucugguuuucgcucaaaaaauuccuggaaaugacaauagcacggcaacgcugugccuugggcaccaugcaguaccaaauggaacgauagugaaaacaaucacaaaugaccgaauugaaguuacuaaugcuacugagcugguucagaauuccucaauaggugaaauaugcgacaguccucaucagauccuugauggagaaaacugcacacuaauagaugcucuauugggagauccucagugugauggcuuucaaaauaagaaaugggaccuuuuuguugaacgaagcaaagccuacagcaacuguuacccuuaugaugugccggauuaugccucccuuaggucacuaguugccucauccggcacacuggaguuuaacaaugaaagcuucaauuggacuggagucacucaaaacggaacaaguucugcuugcauaaggagaucuaguaguaguuucuuuaguagauuaaauugguugacccacuuaaacuacacauacccagcauugaacgugacuaugccaaacaaugaacaauuugacaaauuguacauuugggggguucaccacccggguacggacaaggaccaaaucuuccuguaugcucaaucaucaggaagaaucacaguaucuaccaaaagaagccaacaagcuguaaucccaaauaucggaucuagacccagaauaagggauaucccuagcagaauaagcaucuauuggacaauaguaaaaccgggagacauacuuuugauuaacagcacagggaaucuaauugcuccuagggguuacuucaaaauacgaagugggaaaagcucaauaaugagaucagaugcacccauuggcaaaugcaagucugaaugcaucacuccaaauggaagcauucccaaugacaaaccauuccaaaauguaaacaggaucacauacggggccugucccagauauguuaagcauagcacucugaaauuggcaacaggaaugcgaaauguaccagagaaacaaacuagaggcauauuuggcgcaauagcggguuucauagaaaaugguugggagggaaugguggaugguugguacgguuucaggcaucaaaauucugagggaagaggacaagcagcagaucucaaaagcacucaagcagcaaucgaucaaaucaaugggaagcugaaucgauugaucgggaaaaccaacgagaaauuccaucagauugaaaaagaauucucagaaguagaaggaagaauucaggaccuugagaaauauguugaggacacuaaaauagaucucuggucauacaacgcggagcuucuuguugcccuggagaaccaacauacaauugaucuaacugacucagaaaugaacaaacuguuugaaaaaacaaagaagcaacugagggaaaaugcugaggauaugggaaaugguuguuucaaaauauaccacaaaugugacaaugccugcauaggaucaauaagaaauggaacuuaugaccacaauguguacagggaugaagcauuaaacaaccgguuccagaucaagggaguugagcugaagucaggguacaaagauuggauccuauggauuuccuuugccauaucauguuuuuugcuuuguguugcuuuguugggguucaucaugugggccugccaaaagggcaacauuaggugcaacauuugcauuuga

SEQ ID NO: 45165 - RNA, 1701 nt, Artificial Sequence
  derived and/or modified CDS sequence (wt) from hemagglutinin__InfluenzaA__ALE31613
augaagacuaucauugccuugagcuacauucuaugucugguuuucgcucaaaaaauuccuggaaaugacaauagcacggcaacgcugugccuugggcaccaugcaguaccaaacggaacgauagugaaaacaaucacaaaugaccgaauugaaguuacuaaugcuacugagcugguucagaauuccucaauaggugaaauaugcgacaguccucaucagauccuugauggagaaaacugcacacuaauagaugcucuauugggagacccucagugugauggcuuucaaaauaagaaaugggaccuuuuuguugaacgaagcaaagccuacagcaacuguuacccuuaugaugugccggauuaugccucccuuaggucacuaguugccucauccggcacacuggaguuuaacaaugaaagcuucaauuggacuggagucacucaaaacggaacaaguucugcuugcauaaggagaucuaguaguaguuucuuuaguagauuaaauugguugacccacuuaaacuacacauacccagcauugaacgugacuaugccaaacaaugaacaauuugacaaauuguacauuugggggguucaccacccggguacggacaaggaccaaaucuuccuguaugcucaaucaucaggaagaaucacaguaucuaccaaaggaagccaacaagcuguaaucccaaauaucggaucuagacccagaauaagggauaucccuagcagaauaagcaucuauuggacaauaguaaaaccgggagacauacuuuugauuagcagcacagggaaucuaauugcuccuagggguuacuucaaaauacgaagugggaaaagcucaauaaugagaucagaugcacccauuggcaaaugcaagucugaaugcaucacuccaaauggaagcauucccaaugacaaaccauuccaaaauguaaacaggaucacauacggggccugucccagauauguuaagcauagcacucugaaauuggcaacaggaaugcgaaauguaccagagaaacaaacuagaggcauauuuggcgcaauagcggguuucauagaaaaugguugggagggaaugguggaugguugguacgguuucaggcaucaaaauucugagggaagaggacaagcagcagaucucaaaagcacucaagcagcaaucgaucaaaucaaugggaagcugaaucgauugaucgggaaaaccaacgagaaauuccaucagauugaaaaagaauucucagaaguagaaggaagaauucaggaccuugagaaauauguugaggacacuaaaauagaucucuggucauacaacgcggagcuucuuguugcccuggagaaccaacauacaauugaucuaacugacucagaaaugaacaaacuguuugaaaaaacaaagaagcaacugagggaaaaugcugaggauaugggaaaugguuguuucaaaauauaccacaaaugugacaaugccugcauaggaucaauaagaaauggaacuuaugaccacaauguguacagggaugaagcauuaaacaaccgguuccagaucaagggaguugagcugaagucaggguacaaagauuggauccuauggauuuccuuugccauaucaugucuuuugcuuuguguugcuuuguugggguucaucaugugggccugccaaaagggcaacauuaggugcaacauuugcauuuga

SEQ ID NO: 45166 - RNA, 1701 nt, Artificial Sequence
  derived and/or modified CDS sequence (wt) from hemagglutinin__InfluenzaA__ALE31614
augaagacuaucauugcuuugagcuacauucuaugucugguuuucgcucaaaaaauuccuggaaaugacaauagcacggcaacgcugugccuugggcaccaugcaguaccaaacggaacgauagugaaaacaaucacaaaugaccgaauugaaguuacuaaugcuacugagcugguucagaauuccucaauagguaaaauaugcgacaguccucaucagauccuugauggagaaaacugcacacuaauagaugcucuauugggagauccucagugugauggcuuucaaaauaagaaaugggaccuuuuuguugaacgaagcaaagccuacagcaacuguuacccuuaugaugugccggauuaugccucccuuaggucacuaguugccucauccggcacacuggaguuuaacaaugaaagcuucaauuggacuggagucacccaaaacggaacaaguucugcuugcauaaggagaucuaguaguaguuucuuuaguagauuaaauugguugacccacuuaaacuacacauacccagcauugaacgugacuaugccaaacaaugaacaauuugacaaauuguacauuugggggguucaccacccggguacggacaaggaccaaaucuuccuguaugcucaaucaucaggaagaaucacaguaucuaccaaaagaagccaacaagcuguaaucccaaauaucggaucuagacccagaauaagggauaucccuagcagaauaagcaucuauuggacaauaguaaaaccgggagacauacuuuugauuaacagcacagggaaucuaauugcuccuagggguuacuucaaaauacgaagugggaaaagcucaauaaugagaucagaugcacccauuggcaaaugcaagucugaaugcaucacuccaaauggaagcauucccaaugacaaaccauuccaaaauguaaacaggaucacauacggggccugucccagauauguuaagcauagcacucugaaauuggcaacaggaaugcgaaauguaccagagaaacaaacuagaggcauauuuggcgcaauagcggguuucauagaaaaugguugggagggaaugguggaugguugguacgguuucaggcaucaaaauucugagggaagaggacaagcagcagaucucaaaagcacucaagcagcaaucgaucaaaucaaugggaagcugaaucgauugaucgggaaaaccaacgagaaauuccaucagauugaaaaagaauucucagaaguagaaggaagaauucaggaccuugagaaauauguugaggacacuaaaauagaucucuggucauacaacgcggagcuucuuguugcccuggagaaccaacauacaauugaucuaacugacucagaaaugaacaaacuguuugaaaaaacaaagaagcaacugagggaaaaugcugaggauaugggaaaugguuguuucaaaauauaccacaaaugugacaaugccugcauaggaucaauaagaaauggaacuuaugaccacaauguguacagggaugaagcauuaaacaaccgguuccaaaucaagggaguugagcugaagucaggguacaaagauuggauccuauggauuuccuuugccauaucauguuuuuugcuuuguguugcuuuguugggguucaucaugugggccugccaaaagggcaacauuaggugcaacauuugcauuuga

SEQ ID NO: 45167 - RNA, 1701 nt, Artificial Sequence
  derived and/or modified CDS sequence (wt) from hemagglutinin__InfluenzaA__ALE31615
augaagacuaucauugcuuugagcuacauucuaugucugguuuucgcucaaaaacuuccuggaaaugacaauagcacggcaacgcugugccuugggcaccaugcaguaccaaauggaacgauagugaaaacaaucacgaaugaccgaauugaaguuacuaaugcuacugagcugguucagaauuccucaauaggugaaauaugcgacaguccucaucagauccuugauggagaaaacugcacacuaauagaugcucuauugggagacccucaaugugauggcuuucaaaauaagaaaugggaccuuuuuguugaacggagcaaagccuacagcaacuguuacccuuaugaugugccggauuaugccucccuuaggucacuaguugccucauccggcacacuggaguuuaacaaugaaagcuucaauugggcuggagucacucaaaacggaacaaguucugcuugcauaaggggaucuaauaguaguuucuuuaguagauuaaauugguugacccacuuaaacuucaaauacccagcauugaacgugacuaugccaaacaaugaacaauuugacaaauuguacauuuggggaguucaccacccggguacggacaaggaccaaaucuuccuguaugcucaaucgucaggaaggaucacaguaucuaccaaaagaagccaacaagcuguaaucccgaauaucggaucuagacccagaauaaggaauaucccuagcagaauaagcaucuauuggacaauaguaaaaccgggagacauacuuuugauuaacagcacagggaaccuaauugcuccuagggguuacuucaaaauacgaagugggaaaagcucaauaaugagaucagaugcacccauuggcaaaugcaagucugaaugcaucacuccaaauggaagcauucccaaugacaaaccauuccaaaauguaaacaggaucacauacggggccugucccagauauguuaagcaaagcacucugaaauuggcaacaggaaugcgaaauguaccagagaaacaaacuagaggcauauuuggcgcaauagcggguuucauagaaaaugguugggagggaaugguggaugguugguacgguuucaggcaucaaaauucugaaggaagaggacaagcagcagaucucaaaagcacucaagcagcaaucgaucaaaucaaugggaagcugaaucgauugaucgggaaaaccaacgagaaauuccaucagauugaaaaagaauucucagaaguagaagggagaauucaggaccuugagaaauauguugaagacacaaaaauagaucucuggucauacaacgcagagcuucuuguugcccuggagaaccaacauacaauugaucuaacugacucagaaaugaacaaacuguuugaaaaaacaaagaaacaacugagggaaaaugcugaggauaugggcaaugguuguuucaaaauauaccacaaaugugacaaugccugcauagaaucaaucagaaauggaacuuaugaccacgauguguacagggaugaagcauuaaacaaccgguuccagaucaagggaguugagcugaagucaggguacaaagauuggauccuauggauuuccuuugccauaucauguuuuuugcuuuguguugcuuuguugggguucaucaugugggccugccaaaagggcaacauuaggugcaacauuugcauuuga

SEQ ID NO: 45168 - RNA, 1701 nt, Artificial Sequence
  derived and/or modified CDS sequence (wt) from hemagglutinin__InfluenzaA__ALE31616
augaagacuaucauugcuuugagcuacauucuaugucugguuuucgcucaaaaaauuccuggaaaugacaauagcacggcaacgcugugccuugggcaccaugcaguaccaaacggaacgauagugaaaacaaucacaaaugaccgaauugaaguuacuaaugcuacugagcugguucagaauuccucaauaggugaaauaugcgacaguccucaucagauccuugauggagaaaacugcacacuaauagaugcucuauugggagacccucagugugauggcuuucaaaauaagaaaugggaccuuuuuguugaacgaagcaaagccuacagcaacuguuacccuuaugaugugccggauuaugccucccuuaggucacuaguugccucauccggcacacuggaguuuaacaaugaaagcuucaauuggacuggagucacucaaaacggaacaaguucugcuugcauaaggagaucuaguaguaguuucuuuaguagauuaaauugguugacccacuuaaacuacacauacccagcauugaacgugacuaugccaaacaaugaacaauuugacaaauuguacauuugggggguucaccacccggguacggacaaggaccaaaucuuccuguaugcucaaucaucaggaagaaucacaguaucuaccaaaagaagccaacaagcuguaaucccaaauaucggaucuagacccagaauaagggauaucccuagcagaauaagcaucuauuggacaauaguaaaaccgggagacauacuuuugauuaacagcacagggaaucuaauugcuccuagggguuacuucaaaauacgaagugggaaaagcucaauaaugagaucagaugcacccauuggcaaaugcaagucugaaugcaucacuccaaauggaagcauucccaaugacaaaccauuccaaaauguaaacaggaucacauacggggccugucccagauauguuaagcauagcacucugaaauuggcaacaggaaugcgaaauguaccagagaaacaaacuagaggcauauuuggcgcaauagcggguuucauagaaaaugguugggagggaaugguggaugguugguacgguuucaggcaucaaaauucugagggaagaggacaagcagcagaucucaaaagcacucaagcagcaaucgaucaaaucaauggaaagcugaaucgauugaucgggaaaaccaacgagaaauuccaucagauugaaaaagaauucucagaaguagaaggaagaauucaggaccuugagaaauauguugaggacacuaaaauagaccucuggucauacaacgcggagcuucuuguugcccuggagaaccaacauacaauugaucuaacugacucagaaaugaacaaacuguuugaaaaaacaaagaagcaacugagggaaaaugcugaggauaugggaaaugguuguuucaaaauauaccacaaaugugacaaugccugcauaggaucaauaagaaauggaacuuaugaccacaauguguacagggaugaagcauuaaacaaccgguuccagaucaagggaguugagcugaagucaggguacaaagauuggauccuauggauuuccuuugccauaucauguuuuuugcuuuguguugcuuuguugggguucaucaugugggccugccaaaagggcaacauuaggugcaacauuugcauuuga

SEQ ID NO: 45169 - RNA, 1701 nt, Artificial Sequence; identical to SEQ ID NO: 45065
  derived and/or modified CDS sequence (wt) from hemagglutinin__InfluenzaA__ALE31617

SEQ ID NO: 45170 - RNA, 1701 nt, Artificial Sequence; identical to SEQ ID NO: 45108
  derived and/or modified CDS sequence (wt) from hemagglutinin__InfluenzaA__ALE31618

SEQ ID NO: 45171 - RNA, 1701 nt, Artificial Sequence
  derived and/or modified CDS sequence (wt) from hemagglutinin__InfluenzaA__ALE31619
augaagacuaucauugcuuugagcuacauucuaugucugguuuucgcucaaaaaauuccuggaaaugacaauagcacggcaacgcugugccuugggcaccaugcaguaccaaacggaacgauagugaaaacaaucacaaaugaccgaauugaaguuacuaaugcuacugagcugguucagaauuccucaauaggugaaauaugcgacaguccucaucagauccuugauggagaaaacugcacacuaauagaugcucuauugggagacccucagugugauggcuuucaaaauaagaaaugggaccuuuuuguugaacgaagcaaagccuacagcaacuguuacccuuaugaugugccggauuaugccucccuuaggucacuaguugccucauccggcacacuggaguuuaacaaugaaagcuucaauuggacuggagucacucaaaacggaacaaguucugcuugcauaaggaaaucuaguaguaguuucuuuaguagauuaaauugguugacccacuuaaacuacacauacccagcauugaacgugacuaugccaaacaaugaacaauuugacaaauuguacaucugggggguucaccacccggguacggacaaggaccaaaucuuccuguaugcucgaucaucaggaagaaucacaguaucuaccaaaagaagccaacaagcuguaaucccaaauaucggaucuagacccagaauaagggauaucccuagcagaauaagcaucuauuggacaauaguaaaaccgggagacauacuuuugauuaacagcacagggaaucuaauugcuccuagggguuacuucaaaauacgaagugggaaaagcucaauaaugagaucagaugcacccauuggcaaaugcaagucugaaugcaucacuccaaauggaagcauucccaaugacaaaccauuccaaaauguaaacaggaucacauacggggccugucccagauauguuaagcauagcacucugaaauuggcaacaggaaugcgaaauguaccagagaaacaaacuagaggcauauuuggcgcaauagcggguuucauagaaaaugguugggagggaaugguggaugguugguacgguuucaggcaucaaaauucugagggaagaggacaagcagcagaucucaaaagcacucaagcagcaaucgaucaaaucaaugggaagcugaaucgauugaucgggaaaaccaacgagaaauuccaucagauugaaaaagaauucucagaaguagaaggaagaauucaggaccuugagaaauauguugaggacacuaaaauagaucucuggucauacaacgcggagcuucuuguugcccuggagaaucaacauacaauugaucuaacugacucagaaaugaacaaacuguuugaaaaaacaaagaagcaacugagggaaaaugcugaggauaugggaaaugguuguuucaaaauauaccacaaaugugacaaugccugcauaggaucaauaagaaauggaacuuaugaccacaauguguacagggaugaagcauuaaacaaccgguuccagaucaagggaguugagcugaagucaggguacaaagauuggauccuauggauuuccuuugccauaucauguuuuuugcuuuguguugcuuuguugggguucaucaugugggccugccaaaagggcaacauuaggugcaacauuugcauuuga

SEQ ID NO: 45172 - RNA, 1701 nt, Artificial Sequence
  derived and/or modified CDS sequence (wt) from hemagglutinin__InfluenzaA__ALE31620
augaagacuaucauugcuuugagcuacauucuaugucugguuuucgcucaaaaaauuccuggaaaugacaauagcacggcaacgcugugccuugggcaccaugcaguaccaaacggaacgauagugaaaacaaucacaaaugaccgaauugaaguuacuaaugcuacugaguugguucagaauuccucaauaggugaaauaugcgacaguccucaucagauccuugauggagaaaacugcacacuaauagaugcucuauugggagacccucagugugauggcuuucaaaauaagaaaugggaccuuuuuguugaacgaagcaaagccuacagcaacuguuacccuuaugaugugccggauuaugccucccuuaggucacuaguugccucauccggcacacuggaguuuaacaaugaaagcuucaauuggacuggagucacucaaaacggaacaaguucugcuugcauaaggagaucuaguaguaguuucuuuaguagauuaaauugguugacccacuuaaacuacacauacccagcauugaacgugacuaugccaaacaaugaacaauuugacaaauuguacauuugggggguucaccacccggguacggacaaggaccaaaucuuccuguaugcucaaucaucaggaagaaucacaguaucuaccaaaagaagccaacaagcuguaaucccaaauaucggaucuagacccagaauaagggauaucccuagcagaauaagcaucuauuggacaauaguaaaaccgggagacauacuuuugauuaacagcacagggaaucuaauugcuccuagggguuacuucaaaauacgaagugggaaaagcucaauaaugagaucagaugcacccauuggcaaaugcaagucugaaugcaucacuccaaauggaagcauucccaaugacaaaccauuccaaaauguaaacaggaucacauacggggccugucccagauauguuaagcauagcacucugaaauuggcaacaggaaugcgaaauguaccagagaaacaaacuagaggcauauuuggcgcaauagcggguuucauagaaaaugguugggagggaaugguggaugguugguacgguuucaggcaucaaaauucugagggaagaggacaagcagcagaucucaaaagcacucaagcagcaaucgaucaaaucaaugggaagcugaaucgguugaucgggaaaaccaacgagaaauuccaucagauugaaaaagaauucucagaaguagaaggaagaauucaggaccuugagaaauauguugaggacacuaaaauagaucucuggucauauaacgcggagcuucuuguugcccuggagaaccaacauacaauugaucuaacugacucagaaaugaacaaacuguuugaaaaaacaaagaagcaacugagagaaaaugcugaggauaugggaaaugguuguuucaaaauauaccacaaaugugacaaugccugcauaggaucaauaagaaauggaacuuaugaccacaauguguacagggaugaagcauuaaacaaccgguuccagaucaaggggguugagcugaagucaggguacaaagauuggauccuauggauuuccuuugccauaucauguuuuuugcuuuguguugcuuuguugggguucaucaugugggccugccaaaagggcaacauuaggugcaacauuugcauuuga

SEQ ID NO: 45173 - RNA, 1701 nt, Artificial Sequence
  derived and/or modified CDS sequence (wt) from hemagglutinin__InfluenzaA__ALE31622
augaagacuaucauugcuuugagcuacauucuaugucugguuuucgcucaaaaaauuccuggaaaugacaauagcacggcaacgcugugccuugggcaccaugcaguaccaaacggaacgauagugaaaacaaucacaaaugaccgaauugaaguuacuaaugcuacugagcugguucagaauuccucaauaggugaaauaugcgacaguccucaucagauccuugauggagaaaacugcacacuaauagaugcucuauugggagacccucagugugauggcuuucaaaauaagaaaugggaccuuuuuguugaacgaagcaaagccuacagcaacuguuacccuuaugaugugccggauuaugccucccuuaggucacuaguugccucauccggcacacuggaguuuaacaaugaaagcuucaauuggacuggagucacucaaaacggaacaaguucugcuugcauaaggagaucuaguaguaguuucuuuaguagauuaaauugguugacccacuuaaacuacacauacccagcauugaacgugacuaugccaaacaaugaacaauuugacaaauuguacauuugggggguucaccacccggguacggacaaggaccaaaucuuccuguaugcucaaucaucaggaagaaucacaguaucuaccaaaagaagccaacaagcuguaaucccaaauaucggaucuagacccagaauaagggauaucccuagcagaauaagcaucuauuggacaauaguaaaaccgggggacauacuuuugauuaacagcacagggaaucuaauugcuccuagggguuacuucaaaauacgaagugggaaaagcucaauaaugagaucagauguacccauuggcaaaugcaagucugaaugcaucacuccaaauggaagcauucccaaugacaaaccauuccaaaauguaaacaggaucacauacggggccugucccagauauguuaagcauagcacucugaaauuggcaacaggaaugcgaaauguaccagagaaacaaacuagaggcauauuuggcgcaauagcggguuucauagaaaaugguugggagggaaugguggaugguugguacgguuucaggcaucaaaauucugagggaagaggacaagcagcagaucucaaaagcacucaagcagcaaucgaucaaaucaaugggaagcugaaucgauugaucgggaaaaccaacgagaaauuccaucagauugaaaaagaauucucagaaguagaaggaagaauucaggaccuugagaaauauguugaggacacuaaaauagaucucuggucauacaacgcggagcuucuuguugcccuggagaaccaacauacaauugaucuaacugacucagaaaugaacaaacuguuugaaaaaacaaagaagcaacugagggaaaaugcugaggauaugggaaaugguuguuucaaaauauaccacaaaugugacaaugccugcauaggaucaauaagaaauggaacuuaugaccacaauguguacagggaugaagcauuaaacaaccgguuccagaucaaaggaguugagcugaagucaggguacaaagauuggauccuauggauuuccuuugccauaucauguuuuuugcuuuguguugcuuuguugggguucaucaugugggccugccaaaagggcaacauuaggugcaacauuugcauuuga

SEQ ID NO: 45174 - RNA, 1701 nt, Artificial Sequence
  derived and/or modified CDS sequence (wt) from hemagglutinin__InfluenzaA__ALE31623
augaagacuaucauugcuuugagcuacauucuaugucugguuuucgcucaaaaaauuccuggaaaugacaauagcacggcaacgcugugccuugggcaccaugcaguaccaaacggaacgauagugaaaacaaucacaaaugaccgaauugaaguuacuaaugcuacugagcugguucagaauuccucaauaggugaaauaugcgacaguccucaucagauccuugauggagaaaacugcacacuaauagaugcucuauugggagacccucagugugauggcuuucaaaauaagaaaugggaccuuuuuguugaacgaagcaaagccuacagcaacuguuacccuuaugaugugccggauuaugccucccuuaggucacuaguugccucauccggcacacuggaguuuaacaaugaaagcuucaauuggacuggagucacucaaaacggaacaaguucugcuugcauaaggagaucuaguaguaguuucuuuaguagauuaaauugguugacccacuuaaacuacacauacccagcauugaacgugacuaugccaaacaaugaacaauuugacaaauuguacauuugggggguucaccacccggguacggacaaggaccaaaucuuccuguaugcucaaucaucaggaagaaucacaguaucuaccaaaagaagccaacaagcuguaaucccaaauaucggaucuagacccagaauaagggauaucccuagcagaauaagcaucuauuggacaauaguaaaaccgggggacauacuuuugauuaacagcacagggaaucuaauugcuccuagggguuacuucaaaauacgaagugggaaaagcucaauaaugagaucagaugcacccauuggcaaaugcaagucugaaugcaucacuccaaauggaagcauucccaaugacaaaccauuccaaaauguaaacaggaucacauacggggccugucccagauauguuaagcauagcacucugaaauuggcaacaggaaugcgaaauguaccagagaaacaaacuagaggcauauuuggcgcaauagcggguuucauagaaaaugguugggagggaaugguggaugguugguacgguuucaggcaucaaaauucugagggaagaggacaagcagcagaucucaaaagcacucaagcagcaaucgaucaaaucaaugggaagcugaaucgauugaucgggaaaaccaacgagaaauuccaucagauugaaaaagaauucucagaaguagaaggaagaauucaggaccuugagaaauauguugaggacacuaaaauagaucucuggucauacaacgcggagcuucuuguugcccuggagaaccaacauacaauugaucuaacugacucagaaaugaacaagcuguuugaaaaaacaaagaagcaacugagggaaaaugcugaggauaugggaaaugguuguuucaaaauauaccacaaaugugacaaugccugcauaggaucaauaagaaauggaacuuaugaccacaauguguacagggaugaagcauuaaacaaccgguuccagaucaaaggaguugagcugaagucaggguacaaagauuggauccuauggauuuccuuugccauaucauguuuuuugcuuuguguugcuuuguugggguucaucaugugggccugccaaaagggcaacauuaggugcaacauuugcauuuga

SEQ ID NO: 45175 - RNA, 1701 nt, Artificial Sequence
  derived and/or modified CDS sequence (wt) from hemagglutinin__InfluenzaA__ALE31625
augaagacuaucauugcuuugagcuacauucuaugucugguuuucgcucaaaaaauuccuggaaaugacaauagcacggcaacgcugugccuugggcaccaugcaguaccaaacggaacgauagugaaaacaaucacaaaugaccgaauugaaguuacuaaugcuacugagcugguucagaauuccucaauaggugaaauaugcgacaguccucaucagauccuugauggagaaaacugcacacuaauagaugcucuauugggagacccucagugugauggcuuucaaaauaagaaaugggaccuuuuuguugaacgaagcaaagccuacagcaacuguuacccuuaugaugugccggauuaugccucccuuaggucacuaguugccucauccggcacacuggaguuuaacaaugaaagcuucaauuggacuggagucacucaaaacggaacaaguucugcuugcauaaggagaucuaguaguaguuucuuuagcagauuaaauugguugacccacuuaaacuacacauacccagcauugaacgugacuaugccaaacaaugaacaauuugacaaauuguacauuugggggguucaccacccggguacggacaaggaccaaaucuuccuguaugcucaaucaucaggaagaaucacaguaucuaccaaaagaagccaacaagcuguaaucccaaauaucggaucuagacccagaauaagggauaucccuagcagaauaagcaucuauuggacaauaguaaaaccgggagacauacuuuugauuaacagcacagggaaucuaauugcuccuagggguuacuucaaaauacgaagugggaaaagcucaauaaugagaucagaugcacccauuggcaaaugcaagucugaaugcaucacuccaaauggaagcauucccaaugacaaaccauuccaaaauguaaacaggaucacauacggggccugucccagauauguuaagcauagcacucugaaauuggcaacaggaaugcgaaauguaccagagaaacaaacuagaggcauauuuggcgcaauagcggguuucauagaaaaugguugggagggaaugguggaugguugguacgguuucaggcaucaaaauucugagggaagaggacaagcagcagaucucaaaagcacucaagcagcaauugaucaaaucaaugggaagcugaaucgauugaucgggaaaaccaacgagaaauuccaucagauugaaaaagaauucucagaaguagaaggaagaauucaggaccuugagaaauauguugaggacacuaaaauagaucucuggucauacaacgcggagcuucuuguugcccuggagaaccaacauacaauugaucuaacugacucagaaaugaacaaacuguuugaaaaaacaaagaagcaacugagggaaaaugcugaggauaugggaaaugguuguuucaaaauauaccacaaaugugacaaugccugcauaggaucaauaagaaauggaacuuaugaccacaauguguacagggaugaagcauuaaacaaccgguuccagaucaagggaguugagcugaagucaggguacaaagauuggauccuauggauuuccuuugccauaucauguuuuuugcuuuguguugcuuuguugggguucaucaugugggccugccaaaagggcaacauuaggugcaacauuugcauuuga

SEQ ID NO: 45176 - RNA, 1701 nt, Artificial Sequence
  derived and/or modified CDS sequence (wt) from hemagglutinin__InfluenzaA__ALE31626
augaagaccaucauugcuuugagcuacauucuaugucugguuuucgcucaaaaaauuccuggaaaugacaauagcacggcaacgcugugccuugggcaccaugcaguaccaaacggaacgauagugaaaacaaucacaaaugaccgaauugaaguuacuaaugcuacugagcugguucagaauuccucaauaggugaaauaugcgacaguccucaucagauccuugauggagaaaacugcacacuaauagaugcucuauugggagacccucagugugauggcuuucaaaauaaaaaaugggaccuuuuuguugaacgaagcaaagccuacagcaacuguuacccuuaugaugugccggauuaugccucccuuaggucacuaguugccucauccggcacacuggaguuuaacaaugaaagcuucaauuggacuggagucacucaaaacggaacaaguucugcuugcauaaggagaucuaguaguaguuucuuuaguagauuaaauugguugacccacuugaacuacacauacccagcauugaacgugacuaugccaaacaaugaacaauuugacaaauuguacauuugggggguucaccacccggguacggacaaggaccaaaucuuccuguaugcucaaucaucaggaagaaucacaguaucuaccaaaagaagccaacaagcuguaaucccaaauaucggaucuagacccagaauaagggauaucccuagcagaauaagcaucuauuggacaauaguaaaaccgggagacauacuuuugauuaacagcacagggaaccuaauugcuccuagggguuacuucaaaauacgaagugggaaaagcucaauaaugagaucagaugcacccauuggcaaaugcaagucugaaugcaucacuccaaauggaagcauucccaaugacaaaccauuccaaaauguaaacaggaucacauacggggccugucccagauauguuaagcauagcacucugaaauuggcaacaggaaugcgaaauguaccagagaaacaaacuagaggcauauuuggcgcaauagcggguuucauagaaaaugguugggagggaaugguggaugguugguacgguuucaggcaucaaaauucugagggaagaggacaagcagcagaucucaaaagcacucaagcagcaaucgaucaaaucaaugggaagcugaaucgauugaucgggaaaaccaacgagaaauuccaucagauugaaaaagaauucucagaaguagaaggaagaauucaggaccuugagaaauauguugaggacacuaaaauagaucucuggucauacaacgcggagcuucuuguugcccuggagaaccaacauacaauugaucuaacugacucagaaaugaacaaacuguuugaaaaaacaaagaagcaacugagggaaaaugcugaggauaugggaaaugguuguuucaaaauauaccacaaaugugacaaugccugcauaggaucaauaagaaauggaacuuaugaccacaauguguacagggaugaagcauuaaacaaccgguuccagaucaagggaguugagcugaagucaggguacaaagauuggauccuauggauuuccuuugccauaucauguuuuuugcuuuguguugcuuuguugggguucaucaugugggccugccaaaagggcaacauuaggugcaacauuugcauuuga

SEQ ID NO: 45177 - RNA, 1701 nt, Artificial Sequence
  derived and/or modified CDS sequence (wt) from hemagglutinin__InfluenzaA__ALE31627
augaagacuaucauugcuuugagcuacauucuaugucugguuuucgcucaaaaaauuccuggaaaugacaauagcacggcaacgcugugccuugggcaccaugcaguaccaaacggaacgauagugaaaacaaucacaaaugaccgaauugaaguuacuaaugcuacugagcugguucagaauuccucaauaggugaaauaugcgacaguccucaccagauccuugauggagaaaacugcacacuaauagaugcucuauugggagacccucagugugauggcuuucaaaauaagaaaugggaccuuuuuguugaacgaagcaaagccuacagcaacuguuacccuuaugaugugccggauuaugccucccuuaggucacuaguugccucauccggcacacuggaguuuaacaaugaaagcuucaauuggacuggagucacucaaaacggaacaaguucugcuugcauaaggagaucuaguaguaguuucuuuaguagauuaaauugguugacccacuuaaacuacacauacccagcauugaacgugacuaugccaaacaaugaacaauuugacaaauuguacauuugggggguucaccacccggguacggacaaggaccaaaucuuccuguaugcucaaucaucaggaagaaucacaguaucuaccaaaagaagccaacaagcuguaaucccaaauaucggaucuagacccagaauaagggauaucccuagcagaauaagcaucuauuggacaauaguaaaaccgggagacauacuuuugauuaacagcacagggaaucuaauugcuccuagggguuacuucaaaauacgaagugggaaaagcucaauaaugagaucagaugcacccauuggcaaaugcaagucugaaugcaucacuccaaauggaagcauucccaaugacaaaccauuccaaaauguaaacaggaucacauacggggccugucccagauauguuaagcauagcacucugaaauuggcaacaggaaugcgaaauguaccagagaaacaaacuagaggcauauuuggcgcaauagcggguuucauagaaaaugguugggagggaaugguggaugguugguacgguuucaggcaucaaaauucugagggaagaggacaagcagcagaucucaaaagcacucaagcagcaaucgaucaaaucaauggaaagcugaaucgauugaucgggaaaaccaacgagaaauuccaucagauugaaaaagaauucucagaaguagaaggaagaauucaggaccuugagaaauauguugaggacacuaaaauagaucucuggucauacaacgcggagcuucuuguugcccuggagaaccaacauacaauugaucuaacugacucagaaaugaacaaacuguuugaaaaaacaaagaagcaacugagggaaaaugcugaggauaugggaaaugguuguuucaaaauauaccacaaaugugacaaugccugcauaggaucaauaagaaauggaacuuaugaccacaauguguacagggaugaagcauuaaacaaccgguuccagaucaagggaguugagcugaagucaggguacaaagauuggauccuauggauuuccuuugccauaucauguuuuuugcuuuguguugcuuuguugggguucaucaugugggccugccaaaagggcaacauuaggugcaacauuugcauuuga

SEQ ID NO: 45178 - RNA, 1701 nt, Artificial Sequence; identical to SEQ ID NO: 45028
  derived and/or modified CDS sequence (wt) from hemagglutinin__InfluenzaA__ALE31628

SEQ ID NO: 45179 - RNA, 1701 nt, Artificial Sequence; identical to SEQ ID NO: 45115
  derived and/or modified CDS sequence (wt) from hemagglutinin__InfluenzaA__ALE31629

SEQ ID NO: 45180 - RNA, 1701 nt, Artificial Sequence; identical to SEQ ID NO: 45076
  derived and/or modified CDS sequence (wt) from hemagglutinin__InfluenzaA__ALE31632

SEQ ID NO: 45181 - RNA, 1701 nt, Artificial Sequence
  derived and/or modified CDS sequence (wt) from hemagglutinin__InfluenzaA__ALE31634
augaagacuaucauugcuuugagcuacauucuaugucugguucucgcucaaaaaauuccuggaaaugacaauagcacggcaacgcugugccuugggcaccaugcaguaccaaacggaacgauagugaaaacaaucacaaaugaccgaauugaaguuacuaaugcuacugaguugguucagaauuccucaauaggugaaauaugcgacaguccucaucagauccuugauggagaaaacugcacacuaauagaugcucuauugggagacccucagugugauggcuuucaaaauaagaaaugggaccuuuuuguugaacgaagcaaagccuacagcaacuguuacccuuaugaugugccggauuaugccucccuuaggucacuaguugccucauccggcacacuggaguuuaacaaugaaagcuucaauuggacuggagucacucaaaacggaacaaguucugcuugcauaaggagaucuaguaguaguuucuuuaguagauuaaauugguugacccacuuaaacuacacauacccagcauugaacgugacuaugccaaacaaugaacaauuugacaaauuguacauuugggggguucaccacccggguacggacaaggaccaaaucuuccuguaugcucaaucaucaggaagaaucacaguaucuaccaaaagaagccaacaagcuguaaucccaaauaucggaucuagacccagaauaagggauaucccuagcagaauaagcaucuauuggacaauaguaaaaccgggagacauacuuuugauuaacagcacagggaaucuaauugcuccuagggguuacuucaaaauacgaagugggaaaagcucaauaaugagaucagaugcacccauuggcaaaugcaagucugaaugcaucacuccaaauggaagcauucccaaugacaaaccauuccaaaauguaaacaggaucacauacggggccugucccagauauguuaagcauagcacucugaaauuggcaacaggaaugcgaaauguaccagagaaacaaacuagaggcauauuuggcgcaauagcggguuucauagaaaaugguugggagggaaugguggaugguugguacgguuucaggcaucaaaauucugagggaagaggacaagcagcagaucucaaaagcacucaagcagcaaucgaucaaaucaaugggaagcugaaucgguugaucgggaaaaccaacgagaaauuccaucagauugaaaaagaauucucagaaguagaaggaagaauucaggaccuugagaaauauguugaggacacuaaaauagaucucuggucauauaacgcggagcuucuuguugcccuggagaaccaacauacaauugaucuaacugacucagaaaugaacaaacuguuugaaaaaacaaagaagcaacugagggaaaaugcugaggauaugggaaaugguuguuucaaaauauaccacaaaugugacaaugccugcauaggaucaauaagaaauggaacuuaugaccacaauguguacagggaugaagcauuaaacaaccgguuccagaucaaggggguugagcugaagucaggguacaaagauuggauccuauggauuuccuuugccauaucauguuuuuugcuuuguguugcuuuguugggguucaucaugugggccugccaaaagggcaacauuaggugcaacauuugcauuuga

SEQ ID NO: 45182 - RNA, 1701 nt, Artificial Sequence; identical to SEQ ID NO: 45028
  derived and/or modified CDS sequence (wt) from hemagglutinin__InfluenzaA__ALE31635

SEQ ID NO: 45183 - RNA, 1701 nt, Artificial Sequence; identical to SEQ ID NO: 45028
  derived and/or modified CDS sequence (wt) from hemagglutinin__InfluenzaA__ALE31636

SEQ ID NO: 45184 - RNA, 1701 nt, Artificial Sequence
  derived and/or modified CDS sequence (wt) from hemagglutinin__InfluenzaA__ALE31638
augaagacuaucauugcuuugagcuacauucuaugucugguuuucgcucaaaaaauuccuggaaaugacaauagcacggcaacgcugugccuugggcaccaugcaguaccaaacggaacgauagugaaaacaaucacaaaugaccgaauugaaguuacuaaugcuacugagcugguucagaauuccucaauaggugaaauaugcgacaguccucaucagauccuugauggagaaaacugcacacuaauagaugcucuauugggagacccucagugugauggcuuucaaaauaagaaaugggaccuuuuuguugaacgaagcaaagccuacagcaacuguuacccuuaugaugugccggauuaugccucccuuaggucacuaguugccucauccggcacacuggaguuuaacaaugaaagcuucaauuggacuggagucacucaaaacggaacaaguucugcuugcauaaggagaucuaguaguaguuucuuuaguagauuaaauugguugacccacuuaaacuacacauacccagcauugaacgugacuaugccaaacaaugagcaauuugacaaauuguacauuugggggguucaccacccggguacggacaaggaccaaaucuuccuguaugcucaaucaucaggaagaauaacaguaucuaccaaaagaagccaacaagcuguaaucccaaauaucggaucuagacccagaauaagggauaucccuagcagaauaagcaucuauuggacaauaguaaaaccgggagacauacuuuugauuaacagcacagggaaucuaauugcuccuagggguuacuucaaaauacgaagugggaaaagcucaauaaugagaucagaugcacccauuggcaaaugcaagucugagugcaucacuccaaauggaagcauucccaauggcaaaccauuccaaaauguaaacaggaucacauacggggccugucccagauauguuaagcauagcacucugaaauuggcaacaggaaugcgaaauguaccagagaaacaaacuagaggcauauuuggcgcaauagcggguuucauagaaaaugguugggagggaaugguggaugguugguacgguuucaggcaucaaaauucugagggaagaggacaagcagcagaucucaaaagcacucaagcagcaaucgaucaaaucaaugggaagcugaaucgauugaucgggaaaaccaacgagaaauuccaucagauugaaaaagaauucucagaaguagaaggaagaauucaggaccuugagaaauauguugaggacacuaaaauagaucucuggucauacaacgcggagcuucuuguugcccuggagaaccaacauacaauugaucuaacugacucagaaaugaacaaacuauuugaaaaaacaaagaagcaacugagggaaaaugcugaggauaugggaaaugguuguuucaaaauauaccacaaaugugacaaugccugcauaggaucaauaagaaauggaacuuaugaccacaauguguacagggaugaagcauuaaacaaccgguuccagaucaagggaguugagcugaagucaggguacaaagauuggauccuauggauuuccuuugccauaucauguuuuuugcuuuguguugcuuuguugggguucaucaugugggccugccaaaagggcaacauuaggugcaacauuugcauuuga

SEQ ID NO: 45185 - RNA, 1701 nt, Artificial Sequence
  derived and/or modified CDS sequence (wt) from hemagglutinin__InfluenzaA__ALE31639
augaagacuaucauugccuugagcuacauucuaugucugguuuucgcucaaaaaauuccuggaaaugacaauagcacggcaacgcugugccuugggcaccaugcaguaccaaacggaacgauagugaaaacaaucacaaaugaccgaauugaaguuacuaaugcuacugagcugguucagaauuccucaauaggugaaauaugcgacaguccucaucagauccuugauggagaaaacugcacacuaauagaugcucuauugggagauccucagugugauggcuuucaaaauaagaaaugggaccuuuuuguugaacgaagcaaagccuacagcaacuguuacccuuaugaugugccggauuaugccucccuuaggucacuaguugccucauccggcacacuggaguuuaacaaugaaagcuucaauuggacuggagucacucaaaacggaacaaguucugcuugcauaaggagaucuaguaguaguuucuuuaguagauuaaauugguugacccacuuaaacuacacauacccagcauugaacgugacuaugccaaacaaugaacaauuugacaaauuguacauuugggggguucaccacccggguacggacaaggaccaaaucuuccuguaugcucaaucaucaggaagaaucacaguaucuaccaaaagaagccaacaagcuguaaucccaaauaucggaucuagacccagaauaagggauaucccuagcagaauaagcaucuauuggacaauaguaaaaccgggagacauacuuuugauuaacagcacagggaaucuaauugcuccuagggguuacuucaaaauacgaagugggaaaagcucaauaaugagaucagaugcacccauuggcaaaugcaagucugaaugcaucacuccaaauggaagcauucccaaugacaaaccauuccaaaauguaaacaggaucacauacggggccugucccagauauguuaagcauagcacucugaaauuggcaacaggaaugcgaaauguaccagagaaacaaacuagaggcauauuuggcgcaauagcggguuucauagaaaaugguugggagggaaugguggaugguugguacgguuucaggcaucaaaauucugagggaagaggacaagcagcagaucucaaaagcacucaagcagcaaucgaucaaaucaaugggaagcugaaucgauugaucgggaaaaccaacgagaaauuccaucagauugaaaaagaauucucagaaguagaaggaagaauucaggaccuugagaaauauguugaggacacuaaaauagaucucuggucauacaacgcggagcuucuuguugcccuggagaaccaacauacaauugaucuaacugacucagaaaugaacaaacuguuugaaaaaacaaagaagcaacugagggaaaaugcugaggauaugggaaaugguuguuucaaaauauaccacaaaugugacaaugccugcauaggaucaauaagaaauggaacuuaugaccacaauguguacagggaugaagcauuaaacaaccgguuccagaucaagggaguugagcugaagucaggguacaaagauuggauccuauggauuuccuuugccauaucauguuuuuugcuuuguguugcuuuguugggguucaucaugugggccugccaaaagggcaacauuaggugcaacauuugcauuuga

SEQ ID NO: 45186 - RNA, 1701 nt, Artificial Sequence; identical to SEQ ID NO: 45004
  derived and/or modified CDS sequence (wt) from hemagglutinin__InfluenzaA__ALE31640

SEQ ID NO: 45187 - RNA, 1701 nt, Artificial Sequence; identical to SEQ ID NO: 45018
  derived and/or modified CDS sequence (wt) from hemagglutinin__InfluenzaA__ALE31641

SEQ ID NO: 45188 - RNA, 1701 nt, Artificial Sequence; identical to SEQ ID NO: 45018
  derived and/or modified CDS sequence (wt) from hemagglutinin__InfluenzaA__ALE31642

SEQ ID NO: 45189 - RNA, 1701 nt, Artificial Sequence
  derived and/or modified CDS sequence (wt) from hemagglutinin__InfluenzaA__ALE31643
augaagacuaucauugcuuugagcuacauucuaugucugguuuucgcucaaaagcuuccugaaaaugacaauagcacggcaacgcugugccuugggcaccaugcaguaccaaacggaacgauagugaaaacaaucacgagugaccgaauugaaguuacuaaugcuacugagcugguucagaauuccucaauaggugaaauaugcgacaguccucaucagauccuugauggaaaaaacugcacacuaauagaugcucuauugggagacccucagugugauggcuuucaaaauaagaaaugggaccuuuuuguugaacgaagcacagccuacagcaacuguuacccuuaugaugugccggauuaugccucccuuaggucacuaguugccucauccgguacacuggaguuuaacgaugaaagcuucaauugggcuggagucacucaaaacggaacaaguucugcuugcauaaggggaucuaauaguaguuucuuuaguagauuaaauugguugacccacucaaacuucaaauacccagcauugaacgugacuaugccaaacaaugaacaauuugacaaauuguacauuugggggguucaccacccggguacggacaaggaccaaaucuuccuguaugcucaaucaucagggagaaucacaguauccaccaaaagaagccaacaagcuguaaucccgaauaucggaucuagacccagaauaaggaauaucccuagcagaauaagcaucuauuggacaauaguaaaaccgggagacauacuuuugauuaacagcacagggaaucuaauugcuccuagggguuacuucaaaauacgaagugggaaaagcucaauaaugagaucagaugcacccauuggcaaaugcaagucugaaugcaucacuccaaauggaagcauucccaaugacaaaccauuccaaaauguaaacaggaucacauacggggccugucccagauauguuaagcaaagcacucugaaauuggcaacaggaaugcgaaauguaccagagaaacaaacuagaggcauauuuggcgcaauagcggguuucauagaaaaugguugggagggaaugaaggaugguugguacgguuucaggcaucaaaauucugagggaagaggacaagcagcagaucucaaaagcacucaagcagcaaucgaucaaaucaaugggaagcugaaucgauugaucgggaaaaccaacgagaaauuccaucagauugaaaaagaauucucagaaguagaagggagaauucaggaccuugagaaauauguugaggacacaaaaauagaucucuggucauacaacgcggagcuucuuguugcccuggagaaccaacauacaauugaucuaacugacucagaaaugaacaaacuguuugaaaaaacaaagaagcaacugagggaaaaugcugaggauaugggcaaugguuguuucaaaauauaccacaaaugugacaaugccugcauaggaucaaucagaaauggaacuuaugaccacgauguauacagggaugaagcuuuaaacaaccgguuccagaucaagggaguugagcugaagucaggguacaaagauuggauccuauggauuuccuuugccauaucauguuuuuugcuuuguguugcuuuguugggguucaucaugugggccugccaaaagggcaacauuaggugcaacauuugcauuuga

SEQ ID NO: 45190 - RNA, 1701 nt, Artificial Sequence; identical to SEQ ID NO: 45006
  derived and/or modified CDS sequence (wt) from hemagglutinin__InfluenzaA__ALE31644

SEQ ID NO: 45191 - RNA, 1701 nt, Artificial Sequence; identical to SEQ ID NO: 45006
  derived and/or modified CDS sequence (wt) from hemagglutinin__InfluenzaA__ALE31645

SEQ ID NO: 45192 - RNA, 1701 nt, Artificial Sequence; identical to SEQ ID NO: 45006
  derived and/or modified CDS sequence (wt) from hemagglutinin__InfluenzaA__ALE31646

SEQ ID NO: 45193 - RNA, 1701 nt, Artificial Sequence; identical to SEQ ID NO: 45018
  derived and/or modified CDS sequence (wt) from hemagglutinin__InfluenzaA__ALE31647

SEQ ID NO: 45194 - RNA, 1701 nt, Artificial Sequence
  derived and/or modified CDS sequence (wt) from hemagglutinin__InfluenzaA__ALE31648
augaagacuaucauugcuuugagcuacauucuaugucugguuuucgcucaaaaaauuccuggaaaugacaauagcacggcaacgcugugccuugggcaccaugcaguaccaaacggaacgauagugaaaacaaucacaaaugaccgaauugaaguuacuaaugcuacugagcugguucagaauuccucaauaggugaaauaugcgacaguccucaucagauccuugauggagaaaacugcacacuaauagaugcucuauugggagacccucagugugauggcuuucaaaauaagaaaugggaccuuuuuguugaacgaagcaaagccuacagcaacuguuaccccuaugaugugccggauuaugccucccuuaggucacuaguugcuucauccggcacacuggaguuuaacaaugaaagcuucaauuggacuggagucacucaaaacggaacaaguucugcuugcauaaggagaucuaguaguagcuucuuuaguagauuaaauugguugacccacuuaaacuacacauacccagcauugaacgugacuaugccaaacaaugaacaauuugacaaauuguacauuugggggguucaccacccggguacggacaaggaccaaaucuuccuguaugcucaaccaucaggaagaaucacaguaucuaccaaaagaagccaacaagcuguaaucccaaauaucggaucuagacccagaauaagggauaucccuagcagaauaagcaucuauuggacaauaguaaaaccgggagacauacuuuugauuaacagcacagggaaucuaauugcuccuagggguuacuucaaaauacgaaguggaaaaagcucaauaaugagaucagaugcacccauuggcaaaugcaagucugaaugcaucacuccaaauggaagcauucccaaugacaaaccauuccaaaauguaaacaggaucacauacggggccugucccagauauguuaagcauagcacucugaaauuggcaacaggaaugcgaaauguaccagagaaacaaacuagaggcauauuuggcgcaauagcagguuucauagaaaaugguugggagggaaugguggaugguugguacgguuucaggcaucaaaauucugagggaagaggacaagcagcagaucucaaaagcacucaagcagcaaccgaucaaaucaaugggaagcugaaucgauugaucgggaaaaccaacgagaaauuccaucagauugaaaaagaauucucagaaguagaaggaagaauucaggaccuugagaaauauguugaggacacuaaaauagaucucuggucauacaacgcggagcuucuuguugcccuggagaaccaacauacaauugaucuaacugacucagaaaugaacaaacuguuugaaaaaacaaagaagcaacugagggaaaaugcugaggauaugggaaaugguuguuucaaaauauaccacaaaugugacaaugccugcauaggaucaauaagaaauggaacuuaugaccacaauguguacagggaugaagcauuaaacaaccgguuccagaucaagggaguugagcugaagucaggguacaaagauuggauccuauggauuuccuuugccauaucauguuuuuugcuuuguguugcuuuguugggguucaucaugugggccugccaaaagggcaacauuaggugcaacauuugcauuuga

SEQ ID NO: 45195 - RNA, 1701 nt, Artificial Sequence; identical to SEQ ID NO: 45028
  derived and/or modified CDS sequence (wt) from hemagglutinin__InfluenzaA__ALE31649

SEQ ID NO: 45196 - RNA, 1701 nt, Artificial Sequence; identical to SEQ ID NO: 45018
  derived and/or modified CDS sequence (wt) from hemagglutinin__InfluenzaA__ALE31650

SEQ ID NO: 45197 - RNA, 1701 nt, Artificial Sequence
  derived and/or modified CDS sequence (wt) from hemagglutinin__InfluenzaA__ALE31652
augaagacuaucauugccuugagcuacauucuaugucugguuuucgcucaaaaaauuccuggaaaugacaauagcacggcaacgcugugccuugggcaccaugcaguaccaaacggaacgauagugaaaacaaucacaaaugaccgaauugaaguuacuaaugcuacugagcugguucagaauuccucaauaggugaaauaugcgacaguccucaucagauccuugauggagaaaacugcacacuaauagaugcucuauugggagacccucagugugauggcuuucaaaauaagaaaugggaccuuuuuguugaacgaagcaaagccuacagcaacuguuacccuuaugaugugccggauuaugccucccuuaggucacuaguugccucauccggcacacuggaguuuaacaaugaaagcuucaauuggacuggagucacucaaaacggaacaaguucugcuugcauaaggagaucuaguaguaguuucuuuaguagauuaaauugguugacccacuuaaacuacaaauacccagcauugaacgugacuaugccaaacaaugaacaauuugacaaauuguacauuugggggguucaccacccggguacggacaaggaccaaaucucccuguaugcucaaucaucaggaagaaucacaguaucuaccaaaagaagccaacaagcuguaaucccaaauaucggaucuagacccagaauaagggauaucccuagcagaauaagcaucuauuggacaauaguaaaaccgggagacauacuuuugauuaacagcacagggaaucuaauugcuccuagggguuacuucaaaauacgaagugggaaaagcucaauaaugagaucagaugcacccauuggcaaaugcaagucugaaugcaucacuccaaauggaagcauucccaaugacaaaccauuccaaaauguaaacaggaucacauacggggccugucccagauauguuaagcauagcacucugaaauuggcaacaggaaugcgaaauguaccagagaaacaaacuagaggcauauuuggcgcaauagcggguuucauagaaaaugguugggagggaaugguggaugguugguacgguuucaggcaucaaaauucugagggaagaggacaagcagcagaucucaaaagcacucaagcagcaaucgaucaaaucaaugggaagcugaaucgauugaucgggaaaaccaacgagaaauuccaucagauugaaaaagaauucucagaaguagaaggaagaauucaggaccuugagaaauauguugaggacacuaaaauagaucucuggucauacaacgcggagcuucuuguugcccuggagaaccaacauacaauugaucuaacugacucagaaaugaacaaacuguuugaaaaaacaaagaagcaacugagggaaaaugcugaggauaugggaaaugguuguuucaaaauauaccacaaaugugacaaugccugcauaggaucaauaagaaauggaacuuaugaccacaauguguacagggaugaagcauuaaacaaccgguuccagaucaagggaguugagcugaagucaggguacaaagauuggauccuauggauuuccuuugccauaucauguuuuuugcuuuguguugcuuuguugggguucaucaugugggccugccaaaagggcaacauuaggugcaacauuugcauuuga

SEQ ID NO: 45198 - RNA, 1701 nt, Artificial Sequence
  derived and/or modified CDS sequence (wt) from hemagglutinin__InfluenzaA__ALE31653
augaagacuaucauugccuugagcuacauucuaugucugguuuucgcucaaaaaauuccuggaaaugacaauagcacggcaacgcugugccuugggcaccaugcaguaccaaacggaacgauagugaaaacaaucacaaaugaccgaauugaaguuacuaaugcuacugagcugguucagaauuccucaauaggugaaauaugcgacaguccucaucagauccuugauggagaaaacugcacacuaauagaugcucuauugggagacccucagugugauggcuuucaaaauaagaaaugggaccuuuuuguugaacgaagcaaagccuacagcaacuguuacccuuaugaugugccggauuaugccucccuuaggucacuaguugccucauccggcacacuggaguuuaacaaugaaagcuucaauuggacuggagucacucaaaacggaacaaguucugcuugcauaaggagaucuaguaguaguuucuuuaguagauuaaauugguugacccacuuaaacuacaaauacccagcauugaacgugacuaugccaaacaaugaacaauuugacaaauuguacauuugggggguucaccacccggguacggacaaggaccaaaucuuccuguaugcucaaucaucaggaagaaucacaguaucuaccaaaagaagccaacaagcuguaaucccaaauaucggaucuagacccagaauaagggauaucccuagcagaauaagcaucuauuggacaauaguaaaaccgggagacauacuuuugauuaacagcacagggaaucuaauugcuccuagggguuacuucaaaauacgaagugggaaaagcucaauaaugagaucagaugcacccauuggcaaaugcaagucugaaugcaucacuccaaauggaagcauucccaaugacaaaccauuccaaaauguaaacaggaucacauacggggccugucccagauauguuaagcauagcacucugaaauuggcaacaggaaugcgaaauguaccagagaaacaaacuagaggcauauuuggcgcaauagcggguuucauagaaaaugguugggagggaaugguggaugguugguacgguuucaggcaucaaaauucugagggaagaggacaagcagcagaucucaaaagcacucaagcagcaaucgaucaaaucaaugggaagcugaaucgauugaucgggaaaaccaacgagaaauuccaucagauugaaaaagaauucucagaaguagaaggaagaauucaggaccuugagaaauauguugaggacacuaaaauagaucucuggucauacaacgcggagcuucuuguugcccuggagaaccaacauacaauugaucuaacugacucagaaaugaacaaacuguuugaaaaaacaaagaagcaacugagggaaaaugcugaggauaugggaaaugguuguuucaaaauauaccacaaaugugacaaugccugcauaggaucaauaagaaauggaacuuaugaccacaauguguacagggaugaagcauuaaacaaccgguuccagaucaagggaguugagcugaagucaggguacaaagauuggauccuauggauuuccuuugccauaucauguuuuuugcuuuguguugcuuuguugggguucaucaugugggcuugccaaaagggcaacauuaggugcaacauuugcauuuga

SEQ ID NO: 45199 - RNA, 1701 nt, Artificial Sequence
  derived and/or modified CDS sequence (wt) from hemagglutinin__InfluenzaA__ALE31654
augaagacuaucauugcuuugagcuacauucuaugucugguuuucgcucaaaaaauuccuggaaaugacaauagcacggcaacgcugugucuugggcaccaugcaguaccaaacggaacgauagugaaaacaaucacaaaugaccgaauugaaguuacuaaugcuacugagcugguucagaauuccucaauaggugaaauaugcgacaguccucaucagauccuugauggagaaaacugcacacuaauagaugcucuauugggagacccucagugugauggcuuucaaaauaagaaaugggaccuuuuuguugaacgaagcaaagccuacagcaacuguuaccccuaugaugugccggauuaugccucccuuaggucacuaguugccucauccggcacacuggaguuuaacaaugaaagcuucaauuggacuggagucacucaaaacggaacaaguucugcuugcauaaggagaucuaguaguagcuucuuuaguagauuaaauugguugacccacuuaaacuacacauacccagcauugaacgugacuaugccaaacaaugaacaauuugacaaauuguacauuugggggguucaccacccggguacggacaaggaccaaaucuuccuguaugcucaaucaucaggaagaaucacaguaucuaccaaaagaagccaacaagcuguaaucccaaauaucggaucuagacccagaauaagggauaucccuagcagaauaagcaucuauuggacaauaguaaaaccgggagacauacuuuugauuaacagcacagggaaucuaauugcuccuagggguuacuucaaaauacgaaguggaaaaagcucaauaaugagaucagaugcacccauuggcaaaugcaagucugaaugcaucacuccaaauggaagcauucccaaugacaaaccauuccaaaauguaaacaggaucacauacggggccugucccagauauguuaagcauagcacucugaaauuggcaacaggaaugcgaaauguaccagagaaacaaacuagaggcauauuuggcgcaauagcagguuucauagaaaaugguugggagggaaugguggaugguugguacgguuucaggcaucaaaauucugagggaagaggacaagcagcagaucucaaaagcacucaagcagcaaucgaucaaaucaaugggaagcugaaucgauugaucgggaaaaccaacgagaaauuccaucagauugaaaaagaauucucagaaguagaaggaagaauucaggaccuugagaaauauguugaggacacuaaaauagaucucuggucauacaacgcggagcuucuuguugcccuggagaaccaacauacaauugaucuaacugacucagaaaugaacaaacuguuugaaaaaacaaagaagcaacugagggaaaaugcugaggauaugggaaaugguuguuucaaaauauaccacaaaugugacaaugccugcauaggaucaauaagaaauggaacuuaugaccacaauguguacagggaugaagcauuaaacaaccgguuccagaucaagggaguugagcugaagucaggguacaaagauuggauccuauggauuuccuuugccauaucauguuuuuugcuuuguguugcuuuguugggguucaucaugugggccugccaaaagggcaacauuaggugcaacauuugcauuuga

SEQ ID NO: 45200 - RNA, 1701 nt, Artificial Sequence; identical to SEQ ID NO: 45028
  derived and/or modified CDS sequence (wt) from hemagglutinin__InfluenzaA__ALE31655

SEQ ID NO: 45201 - RNA, 1701 nt, Artificial Sequence
  derived and/or modified CDS sequence (wt) from hemagglutinin__InfluenzaA__ALE31656
augaagacuaucauugcuuugagcuacauucuaugucugguuuucgcucaaaaaauuccuggaaaugacaauagcacggcaacgcugugccuugggcaccaugcaguaccaaacggaacgauagugaaaacaaucacaaaugaccgaauugaaguuacuaaugcuacugagcugguucagaauuccucaauaggugaaauaugcgacaguccucaucagauccuugauggagaaaacugcacacuaauagaugcucuauugggagacccucagugugauggcuuucaaaauaagaaaugggacauuuuuguugaacgaagcaaagccuacagcaacuguuacccuuaugaugugccggauuaugccucccuuaggucacuaguugccucauccggcacacuggaguuuaacaaugaaagcuucaauuggacuggagucacucaaaacggaacaaguucugcuugcauaaggagaucuaguaguaguuucuuuaguagauuaaauugguugacccacuuaaacuacacauacccagcauugaacgugacuaugccaaacaaugaacaauuugacaaauuguacauuugggggguucaccacccggguacggacaaggaccaaaucuuccuguaugcucaaucaucaggaagaaucacaguaucuaccaaaagaagccaacaagcuguaaucccaaauaucggaucuagacccagaauaagggauaucccuagcagaauaagcaucuauuggacaauaguaaaaccgggagacauacuuuugauuaacagcacagggaaucuaauugcuccuagggguuacuucaaaauacgaagugggaaaagcucaauaaugagaucagaugcacccauuggcaaaugcaagucugaaugcaucacuccaaauggaagcauucccaaugacaaaccauuccaaaauguaaacaggaucacauacggggccugucccagauauguuaagcauagcacucugaaauuggcaacaggaaugcgaaauguaccagagaaacaaacuagaggcauauuuggcgcaauagcggguuucauagaaaaugguugggagggaaugauggaugguugguacgguuucaggcaucaaaauucugagggaagaggacaagcagcagaucucaaaagcacucaagcagcaaucgaucaaaucaaugggaagcugaaucgauugaucgggaaaaccaacgagaaauuccaucagauugaaaaagaauucucagaaguagaaggaagaauucaggaccuugagaaauauguugaggacacuaaaauagaucucuggucauacaacgcggagcuucuuguugcccuggagaaccaacauacaauugaucuaacugacucagaaaugaacaaacuguuugaaaaaacaaagaagcaacugagggaaaaugcugaggauaugggaaaugguuguuucaaaauauaccacaaaugugacaaugccugcauaggaucaauaagaaauggaacuuaugaccacaauguguacagggaugaagcauuaaacaaccgguuccagaucaagggaguugagcugaagucaggguacaaagauuggauccuauggauuuccuuugccauaucauguuuuuugcuuuguguugcuuuguugggguucaucaugugggccugccaaaagggcaacauuaggugcaacauuugcauuuga

SEQ ID NO: 45202 - RNA, 1701 nt, Artificial Sequence
  derived and/or modified CDS sequence (wt) from hemagglutinin__InfluenzaA__ALE31657
augaagacuaucauugcuuugagcuacauucuaugucugguuuccgcucaaaaaauuccuggaaaugacaauagcacggcaacgcugugccuugggcaccaugcaguaccaaacggaacgauagugaaaacaaucacaaaugaccgaauugaaguuacuaaugcuacugagcugguucagaauuccucaauaggugaaauaugcgacaguccucaucagauccuugauggagaaaacugcacacuaauagaugcucuauugggagacccucagugugauggcuuucaaaauaagaaaugggaccuuuuuguugaacgaagcaaagccuacagcaacuguuacccuuaugaugugccggauuaugccucccuuaggucacuaguugccucauccggcacacuggaguuuaacaaugaaagcuucaauuggacuggagucacucaaaacggaacaaguucugcuugcauaaggagaucuaguaguaguuucuuuaguagauuaaauugguugacccacuuaaacuacacauacccagcauugaacgugacuaugccaaacaaugaacaauuugacaaauuguacauuugggggguucaccacccggguacggacaaggaccaaaucuuccuguaugcucaaucaucaggaagaaucacaguaucuaccaaaagaagccaacaagcuguaaucccaaauaucggaucuagacccagaauaagggauaucccuagcagaauaagcaucuauuggacaauaguaaaaccgggagacauacuuuugauuaacagcacagggaaucuaauugcuccuagggguuacuucaaaauacgaagugggaaaagcucaauaaugagaucagaugcacccauuggcaaaugcaagucugaaugcaucacuccaaauggaagcauucccaaugacaaaccauuccaaaauguaaacaggaucacauacggggccugucccagauauguuaagcauagcacucugaaauuggcaacaggaaugcgaaauguaccagagaaacaaacuagaggcauauuuggcgcaauagcggguuucauagaaaaugguugggagggaaugguggaugguugguacgguuucaggcaucaaaauucugagggaagaggacaagcagcagaucucaaaagcacucaagcagcaaucgaucaaaucaauggaaagcugaaucgauugaucgggaaaaccaacgagaaauuccaucagauugaaaaagaauucucagaaguagaaggaagaauucaggaccuugagaaauauguugaggacacuaaaauagaucucuggucauacaacgcggagcuucuuguugcccuggagaaccaacauacaauugaucuaacugacucagaaaugaacaaacuguuugaaaaaacaaagaagcaacugagggaaaaugcugaggauaugggaaaugguuguuucaaaauauaccacaaaugugacaaugccugcauaggaucaauaagaaauggaacuuaugaccacaauguguacagggaugaagcauuaaacaaccgguuccagaucaagggaguugagcugaagucaggguacaaagauuggauccuauggauuuccuuugccauaucauguuuuuugcuuuguguugcuuuguugggguucaucaugugggccugccaaaagggcaacauuaggugcaacauuugcauuuga

SEQ ID NO: 45203 - RNA, 1701 nt, Artificial Sequence
  derived and/or modified CDS sequence (wt) from hemagglutinin__InfluenzaA__ALE31658
augaagacuaucauugcuuugagcuacauucuaugucugguuuucgcucaaaaaauuccuggaaaugacaauagcacggcaacgcugugccuugggcaccaugcaguaccaaacggaacaauagugaaaacaaucacaaaugaccgaauugaaguuacuaaugcuacugagcugguucagaauuccucaauaggugaaauaugcgacaguccucaucagauccuugauggagaaaacugcacacuaauagaugcucuauugggagacccucagugugauggcuuucaaaauaagaaaugggaccuuuuuguugaacgaagcaaagccuacagcaacuguuacccuuaugaugugccggauuaugccucccuuaggucacuaguugccucauccggcacacuggaguuuaacaaugaaagcuucaauuggacuggagucacucaaaacggaacaaguucugcuugcauaaggagaucuaguaguaguuucuuuaguagauuaaauugguugacccacuuaaacuacacauacccagcauugaacgugacuaugccaaacaaugaacaauuugacaaauuguacauuugggggguucaccacccggguacggacaaggaccaaaucuuccuguaugcucaaucaucaggaagaaucacaguaucuaccaaaagaagccaacaagcuguaaucccaaauaucggaucuagacccagaauaagggauaucccuagcagaauaagcaucuauuggacaauaguaaaaccgggagacauacuuuugauuaacagcacagggaaucuaauugcuccuagggguuacuucaaaauacgaagugggaaaagcucaauaaugagaucagaugcacccauuggcaaaugcaagucugaaugcaucacuccaaauggaagcauucccaaugacaaaccauuccaaaauguaaacaggaucacauacggggccugucccagauauguuaagcauagcacucugaaauuggcaacaggaaugcgaaauguaccagagaaacaaacuagaggcauauuuggcgcaauagcggguuucauagaaaaugguugggagggaaugguggaugguugguacgguuucaggcaucaaaauucugagggaagaggacaagcagcagaucucaaaagcacucaagcagcaaucgaucaaaucaaugggaagcugaaucgauugaucgggaaaaccaacgagaaauuccaucagauugaaaaagaauucucagaaguagaaggaagaauucaggaccuugagaaauauguugaggacacuaaaauagaucucuggucauacaacgcggagcuucuuguugcccuggagaaccaacauacaauugaucuaacugacucagaaaugaacaaacuguuugaaaaaacaaagaagcaacugagggaaaaugcugaggauaugggaaaugguuguuucaaaauauaccacaaaugugacaaugccugcauaggaucaauaagaaauggaacuuaugaccacaauguguacagggaugaagcauuaaacaaccgguuccagaucaagggaguugagcugaagucaggguacaaagauuggauccuauggauuuccuuugccauaucauguuuuuugcuuuguguugcuuuguugggguucaucaugugggccugccaaaagggcaacauuaggugcaacauuugcauuuga

SEQ ID NO: 45204 - RNA, 1701 nt, Artificial Sequence
  derived and/or modified CDS sequence (wt) from hemagglutinin__InfluenzaA__ALE31659
augaagacuaucauugccuugagcuacauucuaugucugguuuucgcucaaaaaauuccuggaaaugacaauagcacggcaacgcugugccuugggcaccaugcaguaccaaacggaacgauagugaaaacaaucacaaaugaccgaauugaaguuacuaaugcuacugagcugguucagaauuccucaauaggugaaauaugcgacaguccucaucagauccuugauggagaaaacugcacacuaauagaugcucuauugggagacccucagugugauggcuuucaaaauaagaaaugggaccuuuuuguugaacgaagcaaagccuacagcaacuguuacccuuaugaugugccggauuaugccucccuuaggucacuaguugccucauccggcacacuggaguuuaacaaugaaagcuucaauuggacuggagucacucaaaacggaacaaguucugcuugcauaaggagaucuaguaguaguuucuuuaguagauuaaauugguugacccacuuaaacuacacauacccagcauugaacgugacuaugccaaacaaugaacaauuugacaaauuguacauuugggggguucaccauccggguacggacaaggaccaaaucuuccuguaugcucgaucaucaggaagaaucacaguaucuaccaaaggaagccaacaagcuguaaucccaaauaucggaucuagacccagaauaagggauaucccuagcagaauaagcaucuauuggacaauaguaaaaccgggagacauacuuuugauuaacagcacagggaaucuaauugcuccuagggguuacuucaaaauacgaagugggaaaagcucaauaaugagaucagaugcacccauuggcaaaugcaagucugaaugcaucacuccaaauggaagcauucccaaugacaaaccauuccaaaauguaaacaggaucacauacggggccugucccagauauguuaagcauagcacucugaaauuggcaacaggaaugcgaaauguaccagagaaacaaacuagaggcauauuuggcgcaauagcggguuucauagaaaaugguugggagggaaugguggaugguugguacgguuucaggcaucaaaauucugagggaagaggacaagcagcagaucucaaaagcacucaagcagcaaucgaucaaaucaaugggaagcugaaucgauugaucgggaaaaccaacgagaaauuccaucagauugaaaaagaauucucagaaguagaaggaagaauucaggaccuugagaaauauguugaggacacuaaaauagaucucuggucauacaacgcggagcuucuuguugcccuggagaaccaacauacaauugaucuaacugacucagaaaugaacaaacuguuugaaaaaacaaagaagcaacugagggaaaaugcugaggauaugggaaaugguuguuucaaaauauaccacaaaugugacaaugccugcauaggaucaauaagaaauggaacuuaugaccacaauguguacagggaugaagcauuaaacaaccgguuccagaucaagggaguugagcugaagucaggguacaaagauuggauccuauggauuuccuuugccauaucauguuuuuugcuuuguguugcuuuguugggguucaucaugugggccugccaaaagggcaacauuaggugcaacauuugcauuuga

SEQ ID NO: 45205 - RNA, 1701 nt, Artificial Sequence
  derived and/or modified CDS sequence (wt) from hemagglutinin__InfluenzaA__ALE31660
augaagacuaucauugccuugagcuacauucuaugucugguuuucgcucaaaaaauuccuggaaaugacaauagcacggcaacgcugugccuugggcaccaugcaguaccaaacggaacgauagugaaaacaaucacaaaugaccgaauugaaguuacuaaugcuacugagcugguucagaauuccucaauaggugaaauaugcgacaguccucaucagauccuugauggagaaaacugcacacuaauagaugcucuauugggagacccucagugugauggcuuucaaaauaagaaaugggaccuuuuuguugaacgaagcaaagccuacagcaacuguuacccuuaugaugugccggauuaugccucccuuaggucacuaguugccucauccggcacacuggaguuuaacaaugaaagcuucaauuggacuggagucacucaaaacggaacaaguucugcuugcauaaggagaucuaguaguaguuucuuuaguagauuaaauugguugacccacuuaaacuacacauacccagcauugaacgugacuaugccaaacaaugaacaauuugacaaauuguacauuugggggguucaccacccggguacggacaaggaccaaaucuuccuguaugcucaaucaucaggaagaaucacaguaucuaccaaaggaagccaacaagcuguaaucccaaauaucggaucuagacccagaauaagggauaucccuagcagaauaagcaucuauuggacaauaguaaaaccgggagacauacuuuugauuaacagcacagggaaucuaauugcuccuagggguuacuucaaaauacgaagugggaaaagcucaauaaugagaucagaugcacccauuggcaaaugcaagucugaaugcaucacuccaaauggaagcauucccaaugacaaaccauuccaaaauguaaacaggaucacauacggggccugucccagauauguuaagcauagcacucugaaauuggcaacaggaaugcgaaauguaccagagaaacaaacuagaggcauauuuggcgcaauagcggguuucauagaaaaugguugggagggaaugguggaugguugguacgguuucaggcaucaaaauucugagggaagagggcaagcagcagaucucaaaagcacucaagcagcaaucgaucaaaucaaugggaagcugaaucgauugaucgggaaaaccaacgagaaauuccaucagauugaaaaagaauucucagaaguagaaggaagaauucaggaccuugagaaauauguugaggacacuaaaauagaucucuggucauacaacgcggagcuucuuguugcccuggagaaccaacauacaauugaucuaacugacucagaaaugaacaaacuguuugaaaaaacaaagaagcaacugagggaaaaugcugaggauaugggaaaugguuguuucaaaauauaccacaaaugugacaaugccugcauaggaucaauaagaaauggaacuuaugaccacaauguguacagggaugaagcauuaaacaaccgguuccagaucaagggaguugagcugaagucaggguacaaagauuggauccuauggauuuccuuugccauaucauguuuuuugcuuuguguugcuuuguugggguucaucaugugggccugccaaaagggcaacauuaggugcaacauuugcauuuga

SEQ ID NO: 45206 - RNA, 1701 nt, Artificial Sequence
  derived and/or modified CDS sequence (wt) from hemagglutinin__InfluenzaA__ALE31661
augaagacuaucauugccuugagcuacauucuaugucugguuuucgcucaaaaaauuccuggaaaugacaauagcacggcaacgcugugccuugggcaccaugcaguaccaaacggaacgauagugaaaacaaucacaaaugaccgaauugaaguuacuaaugcuacugagcugguucagaauuccucaauaggugaaauaugcgacaguccucaucagauccuugauggagaaaacugcacacuaauagaugcucuauugggagacccucagugugauggcuuucagaauaagaaaugggaccuuuuuguugaacgaagcaaagccuacagcaacuguuacccuuaugaugugccggauuaugccucccuuaggucacuaguugccucauccggcacacuggaguuuaacaaugaaagcuucaauuggacuggagucacucaaaacggaacaaguucugcuugcauaaggagaucuaguaguaguuucuuuaguagauuaaauugguugacccacuuaaacuacacauacccagcauugaacgugacuaugccaaacaaugaacaauuugacaaauuguacauuugggggguucaccacccggguacggacaaggaccaaaucuuccuguaugcucaaucaucaggaagaaucacaguaucuaccaaaaaaagccaacaagcuguaaucccaaauaucggaucuagacccagaauaagggauaucccuagcagaauaagcaucuauuggacaauaguaaaaccgggagacauacuuuugauuaacagcacaggaaaucuaauugcuccuagggguuacuucaaaauacgaagugggaaaagcucaauaaugagaucagaugcacccauuggcaaaugcaagucugaaugcaucacuccaaauggaagcauucccaaugacaaaccauuccaaaauguaaacaggaucacauacggggccugucccagauauguuaagcauagcacucugaaauuggcaacaggaaugcgaaauguaccagagaaacaaacuagaggcauauuuggcgcaauagcggguuucauagaaaaugguugggagggaaugguggaugguugguacgguuucaggcaucaaaauucugagggaagaggacaagcagcagaucucaaaagcacucaagcagcaaucgaucaaaucaaugggaagcugaaucgauugaucgggaaaaccaacgagaaauuccaucagauugaaaaagaauucucagaaguagaaggaagaauucaggaccuugagaaauauguugaggacacuaaaauagaucucuggucauacaacgcggagcuucuuguugcccuggagaaccaacauacaauugaucuaacugacucagaaaugaacaaacuguuugaaaaaacaaagaagcaacugagggaaaaugcugaggauaugggaaaugguuguuucaaaauauaccacaaaugugacaaugccugcauaggaucaauaagaaauggaacuuaugaccacaauguguacagggaugaagcauuaaacaaccgguuccagaucaagggaguugagcugaagucaggguacaaagauuggauccuauggauuuccuuugccauaucauguuuuuugcuuuguguugcuuuguugggguucaucaugugggccugccaaaagggcaacauuaggugcaacauuugcauuuga

SEQ ID NO: 45207 - RNA, 1701 nt, Artificial Sequence
  derived and/or modified CDS sequence (wt) from hemagglutinin__InfluenzaA__ALE31662
augaagacuaucauugccuugagcuacauucuaugucugguuuucgcucaaaaaauuccuggaaaugacaauagcacggcaacgcugugccuugggcaccaugcaguaccaaacggaacgauagugaaaacaaucgcaaaugaccgaauugaaguuacuaaugcuacugagcugguucagaauuccucaauaggugaaauaugcgacaguccucaucagauccuugauggagaaaacugcacacuaauagaugcucuauugggagacccucagugugauggcuuucaaaauaagaaaugggaccuuuuuguugaacgaagcaaagccuacagcaacuguuacccuuaugaugugccggauuaugccucccuuaggucacuaguugccucauccggcacacuggaguuuaacaaugaaagcuucaauuggacuggagucacucaaaacggaacaaguucugcuugcauaaggagaucuaguaguaguuucuuuaguagauuaaauugguugacccacuuaaacuacacauacccagcauugaacgugacuaugccaaacaaugaacaauuugacaaauuguacauuugggggguucaccacccggguacggacaaggaccaaaucuuccuguaugcucaaucaucaggaagaaucacaguaucuaccaaaggaagccaacaagcuguaaucccaaauaucggaucuagacccagaauaagggauaucccuagcagaauaagcaucuauuggacaauaguaaaaccgggagacauacuuuugauuaacagcacagggaaucuaauugcuccuagggguuacuucaaaauacgaagugggaaaagcucaauaaugagaucagaugcacccauuggcaaaugcaagucugaaugcaucacuccaaauggaagcauucccaaugacaaaccauuccaaaauguaaacaggaucacauacggggccugucccagauauguuaagcauagcacucugaaauuggcaacaggaaugcgaaauguaccagagaaacaaacuagaggcauauuuggcgcaauagcggguuucauagaaaaugguugggagggaaugguggaugguugguacgguuucaggcaucaaaauucugagggaagaggacaagcagcagaucucaaaagcacucaagcagcaaucgaucaaaucaaugggaagcugaaucgauugaucgggaaaaccaacgagaaauuccaucagauugaaaaagaauucucagaaguagaaggaagaauucaggaccuugagaaauauguugaggacacuaaaauagaucucuggucauacaacgcggagcuucuuguugcccuggagaaccaacauacaauugaucuaacugacucagaaaugaacaaacuguuugaaaaaacaaagaagcaacugagggaaaaugcugaggauaugggaaaugguuguuucaaaauauaccacaaaugugacaaugccugcauaggaucaauaagaaauggaacuuaugaccacaauguguacagggaugaagcauuaaacaaccgguuccagaucaagggaguugagcugaagucaggguacaaagauuggauccuauggauuuccuuugccauaucaugucuuuugcuuuguguugcuuuguugggguucaucaugugggccugccaaaagggcaacauuaggugcaacauuugcauuuga

SEQ ID NO: 45208 - RNA, 1701 nt, Artificial Sequence
  derived and/or modified CDS sequence (wt) from hemagglutinin__InfluenzaA__ALE31663
augaagacuaucauugcuuugagcuacauucuaugucugguuuucgcucaaaaacuuccuggaaaugacaauagcacggcaacgcugugccuugggcaccaugcaguaccaaacggaacgauagugaaaacaaucacgaaugaccgaauugaaguuacuaaugcuacugagcugguucagaauuccucaauaggugaaauaugcgacaguccucaucagauccuugauggagaaaacugcacacuaauagaugcucuauugggagacccucagugugauggcuuucaaaacaagaaaugggaccuuuuuguugaacgaagcaaagccuacagcaacuguuacccuuaugaugugccggauuaugccucccuuaggucacuaguugccucauccggcacacuggaguuuaacaaugaaaguuucaauugggcuggagucacucaaaacggaacaaguucuucuugcauaaggggaucuaauaguaguuucuuuaguagauuaaauugguugacccacuuaaacuccaaauacccagcauuaaacgugacuaugccaaacaaugaacaauuugacaaauuguacauuugggggguucaccacccggguacggacaaggaccaaaucuuccuguaugcacaaucaucaggaagaaucacaguaucuaccaaaagaagccaacaagcuguaaucccgaauaucggaucuagacccagaauaagggauaucccuagcagaauaagcaucuauuggacaauaguaaaaccgggagacauacuuuugauuaacagcacagggaaucuaauugcuccuagggguuacuucaaaauacgaagugggaaaagcucaauaaugagaucagaugcacccauuggcaaaugcaagucugaaugcaucacuccaaauggaagcauucccaaugacaaaccauuccaaaauguaaacaggaucacauacggggccugucccagauauguuaagcaaagcacucugaaauuggcaacaggaaugcgaaauguaccagagagacaaacuagaggcauauuuggcgcaauagcggguuucauagaaaaugguugggagggaaugguggaugguugguacggcuucaggcaucaaaauucugagggaagaggacaagcggcagaucucaaaagcacucaagcagcaaucgaucaaaucaaugggaagcugaaucgauugaucgggaaaaccaacgagaaauuccaucagauugaaaaggaauucucagaaguagaagggagaauucaggaccuugagaaauauguugaggacacaaaaauagaucucuggucauacaacgcggagcuucuuguugcccuggagaaccaacacacaauugaucuaacugacucagaaaugaacaaacuguuugaaaaaacaaagaagcaacugagggagaaugcugaggauaugggcaaugguuguuucaaaauauaccacaaaugugacaaugccugcauaggaucaaucagaaauggaacuuaugaccacgauguauacagggaugaagcauuaaacaaccgguuccagaucaagggaguugagcugaagucaggguacaaagauuggauccuauggauuuccuuugccauaucauguuuuuugcuuuguguugcuuuguugggguucaucaugugggccugccaaaagggcaacauuaggugcaacauuugcauuuga

SEQ ID NO: 45209 - RNA, 1701 nt, Artificial Sequence
  derived and/or modified CDS sequence (wt) from hemagglutinin__InfluenzaA__ALE31666
augaagacuaucauugcuuugagcuacauucuaugucugguuuucgcucaaaaaauuccuggaaaugacaauagcacggcaacgcugugccuugggcaccaugcaguaccaaacggaacgauagugaaaacaaucacaaaugaccgaauugaaguuacuaaugcuacugagcugguucagaauuccucaauaggugaaauaugcgacaguccucaucagauccuugauggagaaaacugcacacuaauagaugcucuauugggagacccucagugugauggcuuucaaaauaagaaaugggaccuuuuuguugaacgaagcaaagccuacagcaacuguuacccuuaugaugugccggauuaugccucccuuaggucacuaguugccucauccggcacacuggaguuuaacaaugaaagcuucaauuggacuggagucacucaaaacggaacaaguucugcuugcauaaggaaaucuaguaguaguuucuuuaguagauuaaauugguugacccacuuaaaauacacauacccagcauugaacgugacuaugccaaacaaugaacaauuugacaaauuguacauuugggggguucaccacccggguacggacaaggaccaaaucuuccuguaugcucgaucaucaggaagaaucacaguaucuaccaaaagaagccaacaagcuguaaucccaaauaucggaucuagacccagaauaagggauaucccuagcagaauaagcaucuauuggacaauaguaaaaccgggagacauacuuuugauuaacagcacagggaaucuaauugcuccuagggguuacuucaaaauacgaagugggaaaagcucaauaaugagaucagaugcacccauuggcaaaugcaagucugaaugcaucacuccaaauggaagcauucccaaugacaaaccauuccaaaauguaaacaggaucacauacggggccugucccagauauguuaagcauagcacucugaaauuggcaacaggaaugcgaaauguaccagagaaacaaacuagaggcauauuuggcgcaauagcggguuucauagaaaaugguugggagggaaugguggaugguugguacgguuucaggcaucaaaauucugaggggagaggacaagcagcagaucucaaaagcacucaagcagcaaucgaucaaaucaaugggaagcugaaucgauugaucgggaaaaccaacgagaaauuccaucagauugaaaaagaauucucagaaguagaaggaagaauucaggaccuugagaaauauguugaggacacuaaaauagaucucuggucauacaacgcggagcuucuuguugcccuggagaaucaacauacaauugaucuaacugacucagaaaugaacaaacuguuugaaaaaacaaagaagcaacugagggaaaaugcugaggauaugggaaaugguuguuucaaaauauaccacaaaugugacaaugccugcauaggaucaauaagaaauggaacuuaugaccacaauguguacagggaugaagcauuaaacaaccgguuccagaucaagggaguugagcugaagucaggguacaaagauuggauccuauggauuuccuuugccauaucauguuuuuugcuuuguguugcuuuguugggguucaucaugugggccugccaaaagggcaacauuaggugcaacauuugcauuuga

SEQ ID NO: 45210 - RNA, 1701 nt, Artificial Sequence
  derived and/or modified CDS sequence (wt) from hemagglutinin__InfluenzaA__ALE31667
augaagacuaucauugcuuugagcuacauucuaugucugguuuucgcucaaaaaauuccuggaaaugacaauagcacggcaacgcugugccuugggcaccaugcaguacuaaacggaacgauagugaaaacaaucacaaaugaccgaauugaaguuacuaaugcuacugagcugguucagaauuccucaauaggugaaauaugcgacaguccucaucagauccuugauggagaaaacugcacacuaauagaugcucuauugggagacccucagugugauggcuuucaaaauaagaaaugggaccuuuuuguugaacgaagcaaagccuacagcaacuguuacccuuaugaugugccggauuaugccucccuuaggucacuaguugccucauccggcacacuggaguuuaacaaugaaagcuucaauuggacuggagucacucaaaacggaacaaguucugcuugcauaaggaaaucuaguaguaguuucuuuaguagauuaaauugguugacccacuuaaacuacacauacccagcauugaacgugacuaugccaaacaaugaacaauuugacaaauuguacauuugggggguucaccacccggguacggacaaggaccaaaucuuccuguaugcucgaucaucaggaagaaucacaguaucuaccaaaagaagccaacaagcuguaaucccaaauaucggaucuagacccagaauaagggauaucccuagcagaauaagcaucuauuggacaauaguaaaaccgggagacauacuuuugauuaacagcacagggaaucuaauugcuccuagggguuacuucaaaauacgaagugggaaaagcucaauaaugagaucagaugcacccauuggcaaaugcaagucugaaugcaucacuccaaauggaagcauucccaaugacaaaccauuccaaaauguaaacaggaucacauacggggccugucccagauauguuaagcauagcacucugaaauuggcaacaggaaugcgaaauguaccagagaaacaaacuagaggcauauuuggcgcaauagcggguuucauagaaaaugguugggagggaaugguggaugguugguacgguuucaggcaucaaaauucugagggaagaggacaagcagcagaucucaaaagcacucaagcagcaaucgaucaaaucaaugggaagcugaaucgauugaucgggaaaaccaacgagaaauuccaucagauugaaaaagaauucucagaaguagaaggaagaauucaggaccuugagaaauauguugaggacacuaaaauagaucucuggucauacaacgcggagcuucuuguugcccuggagaaucaacauacaauugaucuaacugacucagaaaugaacaaacuguuugaaaaaacaaagaagcaacugagggaaaaugcugaggauaugggaaaugguuguuucaaaauauaccacaaaugugacaaugccugcauaggaucaauaagaaauggaacuuaugaccacaauguguacagggaugaagcauuaaacaaccgguuccagaucaagggaguugagcugaagucaggguacaaagauuggauccuauggauuuccuuugccauaucauguuuuuugcuuuguguugcuuuguugggguucaucaugugggccugccaaaagggcaacauuaggugcaacauuugcauuuga

SEQ ID NO: 45211 - RNA, 1701 nt, Artificial Sequence
  derived and/or modified CDS sequence (wt) from hemagglutinin__InfluenzaA__ALE31668
augaagacuaucauugcuuugagcuacauucuaugucugguuuucgcucaaaaaauuccuggaaaugacaauagcacggcaacgcugugccuugggcaccaugcaguaccaaacggaacgauagugaaaacaaucacaaacgaccgaauugaaguuacuaaugcuacugaguugguucagaauuccucaauaggugaaauaugcgacaguccucaucagauccuugauggagaaaacugcacacuaauagaugcucuauugggagacccucagugugauggcuuucaaaauaagaaaugggaccuuuuuguugaacgaagcaaagccuacagcaacuguuacccuuaugaugugccggauuaugccucccuuaggucacuaguugccucauccggcacacuggaguuuaacaaugaaagcuucaauuggacuggagucacucaaaacggaacaaguucugcuugcauaaggagaucuaguaguaguuucuuuaguagauuaaauugguugacccacuuaaacuacacauacccagcauugaacgugacuaugccaaacaaugaacaauuugacaaauuguacauuugggggguucaccacccggguacggacaaggaccaaaucuuccuguaugcucaaucaucaggaagaaucacaguaucuaccaaaagaagccaacaagcuguaaucccaaauaucggaucuagacccagaauaagggauaucccuagcagaauaagcaucuauuggacaauaguaaaaccgggagacauacuuuugauuaacagcacagggaaucuaauugcuccuagggguuacuucaaaauacgaagugggaaaagcucaauaaugagaucagaugcacccaucggcaaaugcaagucugaaugcaucacuccaaauggaagcauucccaaugacaaaccauuccaaaauguaaacaggaucacauacggggccugucccagauauguuaagcauagcacucugaaauuggcaacaggaaugcgaaauguaccagagaaacaaacuagaggcauauuuggcgcaauagcggguuucauagaaaaugguugggagggaaugguggaugguugguacgguuucaggcaucaaaacucugagggaagaggacaagcagcagaucucaaaagcacucaagcagcaaucgaucaaaucaaugggaagcugaaucgguugaucgggaaaaccaacgagaaauuccaucagauugaaaaagaauucucagaaguagaaggaagaauucaggaccuugagaaauauguugaggacacuaaaauagaucucuggucauacaacgcggagcuucuuguugcccuggagaaccaacauacaauugaucuaacugacucagaaaugaacaaacuguuugaaaaaacaaagaagcaacugagggaaaaugcugaggauaugggaaaugguuguuucaaaauauaccacaaaugugacaaugccugcauaggaucaauaagaaauggaacuuaugaccacaauguguacagggaugaagcauuaaacaaccgguuccagaucaagggaguugagcugaagucaggguacaaagauuggauccuauggauuuccuuugccauaucauguuuuuugcuuuguguugcuuuguugggguucaucaugugggccugccaaaagggcaacauuaggugcaacauuugcauuuga

SEQ ID NO: 45212 - RNA, 1701 nt, Artificial Sequence
  derived and/or modified CDS sequence (wt) from hemagglutinin__InfluenzaA__ALE31669
augaagacuaucauugcuuugagcuacauucuaugucugguuuucgcucaaaaaauuccuggaaaugacaauagcacggcaacgcugugccuugggcaccaugcaguaccaaacggaacgauagugaaaacaaucacaaaugaccgaauugaaguuacuaaugcuacugagcugguucagaauuccucaauaggugaaauaugcgacaguccucaucagauccuugauggagaaaacugcacacuaauagaugcucuauugggagacccucagugugauggcuuucaaaauaagaaaugggaccuuuuuguugaacgaagcaaagccuacagcaacuguuacccuuaugaugugccggauuaugccucccuuaggucacuaguugccucauccggcacacuggaguuuaacaaugaaagcuucaauuggacuggagucacucaaaacggaacaaguucugcuugcauaaggagaucuaguaguaguuucuuuaguagauuaaauugguugacccacuuaaacuacacauacccagcauugaacgugacuaugccaaacaaugaacaauuugacaaauuguacauuugggggguucaccacccggguacggacaaggaccaaaucuuccuguaugcucaaucaucaggaagaaucacaguaucuaccaaaagaagccaacaagcuguaaucccaaauaucggaucuagacccagaauaagggauaucccuagcagaauaagcaucuauuggacaauaguaaaaccgggggacauacuuuugauuaacagcacagggaaucuaauugcuccuagggguuauuucaaaauacgaagugggaaaagcucaauaaugagaucagaugcacccauuggcaaaugcaagucugaaugcaucacuccaaauggaagcauucccaaugacaaaccauuccaaaauguaaacaggaucacauacggggccugucccagauauguuaagcauagcacucugaaauuggcaacaggaaugcgaaauguaccagagaaacaaacuagaggcauauuuggcgcaauagcggguuucauagaaaaugguugggagggaaugguggaugguugguacgguuucaggcaucaaaauucugagggaagaggacaagcagcagaucucaaaagcacucaagcagcaaucgaucaaaucaaugggaagcugaaucgauugaucgggaaaaccaacgagaaauuccaucagauugaaaaagaauucucagaaguagaaggaagaauucaggaccuugagaaauauguugaggacacuaaaauagaucucuggucauacaacgcggagcuucuuguugcccuggagaaccaacauacaauugaucuaacugacucagaaaugaacaaacuguuugaaaaaacaaagaagcaacugagggaaaaugcugaggauaugggaaaugguuguuucaaaauauaccacaaaugugacaaugccugcauaggaucaauaagaaauggaacuuaugaccacaauguguacagggaugaagcauuaaacaaccgguuccagaucaagggaguugagcugaagucaggguacaaagauuggauccuauggauuuccuuugccauaucauguuuuuugcuuuguguugcuuuguugggguucaucaugugggccugccaaaagggcaacauuaggugcaacauuugcauuuga

SEQ ID NO: 45213 - RNA, 1701 nt, Artificial Sequence
  derived and/or modified CDS sequence (wt) from hemagglutinin__InfluenzaA__ALE31670
augaagacuaucauugcuuugagcuacauucuaugucugguuuucgcucaaaagcuuccugaaaaugacaauagcacggcaacgcugugccuugggcaccaugcaguaccaaacggaacgauagugaaaacaaucacgagugaccgaauugaaguuacuaaugcuacugagcugguucagaauuccucaauaggugaaauaugcgacaguccucaucagauccuugauggaaaaaacugcacacuaauagaugcucuauugggagacccucagugugauggcuuucaaaauaagaaaugggaccuuuuuguugaacgaagcaaagccuacagcaacuguuacccuuaugaugugccggauuaugccucccuuaggucacuaguugccucauccgguacacuggaguuuaacgaugaaagcuucaauugggcuggagucacucaaaacggaacaaguucugcuugcauaagggguucuaauaguaguuucuuuaguagauuaaauugguugacccacucaaacuucaaauacccagcauugaacgugacuaugccaaacaaugaacaauuugacaaauuguacauuugggggguucaccacccggguacggacaaggaccaaaucuuccuguaugcucaaucaucaggaagaaucacaguauccaccaaaagaagccaacaagcuguaaucccgaauaucggaucuagacccagaauaaggaauaucccuagcagaauaagcaucuauuggacaauaguaaaaccgggagacauacuuuugauuaacagcacagggaaucuaauugcuccuagggguuacuucaaaauacgaagugggaaaagcucaauaaugagaucagaugcacccauuggcaaaugcaagucugaaugcaucacuccaaauggaagcauucccaaugacaaaccauuccaaaauguaaacaggaucacauacggggccugucccagauauguuaagcaaagcacucugaaauuggcaacaggaaugcgaaauguaccagagaaacaaacuagaggcauauuuggcgcaauagcggguuucauagaaaaugguugggagggaaugaaggaugguugguacgguuucaggcaucaaaauucugagggaagaggacaagcagcagaucucaaaagcacucaagcugcaaucgaucaaaucaaugggaagcugaaucgauugaucgggaagaccaacgagaaauuccaucagauugaaaaagaauucucagaaguagaagggagaauucaggaccuugagaaauauguugaggacacaaaaauagaucucuggucauacaacgcggagcuucuuguugcccuggagaaccaacauacaauugaucuaacugacucagaaaugaacaaacuguuugaaaaaacaaagaagcaaaugagggaaaaugcugaggauaugggcaaugguuguuucaaaauauaccacaaaugugacaaugccugcauaggaucaaucagaaauggaacuuaugaccacgauguauacagggaugaagcuuuaaacaaccgguuccagaucaagggaguugagcugaagucaggguacaaagauuggauccuauggauuuccuuugccauaucauguuuuuugcuuuguguugcuuuguugggguucaucaugugggccugccaaaagggcaacauuaggugcaacauuugcauuuga

SEQ ID NO: 45214 - RNA, 1701 nt, Artificial Sequence
  derived and/or modified CDS sequence (wt) from hemagglutinin__InfluenzaA__ALE31671
augaagacuaucauugcuuugagcuacauucuaugucugguuuucgcucaaaaaauuccuggaaaugacaauagcacggcaacgcugugccuugggcaccaugcaguaccaaacggaacgauagugaaaacaaucacaaaugaccgaauugaaguuacuaaugcuacugagcugguucagaauuccucaauaggugaaauaugcgacaguccucaucagauccuugauggagaaaacugcacacuaauagaugcucuauugggagacccucagugugauggcuuucaaaauaagaaaugggaccuuuuuguugaacgaagcaaagccuacagcaacuguuacccuuaugaugugccggauuaugccucccuuaggucacuaguugccucauccggcacacuggaguuuaacaaugaaagcuucaauuggacuggagucacucaaaacggaacaaguucugcuugcauaaggagaucuaguaguaguuucuuuaguagauuaaauugguugacccacuuaaacuacacauacccagcauugaacgugacuaugccaaacaaugaacaauuugacaaauuguacauuugggggguucaccacccggguacggacaaggaccaaaucuuccuguaugcucaaucaucaggaagaaucacaguaucuaccaaaagaagccaacaagcuguaaucccaaauaucggaucuagacccagaauaagggauaucccuagcagaauaagcaucuauuggacaauaguaaaaccgggagacauacuuuugauuaacagcacagggaaucuaauugcuccuagggguuauuucaaaauacgaagugggaaaagcucaauaaugagaucagaugcacccauuggcaaaugcaagucugaaugcaucacuccaaauggaagcauucccaaugacaaaccauuccaaaauguaaacaggaucacauacggggccugucccagauauguuaagcauagcacucugaaauuggcaacaggaaugcgaaauguaccagagaaacaaacuagaggcauauuuggcgcaauagcggguuucauagaaaaugguugggagggaaugguggaugguugguacgguuucaggcaucaaaauucugagggaagaggacaagcagcagaucucaaaagcacucaagcagcaaucgaucaaaucaaugggaagcugaaucgauugaucgggaaaaccaacgagaaauuccaucagauugaaaaagaauucucagaaguagaaggaagaauucaggaccuugagaaauauguugaggacacuaaaauagaucucuggucauacaacgcggagcuucuuguugcccuggagaaccaacauacaauugaucuaacugacucagaaaugaacaaacuguuugaaaaaacaaagaagcaacugagggaaaaugcugaggauaugggaaaugguuguuucaaaauauaccacaaaugugacaaugccugcauaggaucaauaagaaauggaacuuaugaccacaauguguacagggaugaagcauuaaacaaccgguuccagaucaagggaguugagcugaagucaggguacaaagauuggauccuauggauuuccuuugccauaucauguuuuuugcuuuguguugcuuuguugggguucaucaugugggccugccaaaagggcaacauuaggugcaacauuugcauuuga

SEQ ID NO: 45215 - RNA, 1701 nt, Artificial Sequence
  derived and/or modified CDS sequence (wt) from hemagglutinin__InfluenzaA__ALE31672
augaagacuaucauugccuugagcuacauucuaugucugguuuucgcucaaaaaauuccuggaaaugacaauagcacggcaacgcugugccuugggcaccaugcaguaccaaacggaacgauagugaaaacaaucacgaaugaccgaauugaaguuacuaaugcuacugagcugguucagaauuccucaauaggugaaauaugcgacaguccucaucagauccuugauggagaaaacugcacacuaauagaugcucuauugggagacccucagugugauggcuuucaaaauaagaaaugggaccuuuuuguugaacgaagcaaagccuacagcaacuguuacccuuaugaugugccggauuaugccucccuuaggucacuaguugccucauccggcacacuggaguuuaacaaugaaagcuucaauuggacuggagucacucaaaacggaacaaguucugcuugcauaaggagaucuaguaguaguuucuuuaguagauuaaauugguugacccacuuaaacuacacauacccagcauugaacgugacuaugccaaacaaugaacaauuugacaaauuguacauuugggggguucaccacccggguacggacaaggaccaaaucuuccuguaugcucaaucaucaggaagaaucacaguaucuaccaaaagaagccaacaagcuguaaucccaaauaucggaucuaggcccagaauaagggauaucccuagcagaauaagcaucuauuggacaauaguaaaaccgggagacauacuuuugauuaacagcacagggaaucuaauugcuccuagggguuacuucaaaauacgaagugggaaaagcucaauaaugagaucagaugcacccauuggcaaaugcaagucugaaugcaucacuccaaauggaagcauucccaaugacaaaccauuccaaaauguaaacaggaucacauacggggccugucccagauauguuaagcauagcacucugaaauuggcaacaggaaugcgaaauguaccagagaaacaaacuagaggcauauuuggcgcaauagcggguuucauagaaaaugguugggagggaaugguggaugguugguacgguuucaggcaucaaaauucugagggaagaggacaagcagcagaucucaaaagcacucaagcagcaaucgaucaaaucaaugggaagcugaaucgauugaucgggaaaaccaacgagaaauuccaucagauugaaaaagaauucucagaaguagaaggaagaauucaggaccuugagaaauauguugaggacacuaaaauagaucucuggucauacaacgcggagcuucuuguugcccuggagaaccaacauacaauugaucuaacugacucagagaugaacaaacuguuugaaaaaacaaagaagcaacugagggaaaaugcugaggauaugggaaaugguuguuucaaaauauaccacaaaugugacaaugccugcauaggaucaauaagaaauggaacuuacgaccacaauguguacagggaugaagcauuaaacaaccgguuccagaucaagggaguugagcugaagucaggguacaaagauuggauccuauggauuuccuuugccauaucauguuuuuugcuuuguguugcuuuguugggguucaucaugugggccugccaaaagggcaacauuaggugcaacauuugcauuuga

SEQ ID NO: 45216 - RNA, 1701 nt, Artificial Sequence
  derived and/or modified CDS sequence (wt) from hemagglutinin__InfluenzaA__ALE31673
augaagacuaucauugcuuugagcuacauucuaugucugguuuucgcucaaaagcuuccugaaaaugacaauagcacggcaacgcugugccuugggcaccaugcaguaccaaacggaacgauagugaaaacaaucacgagugaccgaauugaaguuacuaaugcuacugagcugguucagaauuccucaauaggugaaauaugcgacaguccucaucagauccuugauggaaaaaacugcacacuaauagaugcucuauugggggacccucagugugauggcuuucaaaauaagaaaugggaccuuuuuguugaacgaagcaaagccuacagcaacuguuacccuuaugaugugccggauuaugccucccuuaggucacuaguugccucauccgguacacuggaguuuaacgaugaaagcuucaauugggcuggagucacucaaaacggaacaaguucugcuugcauaaggggaucuaauaguaguuucuuuaguagauuaaauugguugacccacucaaacuucaaauacccagcauugaacgugacuaugccaaacaaugaacaauuugacaaauuguacauuugggggguucaccacccggguacggacaaggaccaaaucuuccuguaugcucaaucaucaggaagaaucacaguauccaccaaaagaagccaacaagcuguaaucccgaauaucggaucuagacccagaauaaggaauaucccuagcagaauaagcaucuauuggacaauaguaaaaccaggagacauacuuuugauuaacagcacagggaaucuaauugcuccuagggguuacuucaaaauacgaagugggaaaagcucaauaaugagaucagaugcacccauuggcaaaugcaagucugaaugcaucacuccaaauggaagcauucccaaugacaaaccauuccaaaauguaaacaggaucacauacggggccugucccagauauguuaagcaaagcacucugaaauuggcaacaggaaugcgaaauguaccagagaaacaaacuagaggcauauuuggcgcaauagcggguuucauagaaaaugguugggagggaaugaaggaugguugguacgguuucaggcaucaaaauucugagggaagaggacaagcagcagaucucaaaagcacucaagcagcaaucgaucaaaucaaugggaagcugaaucgauugaucgggaaaaccaacgagaaauuccaucagauugaaaaagaauucucagaaguagaagggagaauucaggaccuugagaaauauguugaggacacaaaaauagaucucuggucauacaacgcggagcuucuuguugcccuggagaaccaacauacaauugaucuaacugacucagaaaugaacaaacuguuugaaaaaacaaagaagcaacugagggaaaaugcugaggauaugggcaaugguuguuucaaaauauaccacaaaugugacaaugccugcauaggaucaaucagaaauggaacuuaugaccacgauguauacagggaugaagcuuuaaacaaccgguuccagaucaagggaguugagcugaagucaggguacaaagauuggauccuauggauuuccuuugccauaucauguuuuuugcuuuguguugcuuuguugggguucaucaugugggccugccaaaagggcaacauuaggugcaacauuugcauuuga

SEQ ID NO: 45217 - RNA, 1701 nt, Artificial Sequence
  derived and/or modified CDS sequence (wt) from hemagglutinin__InfluenzaA__ALE31674
augaagacuaucauugccuugagcuacauucuaugucugguuuucgcucaaaaaauuccuggaaaugacaauagcacggcaacgcugugccuugggcaccaugcaguaccaaacggaacgauagugaaaacaaucacaaaugaccgaauugaaguuaccaaugcuacugagcugguucagaauuccucaauaggugaaauaugcgacaguccucaucagauccuugauggagaaaacugcacacuaauagaugcucuauugggagacccucagugugauggcuuucaaaauaagaaaugggaccuuuuuguugaacgaagcaaagccuacagcaacuguuacccuuaugaugugccggauuaugccucccuuaggucacuaguugccucauccggcacacuggaguuuaacaaugaaagcuucaauuggacuggagucacucaaaacggaacaaguucugcuugcauaaggagaucuaguaguaguuucuuuaguagauuaaauugguugacccacuuaaacuacacauacccagcauugaacgugacuaugccaaacaaugaacaauuugacaaauuguacauuugggggguucaccacccggguacggacaaggaccaaaucuuccuguaugcucacucaucaggaagaaucacaguaucuaccaaaagaagccaacaagcuguaaucccaaauaucggaucuagacccagaauaagggauaucccuagcagaauaagcaucuauuggacaauaguaaaaccgggagacauacuuuugauuaacagcacagggaaucuaauugcuccuagggguuacuucaaaauacgaagugggaaaagcucaauaaugagaucagaugcacccauuggcaaaugcaagucugaaugcaucacuccaaauggaagcauucccaaugacaaaccauuccaaaauguaaacaggaucacauacggggccugucccagauauguuaagcauagcacucugaaauuggcaacaggaaugcgaaauguaccagagaaacaaacuagaggcauauuuggcgcaauagcggguuucauagaaaaugguugggagggaaugguggaugguugguacgguuucaggcaucaaaauucugagggaagaggacaagcagcagaucucaaaagcacucaagcagcaaucgaucaaaucaaugggaagcugaaucgguugaucgggaaaaccaacgagaaauuccaucagauugaaaaagaauucucagaaguagaaggaagaauucaggaccuugagaaauauguugaggacacuaaaauagaucucuggucauacaacgcggagcuucuuguugcccuggagaaccaacauacaauugaucuaacugacucagaaaugaacaaacuguuugaaaaaacaaagaagcaacugagggaaaaugcugaggauaugggaaaugguuguuucaaaauauaccacaaaugugacaaugccugcauaggaucaauaagaaauggaacuuaugaccacaauguguacagggaugaagcauuaaacaaccgguuccagaucaagggaguugagcugaagucaggguacaaagauuggauccuauggauuuccuuugccauaucauguuuuuugcuuuguguugcuuuguugggguucaucaugugggccugccaaaagggcaacauuaggugcaacauuugcauuuga

SEQ ID NO: 45218 - RNA, 1701 nt, Artificial Sequence
  derived and/or modified CDS sequence (wt) from hemagglutinin__InfluenzaA__ALE31675
augaagacuaucauugccuugagcuacauucuaugucugguuuucgcucaaaaaauuccuggaaaugacaauagcacggcaacgcugugccuugggcaccaugcaguaccaaacggaacgauagugaaaacaaucacaaaugaccgaauugaaguuacuaaugcuacugagcugguucagaauuccucaauaggugaaauaugcaacaguccucaucagauccuugauggagaaaacugcacacuaauagaugcucuauugggagacccucagugugauggcuuucaaaauaagaaaugggaccuuuuuguugaacgaagcaaagccuacagcaacuguuacccuuaugaugugccggauuaugccucccuuaggucacuaguugccucauccggcacgcuggaguuuaacaaugaaagcuucaauuggacuggagucacucaaaacggaacaaguucugcuugcauaaggagaucuaguaguaguuucuuuaguagauuaaauugguugacccacuuaaacuacacauacccagcauugaacgugacuaugccaaacaaugaacaauuugacaaauuguacauuugggggguucaccacccggguacggacaaggaccaaaucuuccuguaugcucaaucaucaggaagaaucacaguaucuaccaaaggaagccaacaagcuguaaucccaaauaucggaucuagacccagaauaagggauaucccuagcagaauaagcaucuauuggacaauaguaaaaccgggagacauacuuuugauuaacagcacagggaaucuaauugcuccuagggguuacuucaaaauacgaagugggaaaagcucaauaaugagaucagaugcacccauuggcaaaugcaagucugaaugcaucacuccaaauggaagcauucccaaugacaaaccauuccaaaauguaaacaggaucacauacggggccugucccagauauguuaagcauagcacucugaaauuggcaacaggaaugcgaaauguaccagagaaacaaacuagaggcauauuuggcgcaauagcggguuucauagaaaaugguugggagggaaugguggaugguugguacgguuucaggcaucaaaauucugagggaagaggacaagcagcagaucucaaaagcacucaagcagcaaucgaucaaaucaaugggaagcugaaucgauugaucgggaaaaccaacgagaaauuccaucagauugaaaaagaauucucagaaguagaaggaagaauucaggaccuugagaaauauguugaggacacuaaaauagaucucuggucauacaacgcggagcuucuuguugcccuggagaaccaacauacaauugaucuaacugacucagaaaugaacaaacuguuugaaaaaacaaagaagcaacugagggaaaaugcugaggauaugggaaaugguuguuucaaaauauaccacaaaugugacaaugccugcauaggaucaauaagaaauggaacuuaugaccacaauguguacagggaugaagcauuaaacaaccgguuccagaucaagggaguugagcugaagucaggguacaaagauuggauccuauggauuuccuuugccauaucauguuuuuugcuuuguguugcuuuguugggguucaucaugugggccugccaaaagggcaacauuaggugcaacauuugcauuuga

SEQ ID NO: 45219 - RNA, 1701 nt, Artificial Sequence
  derived and/or modified CDS sequence (wt) from hemagglutinin__InfluenzaA__ALE31676
augaagacuaucauugcuuugagcuacauucuaugucugguuuucgcucaaaaaauuccuggaaaugacaauagcacggcaacgcugugccuugggcaccaugcaguaccaaacggaacgauagugaaaacaaucacaaaugaccgaauugaaguuacuaaugcuacugaguugguucagaauuccucaauaggugaaauaugcgacaguccucaucagauccuugauggagaaaacugcacacuaauagaugcucuauugggagacccucagugugauggcuuucaaaauaagaaaugggaccuuuuuguugaacgaagcaaagccuacagcaacuguuacccuuaugaugugccggauuaugccucccuuaggucacuaguugccucauccggcacacuggaguuuaacaaugaaagcuucaauuggacuggagucacucaaaacggaacaaguucugcuugcauaaggagaucuaguaguaguuucuuuaguagauuaaauugguugacccacuuaaacuacacauacccagcauugaacgugacuaugccaaacaaugaacaauuugacaaauuguacauuugggggguucaccacccggguacggacaaggaccaaaucuuccuguaugcucaaucaucaggaagaaucacaguaucuaccaaaagaagccaacaagcuguaaucccaaauaucggaucuagacccaaaauaagggauaucccuagcagaauaagcaucuauuggacaauaguaaaaccgggagacauacuuuugauuaacagcacagggaaucuaauugcuccuagggguuacuucaaaauacuaagugggaaaagcucaauaaugagaucagaugcacccauuggcaaaugcaagucugaaugcaucacuccaaauggaagcauucccaaugacaaaccauuccaaaauguaaacaggaucacauacggggccugucccagauauguuaagcauagcacucugaaauuggcaacaggaaugcgaaauguaccagagaaacaaacuagaggcauauuuggcgcaauagcggguuucauagaaaaugguugggaaggaaugguggaugguugguacgguuucaggcaucaaaauucugagggaagaggacaagcagcagaucucaaaagcacucaagcagcaaucgaucaaaucaaugggaagcugaaucgguugaucgggaaaaccaacgagaaauuccaucagauugaaaaagaauucucagaaguagaaggaagaauucaggaccuugagaaauauguugaggacucuaaaauagaucucuggucauauaacgcggagcuucuuguugcccuggagaaccaacauacaauugaucuaacugacucagaaaugaacaaacuguuugaaaaaacaaagaagcaacugagggaaaaugcugaggauaugggaaaugguuguuucaaaauauaccacaaaugugacaaugccugcauaggaucaauaagaaauggaacuuaugaccacaauguguacagggaugaagcauuaaacaaccgguuccagaucaaggggguugagcugaagucaggguacaaagauuggauccuauggauuuccuuugccauaucauguuuuuugcuuuguguugcuuuguugggguucaucaugugggccugccaaaagggcaacauuaggugcaacauuugcauuuga

SEQ ID NO: 45220 - RNA, 1701 nt, Artificial Sequence
  derived and/or modified CDS sequence (wt) from hemagglutinin__InfluenzaA__ALE31677
augaagacuaucauugcuuugagcuacauucuaugucugguuuucgcucaaaaaauuccuggaaaugacaauagcacggcaacgcugugccuugggcaccaugcaguaccaaacggaacgauagugaaaacaaucacaaaugaccgaauugaaguuacuaaugcuacugagcugguucagaauuccucaauaggugaaauaugcgacaguccucaucagauccuugauggagaaaacugcacacuaauagaugcucuauuaggagacccucagugugauggcuuucaaaauaagaaaugggaccuuuuuguugaacgaagcaaagccuacagcaacuguuacccuuaugaugugccggauuaugccucccuuaggucacuaguugccucauccggcacacuggaguuuaacaaugaaagcuucaauuggacuggagucacucaaaacggaacaaguucugcuugcauaaggaaaucuaguaguaguuucuuuaguagauuaaauugguugacccacuuaaacuacacauacccagcauugaacgugacuaugccaaacaaugaacaauuugacaaauuguacauuugggggguucaccacccggguacggacaaggaccaaaucuuccuguaugcucgaucaucaggaagaaucacaguaucuaccaaaagaagccaacaagcuguaaucccaaauaucggaucuagacccagaauaagggauaucccuagcagaauaagcaucuauuggacaauaguaaaaccgggagacauacuuuugauuaacagcacagggaaucuaauugcuccuagggguuacuucaaaauacgaagugggaaaagcucaauaaugagaucagaugcacccauuggcaaaugcaagucugaaugcaucacuccaaauggaagcauucccaaugacaaaccauuccaaaauguaaacaggaucacauacggggccugucccagauauguuaagcauagcacucugaaauuggcaacaggaaugcgaaauguaccagagaaacaaacuagaggcauauuuggcgcaauagcggguuucauagaaaaugguugggagggaaugguggaugguugguacgguuucaggcaucaaaauucugaggggagaggacaagcagcagaucucaaaagcacucaagcagcaaucgaucaaaucaaugggaagcugaaucgauugaucgggaaaaccaacgagaaauuccaucagauugaaaaagaauucucagaaguagaaggaagaauucaggaccuugagaaauauguugaggacacuaaaauagaucucuggucauacaacgcggagcuucuuguugcccuggagaaucaacauacaauugaucuaacugacucagaaaugaacaaacuguuugaaaaaacaaagaagcaacugagggaaaaugcugaggauaugggaaaugguuguuucaaaauauaccacaaaugugacaaugccugcauaggaucaauaagaaauggaacuuaugaccacaauguguacagggaugaagcauuaaacaaccgguuccagaucaagggaguugagcugaagucaggguacaaagauuggauccuauggauuuccuuugccauaucauguuuuuugcuuuguguugcuuuguugggguucaucaugugggccugccaaaagggcaacauuaggugcaacauuugcauuuga

SEQ ID NO: 45221 - RNA, 1701 nt, Artificial Sequence
  derived and/or modified CDS sequence (wt) from hemagglutinin__InfluenzaA__ALE31678
augaagacuaucauugccuugagcuacauucuaugucugguuuucgcucaaaaaauuccuggaaaugacaauagcacggcaacgcugugccuugggcaccaugcaguaccaaacggaacgauagugaaaacaaucacaaaugaccgaauugaaguuacuaaugcuacugagcugguucagaauuccucaauaggugaaauaugcgacaguccucaucagauccuugauggagaaaacugcacacuaauagaugcucuauugggagacccucagugugauggcuuucaaaauaagaaaugggaccuuuuuguugaacgaagcaaagccuacagcaacuguuacccuuaugaugugccggauuaugccucccuuaggucacuaguugccucauccggcacacuggaguuuaacaaugaaagcuucaauuggacuggagucacucaaaacggaacaaguucugcuugcauaaggagaucuaguaguaguuucuuuaguagauuaaauugguugacccacuuaaacuacacauacccagcauugaacgugacuaugccaaacaaugaacaauuugacaaauuguacauuugggggguucaccacccggguacggacaaggaccaaaucuuccuguaugcucaaucaucaggaagaaucacaguaucuaccaaaagaagccaacaagcuguaaucccaaauaucggaucuagacccagaauaagggauaucccuagcagaauaagcaucuauuggacaauaguaaaaccgggagacauacuuuugauuaacagcacagggaaucuaauugcuccuagggguuacuucaaaauacgaagugggaaaagcucaauaaugagaucagaugcacccauuggcaaaugcaagucugaaugcaucacuccaaauggaagcauucccaaugacaaaccauuccaaaauguaaacaggaucacauacggggccugucccagauauguuaagcauagcacucugaaauuggcaacaggaaugcgaaauguaccagagaaacaaacuagaggcauauuuggcgcaauagcggguuucauagaaaaugguugggagggaaugguggauggcugguacgguuucaggcaucaaaauucugagggaagaggacaagcagcagaucucaaaagcacucaagcagcaaucgaucaaaucaaugggaagcugaaucgauugaucgggaaaaccaacgagaaauuccaucagauugaaaaagaauucucagaaguagaaggaagaauucaggaccuugagaaauauguugaggacacuaaaauagaucucuggucauacaacgcggagcuucuuguugcccuggagaaccaacauacaauugaucuaacugacucagaaaugaacaaacuguuugaaaaaacaaagaagcaacugagggaaaaugcugaggauaugggaaaugguuguuucaaaauauaccacaaaugugacaaugccugcauaggaucaauaagaaauggaacuuaugaccacaauguguacagggaugaagcauuaaacaaccgguuccagaucaagggaguugagcugaagucaggguacaaagauuggauccuauggauuuccuuugccauaucauguuuuuugcuuuguguugcuuuguugggguucaucaugugggccugccaaaagggcaacauuaggugcaacauuugcauuuga

SEQ ID NO: 45222 - RNA, 1701 nt, Artificial Sequence
  derived and/or modified CDS sequence (wt) from hemagglutinin__InfluenzaA__ALE31679
augaagacuaucauugcuuugagcuacauucuaugucugguuuucgcucaaaaaauuccuggaaaugacaauagcacggcaacgcugugccuugggcaccaugcaguaccaaacggaacgauagugaaaacaaucacaaaugaccgaauugaaguuacuaaugcuacugaguugguucagaauuccucaauaggugaaauaugcgacaguccucaucagauccuugauggagaaaacugcacacuaauagaugcucuauugggagacccucagugugauggcuuucaaaauaagaaaugggaccuuuuuguugaacgaagcaaagccuacagcaacuguuacccuuaugaugugccggauuaugccucccuuaggucacuaguugccucauccggcacacuggaguuuaacaaugaaagcuucaauuggacuggagucacucaaaacggaacaaguucugcuugcauaaggagaucuaguaguaguuucuuuaguagauuaaauugguugacccacuuaaacuacacauacccagcauugaacgugacuaugccaaacaaugaacaauuugacaaauuguacauuugggggguucaccacccggguacggacaaggaccaaaucuuccuguaugcucaaucaucaggaagaaucacaguaucuaccaaaagaagccaacaagcuguaaucccaaauaucggaucuagacccagaauaagggauaucccuagcagaauaagcaucuauuggacaauaguaaaaccgggagacauacuuuugauuaacagcacagggaaucuaauugcuccuagggguuacuucaaaauacgaagugggaaaagcucaauaaugagaucagaugcacccauuggcaaaugcaagucugaaugcaucacuccaaauggaagcauucccaaugacaaaccauuccaaaauguaaacaggaucacauacggggccugucccagauauguuaagcauagcacucugaaauuggcaacaggaaugcgaaauguaccagagaaacaaacuagaggcauauuuggcgcaauagcggguuucauagaaaaugguugggagggaaugguggaugguugguacgguuucaggcaucaaaauucugagggaagaggacaagcagcagaucucaaaagcacucaagcagcaaucgaucaaaucaaugggaagcugaaucgguugaucgggaaaaccaacgagaaauuccaucagauugaaaaagaauucucagaaguagaaggaagaauucaggaccuugagaaauauguugaggacacuaaaauagaucucuggucauauaacgcggagcuucuuguugcccuggagaaccaacauacaauugaucuaacugauucagaaaugaacaaacuguuugaaaaaacaaagaagcaacugagggaaaaugcugaggauaugggaaaugguuguuucaaaauauaccacaaaugugacaaugccugcauaggaucaauaagaaauggaacuuaugaccacaauguguacagggaugaagcauuaaacaaccgguuccagaucaaggggguugagcugaagucaggguacaaagauuggauccuauggauuuccuuugccauaucauguuuuuugcuuuguguugcuuuguugggguucaucaugugggccugccaaaagggcaacauuaggugcaacauuugcauuuga

SEQ ID NO: 45223 - RNA, 1701 nt, Artificial Sequence; identical to SEQ ID NO: 45069
  derived and/or modified CDS sequence (wt) from hemagglutinin__InfluenzaA__ALE31680

SEQ ID NO: 45224 - RNA, 1701 nt, Artificial Sequence; identical to SEQ ID NO: 45068
  derived and/or modified CDS sequence (wt) from hemagglutinin__InfluenzaA__ALE31681

SEQ ID NO: 45225 - RNA, 1701 nt, Artificial Sequence; identical to SEQ ID NO: 45028
  derived and/or modified CDS sequence (wt) from hemagglutinin__InfluenzaA__ALE31682

SEQ ID NO: 45226 - RNA, 1701 nt, Artificial Sequence; identical to SEQ ID NO: 45028
  derived and/or modified CDS sequence (wt) from hemagglutinin__InfluenzaA__ALE31683

SEQ ID NO: 45227 - RNA, 1701 nt, Artificial Sequence; identical to SEQ ID NO: 45028
  derived and/or modified CDS sequence (wt) from hemagglutinin__InfluenzaA__ALE31684

SEQ ID NO: 45228 - RNA, 1701 nt, Artificial Sequence
  derived and/or modified CDS sequence (wt) from hemagglutinin__InfluenzaA__ALE31685
augaagacuaucauugcuuugagcuacauucuaugucugguuuucgcucaaaaaauuccuggaaaugacaauagcacggcaacgcugugccuugggcaccaugcaguaccaaacggaacgauagugaaaacaaucacaaaugaccgaauugaaguuacuaaugcuacugagcugguucagaauuccucaauaggugaaauaugcgacaguccucaucagauccuugauggagaaaacugcacacuaauagaugcucuauugggagacccucagugugauggcuuucaaaauaagaaaugggaccuuuuuguugaacgaagcaaagccuacagcaacuguuacccuuaugaugugccggauuaugccucccuuaggucacuaguugccucauccggcacacuggaguuuaacaaugaaagcuucaauuggacuggagucacucaaaacggaacaaguucugcuugcauaaggagaucuaguaguaguuucuuuaguagauuaaauugguugacccacuuaaacuacacauacccagcauugaacgugacuaugccaaacaaugaacaauuugacaaauuguacauuugggggguucaccacccggguacggacaaggaccaaaucuuccuguaugcucaaucaucaggaagaaucacaguaucuaccaaaagaagccaacaagcuguaaucccaaauaucgggucuagacccagaauaagggauaucccuagcagaauaagcaucuauuggacaauaguaaaaccgggagacauacuuuugauuaacagcacagggaaucuaauugcuccuagggguuacuucaaaauacgaagugggaaaagcucaauaaugagaucagaugcacccauuggcaaaugcaagucugaaugcaucacuccaaauggaagcauucccaaugacaaaccauuccaaaauguaaacaggaucacauacggggccugucccagauauguuaagcauagcacucugaaauuggcaacaggaaugcgaaauguaccagagaaacaaacuagaggcauauuuggcgcaauagcggguuucauagaaaaugguugggagggaaugguggaugguugguacgguuucaggcaucaaaauucugagggaagaggacaagcagcagaucucaaaagcacucaagcagcaaucgaucaaaucaauggaaagcugaaucgauugaucgggaaaaccaacgagaaauuccaucagauugaaaaagaauucucagaaguagaaggaagaauucaggaccuugagaaauauguugaggacacuaaaauagaucucuggucauacaacgcggagcuucuuguugcccuggagaaccaacauacaauugaucuaacugacucagaaaugaacaaacuguuugaaaaaacaaagaagcaacugagggaaaaugcugaggauaugggaaaugguuguuucaaaauauaccacaaaugugacaaugccugcauaggaucaauaagaaauggaacuuaugaccacaauguguacagggaugaagcauuaaacaaccgguuccagaucaagggaguugagcugaagucaggguacaaagauuggauccuauggauuuccuuugccauaucauguuuuuugcuuuguguugcuuuguugggguucaucaugugggccugccaaaagggcaacauuaggugcaacauuugcauuuga

SEQ ID NO: 45229 - RNA, 1701 nt, Artificial Sequence
  derived and/or modified CDS sequence (wt) from hemagglutinin__InfluenzaA__ALE31686
augaagacuaucauugccuugagcuacauucuaugucugguuuucgcucaaaaaauuccuggaaaugacaauagcacggcaacgcugugccuugggcaccaugcaguaccaaacggaacgauagugaaaacaaucacaaaugaccgaauugaaguuacuaaugcuacugagcugguucagaauuccucaauaggugaaauaugcgacaguccucaucagauccuugauggagaaaacugcacacuaauagaugcucuauugggagacccucagugugauggcuuucaaaauaagaaaugggaccuuuuuguugaacgaagcaaagccuacagcaacuguuacccuuaugaugugccggauuaugccucccuuaggucacuaguugccucauccggcacacuggaguuuaacaaugaaagcuucaauuggacuggagucacucaaaacggaacaaguucugcuugcauaaggagaucuaguaguaguuucuuuaguagauuaaauugguugacccacuuaaacuacacauacccagcauugaacgugacuaugccaaacaaugaacaauuugacaaauuguacauuugggggguucaccacccggguacggacaaggaccaaaucuuccuguaugcucaaucaucaggaagaaucacaguaucuaccaaaagaagccaacaagcuguaaucccaaauaucggaucuagacccagaauaagggauaucccuagcagaauaagcaucuauuggacaauaguaaaaccgggagacauacuuuugauuaacagcacagggaaucuaauugcuccuagggguuacuucaaaauacgaagugggaaaagcucaauaaugagaucagaugcacccauuggcaaaugcaagucugaaugcaucacuccaaauggaagcauucccaaugacaaaccauuccaaaauguaaacaggaucacauacggggccugucccagauauguuaagcauagcacucugaaauuggcaacaggaaugcgaaauguaccagagaaacaaacuagaggcauauuuggcgcaauagcggguuucauagaaaaugguugggagggaaugguggacgguugguacgguuucaggcaucaaaauucugagggaagaggacaagcagcagaucucaaaagcacucaagcagcaaucgaucaaaucaaugggaagcugaaucgauugaucgggaaaaccaacgagaaauuccaucagauugaaaaagaauucucagaaguagaaggaagaauucaggaccuugagaaauauguugaggacacuaaaauagaucucuggucauacaacgcggagcuucuuguugcccuggagaaccaacauacaauugaucuaacugacucagaaaugaacaaacuguuugaaaaaacaaagaagcaacugagggaaaaugcugaggauaugggaaaugguuguuucaaaauauaccacaaaugugacaaugcuugcauaggaucaauaagaaauggaacuuaugaccacaauguguacagggaugaagcauuaaacaaccgguuccagaucaagggaguugagcugaagucaggguacaaagauuggauccuauggauuuccuuugccauaucauguuuuuugcuuuguguugcuuuguugggguucaucaugugggccugccaaaagggcaacauuaggugcaacauuugcauuuga

SEQ ID NO: 45230 - RNA, 1701 nt, Artificial Sequence
  derived and/or modified CDS sequence (wt) from hemagglutinin__InfluenzaA__ALE31687
augaagacuaucauugcuuugagcuacauucuaugucugguuuucgcucaaaaaauuccuggaaaugacaauagcacggcaacgcugugccuugggcaccaugcaguaccaaacggaacgauagugaaaacaaucacaaaugaccgaauugaaguuacuaaugcuacugagcugguucagaauuccucaauaggugaaauaugcgacaguccucaucagauccuugauggagaaaacugcacacuaauagaugcucuauugggagacccucagugugauggcuuucaaaauaagaaaugggaccuuuuuguugaacgaagcaaagccuacagcaacuguuacccuuaugaugugccggauuaugccucccuuaggucacuaguugccucauccggcacacuggaguuuaacaaugaaagcuucaauuggacuggagucacucaaaacggaacaaguucugcuugcauaaggagaucuaguaguaguuucuuuaguagauuaaauugguugacccacuuaaacuacacauacccagcauugaacgugacuaugccaaacaaugaacaauuugacaaauuguacauuugggggguucaccacccggguacggacaaggaccaaaucuuccuguaugcucaaucaucaggaagaaucacaguaucuaccaaaagaagccaacaagcuguaaucccaaauaucggaucuagacccagaauaagggauaucccuagcagaauaagcaucuauuggacaauaguaaaaccgggagacauacuuuugauuaacagcacagggaaucuaauugcuccuagggguuacuucaaaauacgaagugggaaaagcucaauaaugagaucagaugcacccauuggcaaaugcaagucugaaugcaucacuccaaauggaagcauucccaaugacaaaccauuccaaaauguaaacaggaucacauacggggccugucccagauauguuaagcauagcacucugaaauuggcaacaggaaugcgaaauguaccagagaaacaaacuagaggcauauuuggcgcaauagcggguuucauagaaaaugguugggagggaaugguggaugguugguacgguuucaggcaucaaaauucugagggaagaggacaagcagcagaucucaaaagcacucaagcagcaaucgaucaaaucaauggaaagcugaaucgauugaucgggaaaaccaacgagaaauuccaucagauugaaaaagaauucucagaaguagaaggaagaauucaggaccuugagaaauauguugaggacacuaaaauagaucucuggucauacaacgcggagcuucuuguugcccuggagaaccaacauacaauugaucuaacugacucagaaaugaacaaacuguuugaaaaaacaaagaagcaacugagggaaaaugcugaggauaugggaaaugguuguuucaaaauauaccacaaaugugacaaugccugcauagaaucaauaagaaauggaacuuaugaccacaauguguacagggaugaagcauuaaacaaccgguuccagaucaagggaguugagcugaagucaggguacaaagauuggauccuauggauuuccuuugccauaucauguuuuuugcuuuguguugcuuuguugggguucaucaugugggccugccaaaagggcaacauuaggugcaacauuugcauuuga

SEQ ID NO: 45231 - RNA, 1701 nt, Artificial Sequence
  derived and/or modified CDS sequence (wt) from hemagglutinin__InfluenzaA__ALE31688
augaagacuaccauugcuuugagcuacauucuaugucugguuuucgcucaaaagcuuccugaaaaugacaauagcacggcaacgcugugccuugggcaccaugcaguaccaaacggaacgauagugaaaacaaucacgagugaccgaauugaaguuacuaaugcuacugagcugguucagaauuccucaauaggugaaauaugcgacaguccucaucagauccuugauggaaaaaacugcacacuaauagaugcucuauugggagacccucagugugauggcuuucaaaauaagaaaugggaccuuuuuguugaacgaagcaaagccuacagcaacuguuacccuuaugaugugccggauuaugccucccuuaggucacuaguugccucauccgguacacuggaguuuaacgaugaaagcuucaauugggcuggagucacucaaaacggaacaaguucugcuugcauaaggggaucuaauaguaguuucuuuaguagauuaaauugguugacccacucaaacuucaaauacccagcauugaacgugacuaugccaaacaaugaacaauuugacaaauuguacauuugggggguucaccacccggguacggacaaggaccaaauuuuccuguaugcucaaucaucaggaagaaucacaguauccaccaaaagaagccaacaagcuguaaucccgaauaucggaucuagacccagaauaaggaauaucccuagcagaauaagcaucuauuggacaauaguaaaaccgggagacauacuuuugauuaacagcacagggaaucuaauugcuccuagggguuacuucaaaauacgaagugggaaaagcucaauaaugagaucagaugcacccauuggcaaaugcaagucugaaugcaucacuccaaauggaagcauucccaaugacaaaccauuccaaaauguaaacaggaucacauacggggccugucccagauauguuaagcaaagcacucugaaauuggcaacaggaaugcgaaauguaccagagaaacaaacuagaggcauauuuggcgcaauagcggguuucauagaaaaugguugggagggaaugaaggaugguugguacgguuucaggcaucaaaauucugagggaagaggacaagcagcagaucucaaaagcacucaagcagcaaucgaucaaaucaaugggaagcugaaucgauugaucgggaaaaccaacgagaaauuccaucagauugaaaaagaauucucagaaguagaagggagaauucaggaccuugagaaauauguugaggacacaaaaauagaucucuggucauacaacgcggagcuucuuguugcccuggagaaccaacauacaauugaucuaacugacucagaaaugaacaaacuguuugaaaaaacaaagaagcaacugagggaaaaugcugaggauaugggcaaugguuguuucaaaauauaccacaaaugugacaaugccugcauaggaucaaucagaaauggaacuuaugaccacgauguauacagggaugaagcuuuaaacaaccgguuccagaucaagggaguugagcugaagucaggguacaaagauuggauccuauggauuuccuuugccauaucauguuuuuugcuuuguguugcuuuguugggguucaucaugugggccugccaaaagggcaacauuaggugcaacauuugcauuuga

SEQ ID NO: 45232 - RNA, 1701 nt, Artificial Sequence
  derived and/or modified CDS sequence (wt) from hemagglutinin__InfluenzaA__ALE31689
augaagacuaucauugcuuugagcuacauucuaugucugguuuucgcucaaaaaauuccuggaaaugacaauagcacggcaacgcugugccuugggcaccaugcaguaccaaacggaacgauagugaaaacaaucacaaaugaccgaauugaaguuacuaaugcuacugagcugguucagaauuccucaauaggugaaauaugcgacaguccucaucagauccuugauggagaaaacugcacacuaauagaugcucuauugggagacccucagugugauggcuuucaaaauaagaaaugggaccuuuuuguugaacgaagcaaagccuacagcaacuguuacccuuaugaugugccggauuaugccucccuuaggucacuaguugccucauccggcacacuggaguuuaacaaugaaagcuucaauuggacuggagucacucaaaacggaacaaguucugcuugcauaaggagaucuaguaguaguuucuuuaguagauuaaauugguugacccacuuaaacuacacauacccagcauugaacgugacuaugccaaacaaugagcaauuugacaaauuguacauuugggggguucaccacccggguacggacaaggaccaaaucuuccuguaugcucaaucaucaggaagaauaacaguaucuaccaaaagaagccaacaagcuguaaucccaaauaucggaucuagacccagaauaagggauaucccuagcagaauaagcaucuauuggacaauaguaaaaccgggagacauacuuuugauuaacagcacagggaaucuaauugcuccuagggguuacuucaaaauacgaagugggaaaagcucaauaaugagaucagaugcacccauuggcaaaugcaagucugagugcaucacuccaaauggaagcauucccaaugacaaaccauuccaaaauguaaacaggaucacauacggggccugucccagauauguuaagcauagcacucugaaauuggcaacaggaaugcgaaauguaccagagaaacaaacuagaggcauauuuggcgcaauagcggguuucauagaaaaugguugggagggaaugguggaugguugguacgguuucaggcaucaaaauucugagggaagaggacaagcagcagaucucaaaagcacucaagcagcaaucgaucaaaucaaugggaagcugaaucgauugaucgggaaaaccaacgagaaauuccaucagauugaaaaagaauucucagaaguagaaggaagaauucaggaccuugagaaauauguugaggacacuaaaauagaucucuggucauacaacgcggagcuucuuguugcccuggagaaccaacauacaauugaucuaacugacucagaaaugaacaaacuauuugaaaaaacaaagaagcaacugagggaaaaugcugaggauaugggaaaugguuguuucaaaauauaccacaaaugugacaaugccugcauaggaucaauaagaaauggaacuuaugaccacaauguguacagggaugaagcauuaaacaaccgguuccagaucaagggaguugagcugaagucaggguacaaagauuggauccuauggauuuccuuugccauaucauguuuuuugcuuuguguugcuuuguugggguucaucaugugggccugccaaaagggcaacauuaggugcaacauuugcauuuga

SEQ ID NO: 45233 - RNA, 1701 nt, Artificial Sequence
  derived and/or modified CDS sequence (wt) from hemagglutinin__InfluenzaA__ALE31690
augaagacuaucauugcuuugagcugcauucuaugucugguuuucgcucaaaaacuuccuggaaaugacaauagcacggcaacgcugugccuugggcaccaugcaguaccaaacggaacgauagugaaaacaaucacgaaugaccgaauugaaguuacuaaugcuacugagcugguucagaacuccucaauaggugaaauaugcgacaguccucaucagauccuugauggagaaaacugcacacuaauagaugcucuauugggagacccucagugugauggcuuucaaaauaagaaaugggaccuuuuuguugaacgaagcaaagccuacagcaacuguuacccuuaugaugugccggauuaugccucccuuaggucacuaguugccucauccggcacacuggaguuuaacaaugaaagcuucaauugggcuggaguaacucaaaacggaacaaguucuucuugcauaaggggaucuaauaguaguuucuuuaguagauuaaauugguugacccacuuaaacuccaaauacccagcauuaaacgugacuaugccaaacaaugaacaauuugacaaauuguacauuugggggguucaccacccggguacggacaaggaccaaaucuuccuguaugcacaaucaucaggaagaaucacaguaucuaccaaaagaagccaacaagcuguaaucccgaauaucggaucuagacccagaauaagggauaucccuagcagaauaagcaucuauuggacaauaguaaaaccaggagacauacuuuugauuaacagcacagggaaucuaauugcuccuagggguuacuucaaaauacgaagugggaaaagcucaauaaugagaucagaugcacccauuggcaaaugcaagucugaaugcaucacuccaaauggaagcauucccaaugacaaaccauuccaaaauguaaacaggaucacauacggggccugucccagauauguuaagcaaagcacucugaaauuggcaacaggaaugcgaaauguaccagagagacaaacuagaggcauauuuggcgcaauagcggguuucauagaaaaugguugggagggaaugguggaugguugguacggcuucaggcaucaaaauucugagggaagaggacaagcagcagaucucaaaagcacucaagcagcaaucgaucaaaucaauggaaagcugaaucgauugaucgggaaaaccaacgagaaauuccaucagauugaaaaagaauucucagaaguagaagggagaauucaggaccuugagaaauauguugaggacacaaaaauagaucucuggucauacaacgcggagcuucuuguugcccuggagaaccaacauacaauugaucuaacugacucagaaaugaacaaacuguuugaaaaaacaaagaagcaacugagggaaaaugcugaggauaugggcaaugguuguuucaaaauauaccacaaaugugacaaugccugcauaggaucaaucagaaauggaacuuaugaccacaauguauacagggaugaagcauuaaacaaccgguuccagaucaagggaguugagcugaagucaggguacaaagauuggauccuauggauuuccuuugccauaucauguuuuuugcuuuguguugcuuuguugggguucaucaugugggccugccaaaagggcaacauuaggugcaacauuugcauuuga

SEQ ID NO: 45234 - RNA, 1701 nt, Artificial Sequence
  derived and/or modified CDS sequence (wt) from hemagglutinin__InfluenzaA__ALE31691
augaagacuaucauugcuuugagcuacauucuaugucugguuuucgcucaaaaacuuccuggaaaugacaauagcacggcaacgcugugccuugggcaccaugcaguaccaaauggaacuauagugaaaacaaucacgaaugaccgaauugaaguuacuaaugcuacugaacugguucagaauuccucaauaggugaaauaugcgacaguccucaucagauccuugauggagaaaacugcacacuaauagaugcucuauugggagacccucagugugauggcuuucaaaauaagaaaugggaccuuuuuguugaacggagcaaagccuacagcaacuguuacccuuaugaugugccggauuaugccucccuuaggucacuaguugccucauccggcacacuggaguuuaacaaugaaagcuucaauugggcuggagucacucaaaacggaacaaguucugcuugcauaaggggaucuaauaguaguuucuuuaguagauuaaauugguugacccacuuaaacuucaaauacccagcauugaacgugacuaugccaaacaaugaacaauuugacaaauuguacauuuggggaguucaccacccggguacggacaaggaccaaaucuuccuguaugcucaaucgucagggagaaucacaguaucuaccaaaagaagccaacaagcuguaaucccgaauaucggaucuagacccagaauaaggaauaucccuagcagaauaagcaucuauuggacaauaguaaaaccgggagacauacuuuugauuaacagcacagggaaccuaauugcuccuagggguuacuucaaaauacgaagugggaaaagcucaauaaugagaucagaugcacccauuggcaaaugcaagucugaaugcaucacuccaaauggaagcauucccaaugacaaaccauuccaaaauguaaacaggaucacauacggggccugucccagauauguuaagcaaagcacccugaaauuggcaacaggaaugcgaaauguaccagagaaacaaacuagaggcauauuuggcgcaauagcggguuucauagaaaaugguugggagggaaugguggaugguugguacgguuucaggcaucaaaauucugagggaagaggacaagcagcagaucucaaaagcacucaagcagcaaucgaucaaaucaaugggaagcugaaucgauugaucgggaaaaccaacgagaaauuccaucagauugaaaaagaauucucagaaguagaagggagaauucaggaccuugagaaauauguugaggacacaaaaauagaucucuggucauacaacgcggagcuucuuguugcccuggagaaccaacauacaauugaucuaacugacucagaaaugaacaaacuguuugaaaaaacaaagaaacaacugagggaaaaugcugaggauaugggcaaugguuguuucaaaauauaccacaaaugugacaaugccugcauaggaucaaucagaaauggaacuuaugaccacgauguguacagggaugaagcauuaaacaaccgguuccagaucaagggaguugagcugaagucaggguacaaagauuggauccuauggauuuccuuugccauaucauguuuuuugcuuuguguugcuuuguugggguucaucaugugggccugccaaaagggcaacauuaggugcaacauuugcauuuga

SEQ ID NO: 45235 - RNA, 1701 nt, Artificial Sequence
  derived and/or modified CDS sequence (wt) from hemagglutinin__InfluenzaA__ALE31692
augaagacuaucauugcuuugagcuacauucuaugucugguuuucgcucaaaaaauuccuggaaaugacaauagcacggcaacgcugugccuugggcaccaugcaguaccaaacggaacgauagugaaaacaaucacaaaugaccgaauugaaguuacuaaugcuacugagcugguucagaauuccucaauaggugaaauaugcgacaguccucaucagauccuugauggagaaaacugcacacuaauagaugcucuauugggagacccucagugugauggcuuucaaaauaagaaaugggaccuuuuuguugaacgaagcaaagccuacagcaacuguuacccuuaugaugugccggauuaugccucccuuaggucacuaguugccucauccggcacacuggaguuuaacaaugaaagcuucaauuggacuggagucacucaaaacggaacaaguucugcuugcauaaggaaaucuaguaguaguuucuuuaguagauuaaauugguugacccacuuaaacuacacauacccagcauugaacgugacuaugccaaacaaugaacaauuugacaaauuguacauuugggggguucaccacccggguacggacaaggaccaaaucuuccuguaugcucgaucaucaggaagaaucacaguaucuaccaaaagaagccaacaagcuguaaucccaaauaucggauauagacccagaauaagggauaucccuagcagaauaagcaucuauuggacaauaguaaaaccgggagacauacuuuugauuaacagcacagggaaucuaauugcuccuagggguuacuucaaaauacgaagugggaaaagcucaauaaugagaucagaugcacccauuggcaaaugcaagucugaaugcaucacuccaaauggaagcauucccaaugacaaaccauuccaaaauguaaacaggaucacauacggggccugucccagauauguuaagcauagcacucugaaauuggcaacaggaaugcgaaauguaccagagaaacaaacuagaggcauauuuggcgcaauagcggguuucauagaaaaugguugggagggaaugguggaugguugguacgguuucaggcaucaaaauucugaggggagaggacaagcagcagaucucaaaagcacucaagcagcaaucgaucaaaucaaugggaagcugaaucgauugaucgggaaaaccaacgagaaauuccaucagauugaaaaagaauucucagaaguagaaggaagaauucaggaccuugagaaauauguugaggacacuaaaauagaucucuggucauacaacgcggagcuucuuguugcccuggagaaucaacauacaauugaucuaacugacucagaaaugaacaaacuguuugaaaaaacaaagaagcaacugagggaaaaugcugaggauaugggaaaugguuguuucaaaauauaccacaaaugugacaaugccugcauaggaucaauaagaaauggaacuuaugaccacaauguguacagggaugaagcauuaaacaaccgguuccagaucaagggaguugagcugaagucaggguacaaagauuggauccuauggauuuccuuugccauaucauguuuuuugcuuuguguugcuuuguugggguucaucaugugggccugccaaaagggcaacauuaggugcaacauuugcauuuga

SEQ ID NO: 45236 - RNA, 1701 nt, Artificial Sequence; identical to SEQ ID NO: 45235
  derived and/or modified CDS sequence (wt) from hemagglutinin__InfluenzaA__ALE31693

SEQ ID NO: 45237 - RNA, 1701 nt, Artificial Sequence
  derived and/or modified CDS sequence (wt) from hemagglutinin__InfluenzaA__ALE31694
augaagacuaucauugccuugagcuacauucuaugucugguuuucgcucaaaaaauuccuggaaaugauaauagcacggcaacgcugugccuugggcaccaugcaguaccaaacggaacgauagugaaaacaaucacaaaugaccgaauugaaguuacuaaugcuacugagcugguucagaauuccucaauaggugaaauaugcgacaguccucaucagauccuugauggagaaaacugcacacuaauagaugcucuauugggagacccucagugugauggcuuucaaaauaagaaaugggaccuuuuuguugaacgaagcaaagccuacagcaacuguuacccuuaugaugugccggauuaugccucccuuaggucacuaguugccucauccggcacacuggaguuuaacaaugaaagcuucaauuggacuggagucacucaaaacggaacaaguucugcuugcauaaggagaucuaguaguaguuucuuuaguagauuaaauugguugacccacuuaaacuacacauacccagcauugaacgugacuaugccaaacaaugaacaauuugacaaauuguacauuugggggguucaccacccggguacggacaaggaccaaaucuuccuguaugcucaaucaucaggaagaaucacaguaucuaccaaaagaagccaacaagcuguaaucccaaauaucggaucuagacccagaauaagggauaucccuagcagaauaagcaucuauuggacaauaguaaaaccgggagacauacuuuugauuaacagcacagggaaucuaauugcuccuagggguuacuucaaaauacgaagugggaaaagcucaauaaugagaucagaugcacccauuggcaaaugcaagucugaaugcaucacuccaaauggaagcauucccaaugacaaaccauuccaaaauguaaacaggaucacauacggggccugucccagauauguuaagcauagcacucugaaauuggcaacaggaaugcgaaauguaccagagaaacaaacuagaggcauauuuggcgcaauagcggguuucauagaaaaugguugggagggaaugguggaugguugguacgguuucaggcaucaaaauucugagggaagaggacaagcagcagaucucaaaagcacucaagcagcaaucgaucaaaucaaugggaagcugaaucgauugaucgggaaaaccaacgagaaauuccaucagauugaaaaagaauucucagaaguagaaggaagaauucaggaccuugagaaauauguugaggacacuaaaauagaucucuggucauacaacgcggagcuucuuguugcccuggagaaccaacauacaauugaucuaacugacucagaaaugaacaaacuguuugaaaaaacaaagaagcaacugagggaaaaugcugaggauaugggaaaugguuguuucaaaauauaccacaaaugugacaaugccugcauaggaucaauaagaaauggaacuuaugaccacaauguguacagggaugaagcauuaaacaaccgguuccagaucaagggaguugagcugaagucaggguacaaagauuggauccuauggauuuccuuugccauaucauguuuuuugcuuuguguugcuuuguugggguucaucaugugggccugccaaaagggcaacauuaggugcaacauuugcauuuga

SEQ ID NO: 45238 - RNA, 1701 nt, Artificial Sequence; identical to SEQ ID NO: 45235
  derived and/or modified CDS sequence (wt) from hemagglutinin__InfluenzaA__ALE31695

SEQ ID NO: 45239 - RNA, 1701 nt, Artificial Sequence
  derived and/or modified CDS sequence (wt) from hemagglutinin__InfluenzaA__ALE31696
augaagacuaucauugcuuugagcuacauucuaugucugguuuucgcucaaaaaauuccuggaaaugacaauagcacggcaacgcugugccuugggcaccaugcaguaccaaacggaacgauagugaaaacaaucacaaaugaccgaauugaaguuacuaaugcuacugagcugguucagaauuccucaauaggugaaauaugcgacaguccucaucagauccuugauggagaaaacugcacacuaauagaugcucuauugggagacccucagugugauggcuuucaaaauaagaaaugggaccuuuuuguugaacgaagcaaagccuacagcaacuguuacccuuaugaugugccggauuaugccucccuuaggucacuaguugccucauccggcacacuggaguuuaacaaugaaagcuucaauuggacuggagucacucaaaacggaacaaguucugcuugcauaaggaaaucuaguaguaguuucuuuaguagauuaaauugguugacccacuuaaacuacacauacccagcauugaacgugacuaugccaaacaaugaacaauuugacaaauuguacauuugggggguucaccacccggguacggacaaggaccaaaucuuccuguaugcucgaucaucaggaagaaucacaguaucuaccaaaagaagccaacaagcuguaaucccaaauaucggaucuagacccagaauaagggauaucccuagcagaauaagcaucuauuggacaauaguaaaaccgggagacauacuuuugauuaacagcacagggaaucuaauugcuccuagggguuacuucaaaauacgaagugggaaaagcucaauaaugagaucagaugcacccauuggcaaaugcaagucugaaugcaucacuccaaauggaagcauucccaaugacaaaccauuccaaaauguaaacaggaucacauacggggccugucccagauauguuaagcauagcacucugaaauuggcaacaggaaugcgaaauguaccagagaaacaaacuagaggcauauuuggcgcaauagcggguuucauagaaaaugguugggagggaaugguggaugguugguacgguuucaggcaucaaaauucugaggggagaggacaagcagcagaucucaaaagcacucaagcagcaaucgaucaaaucaaugggaagcugaaucgauugaucgggaaaaccaacgagaaauuccaucagauugaaaaagaauucucagaaguagaaggaagaauucaggaccuugagaaauauguugaggacacuaaaauagaucucuggucauacaacgcggagcuucuuguugcccuggagaaucaacauacaauugaucuaacugacucagaaaugaacaaacuguuugaaaaaacaaagaaacaacugagggaaaaugcugaggauaugggaaaugguuguuucaaaauauaccacaaaugugacaaugccugcauaggaucaauaagaaauggaacuuaugaccacaauguguacagggaugaagcauuaaacaaccgguuccagaucaagggaguugagcugaagucaggguacaaagauuggauccuauggauuuccuuugccauaucauguuuuuugcuuuguguugcuuuguugggguucaucaugugggccugccaaaagggcaacauuaggugcaacauuugcauuuga

SEQ ID NO: 45240 - RNA, 1701 nt, Artificial Sequence; identical to SEQ ID NO: 45235
  derived and/or modified CDS sequence (wt) from hemagglutinin__InfluenzaA__ALE31697

SEQ ID NO: 45241 - RNA, 1701 nt, Artificial Sequence
  derived and/or modified CDS sequence (wt) from hemagglutinin__InfluenzaA__ALE31698
augaagacuaucauugcuuugagcuacauucuauguaugguuuucgcucaaaaaauuccuggaaaugacaauagcacggcaacgcugugccuugggcaccaugcaguaccaaacggaacgauagugaaaacaaucacaaaugaccgaauugaaguuacuaaugcuacugagcugguucagaauuccucaauaggugaaauaugcgacaguccucaucagauccuugauggagaaaacugcacacuaauagaugcucuauugggagauccucagugugauggcuuucaaaauaagaaaugggaccuuuuuguugaacgaagcaaagccuacagcaacuguuacccuuaugaugugccggauuaugccucccuuaggucacuaguugccucauccggcacacuggaguuuaacaaugaaagcuucaauuggacuggagucacucaaaacggaacaaguucugcuugcauaaggagaucuaguaguaguuucuuuaguagauuaaauugguugacccacuuaaacuacacauacccagcauugaacgugacuaugccaaacaaugaacaauuugacaaauuguacauuugggggguucaccacccggguacggacaaggaccaaaucuuccuguaugcucaaucaucaggaagaaucacaguaucuaccaaaagaagccaacaagcuguaaucccaaauaucggaucuagacccagaauaagggauaucccuagcagaauaagcaucuauuggacaauaguaaaaccgggagacauacuuuugauuaacagcacagggaaucuaauugcuccuagggguuacuucaaaauacgaagugggaaaagcucaauaaugagaucagaugcacccauuggcaaaugcaagucugaaugcaucacuccaaauggaagcauucccaaugacaaaccauuccaaaauguaaacaggaucacauacggggccugucccagauauguuaagcauagcacucugaaauuggcaacaggaaugcgaaauguaccagagaaacaaacuagaggcauauuuggcgcaauagcggguuucauagaaaaugguugggagggaaugguggaugguugguacgguuucaggcaucaaaauucugagggaagaggacaagcagcagaucucaaaagcacucaagcagcaaucgaucaaaucaaugggaagcugaaucgauugaucgggaaaaccaacgagaaauuccaucagauugaaaaagaauucucagaaguagaaggaagaauucaggaccuugagaaauauguugaggacacuaaaauagaucucuggucauacaacgcggagcuucuuguugcccuggagaaccaacauacaauugaucuaacugacucagaaaugaacaaacuguuugaaaaaacaaagaagcaacugagggaaaaugcugaggauaugggaaaugguuguuucaaaauauaccacaaaugugacaaugccugcauaggaucgauaagaaauggaacuuaugaccacaauguguacagggaugaagcauuaaacaaccgguuccagaucaagggaguugagcugaagucaggguacaaagauuggauccuauggauuuccuuugccauaucauguuuuuugcuuuguguugcuuuguugggguucaucaugugggccugccaaaagggcaacauuaggugcaacauuugcauuuga

SEQ ID NO: 45242 - RNA, 1701 nt, Artificial Sequence
  derived and/or modified CDS sequence (wt) from hemagglutinin__InfluenzaA__ALE31699
augaagacuaucauugccuugagcuacauucuaugucugguuuucgcucaaaaaauuccuggaaaugacaauagcacggcaacgcugugccuugggcaccaugcaguaccaaacggaacgauagugaaaacaaucacaaaugaccgaauugaaguuacuaaugcuacugagcugguucagaauuccucaauaggugaaauaugcgacaguccucaucagauccuugauggagaaaacugcacacuaauagaugcucuauugggagacccucagugugauggcuuucaaaauaagaaaugggaccuuuuuguugaacgaagcaaagccuacagcaacuguuacccuuaugaugugccgaauuaugccucccuuaggucacuaguugccucauccggcacacuggaguuuaacaaugaaagcuucaauuggacuggagucacucaaaacggaacaaguucugcuugcauaaggagaucuaguaguaguuucuuuaguagauuaaauugguugacccacuuaaacuacgcauacccagcauugaacgugacuaugccaaacaaugaacaauuugacaaauuguacauuugggggguucaccacccggguacggacaaggaccaaaucuuccuguaugcucaaucaucaggaagaaucacaguaucuaccaaaagaagccaacaagcuguaaucccaaauaucggaucuagacccagaauaagggauaucccuagcagaauaagcaucuauuggacaauaguaaaaccgggagacauacuuuugauuaacagcacagggaaucuaauugcuccuagggguuacuucaaaauacgaagugggaaaagcucaauaaugagaucagaugcacccauuggcaaaugcaagucugaaugcaucacuccaaauggaagcauucccaaugacaaaccauuccaaaauguaaacaggaucacauacggggccugucccagauauguuaagcauagcacucugaaauuggcaacaggaaugcgaaauguaccagagaaacaaacuagaggcauauuuggcgcaauagcggguuucauagaaaaugguugggagggaaugguggaugguugguacgguuucaggcaucaaaauucugagggaagaggacaagcagcagaucucaaaagcacucaagcagcaaucgaucaaaucaaugggaagcugaaucgguugaucgggaaaaccaacgagaaauuccaucagauugaaaaagaauucucagaaguagaaggaagaauucaggaccuugagaaauauguugaggacacuaaaauagaucucuggucauacaacgcggagcuucuuguugcccuggagaaccaacauacaauugaucuaacugacucagaaaugaacaaacuguuugaaaaaacaaagaagcaacugagggaaaaugcugaggauaugggaaaugguuguuucaaaauauaccacaaaugugacaaugccugcauaggaucaauaagaaauggaacuuaugaccacaauguguacagggaugaagcauuaaacaaccgguuccagaucaagggaguugagcugaagucaggguacaaagauuggauccuauggauuuccuuugccauaucauguuuuuugcuuuguguugcuuuguugggguucaucaugugggccugccaaaagggcaacauuaggugcaacauuugcauuuga

SEQ ID NO: 45243 - RNA, 1701 nt, Artificial Sequence; identical to SEQ ID NO: 45006
  derived and/or modified CDS sequence (wt) from hemagglutinin__InfluenzaA__ALE31700

SEQ ID NO: 45244 - RNA, 1701 nt, Artificial Sequence
  derived and/or modified CDS sequence (wt) from hemagglutinin__InfluenzaA__ALE31701
augaagacuaucauugcuuugagcuacauucuaugucugguuuucgcucaaaaaauuccuggaaaugacaauagcacggcaacgcugugccuugggcaccaugcaguaccaaacggaacgauagugaaaacaaucacaaaugaccgaauugaaguuacuaaugcuacugagcugguucagaauuccucaauaggugaaauaugcgacaguccucaucagauccuugauggagaaaacugcacacuaauagaugcucuauugggagacccucagugugauggcuuucaaaauaagaaaugggaccuuuuuguugaacgaagcaaagccuacagcaacuguuacccuuaugaugugccggauuaugccucccuuaggucacuaguugccucauccggcacacuggaguuuaacaaugaaagcuucaauuggacuggagucacucaaaacggaacaaguucugcuugcauaaggagaucuaguaguaguuucuuuaguagauuaaauugguugacccacuuaaacuacacauacccagcauugaacgugacuaugccaaacaaugagcaauuugacaaauuguacauuugggggguucaccacccggguacggacaaggaccaaaucuuccuguaugcucaaucaucaggaagaauaacaguaucuaccaaaagaagccaacaagcuguaauuccaaauaucggaucuagacccagaauaagggauaucccuagcagaauaagcaucuauuggacaauaguaaaaccgggagacauacuuuugauuaacagcacagggaaucuaauugcuccuagggguuacuucaaaauacgaagugggaaaagcucaauaaugagaucagaugcacccauuggcaaaugcaagucugagugcaucacuccaaauggaagcauucccaaugacaaaccauuccaaaauguaaacaggaucacauacggggccugucccagauauguuaagcauagcacucugaaauuggcaacaggaaugcgaaauguaccagagaaacaaacuagaggcauauuuggcgcaauagcggguuucauagaaaaugguugggagggaaugguggaugguugguacgguuucaggcaucaaaauucugagggaagaggacaagcagcagaucucaaaagcacucaagcagcaaucgaucaaaucaaugggaagcugaaucgauugaucgggaaaaccaacgagaaauuccaucagauugaaaaagaauucucagaaguagaaggaagaauucaggaccuugagaaauauguugaggacacuaaaauagaucucuggucauacaacgcggagcuucuuguugcccuggagaaccaacauacaauugaucuaacugacucagaaaugaacaaacuguuugaaaaaacaaagaagcaacugagagaaaaugcugaggauaugggaaaugguuguuucaaaauauaccacaaaugugacaaugccugcauaggaucaauaagaaauggaacuuaugaccacaauguguacagggaugaagcauuaaacaaccgguuccagaucaagggaguugagcugaagucaggguacaaagauuggauccuauggauuuccuuugccauaucauguuuuuugcuuuguguugcuuuguugggguucaucaugugggccugccaaaagggcaacauuaggugcaacauuugcauuuga

SEQ ID NO: 45245 - RNA, 1701 nt, Artificial Sequence; identical to SEQ ID NO: 45018
  derived and/or modified CDS sequence (wt) from hemagglutinin__InfluenzaA__ALE31702

SEQ ID NO: 45246 - RNA, 1701 nt, Artificial Sequence
  derived and/or modified CDS sequence (wt) from hemagglutinin__InfluenzaA__ALE31703
augaagacuaucauugcuuugagcuacauucuaugucugguuuucgcucaaaaaauuccuggaaaugacaauagcacggcaacgcugugccuugggcaccaugcaguaccaaacggaacgauagugaaaacaaucacaaaugaccgaauugaaguuacuaaugcuacugagcugguucagaauucaucaauaggugaaauaugcgacaguccucaucagauccuugauggagaaaacugcacacuaauagaugcucuauugggagacccucagugugauggcuuucaaaauaagaaaugggaccuuuuuguugaacgaagcaaagccuacagcaacuguuacccuuaugaugugccggauuaugccucccuuaggucacuaguugccucauccggcacacuggaguuuaacaaugaaagcuucaauuggacuggagucacucaaaacggaacaaguucugcuugcauaaggagaucuaguaguaguuucuuuaguagauuaaauugguugacccacuuaaacuacacauacccagcauugaacgugacuaugccaaacaaugagcaauuugacaaauuguacauuugggggguucaccacccggguacggacaaggaccaaaucuuccuguaugcucaaucaucaggaagaauaacaguaucuaccaaaagaagccaacaagcuguaaucccaaauaucggaucuagacccagaauaagggauaucccuagcagaauaagcaucuauuggacaauaguaaaaccgggagacauacuuuugauuaacagcacagggaaucuaauugcuccuagggguuacuucaaaauacgaagugggaaaagcucaauaaugagaucagaugcacccauuggcaaaugcaagucugagugcaucacuccaaacggaagcauucccaaugacaaaccauuccaaaauguaaacaggaucacauacggggccugucccagauauguuaagcauagcacucugaaauuggcaacaggaaugcgaaauguaccagagaaacaaacuagaggcauauuuggcgcaauagcggguuucauagaaaaugguugggagggaaugguggaugguugguacgguuucaggcaucaaaauucugagggaagaggacaagcagcagaucucaaaagcacucaagcagcaaucgaucaaaucaaugggaagcugaaucgauugaucgggaaaaccaacgagaaauuccaucagauugaaaaagaauucucagaaguagaaggaagaauucaggaccuugagaaauauguugaggacacuaaaauagaucucuggucauacaacgcggagcuucuuguugcccuggagaaccaacauacaauugaucuaacugacucagaaaugaacaaacuguuugaaaaaacaaagaagcaacugagggaaaaugcugaggauaugggaaaugguuguuucaaaauauaccacaaaugugacaaugccugcauaggaucaauaagaaauggaacuuaugaccacaauguguacagggaugaagcauuaaacaaccgguuccagaucaagggaguugagcugaagucaggguacaaagauuggauccuauggauuuccuuugccauaucauguuuuuugcuuuguguugcuuuguugggguucaucaugugggccugccaaaagggcaacauuaggugcaacauuugcauuuga

SEQ ID NO: 45247 - RNA, 1701 nt, Artificial Sequence; identical to SEQ ID NO: 45076
  derived and/or modified CDS sequence (wt) from hemagglutinin__InfluenzaA__ALE31704

SEQ ID NO: 45248 - RNA, 1701 nt, Artificial Sequence; identical to SEQ ID NO: 45018
  derived and/or modified CDS sequence (wt) from hemagglutinin__InfluenzaA__ALE31705

SEQ ID NO: 45249 - RNA, 1701 nt, Artificial Sequence
  derived and/or modified CDS sequence (wt) from hemagglutinin__InfluenzaA__ALE31706
augaagacuaucauugccuugagcuacauucuaugucugguuuucgcucaaaaaauuccuggaaaugacaauagcacggcaacgcugugccuugggcaccaugcaguaccaaacggaacgauagugaaaacaaucacaaaugaccgaauugaaguuacuaaugcuacugagcugguucagaauuccucaauaggugaaauaugcgacaguccucaucagauccuugauggagaaaacugcacacuaauagaugcucuauugggagacccucagugugauggcuuucaaaauaagaaaugggaccuuuuuguugaacgaagcaaagccuacagcaacuguuacccuuaugaugugccggauuaugccucccuuaggucacuaguugccucauccggcacacuggaguuuaacaaugaaagcuucaauuggacuggagucacucaaaacggaacaaguucugcuugcauaaggagaucuaguaguaguuucuuuaguagauuaaauugguugacccacuuaaacuacacauacccagcauugaacgugacuaugccaaacaaugaacaauuugacaaauuguacauuugggggguucaccacccggguacggacaaggaccaaaucuuccuguaugcucaaucaucaggaagaaucacaguaucuaccaaaggaagccaacaagcuguaaucccaaauaucggaucuagacccagaauaagggauaucccuagcagaauaagcaucuauuggacaauaguaaaaccgggagacauacuuuugauuaacagcacagggaaucuaauugcuccuagggguuacuucaaaauacgaagugggaaaagcucaauaaugagaucagaugcacccauuggcaaaugcaagucugaaugcaucacuccaaauggaagcauucccaaugacaaaccauuccaaaauguaaacaggaucacauacggggccugucccagauauguuaagcauagcacucugaaauuggcaacaggaaugcgaaauguaccagagaaacaaacuagaggcauauuuggcgcaauagcggguuucauagaaaaugguugggagggaaugguggaugguugguacgguuucaggcaucaaaauucugagggaagaggacaagcagcagaucucaaaagcacucaagcagcaaucgaucaaaucaaugggaagcugaaucgauugaucgggaaaaccaacgagaaauuccaucagauugaaaaagaauucucagaaguagaaggaagaauucaggaccuugagaaauauguugaggacacuaagauagaucucuggucauacaacgcggagcuucuuguugcccuggagaaccaacauacaauugaucuaacugacucagaaaugaacaaacuguuugaaaaaacaaagaagcaacugagggaaaaugcugaggauaugggaaaugguuguuucaaaauauaccacaaaugugacaaugccugcauaggaucaauaagaaauggaacuuaugaccacaauguguacagggaugaagcauuaaacaaccgguuccagaucaagggaguugagcugaagucaggguacaaagauuggauccuauggauuuccuuugccauaucaugucuuuugcuuuguguugcuuuguugggguucaucaugugggccugccaaaagggcaacauuaggugcaacauuugcauuuga

SEQ ID NO: 45250 - RNA, 1701 nt, Artificial Sequence; identical to SEQ ID NO: 45139
  derived and/or modified CDS sequence (wt) from hemagglutinin__InfluenzaA__ALE31707

SEQ ID NO: 45251 - RNA, 1701 nt, Artificial Sequence; identical to SEQ ID NO: 45139
  derived and/or modified CDS sequence (wt) from hemagglutinin__InfluenzaA__ALE31708

SEQ ID NO: 45252 - RNA, 1701 nt, Artificial Sequence
  derived and/or modified CDS sequence (wt) from hemagglutinin__InfluenzaA__ALE31709
augaagacuaucauugcuuugagcuacauucuaugucugguuuucgcucaaaaacuuccuggaaaugacaauagcacggcaacgcugugccuugggcaccaugcaguaccaaacggaacgauagugaaaacaaucacgaaugaccgaauugaaguuacuaaugcuacugagcugguucagaauuccucaauaggugaaauaugcgacaguccucaucagauccuugauggagaaaacugcacacuaauagaugcucuauugggagacccucagugugauggcuuucaaaauaagaaaugggaccuuuuuguugaacgaagcaaagccuacagcaacuguuacccuuaugaugugccggauuaugccucccuuaggucacuaguugccucauccggcacacuggaguuuaacaaugaaagcuucaauugggcuggagucacucaaaacggaacaaguucuucuugcauaaggggaucuaauaguaguuucuuuaguagauuaaauugguugacccacuuaaacuccaaauacccagcauuaaacgugacuaugccaaacaaugaacaauuugacaaauuguacauuugggggguucaccacccggguacggacaaggaccaaaucuuccuguaugcacaaucaucaggaagaaucacaguaucuaccaaaagaagccaacaagcuguaaucccgaauaucggaucuagacccagaauaagggauaucccuagcagaauaagcaucuauuggacaauaguaaaaccgggagacauacuuuugauuaacagcacagggaaucuaauugcuccuagggguuacuucaaaauacgaagugggaaaagcucaauaaugagaucagaugcacccauuggcaaaugcaagucugaaugcaucacuccaaauggaagcauucccaaugacaaaccauuccaaaauguaaacaggaucacauacggggccugucccagauauguuaagcaaagcacucugaaauuggcaacaggaaugcgaaauguaccagagagacaaacuagaggcauauuuggcgcaauagcggguuucauagaaaaugguugggagggaaugguggaugguugguacggcuucaggcaucaaaauucugagggaagaggacaagcagcagaucucaaaagcacucaagcagcaaucgaucaaaucaaugggaagcugaaucgauugaucgggaaaaccaacgagaaauuccaucagauugaaaaagaauucucagaaguagaagggagaauucaggaccuugagaaauauguugaggacacaaaaauagaucucuggucauacaacgcggagcuucuuguugcccuggagaaccaacauacaauugaucuaacugacucagaaaugaacaaacuguuugaaaaaacaaagaagcaacugagggaaaaugcugaggauaugggcaaugguuguuucaaaauauaccacaaaugugacaaugccugcauaggaucaaucagaaauggaacuuaugaccacgauguauacagggaugaagcauuaaacaaccgguuccagaucaagggaguugagcugaagucaggguacaaagauuggauccuauggauuuccuuugccauaucauguuuuuugcuuuguguugcuuuguugggguucaucaugugggccugccaaaagggcaacauuagaugcaacauuugcauuuga

SEQ ID NO: 45253 - RNA, 1701 nt, Artificial Sequence
  derived and/or modified CDS sequence (wt) from hemagglutinin__InfluenzaA__ALE31710
augaagacuaucauugcuuugagcuacauucuaugucugguuuucgcucaaaaaauuccuggaaaugacaauagcacggcaacgcugugccuugggcaccaugcaguaccaaacggaacgauagugaaaacaaucacaaaugaccgaauugaaguuacuaaugcuacugaguugguucagaauuccucaauaggugaaauaugcgacaguccucaucagauccuugauggagaaaacugcacacuaauagaugcucuauugggagacccucagugugauggcuuucaaaauaagaaaugggaccuuuuuguugaacgaagcaaagccuacagcaacuguuacccuuaugaugugccggauuaugccucccuuaggucacuaguugccucauccggcacacuggaguuuaacaaugaaagcuucaauuggacuggagucacucaaaacggaacaaguucugcuugcauaaggagaucuaguaguaguuucuuuaguagauuaaauugguugacccacuuaaacuacacauacccagcauugaacgugacuaugccaaacaaugaacaauuugacaaauuguacauuugggggguucaccacccggguacggacaaggaccaaaucuuccuguaugcucaaucaucaggaagaaucacaguaucuaccaaaagaagccaacaagcuguaaucccaaauaucggaucuagacucagaauaagggauaucccuagcagaauaagcaucuauuggacaauaguaaaaccgggagacauacuuuugauuaacagcacagggaaucuaauugcuccuagggguuacuucaaaauacuaagugggaaaagcucaauaaugagaucagaugcacccauuggcaaaugcaagucugaaugcaucacuccaaauggaagcauucccaaugacaaaccauuccaaaauguaaacaggaucacauacggggccugucccagauauguuaagcauagcacucugaaauuggcaacaggaaugcgaaauguaccagagaaacagacuagaggcauauuuggcgcaauagcggguuucauagaaaaugguugggaaggaaugguggaugguugguacgguuucaggcaucaaaauucugagggaagaggacaagcagcagaucucaaaagcacucaagcagcaaucgaucaaaucaaugggaagcugaaucgguugaucgggaaaaccaacgagaaauuccaucagauugaaaaagaauucucagaaguagaaggaagaauucaggaccuugagaaauauguugaggacucuaaaauagaucucuggucauauaacgcggagcuucuuguugcccuggagaaccaacauacaauugaucuaacugacucagaaaugaacaaacuguuugaaaaaacaaagaagcaacugagggaaaaugcugaggauaugggaaaugguuguuucaaaauauaccacaaaugugacaaugccugcauaggaucaauaagaaauggaacuuaugaccacaauguguacagggaugaagcauuaaacaaccgguuccagaucaaggggguugagcugaagucaggguacaaagauuggauccuauggauuuccuuugccauaucauguuuuuugcuuuguguugcuuuguugggguucaucaugugggccugccaaaagggcaacauuaggugcaacauuugcauuuga

SEQ ID NO: 45254 - RNA, 1701 nt, Artificial Sequence
  derived and/or modified CDS sequence (wt) from hemagglutinin__InfluenzaA__ALE31711
augaagacuaucauugcuuugagcuacauucuaugucugguuuucgcucaaaaaauuccuggaaaugacaauagcacggcaacgcugugccuugggcaccaugcaguaccaaacggaacgauagugaaaacaaucacaaaugaccgaauugaaguuacuaaugcuacugaguugguucagaauuccucaauaggugaaauaugcgacaguccucaucagauccuugauggagaaaacugcacacuaauagaugcucuauugggagacccucagugugauggcuuucaaaauaagaaaugggaccuuuuuguugaacgaagcaaagccuacagcaacuguuacccuuaugaugugccggauuaugccucccuuaggucacuaguugccucauccggcacacuggaguuuaacaaugaaagcuucaauuggacuggagucacucaaaacggaacaaguucugcuugcauaaggagaucuaguaguaguuucuuuaguagauuaaauugguugacccacuuaaacuacacauacccagcauugaacgugacuaugccaaacaaugaacaauuugacaaauuguacauuugggggguucaccacccggguacggacaaggaccaaaucuuccuguaugcucaaucaucaggaagaaucacaguaucuaccaaaagaagccaacaagcuguaaucccaaauaucggaucuagacccagaauaagggauaucccuagcagaauaagcaucuauuggacaauaguaaaaccgggagacauacuuuugauuaacagcacagggaaucuaauugcuccuagggguuacuucaaaauacuaagugggaaaagcucaauaaugagaucagaugcacccauuggcaaaugcaagucugaaugcaucacuccaaauggaagcauucccaaugacaaaccauuccaaaauguaaacaggaucacauacggggccugucccagauauguuaagcauagcacucugaaauuggcaacaggaaugcgaaauguaccagagaaacagacuagaggcauauuuggcgcaauagcggguuucauagaaaaugguugggaaggaaugguggaugguugguacgguuucaggcaucaaaauucugagggaagaggacaagcagcagaucucaaaagcacucaagcagcaaucgaucaaaucaaugggaagcugaaucgguugaucgggaaaaccaacgagaaauuccaucagauugaaaaagaauucucagaaguagaaggaagaauucaggaccuugagaaauauguugaggacucuaaaauagaucucuggucauauaacgcggagcuucuuguugcccuggagaaccaacauacaauugaucuaacugacucagaaaugaacaaacuguuugaaaaaacaaagaagcaacugagggaaaaugcugaggauaugggaaaugguuguuucaaaauauaccacaaaugugacaaugccugcauaggaucaauaagaaauggaacuuaugaccacaauguguacagggaugaagcauuaaacaaccgguuccagaucaaggggguugagcugaagucaggguacaaagauuggauccuauggauuuccuuugccauaucauguuuuuugcuuuguguugcuuuguugggguucaucaugugggccugccaaaagggcaacauuaggugcaacauuugcauuuga

SEQ ID NO: 45255 - RNA, 1701 nt, Artificial Sequence; identical to SEQ ID NO: 44999
  derived and/or modified CDS sequence (wt) from hemagglutinin__InfluenzaA__ALE31712

SEQ ID NO: 45256 - RNA, 1701 nt, Artificial Sequence
  derived and/or modified CDS sequence (wt) from hemagglutinin__InfluenzaA__ALE31713
augaagacuaucauugcuuugagcuacauucuaugucugguuuucgcucaaaaaauuccuggaaaugacaauagcacggcaacgcugugccuugggcaccaugcaguaccaaacggaacgauagugaaaacaaucacaaaugaccgaauugaaguuacuaaugcuacugagcugguucagaauuccucaauaggugaaauaugcgacaguccucaucagauccuugauggagaaaacugcacacuaauagaugcucuauugggagacccucagugugauggcuuucaaaauaagaaaugggaccuuuuuguugaacgaagcaaagccuacagcaacuguuacccuuaugaugugccggauuaugccucccuuaggucacuaguugccucauccggcacacuggaguuuaacaaugaaagcuucaauuggacuggagucacucaaaacggaacaaguucugcuugcauaaggaaaucuaguaguaguuucuuuaguagauuaaauugguugacccacuuaaacuacacauacccagcauugaacgugacuaugccaaacaaugaacaauuugacaaauuguacauuugggggauucaccacccggguacggacaaggaccaaaucuuccuguaugcucgaucaucaggaagaaucacaguaucuaccaaaagaagccaacaagcuguaaucccaaauaucggaucuagacccagaauaagggauaucccuagcagaauaagcaucuauuggacaauaguaaaaccgggagacauacuuuugauuaacagcacagggaaucuaauugcuccuagggguuacuucaaaauacgaagugggaaaagcucaauaaugagaucagaugcacccauuggcaaaugcaagucugaaugcaucacuccaaauggaagcauucccaaugacaaaccauuccaaaauguaaacaggaucacauacggggccugucccagauauguuaagcauagcacucugaaauuggcaacaggaaugcgaaauauaccagagaaacaaacuaaaggcauauuuggcgcaauagcggguuucauagaaaaugguugggagggaaugguggaugguugguacgguuucaggcaucaaaauucugaggggagaggacaagcagcagaucucaaaagcacucaagcagcaaucgaucaaaucaaugggaagcugaaucgauugaucgggaaaaccaacgagaaauuccaucagauugaaaaagaauucucagaaguagaaggaagaauucaggaccuugagaaauauguugaggacacuaaaauagaucucuggucauacaacgcggagcuucuuguugcccuggagaaucaacauacaauugaucuaacugacucagaaaugaacaaacuguuugaaaaaacaaagaagcaacugagggaaaaugcugaggauaugggaaaugguuguuucaaaauauaccacaaaugugacaaugccugcauaggaucaauaagaaauggaacuuaugaccacaauguguacagggaugaagcauuaaacaaucgguuccagaucaagggaguugagcugaagucaggguacaaagauuggauccuauggauuuccuuugccacaucauguuuuuugcuuuguguugcuuuguugggguucaucaugugggccugccaaaagggcaacauuaggugcaacauuugcauuuga

SEQ ID NO: 45257 - RNA, 1701 nt, Artificial Sequence; identical to SEQ ID NO: 45140
  derived and/or modified CDS sequence (wt) from hemagglutinin__InfluenzaA__ALE31714

SEQ ID NO: 45258 - RNA, 1701 nt, Artificial Sequence
  derived and/or modified CDS sequence (wt) from hemagglutinin__InfluenzaA__ALE31715
augaagacuaucauugcuuugagcuacauucuaugucugguuuucgcucaaaaaauuccuggaaaugacaauagcacggcaacgcugugccuugggcaccaugcaguaccaaacggaacgauagugaaaacaaucacaaaugaccgaauugaaguuacuaaugcuacugagcugguucagaauuccucaauaggugaaauaugcgacaguccucaucagauccuugauggagaaaacugcacacuaauagaugcucuauugggagacccucagugugauggcuuucaaaauaagaaaugggaccuuuuuguugaacgaagcaaagccuacagcaacuguuacccuuaugaugugccggauuaugccucccuuaggucacuaguugccucauccggcacacuggaguuuaacaaugaaagcuucaauuggacuggagucacucaaaacggaacaaguucugcuugcauaaggaaaucuaguaguaguuucuuuaguagauuaaauugguugacccacuuaaacuacacauacccagcauugaacgugacuaugccaaacaaugaacaauuugacaaauuguacauuugggggguucaccacccggguacugacaaggaccaaaucuuccuguaugcucgaucaucaggaagaaucacaguaucuaccaaaagaagccaacaagcuguaaucccaaauaucggaucuagacccagaauaagggauaucccuagcagaauaagcaucuauuggacaauaguaaaaccgggagacauacuuuugauuaacagcacagggaaucuaauugcuccuagggguuacuucaaaauacgaagugggaaaagcucaauaaugagaucagaugcacccauuggcaaaugcaagucugaaugcaucacuccaaauggaagcauucccaaugacaaaccauuccaaaauguaaacaggaucacauacggggccugucccagauauguuaagcauagcacucugaaauuggcaacaggaaugcgaaauguaccagagaaacaaacuagaggcauauuuggcgcaauagcggguuucauagaaaaugguugggagggaaugguggaugguugguacgguuucaggcaucaaaauucugaggggagaggacaagcagcagaucucaaaagcacucaagcagcaaucgaucaaaucaaugggaagcugaaucgauugaucgggaaaaccaacgagaaauuccaucagauugaaaaagaauucucagaaguagaaggaagaauucaggaccuugagaaauauguugaggacacuaaaauagaucucuggucauacaacgcggagcuucuuguugcccuggagaaucaacauacaauugaucuaacugacucagaaaugaacaaacuauuugaaaaaacaaagaagcaacugagggaaaaugcugaggauaugggaaaugguuguuucaaaauauaccacaaaugugacaaugccugcauaggaucaauaagaaauggaacuuaugaccacaauguguacagggaugaagcauuaaacaaccgguuccagaucaagggaguugagcugaagucaggguacaaagauuggauccuauggauuuccuuugccauaucauguuuuuugcuuuguguugcuuuguugggguucaucaugugggccugccaaaagggcaacauuaggugcaacauuugcauuuga

SEQ ID NO: 45259 - RNA, 1701 nt, Artificial Sequence
  derived and/or modified CDS sequence (wt) from hemagglutinin__InfluenzaA__ALE31716
augaagacuaucauugcuuugagcuacauucuaugucugguuuucgcucaaaaaauuccuggaaaugacaauagcacggcaacgcugugccuugggcaccaugcaguaccaaacggaacgauagugaaaacaaucacaaaugaccgaauugaaguuacuaaugcuacugaguugguucagaauuccucaauaggugaaauaugcgacaguccucaucagauccuugauggagaaaacugcacacuaauagaugcucuauugggagacccucagugugauggcuuucaaaauaagaaaugggaccuuuuuguugaacgaagcaaagccuacagcaacuguuacccuuaugaugugccggauuaugccucccuuaggucacuaguugccucauccggcacacuggaguuuaacaaugaaagcuucaauuggacuggagucacucaaaacggaacaaguucugcuugcauaaggagaucuaguaguaguuucuuuaguagauuaaauugguugacccacuuaaacuacacauacccagcauugaacgugacuaugccaaacaaugaacaauuugacaaauuguacauuugggggguucaccacccggguacggacaaggaccaaaucuuccuguaugcucaaucaucaggaagaaucacaguaucuaccaaaagaagccaacaagcuguaaucccaaauaucggaucuagacccagaauaagggauaucccuagcagaauaagcaucuauuggacaauaguaaaaccgggagacauacuuuugauuaacagcacagggaaucuaauugcuccuagggguuacuucaaaauacuaagugggaaaagcucaauaaugagaucagaugcacccauuggcaaaugcaagucugaaugcaucacuccaaauggaagcauucccaaugacaaaccauuccaaaauguaaacaggaucacauacggggccugucccagauauguuaagcauagcacucugaaauuggcaacaggaaugcgaaauguaccagagaaacaaacuagaggcauauuuggcgcaauagcggguuucauagaaaaugguugggaaggaaugguggaugguugguacgguuucaggcaucaaaauucugagggaagaggacaagcagcagaucucaaaagcacucaagcagcaaucgaucaaaucaaugggaagcugaaucgguugaucgggaaaaccaacgagaaauuccaucagauugaaaaagaauucucagaaguagaaggaagaauucaggaccuugagaaauauguugaggacucuaaaauagaucucuggucauauaacgcagagcuucuuguugcccuggagaaccaacauacaauugaucuaacugacucagaaaugaacaaacuguuugaaaaaacaaagaagcaacugagggaaaaugcugaggauaugggaaaugguuguuucaaaauauaccacaaaugugacaaugccugcauaggaucaauaagaaauggaacuuaugaccacaauguguacagggaugaagcauuaaacaaccgguuccagaucaaggggguugagcugaagucaggguacaaagauuggauccuauggauuuccuuugccauaucauguuuuuugcuuuguguugcuuuguugggguucaucaugugggccugccaaaagggcaacauuaggugcaacauuugcauuuga

SEQ ID NO: 45260 - RNA, 1701 nt, Artificial Sequence
  derived and/or modified CDS sequence (wt) from hemagglutinin__InfluenzaA__ALE31717
augaagacuaucauugcuuugagcuacauucuaugucugguuuucgcucaaaaaauuccuggaaaugacaauagcacagcaacgcugugccuugggcaccaugcaguaccaaacggaacgauagugaaaacaaucacaaaugaccgaauugaaguuacuaaugcuacugagcugguucagaauuccucaauaggugaaauaugcgacaguccucaucagauccuugauggagaaaacugcacacuaauagaugcucuauugggagacccucagugugauggcuuucaaaauaagaaaugggaccuuuuuguugaacgaagcaaagccuacagcaacuguuacccuuaugaugugccggauuaugccucccuuaggucacuaguugccucauccggcacacuggaguuuaacaaugaaagcuucaauuggacuggagucacucaaaacggaacaaguucugcuugcauaaggaaaucuaguaguaguuucuuuaguagauuaaauugguugacccacuuaaacuacaaauacccagcauugaacgugacuaugccaaacaaugaacaauuugacaaauuguacauuugggggguucaccacccggguacggacaaggaccaaaucuuccuguaugcucgaucaucaggaagaaucacaguaucuaccaaaacaagccaacaagcuguaaucccaaauaucggaucuagacccagaauaagggauaucccuagcagaauaagcaucuauuggacaauaguaaaaccgggagacauacuuuugauuaacagcacagggaaucuaauugcuccuagggguuacuucaaaauacgaagugggaaaagcucaauaaugagaucagaugcacccauuggcaaaugcaagucugaaugcaucacuccaaauggaagcauucccaaugacaaaccauuccaaaauguaaacaggaccacauacggggccugucccagauauguuaagcauagcacucugaaauuggcaacaggaaugcgaaauguaccagagaaacaaacuagaggcauauuuggcgcaauagcggguuucauagaaaaugguugggagggaaugguggaugguugguacgguuucaggcaucaaaauucugaggggagaggacaagcagcagaucucaaaagcacucaagcagcaaucgaucaaaucaaugggaagcugaaucgauugaucgggaaaaccaacgagaaauuccaucagauugaaaaagaauucucagaaguagaaggaagaauucaggaccuugagaaauauguugaggacacuaaaauagaucucuggucauacaacgcggagcuucuuguugcccuggagaaucaacauacaauugaucuaacugacucagaaaugaacaaacuguuugaaaaaacaaagaagcaacugagggaaaaugcugaggauaugggaaaugguuguuucaaaauauaccacaaaugugacaaugccugcauaggaucaauaagaaauggaacuuaugaccacaauguguacagggaugaagcauuaaacaaccgguuccagaucaagggaguugagcugaagucaggguacaaagauuggauccuauggauuuccuuugccauaucauguuuuuugcuuuguguugcuuuguugggguucaucaugugggccugccaaaagggcaacauuaggugcaacauuugcauuuga

SEQ ID NO: 45261 - RNA, 1701 nt, Artificial Sequence; identical to SEQ ID NO: 45140
  derived and/or modified CDS sequence (wt) from hemagglutinin__InfluenzaA__ALE31718

SEQ ID NO: 45262 - RNA, 1701 nt, Artificial Sequence
  derived and/or modified CDS sequence (wt) from hemagglutinin__InfluenzaA__ALE31719
augaagacuaucauugcuuugagcuacauucuaugucugguuuucgcucaaaaaauuccuggaaaugacaauagcacggcaacgcugugccuugggcaccaugcaguaccaaacggaacgauagugaaaacaaucacaaaugaccgaauugaaguuacuaaugcuacugagcugguucagaauuccucaauaggugaaauaugcgacaguccucaucagauccuugauggagaaaacugcacacuaauagaugcucuauugggagacccucagugugauggcuuucaaaauaagaaaugggaccuuuuuguugaacgaagcaaagccuacagcaacuguuacccuuaugaugugccggauuaugccucccuuaggucacuaguugccucauccggcacacuggaguuuaacaaugaaagcuucaauuggacuggagucacucaaaacggaacaaguucugcuugcauaaggaaaucuaguaguaguuucuuuaguagauuaaauugguugacccacuuaaacuacacauacccagcauugaacgugacuaugccaaacaaugaacaauuugacaaauuguacauuugggggguucaccacccggguacggacaaggaccaaaucuuccuguaugcucgaucaucaggaagaaucacaguaucuaccaaaagaagccaacaagcuguaaucccaaauaucggaucuagacccagaauaagggauaucccuagcagaauaagcaucuauuggacaauaguaaaaccgggagacauacuuuugauuaacagcacagggaaucuaauugcuccuagggguuacuucaaaauacgaagugggaaaagcucaauaaugagaucagaugcacccauuggcaaaugcaagucugaaugcaucacuccaaauggaagcauucccaaugacaaaccauuccaaaauguaaacaggaucacauacggggccugucccagauauguuaagcauagcacucugaaauuggcaacaggaaugcgaaauauaccagagaaacaaacuagaggcauauuuggcgcaauagcggguuucauagaaaaugguugggagggaaugguggaugguugguacgguuucaggcaucaaaauucugaggggagaggacaagcagcagaucucaaaagcacucaagcagcaaucgaucaaaucaaugggaagcugaaucgauugaucgggaaaaccaacgagaaauuccaucagauugaaaaagaauucucagaaguagaaggaagaauucaggaccuugagaaauauguugaggacacuaaaauagaucucuggucauacaacgcggagcuucuuguugcccuggagaaucaacauacaauugaucuaacugacucagaaaugaacaaacuguuugaaaaaacaaagaagcaacugagggaaaaugcugaggauaugggaaaugguuguuucaaaauauaccacaaaugugacaaugccugcauaggaucaauaagaaauggaacuuaugaccacaauguguacagggaugaagcauuaaacaaccgguuccagaucaagggaguugagcugaagucaggguacaaagauuggauccuauggauuuccuuugccauaucauguuuuuugcuuuguguugcuuuguugggguucaucaugugggccugccaaaagggcaacauuaggugcaacauuugcauuuga

SEQ ID NO: 45263 - RNA, 1701 nt, Artificial Sequence; identical to SEQ ID NO: 45137
  derived and/or modified CDS sequence (wt) from hemagglutinin__InfluenzaA__ALE31720

SEQ ID NO: 45264 - RNA, 1701 nt, Artificial Sequence; identical to SEQ ID NO: 45018
  derived and/or modified CDS sequence (wt) from hemagglutinin__InfluenzaA__ALE31721

SEQ ID NO: 45265 - RNA, 1701 nt, Artificial Sequence
  derived and/or modified CDS sequence (wt) from hemagglutinin__InfluenzaA__ALE31722
augaagacuaucauugcuuugagcugcauucuaugucugguuuucgcucaaaaacuuccuggaaaugacaauagcacggcaacgcugugccuugggcaccaugcaguaccaaacggaacgauagugaaaacaaucacgaaugaccgaauugaaguuacuaaugcuacugagcugguucagaacuccucaauaggugaaauaugcgacaguccucaucagauccuugauggagaaaacugcacacuaauagaugcucuauugggagacccucagugugauggcuuucaaaauaagaaaugggaccuuuuuguugaacgaagcaaagccuacagcaacuguuacccuuaugaugugccggauuaugccucccuuaggucacuaguugccucauccggcacacuggaguuuaacaaugaaagcuucaauugggcuggagucacucaaaacggaacaaguucuucuugcauaaggggaucuaauaguaguuucuuuaguagauuaaauugguugacccacuuaaacuccaaauacccagcauuaaacgugacuaugccaaacaaugaacaauuugacaaauuguacauuugggggguucaccacccggguacggacaaggaccaaaucuuccuguaugcacaaucaucaggaagaaucacaguaucuaccaaaagaagccaacaagcuguaaucccgaauaucggaucuagacccagaauaagggauaucccuagcagaauaagcaucuauuggacaauaguaaaaccaggagacauacuuuugauuaacagcacagggaaucuaauugcuccuagggguuacuucaaaauacgaagugggaaaagcucaauaaugagaucagaugcacccauuggcaaaugcaagucugaaugcaucacuccaaauggaagcauucccaaugacaaaccauuccaaaauguaaacaggaucacauacggggccugucccagauauguuaagcaaagcacucugaaauuggcaacaggaaugcgaaauguaccagagagacaaacuagaggcauauuuggcgcaauagcggguuucauagaaaaugguugggagggaaugguggaugguugguacggcuucaggcaucaaaauucugagggaagaggacaagcagcagaucucaaaagcacucaagcagcaaucgaucaaaucaaugggaagcugaaucgauugaucgggaaaaccaacgagaaauuccaucagauugaaaaagaauucucagaaguagaagggagaauucaggaccuugagaaauauguugaggacacaaaaauagaucucuggucauacaacgcggagcuucuuguugcccuggagaaccaacauacaauugaucuaacugacucagaaaugaacaaacuguuugaaaaaacaaagaagcaacugagggaaaaugcugaggauaugggcaaugguuguuucaaaauauaccacaaaugugacaaugccugcauaggaucaaucagaaauggaacuuaugaccacaauguauacagggaugaagcauuaaacaaccgguuccagaucaagggaguugagcugaagucaggguacaaagauuggauccuauggauuuccuuugccauaucauguuuuuugcuuuguguugcuuuguugggguucaucaugugggccugccaaaagggcaacauuaggugcaacauuugcauuuga

SEQ ID NO: 45266 - RNA, 1701 nt, Artificial Sequence
  derived and/or modified CDS sequence (wt) from hemagglutinin__InfluenzaA__ALE31723
augaagacuaucauugcuuugagcuacauucuaugucugguuuucgcucaaaaaauuccuggaaaugacaauagcacggcaacgcugugccuugggcaccaugcaguaccaaacggaacgauagugaaaacaaucacaaaugaccgaauugaaguuacuaaugcuacugagcugguucagaauuccucaauaggugaaauaugcgacaguccucaucagauccuugauggagaaaacugcacacuaauagaugcucuauugggagacccucagugugauggcuuucaaaauaagaaaugggaccuuuuuguugaacgaagcaaagccuacagcaacuguuacccuuaugaugugccggauuaugccucccuuaggucacuaguugccucauccggcacacuggaguuuaacaaugaaagcuucaauuggacuggagucacucaaaacggaacaaguucugcuugcauaaggaaaucuaguaguaguuucuuuaguagauuaaauugguugacccacuuaaacuacacauacccagcauugaaugugacuaugccaaacaaugaacaauuugacaaauuguacauuugggggguucaccacccggguacggacaaggaccaaaucuuccuguaugcucgaucaucaggaagaaucacaguaucuaccaaaagaagccaacaagcuguaaucccaaauaucggaucuagacccagaauaagggauaucccuagcagaauaagcaucuauuggacaauaguaaaaccgggagacauacuuuugauuaacagcacagggaaucuaauugcuccuagggguuacuucaaaauacgaagugggaaaagcucaauaaugagaucagaugcacccauuggcaaaugcaagucugaaugcaccacuccaaauggaagcauucccaaugacaaaccauuccaaaauguaaacaggaucacauacggggccugucccagauauguuaagcauagcacucugaaauuggcaacaggaaugcgaaauguaccagagaaacaaacuagaggcauauuuggcgcaauagcggguuucauagaaaaugguugggagggaaugguggaugguugguacgguuucaggcaucaaaauucugaggggagaggacaagcagcagaucucaaaagcacucaagcagcaaucgaucaaaucaaugggaagcugaaucgauugaucgggaaaaccaacgagaaauuccaucagauugaaaaagaauucucagaaguagaaggaagaauucaggaccuugagaaauauguugaggacacuaaaauagaucucuggucauacaacgcggagcuucuuguugcccuggagaaucaacauacaauugaucuaacugacucagaaaugaacaaacuguuugaaaaaacaaagaagcaacugagggaaaaugcugaggauaugggaaaugguuguuucaaaauauaccacaaaugugacaaugccugcauaggaucaauaagaaauggaacuuaugaccacaauguguacagggaugaagcauuaaacaaccgguuccagaucaagggaguugagcugaagucaggguacaaagauuggauccuauggauuuccuuugccauaucauguuuuuugcuuuguguugcuuuguugggguucaucaugugggccugccaaaagggcaacauuaggugcaacauuugcauuuga

SEQ ID NO: 45267 - RNA, 1701 nt, Artificial Sequence; identical to SEQ ID NO: 45076
  derived and/or modified CDS sequence (wt) from hemagglutinin__InfluenzaA__ALE31724

SEQ ID NO: 45268 - RNA, 1701 nt, Artificial Sequence; identical to SEQ ID NO: 45006
  derived and/or modified CDS sequence (wt) from hemagglutinin__InfluenzaA__ALE31725

SEQ ID NO: 45269 - RNA, 1701 nt, Artificial Sequence; identical to SEQ ID NO: 45076
  derived and/or modified CDS sequence (wt) from hemagglutinin__InfluenzaA__ALE31726

SEQ ID NO: 45270 - RNA, 1701 nt, Artificial Sequence; identical to SEQ ID NO: 45115
  derived and/or modified CDS sequence (wt) from hemagglutinin__InfluenzaA__ALE31727

SEQ ID NO: 45271 - RNA, 1701 nt, Artificial Sequence
  derived and/or modified CDS sequence (wt) from hemagglutinin__InfluenzaA__ALE31728
augaagacuaucauugcuuugagcuacauucuaugucugguuuucgcucaaaaaauuccuggaaaugacaauagcacggcaacgcugugccuugggcaccaugcaguaccaaacggaacgauagugaaaacaaucacaaaugaccgaauugaaguuacuaaugcuacugaguugguucagaauuccucaauaggugaaauaugcgacaguccucaucagauccuugauggagaaaacugcacacuaauagaugcucuauugggagacccucagugugauggcuuucaaaauaagaaaugggaccuuuuuguugaacgaagcaaagccuacagcaacuguuacccuuaugaugugccggauuaugccucccuuaggucacuaguugccucauccggcacacuggaguuuaacaaugaaagcuucaauuggacuggagucacucaaaacggaacaaguucugcuugcauaaggagaucuaguaguaguuucuuuaguagauuaaauugguugacccacuuaaacuacacauacccagcauugaacgugacuauaccaaacaaugaacaauuugacaaauuguacauuugggggguucaccacccggguacggacaaggaccaaaucuuccuguaugcucaaucaucaggaagaaucacaguaucuaccaaaagaagccaacaagcuguaaucccaaauaucggaucuagacccagaauaagggauaucccuagcagaauaagcaucuauuggacaauaguaaaaccgggagacauacuuuugauuaacagcacagggaaucuaauugcuccuagggguuacuucaaaauacgaagugggaaaagcucaauaaugagaucagaugcgcccauuggcaaaugcaagucugaaugcaucacuccaaauggaagcauucccaaugacaaaccauuccaaaauguaaacaggaucacauacggggccugucccagauauguuaagcauagcacucugaaauuggcaacaggaaugcgaaauguaccagagaaacaaacuagaggcauauuuggcgcaauagcggguuucauagaaaaugguugggagggaaugguggaugguugguacgguuucaggcaucaaaauucugagggaagaggacaagcagcagaucucaaaagcacucaagcagcaaucgaucaaaucaaugggaagcugaaucgguugaucgggaaaaccaacgagaaauuccaucagauugaaaaagaauucucagaaguagaaggaagaauucaggaccuugagaaauauguugaggacacuaaaauagaucucuggucauauaacgcggagcuucuuguugcccuggagaaccaacauacaauugaucuaacugacucagaaaugaacaaacuguuugaaaaaacaaagaagcaacugagggaaaaugcugaggauaugggaaaugguuguuucaaaauauaccacaaaugugacaaugccugcauaggaucaauaagaaauggaacuuaugaccacaauguguacagggaugaagcauuaaacaaccgguuccagaucaaggggguugagcugaagucaggguacaaagauuggauccuauggauuuccuuugccauaucauguuuuuugcuuuguguugcuuuguugggguucaucaugugggccugccaaaagggcaacauuaggugcaacauuugcauuuga

SEQ ID NO: 45272 - RNA, 1701 nt, Artificial Sequence
  derived and/or modified CDS sequence (wt) from hemagglutinin__InfluenzaA__ALE31729
augaagacuaucauugcuuugagcuacauucuaugucugguuuucgcucaaaaaauuccuggaaaugacaauagcacggcaacgcugugccuugggcaccaugcaguaccaaacggaacgauagugaaaacaaucacaaaugaccgaauugaaguuacuaaugcuacugagcugguucagaauuccucaauaggugaaauaugcgacaguccucaucagaucauugauggagaaaacugcacacuaauagaugcucuauugggagacccucagugugauggcuuucaaaauaagaaaugggaccuuuuuguugaacgaagcaaagccuacagcaacuguuacccuuaugaugugccggauuaugccucccuuaggucacuaguugccucauccggcacacuggaguuuaacaaugaaagcuucaauuggacuggagucacucaaaacggaacaaguucugcuugcauaaggagaucuaguaguaguuucuuuaguagauuaaauugguugacccacuuaaacuacacauacccagcauugaacgugacuaugccaaacaaugaacaauuugacaaauuguacauuugggggguucaccacccggguacggacaaggaccaaaucuuccuguaugcucaaucaucaggaagaaucacaguaucuaccaaaagaagccaacaagcuguaaucccaaauaucggaucuagacccagaauaagggauaucccuagcagaauaagcaucuauuggacaauaguaaaaccgggagacauacuuuugauuaacagcacagggaaucuaauugcuccuagggguuacuucaaaauacgaagugggaaaagcucaauaaugagaucagaugcacccauuggcaaaugcaagucugaaugcaucacuccaaauggaagcauucccaaugacaaaccauuccaaaauguaaacaggaucacauacggggccugucccagauauguuaagcauagcacucugaaauuggcaacaggaaugcgaaauguaccagagaaacaaacuagaggcauauuuggcgcaauagcggguuucauagaaaaugguugggagggaaugguggaugguugguacgguuucaggcaucaaaauucugagggaagaggacaagcagcagaucucaaaagcacucaagcagcaaucgaucaaaucaaugggaagcugaaucgauugaucgggaaaaccaacgagaaauuccaucagauugaaaaagaauucucagaaguagaaggaagaauucaggaccuugagaaauauguugaggacacuaaaauagaucucuggucauacaacgcggagcuucuuguugcccuggagaaccaacauacaauugaucuaacugacucagaaaugaacaaacuguuugaaaaaacaaagaagcaacugagggaaaaugcugaggauaugggaaaugguuguuucaaaauauaccacaaaugugacaaugccugcauaggaucaauaagaaauggaacuuaugaccacaauguguacagggaugaagcauuaaacaaccgguuccagaucaagggaguugagcugaagucaggguacaaagauuggauccuauggauuuccuuugccauaucauguuuuuugcuuuguguugcuuuguugggguucaucaugugggccugccaaaagggcaacauuaggugcaacauuugcauuuga

SEQ ID NO: 45273 - RNA, 1701 nt, Artificial Sequence
  derived and/or modified CDS sequence (wt) from hemagglutinin__InfluenzaA__ALE31730
augaagacuaucauugcuuugagcuacauucuaugucugguuuucgcucaaaaaauuccuggaaaugacaauagcacggcaacgcugugccuugggcaccaugcaguaccaaacggaacgauagugaaaacaaucacaaaugaccgaauugaaguuacuaaugcuacugagcugguucagaauuccucaauaggugaaauaugcgacaguccucaucagauccuugauggagaaaacugcacacuaauagaugcucuauugggagacccucagugugauggcuuucaaaauaagaaaugggaccuuuuuguugaacgaagcaaagccuacagcaacuguuacccuuaugaugugccggauuaugccucccuuaggucacuaguugccucauccggcacacuggaguuuaacaaugaaagcuucaauuggacuggagucacucaaaacggaacaaguucugcuugcauaaggagaucuaguaguaguuucuuuaguagauuaaauugguugacccacuuaaacuacacauacccagcauugaacgugacuaugccaaacaaugagcaauuugacaaauuguacauuugggggguucaccacccggguacggacaaggaccaaaucuuccuguacgcucaaucaucaggaagaauaacaguaucuaccaaaagaagccaacaagcuguaaucccaaauaucggaucuagacccagaauaagggauaucccuagcagaauaagcaucuauuggacaauaguaaaaccgggagacauacuuuugauuaacagcacagggaaucuaauugcuccuagggguuacuucaaaauacgaagugggaaaagcucaauaaugagaucagaugcacccauuggcaaaugcaagucugagugcaucacuccaaauggaagcauucccaaugacaaaccauuccaaaauguaaacaggaucacauacggggccugucccagauauguuaagcauagcacucugaaauuggcaacaggaaugcgaaauguaccagagaaacaaacuagaggcauauuuggcgcaauagcggguuucauagaaaaugguugggagggaaugguggaugguugguacgguuucaggcaucaaaauucugagggaagaggacaagcagcagaucucaaaagcacucaagcagcaaucgaucaaaucaaugggaagcugaaucgauugaucgggaaaaccaacgagaaauuccaucagauugaaaaagaauucucagaaguagaaggaagaauucaggaccuugagaaauauguugaggacacuaaaauagaucucuggucauacaacgcggagcuucuuguugcccuggagaaccaacauacaauugaucuaacugacucagaaaugaacaaacuguuugaaaaaacaaagaagcaacugagggaaaaugcugaggauaugggaaaugguuguuucaaaauauaccacaaaugugacaaugccugcauaggaucaauaagaaauggaacuuaugaccacaauguguacagggaugaagcauuaaacaaccgguuccagaucaagggaguugagcugaagucaggguacaaagauuggauccuauggauuuccuuugccauaucauguuuuuugcuuuguguugcuuuguugggguucaucaugugggccugccaaaagggcaacauuaggugcaacauuugcauuuga

SEQ ID NO: 45274 - RNA, 1701 nt, Artificial Sequence
  derived and/or modified CDS sequence (wt) from hemagglutinin__InfluenzaA__ALE31731
augaagacuaucauugcuuugagcuacauucuaugucagguuuucgcucaaaaaauuccuggaaaugacaauagcacggcaacgcugugccuugggcaccaugcaguaccaaacggaacgauagugaaaacaaucacaaaugaccgaauugaaguuacuaaugcuacugagcugguucagaauuccucaauaggugaaauaugcgacaguccucaucagauccuugauggagaaaacugcacacuaauagaugcucuauugggagacccucagugugauggcuuucaaaauaagaaaugggaccuuuuuguugaacgaagcaaagccuacagcaacuguuacccuuaugaugugccggauuaugccucccuuaggucacuaguugccucauccggcacacuggaguuuaacaaugaaagcuucaauuggacuggagucacucaaaacggaacaaguucugcuugcauaaggaaaucuaguaguaguuucuuuaguagauuaaauugguugacccacuuaaacuacacauacccagcauugaacgugacuaugccaaacaaugaacaauuugacaaauuguacauuugggggguucaccacccggguacggacaaggaccaaaucuuccuguaugcucgaucaucaggaagaaucacaguaucuaccaaaagaagccaacaagcuguaaucccaaauaucggaucuagacccagaauaagggauaucccuagcagaauaagcaucuauuggacaauaguaaaaccgggagacauacuuuugauuaacagcacagggaaucuaauugcuccuagggguuacuucaaaauacgaagugggaaaagcucaauaaugagaucagaugcacccauuggcaaaugcaagucugaaugcaucacuccaaauggaagcauucccaaugacaaaccauuccaaaauguaaacaggaucacauacggggccugucccagauauguuaagcauagcacucugaaauuggcaacaggaaugcgaaauguaccagagaaacaaacuagaggcauauuuggcgcaauagcggguuucauagaaaaugguugggagggaaugguggaugguugguacgguuucaggcaucaaaauucugaggggagaggacaagcagcagaucucaaaagcacucaagcagcaaucgaucaaaucaaugggaagcugaaucgauugaucgggaaaaccaacgagaaauuccaucagauugaaaaagaauucucagaaguagaaggaagaauucaggaccuugagaaauauguugaggacacuaaaauagaucucuggucauacaacgcggagcuucuuguugcccuggagaaucaacauacaauugaucuaacugacucagaaaugaacaaacuguuugaaaaaacaaagaagcaacugagggaaaaugcugaggauaugggaaaugguuguuucaaaauauaccacaaaugugacaaugccugcauaggaucaauaagaaauggaacuuaugaccacaauguguacagggaugaagcauuaaacaaccgguuccagaucaagggaguugagcugaagucaggguacaaagauuggauccuauggauuuccuuugccauaucauguuuuuugcuuuguguugcuuuguugggguucaucaugugggccugccaaaagggcaacauuaggugcaacauuugcauuuga

SEQ ID NO: 45275 - RNA, 1701 nt, Artificial Sequence
  derived and/or modified CDS sequence (wt) from hemagglutinin__InfluenzaA__ALE31732
augaagacuaucauugcuuugagcuacauucuaugucugguuuucgcucaaaaaauuccuggaaaugacaauagcacggcaacgcugugccuugggcaccaugcaguaccaaacggaacgauagugaaaacaaucacaaaugaccgaauugaaguuacuaaugcuacugagcugguucagaauuccucaauaggugaaauaugcgacaguccucaucagauccuugauggagaaaacugcacacuaauagaugcucuauugggagacccucagugugauggcuuucaaaauaagaaaugggaccuuuuuguugaacgaagcaaagccuacagcaacuguuacccuuaugaugugccggauuaugccucccuuaggucacuaguugccucauccggcacacuggaguuuaacaaugaaagcuucaauuggacuggagucacucaaaacggaacaaguucugcuugcauaaggaaaucuaguaguaguuucuuuaguagauuaaauugguugacccacuuaaacuacacauacccagcauugaacgugacuaugccaaacaaugaacaauuugacaaauuguacauuugggggguucaccacccggguacggacaaggaccaaaucuuccuguaugcucgaucaucaggaagaaucacaguaucuaccaaaagaagccaacaagcuguaaucccaaauaucggaucuagacccagaauaagggauaucccuagcagaauaagcaucuauuggacaauaguaaaaccgggagacauacuuuugauuaacagcacagggaaucuaauugcuccuagggguuacuucaaaauacgaagugggaaaagcucaauaaugagaucagaugcacccauuggcaaaugcaagucugaaugcaucacuccaaauggaagcauucccaaugacaaaccauuccaaaauguaaacaggaucacauacggggccugucccagauauguuaagcauagcacucugaaauuggcaacaggaaugcgaaauguaccagagaaacaaacuagaggcauauuuggcgcaauagcggguuucauagaaaaugguugggagggaaugguggaugguugguacgguuucaggcaucaaaauucugagggaagaggacaagcagcagaucucaaaagcacucaagcagcaaucgaucaaaucaaugggaagcugaaucgauugaucgggaaaaccaacgagaaauuccaucagauugaaaaagaauucucagaaguagaaggaagaauucaggaccuugagaaauauguugaggacacuaaaauagaucucuggucauacaacgcggagcuucuuguugcccuggagaaucaacauacaauugaucuaacugacucagaaaugaacaaacuguucgaaaaaacaaagaagcaacugagggaaaaugcugaggauaugggaaaugguuguuucaaaauauaccacaaaugugacaaugccugcauaggaucaauaagaaauggaacuuaugaccacaauguguacagggaugaagcauuaaacaaccgguuccagaucaagggaguugagcugaagucaggguacaaagauuggauccuauggauuuccuuugccauaucauguuuuuugcuuuguguugcuuuguugggguucaucaugugggccugccaaaagggcaacauuaggugcaacauuugcauuuga

SEQ ID NO: 45276 - RNA, 1701 nt, Artificial Sequence; identical to SEQ ID NO: 45140
  derived and/or modified CDS sequence (wt) from hemagglutinin__InfluenzaA__ALE31733

SEQ ID NO: 45277 - RNA, 1701 nt, Artificial Sequence
  derived and/or modified CDS sequence (wt) from hemagglutinin__InfluenzaA__ALE31734
augaagacuaucauugcuuugagcuacauucuaugucugguuuucgcucaaaaaauuccuggaaaugacaauagcacggcaacgcugugccuugggcaccaugcaguaccaaacggaacgauagugaaaacaaucacaaaugaccgaauugaaguuacuaaugcuacugagcugguucagaauuccucaauaggugaaauaugcgacaguccucaucagauccuugauggagaaaacugcacacuaauagaugcucuauugggagacccucagugugauggcuuucaaaauaagaaaugggaccuuuuuguugaacgaagcaaagccuacagcaacuguuacccuuaugaugugccggauuaugccucccuuaggucacuaguugccucauccggcacacuggaguuuaacaaugaaagcuucaauuggacuggagucacucaaaacggaacaaguucugcuugcauaaggaaaucuaguaguaguuucuuuaguagauuaaauugguugacccacuuaaaauacacauacccagcauugaacgugacuaugccaaacaaugaacaauuugacaaauuguacauuugggggguucaccacccggguacggacaaggaccaaaucuuccuguaugcucgaucaucaggaagaaucacaguaucuaccaaaagaagccaacaagcuguaaucccaaauaucggauuuagacccagaauaagggauaucccuagcagaauaagcaucuauuggacaauaguaaaaccgggagacauacuuuugauuaacagcacagggaaucuaauugcuccuagggguuacuucaaaauacgaagugggaaaagcucaauaaugagaucagaugcacccauuggcaaaugcaagucugaaugcaucacuccaaauggaagcauucccaaugacaaaccauuccaaaauguaaacaggaucacauacggggccugucccagauauguuaagcauagcacucugaaauuggcaacaggaaugcgaaauguaccagagaaacaaacuagaggcauauuuggcgcaauagcggguuucauagaaaaugguugggagggaaugguggaugguugguacgguuucaggcaucaaaauucugaggggagaggacaagcagcagaucucaaaagcacucaagcagcaaucgaucaaaucaaugggaagcugaaucgauugaucgggaaaaccaacgagaaauuccaucagauugaaaaagaauucucagaaguagaaggaagaauucaggaccuugagaaauauguugaggacacuaaaauagaucucuggucauacaacgcggagcuucuuguugcccuggagaaucaacauacaauugaucuaacugacucagaaaugaacaaacuguuugaaaaaacaaagaagcaacugagggaaaaugcugaggauaugggaaaugguuguuucaaaauauaccacaaaugugacaaugccugcauaggaucaauaagaaauggaacuuaugaccacaauguguacagggaugaagcauuaaacaaccgguuccagaucaagggaguugagcugaagucaggguacaaagauuggauccuauggauuuccuuugccauaucauguuuuuugcuuuguguugcuuuguugggguucaucaugugggccugccaaaagggcaacauuaggugcaacauuugcauuuga

SEQ ID NO: 45278 - RNA, 1701 nt, Artificial Sequence
  derived and/or modified CDS sequence (wt) from hemagglutinin__InfluenzaA__ALE31735
augaagacuaucauugcuuugagcuacauucuaugucugguuuucgcucaaaaaauuccuggaaaugacaauagcacggcaacgcugugccuugggcaccaugcaguaccaaacggaacgauagugaaaacaaucacaaaugaccgaauugaaguuacuaaugcuacugagcugguucagaauuccucaauaggugaaauaugcgacaguccucaucagauccuugauggagaaaacugcacacuaauagaugcucuauugggagacccucagugugauggcuuucaaaauaagaaaugggaccuuuuuguugaacgaagcaaagccuacagcaacuguuacccuuaugaugugccggauuaugccucccuuaggucacuaguugccucauccggcacacuggaguuuaacaaugaaagcuucaauuggacuggagucacucaaaacggaacaaguucugcuugcauaaggaaaucuaguaguaguuucuuuaguagauuaaauugguugacccacuuaaacuacacauacccagcauugaacgugacuaugccaaacaaugaacaauuugacaaauuguacauuugggggguucaccacccggguacggacaaggaccaaaucuuccuguaugcucgaucaucaggaagaaucacaguaucuaccaaaagaagccaacaagcuguaaucccaaauaucggaucuagacccagaauaagggauaucccuagcagaauaagcaucuauuggacaauaguaaaaccgggagacauacuuuugauuaacagcacagggaaucuaauugcuccuagggguuacuucaaaauacgaagugggaaaagcucaauaaugagaucagaugcacccauuggcaaaugcaagucugaaugcaucacuccaaauggaagcauucccaaugacaaaccauuccaaaauguaaacaggaucacauacggggccugucccagauauguuaagcauagcacucugaaauuggcaacaggaaugcgaaauguaccagagaaacaaacuagaggcauauuuggcgcaauagcggguuucauagaaaaugguugggagggaaugguggaugguugguacgguuucaggcaucaaaauucugagggaagaggacaagcagcagaucucaaaagcacucaagcagcaaucgaucaaaucaaugggaagcugaaucgauugaucgggaaaaccaacgagaaauuccaucagauugaaaaagaauucucagaaguagaaggaagaauucaggaccuugagaaauauguugaggacacuaaaauagaucucuggucauacaacgcggagcuucuuguugcccuggagaaucaacauacaauugaucuaacugacucagaaaugaacaaacuguuugaaaaaacaaagaagcaacugagggaaaaugcugaggauaugggaaaugguuguuucaaaauauaccacaaaugugacaaugccugcauaggaucaauaagaaauggaacuuaugaccacaauguguacagggaugaagcauuaaacaaccgguuccagaucaaaggaguugagcugaagucaggguacaaagauuggauccuauggauuuccuuugccauaucauguuuuuugcuuuguguugcuuuguugggguucaucaugugggccugccaaaagggcaacauuaggugcaacauuugcauuuga

SEQ ID NO: 45279 - RNA, 1701 nt, Artificial Sequence; identical to SEQ ID NO: 45018
  derived and/or modified CDS sequence (wt) from hemagglutinin__InfluenzaA__ALE31736

SEQ ID NO: 45280 - RNA, 1701 nt, Artificial Sequence
  derived and/or modified CDS sequence (wt) from hemagglutinin__InfluenzaA__ALE31737
augaagacuaucauugcuuugagcuacauucuaugucugguuuucgcucaaaagcuuccugaaaaugacaauagcacggcaacgcugugccuugggcaccaugcaguaccaaacggaacgauagugaaaacaaucacgagugaccgaauugaaguuacuaaugcuacugagcugguucagaauuccucaauaggugaaauaugcgacaguccucaucagauccuugauggaaaaaacugcacacuaauagaugcucuauugggagacccucagugugauggcuuucaaaauaagaaaugggaccuuuuuguugaacgaagcaaagccuacagcaacuguuacccuuaugaugugccggauuaugccucccuuaggucacuaguugccucauccgguacacuggaguuuaacgaugaaagcuucaauugggcuggagucacucaaaacggaacaaguucugcuugcauaaggggaucuaauaguaguuucuuuaguagauuaaauugguugacccacucaaacuucaaauacccagcauugaacgugacuaugccaaacaaugaacaauuugacaaauuguacauuugggggguucaccacccggguacggacaaggaccaaaucuuccuguaugcucaaucaucaggaagaaucacaguauccaccaaaagaagccaacaagcuguaaucccgaauaucggaucuagacccagaauaaggaauaucccuagcagaauaagcaucuauuggacaauaguaaaaccgggagacauacuuuugauuaacagcacagggaaucuaauugcuccuagggguuacuucaaaauacgaagugggaaaagcucaauaaugagaucagaugcacccauuggcaaaugcaagucugaaugcaucacuccaaauggaagcauucccaaugacaaaccauuccaaaauguaaacaggaucacauacggggccugucccagauauguuaagcaaagcacucugaaauuggcaacaggaaugcgaaauguaccagagaaacaaacuagaggcauauuuggcgcaauagcggguuucauagaaaaugguugggagggaaugaaggaugguugguacgguuucaggcaucaaaauucugagggaagaggacaagcagcagaucucaaaagcacucaagcagcaaucgaucaaaucaaugggaagcugaauagauugaucgggaaaaccaacgagaaauuccaucagauugaaaaagaauucucagaaguagaagggagaauucaggaccuugagaaauauguugaggacacaaaaauagaucucuggucauacaacgcggagcuucuuguugcccuggagaaccaacauacaauugaucuaacugacucagaaaugaacaaacuguuugaaaaaacaaagaagcaacugagggaaaaugcugaggauaugggcaaugguuguuucaaaauauaccacaaaugugacaaugccugcauaggaucaaucagaaauggaacuuaugaccacgauguauacagggaugaagcuuuaaacaaccgguuccagaucaagggaguugagcugaagucaggguacaaagauuggauccuauggauuuccuuugccauaucauguuuuuugcuuuguguugcuuuguugggguucaucaugugggccugccaaaagggcaacauuaggugcaacauuugcauuuga

SEQ ID NO: 45281 - RNA, 1701 nt, Artificial Sequence
  derived and/or modified CDS sequence (wt) from hemagglutinin__InfluenzaA__ALE31738
augaagacuaucauugccuugagcuacauucuaugucugguuuucgcucaaaaaauuccuggaaaugacaauagcacggcaacgcugugccuugggcaccaugcaguaccaaacggaacgauagugaaaacaaucacaaaugaccgaauugaaguuacuaaugcuacugagcugguucagaauuccucaauaggugaaauaugcgacaguccucaucagauccuugauggagaaaacugcacacuaauagaugcucuauugggagacccucagugugauggcuuucaaaauaagaaaugggaccuuuuuguugaacgaagcaaagccuacagcaacuguuacccuuaugaugugccggauuaugccucccuuaggucacuaguugccucauccggcacacuggaguuuaacaaugaaagcuucaauuggacuggagucacucaaaacggaacaaguucugcuugcauaaggagaucuaguaguaguuucuuuaguagauuaaauugguugacccacuuaaacuacaaauacccagcauugaacgugacuaugccaaacaaugaacaauuugacaaauuguacauuugggggguucaccacccggguacggacaaggaccaaaucuuccuguaugcucaaucaucaggaagaaucacaguaucuaccaaaggaagccaacaagcuguaaucccaaauaucggaucuagacccagaauaagggauaucccuagcagaauaagcaucuauuggacaauaguaaaaccgggagacauacuuuugauuaacagcacagggaaucuaauugcuccuagggguuacuucaaaauacgaagugggaaaagcucaauaaugagaucagaugcacccauuggcaaaugcaagucugaaugcaucacuccaaauggaagcauucccaaugacaaaccauuccaaaauguaaacaggaucacauacggggccugucccagauauguuaagcauagcacucugaaauuggcaacaggaaugcgaaauguaccagagaaacaaacuagaggcauauuuggcgcaauagcggguuucauagaaaaugguugggagggaaugguggaugguugguacgguuucaggcaucaaaauucugagggaagaggacaagcagcagaucucaaaagcacucaagcagcaaucgaucaaaucaaugggaagcugaaucgauugaucgggaaaaccaacgagaaauuccaucagauugaaaaagaauucucagaaguagaaggaagaauucaggaccuugagaaauauguugaggacacuaaaauagaucucuggucauacaacgcggagcuucuuguugcccuggagaaccaacauacaauugaucuaacugacucagaaaugaacaaacuguuugaaaaaacaaagaagcaacugagggaaaaugcugaggauaugggaaaugguuguuucaaaauauaccacaaaugugacaaugccugcauaggaucaauaagaaauggaacuuaugaccacaauguguacagggaugaagcauuaaacaaccgguuccagaucaagggaguugagcugaagucaggguacaaagauuggauccuauggauuuccuuugccauaucauguuuuuugcuuuguguugcuuuguugggguucaucaugugggccugccaaaagggcaacauuaggugcaacauuugcauuuga

SEQ ID NO: 45282 - RNA, 1701 nt, Artificial Sequence
  derived and/or modified CDS sequence (wt) from hemagglutinin__InfluenzaA__ALE31739
augaagacuaucauugcuuugagcuacauucuaugucugguuuucgcucaaaaaauuccuggaaaugacaauagcacggcaacgcugugccuugggcaccaugcaguaccaaacggaacgauagugaaaacaaucacaaaugaccgaauugaaguuacuaaugcuacugagcugguucagaauuccucaauaggugaaauaugcgacaguccucaucagauccuugauggagaaaacugcacacuaauagaugcucuauugggagacccucagugugauggcuuucaaaauaagaaaugggaccuuuuuguugaacgaagcaaagccuacagcaacuguuacccuuaugaugugccggauuaugccucccuuaggucacuaguugccucauccggcacacuggaguuuaacaaugaaagcuucaauuggacuggagucacucaaaacggaacaaguucugcuugcauaaggagaucuaguaguaguuucuuuaguagauuaaauugguugacccacuuaaacuacacauacccagcauugaacgugacuaugccaaacaaugaacaauuugacaaauuguacauuugggggguucaccacccggguacggacaaggaucaaaucuuccuguaugcucaaucaucaggaagaaucacaguaucuaccaaaagaagccaacaagcuguaaucccaaauaucggaucuagacccagaauaagggauaucccuagcagaauaagcaucuauuggacaauaguaaaaccgggagacauacuuuugauuaacagcacagggaaucuaauugcuccuagggguuacuucaaaauacgaagugggaaaagcucaauaaugagaucagaugcacccauuggcaaaugcaagucugaaugcaucacuccaaauggaagcauucccaaugacaaaccauuccaaaauguaaacaggaucacauacggggccugucccagauauguuaagcauagcacucugaaauuggcaacaggaaugcgaaauguaccagagaaacaaacuagaggcauauuuggcgcaauagcggguuucauagaaaaugguugggagggaaugguggaugguugguacgguuucaggcaucaaaauucugagggaagaggacaagcagcagaucucaaaagcacucaagcagcaaucgaucaaaucaaugggaagcugaaucgauugaucgggaaaaccaacgagaaauuccaucagauugaaaaagaauucucagaaguagaaggaagaauucaggaccuugagaaauauguugaggacacuaaaauagaucucuggucauacaacgcggagcuucuuguugcccuggagaaccaacauacaauugaucuaacugacucagaaaugaacaaacuguuugaaaaaacaaagaagcaacugagggaaaaugcugaggauaugggaaaugguuguuucaaaauauaccacaaaugugacaaugccugcauaggaucaauaagaaauggaacuuaugaccacaauguauacagggaugaagcauuaaacaaccgguuccagaucaagggaguugagcugaagucaggguacaaagauuggauccuauggauuuccuuugccauaucauguuuuuugcuuuguguugcuuuguugggguucaucaugugggccugccaaaagggcaacauuaggugcaacauuugcauuuga

SEQ ID NO: 45283 - RNA, 1701 nt, Artificial Sequence
  derived and/or modified CDS sequence (wt) from hemagglutinin__InfluenzaA__ALE31741
augaagacuaucauugcuuugagcuacauucuaugucugguuuucgcucaaaagcuuccugaaaaugacaauagcacggcaacgcugugccuugggcaccaugcaguaccaaacggaacgauagugaaaacaaucacgagugaccgaauugaaguuacuaaugcuacugagcugguucagaauuccucaauaagugaaauaugcgacaguccucaucagauccuugauggaaaaaacugcacacuaauagaugcucuauugggagacccucagugugauggcuuucaaaauaagaaaugggaccuuuuuguugaacgaagcaaagccuacagcaacuguuacccuuaugaugugccggauuaugccucccuuaggucacuaguugccucauccgguacacuggaguuuaacgaugaaagcuucaauugggcuggagucacucaaaacggaacaaguucugcuugcauaaggggaucuaauaguaguuucuuuaguagauuaaauugguugacccacucaaacuucaaauacccagcauugaacgugacuaugccaaacaaugaacaauuugacaaauuguacauuugggggguucaccacccggguacggacaaggaccaaaucuuccuguaugcucaaucaucaggaagaaucacaguauccaccaaaagaagccaacaagcuguaaucccgaauaucggaucuagacccagaauaaggaauaucccuagcagaauaagcaucuauuggacaauaguaaaaccgggagacauacuuuugauuaacagcacagggaaucuaauugcuccuagggguuacuucaaaauacgaagugggaaaagcucaauaaugagaucagaugcacccauuggcaaaugcaagucugaaugcaucacuccaaauggaagcauucccaaugacaaaccauuccaaaauguaaacaggaucacauacggggccugucccagauauguuaagcaaagcacucugaaauuggcaacaggaaugcgaaauguaccagagaaacaaacuagaggcauauuuggcgcaauagcggguuucauagaaaaugguugggagggaaugaaggaugguugguacgguuucaggcaucaaaauucugagggaagaggacaagcagcagaucucaaaagcacucaagcagcaaucgaucaaaucaaugggaagcugaaucgauugaucgggaaaaccaacgagaaauuccaucagauugaaaaagaauucucagaaguagaagggagaauucaggaccuugagaaauauguugaggacacaaaaauagaucucuggucauacaacgcggagcuucuuguugcccuggagaaccaacauacaauugaucuaacugacucagaaaugaacaaacuguuugaaaaaacaaagaagcaacugagggaaaaugcugaggauaugggcaaugguuguuucaaaauauaccacaaaugugacaaugccugcauaggaucaaucagaaauggaacuuaugaccacgauguauacagggaugaagcuuuaaacaaccgguuccagaucaagggaguugagcugaagucaggguacaaagauuggauccuauggauuuccuuugccauaucauguuuuuugcuuuguguugcuuuguugggguucaucaugugggccugccaaaagggcaacauuaggugcaacauuugcauuuga

SEQ ID NO: 45284 - RNA, 1701 nt, Artificial Sequence
  derived and/or modified CDS sequence (wt) from hemagglutinin__InfluenzaA__ALE31742
augaagacuaucauugcuuugagcuacauucuaugucuggguuucgcucaaaaaauuccuggaaaugacaauagcacggcaacgcugugccuugggcaccaugcaguaccaaacggaacgauagugaaaacaaucacaaaugaccgaauugaaguuacuaaugcuacugaguugguucagaauuccucaauaggugaaauaugcgacaguccucaucagauccuugauggagaaaacugcacacuaauagaugcucuauugggagacccucagugugauggcuuucaaaauaagaaaugggaccuuuuuguugaacgaagcaaagccuacagcaacuguuacccuuaugaugugccggauuaugccucccuuaggucacuaguugccucauccggcacacuggaguuuaacaaugaaagcuucaauuggacuggagucacucaaaacggaacaaguucugcuugcauaaggagaucuaguaguaguuucuuuaguagauuaaauugguugacccacuuaaacuacacauacccagcauugaacgugacuaugccaaacaaugaacaauuugacaaauuguacauuugggggguucaccacccggguacggacaaggaccaaaucuuccuguaugcucaaucaucaggaagaaucacaguaucuaccaaaagaagccaacaagcuguaaucccaaauaucggaucuagacccagaauaagggacaucccuagcagaauaagcaucuacuggacaauaguaaaaccgggagacauacuuuugauuaacagcacagggaaucuaauugcuccuagggguuacuucaaaauacgaagugggaaaagcucaauaaugagaucagaugcacccauuggcaaaugcaagucugaaugcaucacuccaaauggaagcauucccaaugacaaaccauuccaaaauguaaacagggucacauacggggccugucccagauauguuaagcauagcacucugaaauuggcaacaggaaugcgaaauguaccagagaaacaaacuagaggcauauuuggcgcaauagcggguuucauagaaaaugguugggagggaaugguggaugguugguacgguuucaggcaucaaaauucugagggaagaggacaagcagcagaucucaaaagcacucaagcagcaaucgaucaaaucaaugggaagcugaaucgguugaucgggaaaaccaacgagaaauuccaucagauugaaaaagaauucucagaaguagaaggaagaauucaggaccuugagaaauauguugaggacacuaaaauagaucucuggucauacaacgcagagcuucuuguugcccuggagaaccaacauacaauugaucuaacugacucagaaaugaacaaacuguuugaaaaaacaaagaagcaacugagggaaaaugcugaggauaugggaaaugguuguuucaaaauauaccacaaaugugacaaugccugcauaggaucaauaagaaauggaacuuaugaccacaauguguacagggaugaagcauuaaacaaccgguuucagaucaagggaguugagcugaagucaggguacaaagauuggauccuauggauuuccuuugccauaucauguuuuuugcuuuguguugcuuuguugggguucaucaugugggccugccaaaaaggcaacauuaggugcaacauuugcauuuga

SEQ ID NO: 45285 - RNA, 1701 nt, Artificial Sequence; identical to SEQ ID NO: 45018
  derived and/or modified CDS sequence (wt) from hemagglutinin__InfluenzaA__ALE31743

SEQ ID NO: 45286 - RNA, 1701 nt, Artificial Sequence; identical to SEQ ID NO: 45108
  derived and/or modified CDS sequence (wt) from hemagglutinin__InfluenzaA__ALE31744

SEQ ID NO: 45287 - RNA, 1701 nt, Artificial Sequence
  derived and/or modified CDS sequence (wt) from hemagglutinin__InfluenzaA__ALE31745
augaagacuaucauugcuuugagcuacauucuaugucugguuuucgcucaaaaacuuccuggaaaugacaauagcacggcaacgcugugccuugggcaccaugcaguaccaaacggaacgauagugaaaacgaucacgaaugaccgaauugaaguuacuaaugcuacugagcugguucagaauuccucaauaggugaaauaugcgacaguccucaucagauccuugauggaaaaaacugcacucuaauagaugcucuauugggagacccucagugugauggcuuucaaaauaagagaugggaccuuuuuguugaacgaagcaaagccuacagcaacuguuacccuuaugaugugccggauuaugccucccuuaggucacuaguugccucauccggcacacuggaguuuaacgaugaaagcuucaauugggcuggagucacucaaaacggaacaaguucugcuugcauaaggggaucuaauaguaguuucuuuaguagauuaaauugguugacccacucaaacuucaaauacccagcauugaacgugacuaugccaaacaaugaacaauuugacaaauuguacauuugggggguucaccacccggguacagacaaggaccaaaucuuccuguacgcucaaucaucaggaagaaucacaguaucuaccaaaagaagccaacaagcuguaaucccgaauaucggaucuagacucagaauaaggaauaucccuagcagaauaagcaucuauuggacaauaguaaaaccgggagacauacuuuugauuaacagcacagggaaucuaauugcuccuagggguuacuucaaaauacaaagugggaaaagcucaauaaugagaucagaugcacccauuggcaaaugcaagucugaaugcaucacuccaaauggaagcauucccaaugacaaaccauuccaaaauguaaacaagaucacauacggggccugucccagauauguuaagcaaagcacucugaaauuggcaacaggaaugcgaaauguaccagagaaacaaacuagaggcauauuuggcgcaauagcggguuucauagaaaaugguugggagggaaugaaggaugguugguacgguuucaggcaucaaaauucugagggaagaggacaagcagcagaccucaaaagcacucaagcagcaaucgaucaaaucaaugggaagcugaaucgauugaucgggaaaaccaacgagaaauuccaucagauugaaaaagaauucucagaaguagaagggagaauucaggaccuugagaaauauguugaggacacaaaaauagaucucuggucauacaacgcggagcuucuuguugcccuggagaaccaacauacaauugaucuaacugacucagaaaugaacaaacuguuugaaaaaacaaagaagcaacugagggaaaaugcugaggauaugggcaaugguuguuucaaaauauaccacaaaugugacaaugccugcauaggaucaaucagaaauggaacuuaugaccacgauguauacagggaugaagcuuuaaacaaccgguuccagaucaagggaguugagcugaagucaggguacaaagauuggauccuauggauuuccuuugccauaucauguuuuuugcuuuguguugcuuuguugggguucaucaugugggccugccaaaagggcaacauuaggugcaacauuugcauuuga

SEQ ID NO: 45288 - RNA, 1701 nt, Artificial Sequence
  derived and/or modified CDS sequence (wt) from hemagglutinin__InfluenzaA__ALE31747
augaagacuaucauugcuuugagcuacauucuaugucugguuuucgcucaaaaacuuccuggaaaugacaauagcacggcaacgcugugccuugggcaccaugcaguaccaaacggaacgauagugaaaacaaucacgaaugaccgaauugaaguuacuaaugcuacugagcugguucagaauuccucaauaggugaaauaugcgacaguccucaucagauccuugauggaaaaaacugcacucuaauagaugcucuauugggagacccucagugugauggcuuucaaaauaagagaugggaccuuuuuguugaacgaagcaaagccuacagcaacuguuacccuuaugaugugccggauuaugccucccuuaggucacuaguugccucauccggcacacuggaguuuaacgaugaaagcuucaauugggcuggagucacucaaaacggaacaaguucugcuugcauaaggggaucuaauaguaguuucuuuaguagauuaaauugguugacccacucaaacuucaaauacccagcauugaacgugacuaugccaaacaaugaacaauuugacaaauuguacauuugggggguucaccacccggguacagacaaggaccaaaucuuccuguacgcucaaucaucaggaagaaucacaguaucuaccaaaagaagccaacaagcuguaaucccgaauaucggaucuagacccagaauaaggaauaucccuagcagaauaagcaucuauuggacaauaguaaaaccgggagacauacuuuugauuaacagcacagggaaucuaauugcuccuagggguuacuucaaaauacaaagugggaaaagcucaauaaugagaucagaugcacccauuggcaaaugcaagucugaaugcaucacuccaaauggaagcauucccaaugacaaaccauuccaaaauguaaacaggaucacauacggggccugucccagauauguuaagcaaagcacucugaaauuggcaacaggaaugcgaaauguaccagagaaacaaacuagaggcauauuuggcgcaauagcggguuucauagaaaaugguugggagggaaugaaggaugguugguacgguuucaggcaucaaaauucugagggaagaggacaagcagcagaucucaaaagcacucaagcagcaaucgaucaaaucaaugggaagcugaaucgauugaucgggaaaaccaacgagaaauuccaucagauugaaaaagaauucucagaaguagaagggagaguucaggaccuugagaaauauguugaggacacaaaaauagaucucuggucauacaacgcggagcuucuuguugcccuggagaaccaacauacaauugaucuaacugacucagaaaugaacaaacuguuugaaaaaacaaagaagcaacugagggaaaaugcugaggauaugggcaaugguuguuucaaaauauaccacaaaugugacaaugccugcauaggaucaaucagaaauggaacuuaugaccacgauguauacagggaugaagcuuuaaacaaccgguuccagaucaagggaguugagcugaagucaggguacaaagauuggauccuauggauuuccuuugccauaucauguuuuuugcuuuguguugcuuuguugggguucaucaugugggccugccaaaagggcaacauuaggugcaacauuugcauuuga

SEQ ID NO: 45289 - RNA, 1701 nt, Artificial Sequence; identical to SEQ ID NO: 45018
  derived and/or modified CDS sequence (wt) from hemagglutinin__InfluenzaA__ALE31748

SEQ ID NO: 45290 - RNA, 1701 nt, Artificial Sequence; identical to SEQ ID NO: 45168
  derived and/or modified CDS sequence (wt) from hemagglutinin__InfluenzaA__ALE31749

SEQ ID NO: 45291 - RNA, 1701 nt, Artificial Sequence
  derived and/or modified CDS sequence (wt) from hemagglutinin__InfluenzaA__ALE31750
augaagacuaucauugccuugagcuacauucuaugucugguuuucgcucaaaaaauuccuggaaaugacaauagcacggcaacgcugugccuuggacaccaugcaguaccaaacggaacgauagugaaaacaaucacaaaugaccgaauugaaguuacuaaugcuacugagcugguucagaauuccucaauaggugaaauaugcgacaguccucaucagauccuugauggagaaaacugcacacuaauagaugcucuauugggagacccucagugugauggcuuucaaaauaagaaaugggaccuuuuuguugaacgaagcaaagccuacagcaacuguuacccuuaugaugugccggauuaugccucccuuaggucacuaguugccucauccggcacacuggaguuuaacaaugaaagcuucaauuggacuggagucacucaaaacggaacaaguucugcuugcauaaggagaucuaguaguaguuucuuuaguagauuaaauugguugacccacuuaaacuacacauacccagcauugaacgugacuaugccaaacaaugaacaauuugacaaauuguacauuugggggguucaccacccggguacggacaaggaccaaaucuuccuguaugcucaaucaucaggaagaaucacaguaucuaccaaaggaagccaacaagcuguaaucccaaauaucggaucuagacccagaauaagggauaucccuagcagaauaagcaucuauuggacaauaguaaaaccgggagacauacuuuugauuaacagcacagggaaucuaauugcuccuagggguuacuucaaaauacgaagugggaaaagcucaauaaugagaucagaugcacccauuggcaaaugcaagucugaaugcaucacuccaaauggaagcauucccaaugacaaaccauuccaaaauguaaacaggaucacauacggggccugucccagauauguuaagcauagcacucugaaauuggcaacaggaaugcgaaauguaccagagaaacaaacuagaggcauauuuggcgcaauagcggguuucauagaaaaugguugggagggaaugguggaugguugguacgguuucaggcaucaaaauucugaaggaagaggacaagcagcagaucucaaaagcacucaagcagcaaucgaucaaaucaaugggaagcugaaucgauugaucgggaaaaccaacgagaaauuccaucagauugaaaaagaauucucagaaguagaaggaagaauucaggaccuugagaaauauguugaggacacuaaaauagaucucuggucauacaacgcggagcuucuuguugcccuggagaaccaacauacaauugaucuaacugacucagaaaugaacaaacuguuugaaaaaacaaagaagcaacugagggaaaaugcugaggauaugggaaaugguuguuucaaaauauaccacaaaugugacaaugccugcauaggaucaauaagaaauggaacuuaugaccacaauguguacagggaugaagcauuaaacaaccgguuccagaucaagggaguugagcugaagucaggguacaaagauuggauccuauggauuuccuuugccauaucauguuuuuugcuuuguguugcuuuguugggguucaucaugugggccugccaaaagggcaacauuaggugcaacauuugcauuuga

SEQ ID NO: 45292 - RNA, 1701 nt, Artificial Sequence
  derived and/or modified CDS sequence (wt) from hemagglutinin__InfluenzaA__ALE31751
augaagacuaucauugccuugagcuacauucuaugucugguuuucgcucaaaaaauuccuggaaaugacaauagcacggcaacgcugugccuugggcaccaugcaguaccaaacggaacgauagugaaaacaaucacaaaugaccgaauugaaguuacuaaugcuacugagcugguucagaauuccucaauaggugaaauaugcgacaguccucaucagauccuugauggagaaaacugcacacuaauagaugcucuauugggagacccucagugugauggcuuucaaaauaagaaaugggaccuuuuuguugaacgaagcaaagccuacagcaacuguuacccuuaugaugugccggauuaugccucccuuaggucacuaguugccucauccggcacacuggaguuuaacaaugaaagcuucaauuggacuggagucacucaaaacggaacaaguucugcuugcauaaggagaucuaguaguaguuucuuuaguagauuaaauugguugacccacuuagacuacacauacccagcauugaacgugacuaugccaaacaaugaacaauuugacaaauuguacauuugggggguucaccacccggguacggacaaggaccaaaucuuccuguaugcucaaucaucaggaagaaucacaguaucuaccaaaagaagccaacaagcuguaaucccaaauaucggaucuagacccagaauaagggauaucccuagcagaauaagcaucuauuggacaauaguaaaaccgggagacauacuuuugauuaacagcacagggaaucuaauugcuccuagggguuacuucaaaauacgaagugggaaaagcucaauaaugagaucagaugcacccauuggcaaaugcaagucugaaugcaucacuccaaauggaagcauucccaaugacaaaccauuccaaaauguaaacaggaucacauacggggccugucccagauauguuaagcauagcacucugaaauuggcaacaggaaugcgaaauguaccagagaaacaaacuagaggcauauuuggcgcaauagcggguuucauagaaaaugguugggagggaaugguggaugguugguacgguuucaggcaucaaaauucugagggaagaggacaagcagcagaucucaaaagcacucaagcagcaaucgaucaaaucaaugggaagcugaaucgauugaucgggaaaaccaacgagaaauuccaucagauugaaaaagaauucucagaaguagaaggaagaauucaggaccuugagaaauauguugaggacacuaaaauagaucucuggucauacaacgcggagcuucuuguugcccuggagaaccaacauacaauugaucuaacugacucagaaaugaacaaacuguuugaaaaaacaaagaagcaacugagggaaaaugcugaggauaugggaaaugguuguuucaaaauauaccacaaaugugacaaugccugcauaggaucaauaagaaauggaacuuaugaccacaauguguacagggaugaagcauuaaacaaccgguuccagaucaagggaguugagcugaagucaggguacaaagauuggauccuauggauuuccuuugccauaucauguuuuuugcuuuguguugcuuuguugggguucaucaugugggccugccaaaagggcaacauuaggugcaacauuugcauuuga

SEQ ID NO: 45293 - RNA, 1701 nt, Artificial Sequence
  derived and/or modified CDS sequence (wt) from hemagglutinin__InfluenzaA__ALE31752
augaagacuaucauugcuuugagcuacauucuaugucugguuuucgcucaaaaaauuccuggaaaugacaauagcacggcaacgcugugccuugggcaccaugcaguaccaaacggaacgauagugaaaacaaucacaaaugaccgaauugaaguuacuaaugcuacugagcugguucagaauuccucaauaggugaaauaugcgacaguccucaucagauccuugauggagaaaacugcacacuaauagaugcucuauugggggacccucagugugauggcuuucaaaauaagaaaugggaccuuuuuguugaacgaagcaaagccuacagcaacuguuacccuuaugaugugccggauuaugccucccuuaggucacuaguugccucauccggcacacuggaguuuaacaaugaaagcuucaauuggacuggagucacucaaaacggaacaaguucugcuugcauaaggagaucuaguaguaguuucuuuaguagauuaaauugguugacccacuuaaacuacacauacccagcauugaacgugacuaugccaaacaaugaacaauuugacaaauuguacauuugggggguucaccacccggguacggacaaggaccaaaucuuccuguaugcucaaucaucaggaagaaucacaguaucuaccaaaagaagccaacaagcuguaaucccaaauaucggaucuagacccagaauaagggauaucccuagcagaauaagcaucuauuggacaauaguaaaaccgggagacauacuuuugauuaacagcacagggaaucuaauugcuccuagggguuacuucaaaauacgaagugggaaaagcucaauaaugagaucagaugcacccauuggcaaaugcaagucugaaugcaucacuccaaauggaagcauucccaaugacaaaccauuccaaaauguaaacaggaucacauacggggccugucccagauauguuaagcauagcacucugaaauuggcaacaggaaugcgaaauguaccagagaaacaaacuagaggcauauuuggcgcaauagcggguuucauagaaaaugguugggagggaaugguggaugguugguacgguuucaggcaucaaaauucugagggaagaggacaagcagcagaucucaaaagcacucaagcagcaaucgaucaaaucaaugggaagcugaaucgauugaucgggaaaaccaacgagaaauuccaucagauugaaaaagaauucucagaaguagaaggaagaauucaggaccuugagaaauauguugaggacacuaaaauagaucucuggucauacaacgcggagcuucuuguugcccuggagaaccaacauacaauugaucuaacugacucagaaaugaacaaacuguuugaaaaaacaaagaagcaacugagggaaaaugcugaggauaugggaaaugguuguuucaaaauauaccacaaaugugacaaugccugcauaggaucaauaagaaauggaacuuaugaccacaauguguacagggaugaagcauuaaacaaccgguuccagaucaagggaguugagcugaagucaggguacaaagauuggauccuauggauuuccuuugccauaucauguuuuuugcuuuguguugcuuuguugggguucaucaugugggccugccaaaagggcaacauuaggugcaacauuugcauuuga

SEQ ID NO: 45294 - RNA, 1701 nt, Artificial Sequence
  derived and/or modified CDS sequence (wt) from hemagglutinin__InfluenzaA__ALE31753
augaagacuaucauugccuugagcuacauucuaugucugguuuucgcucaaaaaauuccuggaaaugacaauagcacggcaacgcugugccuugggcaccaugcaguaccaaacggaacgauagugaaaacaaucacaaaugaccgaauugaaguuacuaaugcuacugagcugguucagaauuccucaauaggugaaauaugcgacaguccucaucagauccuugauggagaaaacugcacacuaauagaugcucuauugggagacccucagugugauggcuuucaaaauaagaaaugggaccuuuuuguugaacgaagcaaagccuacagcaacuguuacccuuaugaugugccggauuaugccucccuuaggucacuaguugccucauccggcacacuggaguuuaacaaugaaagcuucaauuggacuggagucacucaaaacggaacaaguucugcuugcauaaggagaucuaguaguaguuucuuuaguagauuaaauugguugacccacuuaaacuacacauacccagcauugaacgugacuaugccaaacaaugaacaauuugacaaauuguacauuugggggguucaccacccggguacggacaaggaccaaaucuuccuguaugcucaaucaucaggaagaaucacaguaucuaccaaaggaagccaacaagcuguaaucccaaauaucggaucuagacccagaauaagggauaucccuagcagaauaagcaucuauuggacaauaguaaaaccgggagacauacuuuugauuaacagcacagggaaucuaauugcuccuagggguuacuucaaaauacgaagugggaaaagcucaauaaugagaucagaugcacccauuggcaaaugcaagucugaaugcaucacuccaaauggaagcauucccaaugacaaaccauuccaaaauguaaacaggaucacauacggggccugucccagauauguuaagcauagcacucugaaauuggcaacaggaaugcgaaauguaccagagaaacaaacuagaggcauauuuggcgcaauagcggguuucauagaaaaugguugggagggaaugguggaugguugguacgguuucaggcaucaaaauucugaaggaagaggacaagcagcagaucucaaaagcacucaagcagcaaucgaucaaaucaaugggaagcugaaucgauugaucgggaaaaccaacgagaaauuccaucagauugaaaaagaauucucagaaguagaaggaagaauucaggaccuugagaaauauguugaggacacuaaaauagaucucuggucauacaacgcggagcuucuuguugcccuggagaaccaacauacaauugaucuaacugacucagaaaugaacaaacuguuugaaaaaacaaagaagcaacugagggaaaaugcugaggauaugggaaaugguuguuucaaaauauaccacaaaugugacaaugccugcauaggaucaauaagaaauggaacuuaugaccacaauguguacagggaugaagcauuaaacaaccgguuccagaucaagggaguugagcugaagucaggguacaaagauuggauccuauggauuuccuuugccauaucauguuuuuugcuuuguguugcuuuguugggguucaucaugugggccugccaaaagggcaacauuaggugcaacauuugcauuuga

SEQ ID NO: 45295 - RNA, 1701 nt, Artificial Sequence; identical to SEQ ID NO: 45168
  derived and/or modified CDS sequence (wt) from hemagglutinin__InfluenzaA__ALE31754

SEQ ID NO: 45296 - RNA, 1701 nt, Artificial Sequence
  derived and/or modified CDS sequence (wt) from hemagglutinin__InfluenzaA__ALE31755
augaagacuaucauugcuuugagcuacauucuaugucugguuuucgcucaaaagcuuccugaaaaugacaauagcacggcaacgcugugccuugggcaccaugcaguaccaaacggaacgauagugaaaacaaucacgagugaccaaauugaaguuacuaaugcuacugagcugguucagaauuccucaauaggugaaauaugcgacaguccucaucagauccuugauggaaaaaacugcacacuaauagaugcucuauugggagacccucagugugauggcuuucaaaauaagaaaugggaccuuuuuguugaacgaagcaaagccuacagcaacuguuacccuuaugaugugccggauuaugccucccuuaggucacuaguugccucauccgguacacuggaguuuaacgaugaaagcuucaauugggcuggagucacucaaaacggaacaaguucugcuugcauaaggggaucuaauaguaguuucuuuaguagauuaaauugguugacccacucaaacuucaaauacccagcauugaacgugacuaugccaaacaaugaacaauuugacaaauuguacauuugggggguucaccacccggguacggacaaggaccaaaucuuccuguaugcucaaucaucaggaagaaucacaguauccaccaaaagaagccaacaagcuguaaucccgaauaucggaucuagacccagaauaaggaauaucccuagcagaauaagcaucuauuggacaauaguaaaaccgggagacauacuuuugauuaacagcacagggaaucuaauugcuccuagggguuacuucaaaauacgaagugggaaaagcucaauaaugagaucagaugcacccauuggcaaaugcaagucugaaugcaucacuccaaauggaagcauucccaaugacaaaccauuccaaaauguaaacaggaucacauacggggccugucccagauauguuaagcaaagcacucugaaauuggcaacaggaaugcgaaauguaccagagaaacaaacuagaggcauauuuggcgcaauagcggguuucauagaaaaugguugggagggaaugaaggaugguugguacgguuucaggcaucaaaauucugagggaagaggacaagcagcagaucucaaaagcacucaagcagcaaucgaucaaaucaaugggaagcugaaucgauugaucgggaaaaccaacgagaaauuccaucagauugaaaaagaauucucagaaguagaagggagaauucaggaccuugagaaauauguugaggacacaaaaauagaucucuggucauacaacgcggagcuucuuguugcccuggagaaccaacauacaauugaucuaacugacucagaaaugaacaaacuguuugaaaaaacaaagaagcaacugagggaaaaugcugaggauaugggcaaugguuguuucaaaauauaccacaaaugugacaaugccugcauaggaucaaucagaaauggaacuuaugaccacaauguauacagggaugaagcuuuaaacaaccgguuccagaucaagggaguugagcugaagucaggguacaaagauuggauccuauggauuuccuuugccauaucauguuuuuugcuuuguguugcuuuguugggguucaucaugugggccugccaaaagggcaacauuaggugcaacauuugcauuuga

SEQ ID NO: 45297 - RNA, 1701 nt, Artificial Sequence; identical to SEQ ID NO: 45291
  derived and/or modified CDS sequence (wt) from hemagglutinin__InfluenzaA__ALE31756

SEQ ID NO: 45298 - RNA, 1701 nt, Artificial Sequence; identical to SEQ ID NO: 45006
  derived and/or modified CDS sequence (wt) from hemagglutinin__InfluenzaA__ALE31757

SEQ ID NO: 45299 - RNA, 1701 nt, Artificial Sequence
  derived and/or modified CDS sequence (wt) from hemagglutinin__InfluenzaA__ALE31758
augaagacuaucauugcuuugagcuacauucuaugucugguuuucgcucaaaaaauuccuggaaaugacaauagcacggcaacgcugugccuugggcaccaugcaguaccaaacggaacgauagugaaaacaaucacaaaugaccgaauugaaguuacuaaugcuacugagcugguucagaauuccucaauaggugaaauaugcgacaguccucaucagauccuugauggagaaaacugcacacuaauagaugcucuauugggagauccucagugugauggcuuucaaaauaagaaaugggaccuuuuuguugaacgaagcaaagccuacagcaacuguuacccuuaugaugugccggauuaugccucccuuaggucacuaguugccucauccggcacacuggaguuuaacaaugaaagcuucaauuggacuggagucacucaaaacggaacaaguucugcuugcauaaggagaucuaguaguaguuucuuuaguagauuaaauugguugacccacuuaaacuacacauacccagcauugaacgugacuaugccaaacaaugaacaauuugacaaauuguacauuugggggguucaccacccggguacggacaaggaccaaaucuuccuguaugcucaaucaucaggaagaaucacaguaucuaccaaaagaagccaacaagcuguaaucccaaauaucggaucuagacccagaauaagggauaucccuagcagaauaagcaucuauuggacaauaguaaaaccgggagacauacuuuugauuaacagcacagggaaucuaguugcuccuagggguuacuucaaaauacgaagugggaaaagcucaauaaugagaucagaugcacccauuggcaaaugcaagucugaaugcaucacuccaaauggaagcauucccaaugacaaaccauuccaaaauguaaacaggaucacauacggggccugucccagauauguuaagcauagcacccugaaauuggcaacaggaaugcgaaauguaccagagaaacaaacuagaggcauauuuggcgcaauagcggguuucauagaaaaugguugggagggaaugguggaugguugguacgguuucaggcaucaaaauucugagggaagaggacaagcagcagaucucaaaagcacucaagcagcaaucgaucaaaucaaugggaagcugaaucgauugaucgggaaaaccaacgagaaauuccaucagauugaaaaagaauucucagaaguagaaggaagaauucaggaccuugagaaauauguugaggacacuaaaauagaucucuggucauacaacgcggagcuucuuguugcccuggagaaccaacauacaauugaucuaacugacucagaaaugaacaaacuguuugaaaaaacaaagaagcaacugagggaaaaugcugaggauaugggaaaugguuguuucaaaauauaccacaaaugugacaaugccugcauaggaucaauaagaaauggaacuuaugaccacaauguguacagggaugaagcauuaaacaaccgguuccagaucaagggaguugagcugaagucaggguacaaagauuggauccuauggauuuccuuugccauaucauguuuuuugcuuuguguugcuuuguugggguucaucaugugggccugccaaaagggcaacauuaggugcaacauuugcauuuga

SEQ ID NO: 45300 - RNA, 1701 nt, Artificial Sequence
  derived and/or modified CDS sequence (wt) from hemagglutinin__InfluenzaA__ALE31759
augaagacuaucauugcuuugagcuacauucuaugucugguuuucgcucaaaaacuuccuggaaaugacaauagcacggcaacgcugugccuugggcaccaugcaguaccaaacggaacgauagugaaaacaaucacgaaugaccgaauugaaguuacuaaugcuacugagcugguucagaauuccucaauaggugaaauaugcgacaguccucaucagauccuugauggaaaaaacugcacucuaauagaugcacuauugggagacccucagugugauggcuuucaaaauaagagaugggaccuuuuuguugaacgaagcaaagccuacagcaacuguuacccuuaugaugugccggauuaugccucccuuaggucacuaguugccucauccggcacacuggaguuuaacgaugaaagcuucaauugggcuggagucacucaaaacggaacaaguucugcuugcauaaggggaucuaauaguaguuucuuuaguagauuaaacugguugacccacucaaacuucaaauacccagcauugaacgugacuaugccaaacaaugaacaauuugacaaauuguacauuugggggguucaccacccggguacagacaaggaccaaaucuuccuguaugcucaaucaucaggaagagucacaguaucuaccaaaagaagccaacaagcuguaaucccgaauaucggaucuagacccagaauaaggaauaucccuagcagaauaagcaucuauuggacaauaguaaaaccgggagacauacuuuugauuaacagcacagggaaucuaaucgcuccuagggguuacuucaaaauacaaagugggaaaagcucaauaaugagaucagaugcacccauuggcaaaugcaagucugaaugcaucacuccaaauggaagcauucccaauaacaaaccauuccaaaauguaaacaggaucacauacggggccugucccagauauguuaagcaaagcacucugaaauuggcaacaggaaugcgaaauguaccagagaaacaaacuagaggcauauuuggcgcaauagcggguuucauagaaaaugguugggagggaaugaaggaugguugguacgguuucaggcaucaaaauucugagggaagaggacaagcagcagaucucaaaagcacucaagcagcaaucgaucaaaucaaugggaagcugaaucgauugaucgggaaaaccaacgagaaauuccaucagauugaaaaagaauucucagaaguagaagggagaauucaggaccuugagaaauauguugaggacacaaaaauagaucucuggucauacaacgcggagcuucuuguugcccuggagaaccaacauacaauugaucuaacugacucagaaaugaacaaacuguuugaaaaaacaaagaagcaacugagggaaaaugcugaggauaugggcaaugguuguuucaaaauauaccacaaaugugacaaugccugcauaggaucaaucagaaauggaacuuaugaccacgauguauacagggaugaagcuuuaaacaaccgguuccagaucaagggaguugagcugaagucaggguacaaagauuggauccuauggauuuccuuugccauaucauguuuuuugcuuuguguugcuuuguugggguucaucaugugggccugccaaaagggcaacauuaggugcaacauuugcauuuga

SEQ ID NO: 45301 - RNA, 1701 nt, Artificial Sequence
  derived and/or modified CDS sequence (wt) from hemagglutinin__InfluenzaA__ALE31760
augaagacuaucauugcuuugagcuacauucuaugucugguuuucgcucaaaaaauuccuggaaaugacaauagcacggcaacgcugugccuugggcaccaugcaguaccaaacggaacgauagugaaaacaaucacaaaugaccgaauugaaguuacuaaugcuacugagcugguucagaauuccucaauaggugaaauaugcgacaguccucaucagauccuugauggagaaaacugcacacuaauagaugcucuauugggagacccucagugugauggcuuucaaaauaagaaaugggaccuuuuuguugaacgaagcaaagccuacagcaacuguuacccuuaugaugugccggauuaugccucccuuaggucacuaguugccucauccggcacacuggaguuuaacaaugaaagcuucaauuggacuggagucacucaaaacggaacaaguucugcuugcauaaggagaucuaguaguaguuucuuuaguagauuaaauugguugacccacuuaaacuacacauacccagcauugaacgugacuaugccaaacaaugagcaauuugacaaauuguacauuugggggguucaccacccggguacggacaaggaccaaaucuuccuguaugcucaaucaucaggaagaauaacaguaucuaccaaaagaagccaacaagcuguaaucccaaauaucggauauagacccagaauaagggauaucccuagcagaauaagcaucuauuggacaauaguaaaaccgggagacauacuuuugauuaacagcacagggaaucuaauugcuccuagggguuacuucaaaauacgaagugggaaaagcucaauaaugagaucagaugcacccauuggcaaaugcaagucugagugcaucacuccaaauggaagcauucccaaugacaaaccauuccaaaauguaaacaggaucacauacggggccugucccagauauguuaagcauagcacucugaaauuggcaacaggaaugcgaaauguaccagagaaacaaacuagaggcauauuuggcgcaauagcggguuucauagaaaaugguugggagggaaugguggaugguugguacgguuucaggcaucaaaauucugagggaagaggacaagcagcagaucucaaaagcacucaagcagcaaucgaucaaaucaaugggaagcugaaucgauugaucgggaaaaccaacgagaaauuccaucagauugaaaaagaauucucagaaguagaaggaagaauucaggaccuugagaaauauguugaggacgcuaaaauagaucucuggucauacaacgcggagcuucuuguugcccuggagaaccaacauacaauugaucuaacugacucagaaaugaacaaacuguuugaaaaaacaaagaagcaacugagggaaaaugcugaggauaugggaaaugguuguuucaaaauauaccacaaaugugacaaugccugcauaggaucaauaagaaauggaacuuaugaccacaauguguacagggaugaagcauuaaacaaccgguuccagaucaagggaguugagcugaagucaggguacaaagauuggauccuauggauuuccuuugccauaucauguuuuuugcuuuguguugcuuuguugggguucaucaugugggccugccaaaagggcaacauuaggugcaacauuugcauuuga

SEQ ID NO: 45302 - RNA, 1701 nt, Artificial Sequence; identical to SEQ ID NO: 45294
  derived and/or modified CDS sequence (wt) from hemagglutinin__InfluenzaA__ALE31761

SEQ ID NO: 45303 - RNA, 1701 nt, Artificial Sequence; identical to SEQ ID NO: 45115
  derived and/or modified CDS sequence (wt) from hemagglutinin__InfluenzaA__ALE31762

SEQ ID NO: 45304 - RNA, 1701 nt, Artificial Sequence; identical to SEQ ID NO: 45059
  derived and/or modified CDS sequence (wt) from hemagglutinin__InfluenzaA__ALE31763

SEQ ID NO: 45305 - RNA, 1701 nt, Artificial Sequence
  derived and/or modified CDS sequence (wt) from hemagglutinin__InfluenzaA__ALE31764
augaagacuaucauugcuuugagcuacauucuaugucugguuuucgcucaaaaaauuccuggaaaugacaauagcacggcaacgcugugccuugggcaccaugcaguaccaaacggaacgauagugaaaacaaucacaaaugaccgaauugaaguuacuaaugcuacugagcugguucagaauuccucaauaggugaaauaugcgacaguccucaucagauccuugauggagaaaacugcacacuaauagaugcucuauugggagacccucagugugauggcuuucaaaauaagaaaugggaccuuuuuguugaacgaagcaaagccuacagcaacuguuacccuuaugaugugccggauuaugccucccuuagaucacuaguugccucauccggcacacuggaguuuaacaaugaaagcuucaauuggacuggagucacucaaaacggaacaaguucugcuugcauaaggaaaucuaguaguaguuucuuuaguagauuaaauugguugacccacuuaaacuacacauacccagcauugaacgugacuaugccaaacaaugaacaauuugacaaauuguacauuugggggguucaccacccggguacggacaaggaccaaaucuuccuguaugcucgaucaucaggaagaaucacaguaucuaccaaaagaagccaacaagcuguaaucccaaauaucggaucuagacccagaauaagggauaucccuagcagaauaagcaucuauuggacaauaguaaaaccgggagacauacuuuugauuaacagcacagggaaucuaauugcuccuagggguuacuucaaaauacgaagugggaaaagcucaauaaugagaucagaugcacccauuggcaaaugcaagucugaaugcaucacuccaaauggaagcauccccaaugacaaaccauuccaaaauguaaacaggaucacauacggggccugucccagauauguuaagcauagcacucugaaauuggcaacaggaaugcgaaauguaccagagaaacaaacuagaggcauauuuggcgcaauagcggguuucauagaaaaugguugggagggaaugguggaugguugguacgguuucaggcaucaaaauucugaggggagaggacaagcagcagaucucaaaagcacucaagcagcaaucgaucaaaucaaugggaagcugaaucgauugaucgggaaaaccaacgagaaauuccaucagauugaaaaagaauucucagaaguagaaggaagaauucaggaccuugagaaauauguugaggacacuaaaauagaucucuggucauacaacgcggagcuucuuguugcccuggagaaucaacauacaauugaucuaacugacucagaaaugaacaaacuauuugaaaaaacaaagaagcaacugagggaaaaugcugaggauaugggaaaugguuguuucaaaauauaccacaaaugugacaaugccugcauaggaucaauaagaaauggaacuuaugaccacaauguguacagggaugaagcauuaaacaaccgguuccagaucaagggaguugagcugaagucaggguacaaagauuggauccuauggauuuccuuugccauaucauguuuuuugcuuuguguugcuuuguugggguucaucaugugggccugccaaaagggcaacauuaggugcaacauuugcauuuga

SEQ ID NO: 45306 - RNA, 1701 nt, Artificial Sequence; identical to SEQ ID NO: 45115
  derived and/or modified CDS sequence (wt) from hemagglutinin__InfluenzaA__ALE31765

SEQ ID NO: 45307 - RNA, 1701 nt, Artificial Sequence
  derived and/or modified CDS sequence (wt) from hemagglutinin__InfluenzaA__ALE31774
augaagacuaucauugcuuugagcuacauucuaugucugguuuucgcucaaaaaauuccuggaaaugacaauagcacggcaacgcugugccuugggcaccaugcaguaccaaacggaacgauagugaaaacaaucacaaaugaccgaauugaaguuacuaaugcuacugagcugguucagaauuccucaauaggugaaauaugcgacaguccucaucagauccuugauggagaaaacugcacacuaauagaugcucuauugggagacccucagugugauggcuuucaaaauaagaaaugggaccuuuuuguugaacgaagcaaagccuacagcaacuguuacccuuaugaugugccggauuaugccucccuuaggucacuaguugccucauccggcacacuggaguuuaacaaugaaagcuucaauuggacuggagucacucaaaacggaacaaguucugcuugcauaaggagaucuaguaguaguuucuuuaguagauuaaauugguugacccacuuaaacuacacauacccagcauugaacgugacuaugccaaacaaugaacaauuugacaaauuguacauuugggggguucaccacccggguacggacaaggaccaagucuuccuguaugcucaaucaucaggaagaaucacaguaucuaccaaaagaagccaacaagcuguaaucccaaauaucggaucuagacccagaauaagggauaucccuagcagaauaagcaucuauuggacaauaguaaaaccgggagacauacuuuugauuaacagcacagggaaucuaauugcuccuagggguuacuucaaaauacgaagugggaaaagcucaauaaugagaucagaugcacccauuggcaaaugcaagucugaaugcaucacuccaaauggaagcauucccaaugacaaaccauuccaaaauguaaacaggaucacauacggggccugucccagauauguuaagcauagcacucugaaauuggcaacaggaaugcgaaauguaccagagaaacaaacuagaggcauauuuggcgcaauagcggguuucauagaaaaugguugggagggaaugguggaugguugguacgguuucaggcaucaaaauucugagggaagaggacaagcagcagaucucaaaagcacucaagcagcaaucgaucaaaucaaugggaagcugaaucgauugaucgggaaaaccaacgagaaauuccaucagauugaaaaagaauucucagaaguagaaggaagaauucaggaccuugagaaauauguugaggacacuaaaauagaucucuggucauacaacgcggagcuucuuguugcccuggagaaccaacauacaauugaucuaacugacucagaaaugaacaaacuguuugaaaaaacaaagaagcaacugagggaaaaugcugaggauaugggaaaugguuguuucaaaauauaccacaaaugugacaaugccugcauaggaucaauaagaaauggaacuuaugaccacaauguguacagggaugaagcauuaaacaaccgguuccagaucaagggaguugagcugaagucaggguacaaagauuggauccuauggauuuccuuugccauaucauguuuuuugcuuuguguugcuuuguugggguucaucaugugggccugccaaaagggcaacauuaggugcaacauuugcauuuga

SEQ ID NO: 45308 - RNA, 1701 nt, Artificial Sequence
  derived and/or modified CDS sequence (wt) from hemagglutinin__InfluenzaA__ALE31775
augaagacuaucauugcuuugagcuacauucuaugucugguuuucgcucaaaaaauuccuggaaaugacaauagcacggcaacgcugugccuugggcaccaugcaguaccaaacggaacgauagugaaaacaaucacaaaugaccgaauugaaguuacuaaugcuacugagcugguucagaauuccucaauaggugaaauaugcgacaguccucaucagauccuugauggagaaaacugcacacuaauagaugcucuauugggagacccucagugugauggcuuucaaaauaagaaaugggaccuuuuuguugaacgaagcaaagccuacagcaacuguuacccuuaugaugugccggauuaugccucccuuaggucacuaguugccucauccggcacacuggaguuuaacaaugaaagcuucaauuggacuggagucacucaaaacggaacaaguucugcuugcauaaggaaaucuaguaguaguuucuuuaguagauuaaauugguugacccacuuaaacuacacauacccagcauugaacgugacuaugccaaacaaugaacaauuugacaaauuguacauuugggggguucaccacccggguacggacaaggaccaaaucuuccuguaugcucgaucaucaggaagaaucacaguaucuaccaaaagaagccaacaagcuguaaucccaaauaucggaucuagacccagaauaagggauaucccuagcagaauaagcaucuauuggacaauaguaaaaccgggagacauacuuuugauuaacagcacagggaaucuaauugcuccuagggguuacuucaaaauacgaagugggaaaagcucaauaaugagaucagaugcacccauuggcaaaugcaagucugaaugcaucacuccaaauggaagcauucccaaugacaaaccauuccaaaauguaaacaggaucacauacggggccugucccagauauguuaagcauagcacucugaaauuggcaacaggaaugcgaaauguaccagagaaacaaacuagaggcauauuuggcgcaauagcggguuucauagaaaaugguugggagggaaugguggaugguugguacgguuucaggcaucaaaauucugagggaagaggacaagcagcagaucucaaaagcacucaagcagcaaucgaucaaaucaaugggaagcugaaucgauugaucgggaaaaccaacgagaaauuccaucagauugaaaaagaauucucagaaguagaaggaagaauucaggaccuugagaaauauguugaggacacuaaaauagaucucuggucauacaacgcggaguuucuuguugcccuggagaaucaacauacaauugaucuaacugacucagaaaugaacaaacuguuugaaaaaacaaagaagcaacugagggaaaaugcugaggauaugggaaaugguuguuucaaaauauaccacaaaugugacaaugccugcauaggaucaauaagaaauggaacuuaugaccacaauguguacagggaugaagcauuaaacaaccgguuccagaucaagggaguugagcugaagucaggguacaaagauuggauccuauggauuuccuuugccauaucauguuuuuugcuuuguguugcuuuguugggguucaucaugugggccugccaaaagggcaacauuaggugcaacauuugcauuuga

SEQ ID NO: 45309 - RNA, 1701 nt, Artificial Sequence
  derived and/or modified CDS sequence (wt) from hemagglutinin__InfluenzaA__ALE31776
augaagacuaucauugcuuugagcuacauucuaugucugguuuucgcucaaaagcuuccugaaaaugacaauagcacggcaacgcugugccuugggcaccaugcagugccaaacggaacgauagugaaaacaaucacgagugaccgaauugaaguuacuaaugcuacugagcugguucagaauuccucaauaggugaaauaugcgacaguccucaucagauccuugauggaaaaaacugcacacuaauagaugcucuauugggagacccucagugugauggcuuucaaaauaagaaaugggaccuuuuuguugaacgaagcaaagccuacagcaacuguuacccuuaugaugugccggauuaugccucccuuaggucacuaguugccucauccgguacacuggaguuuaacgaugaaagcuucaauugggcuggagucacucaaaacggaacaaguucugcuugcauaaggggaucuaauaguaguuucuuuaguagauuaaauugguugacccacucaaacuucaaauacccagcauugaacgugacuaugccaaacaaugaacaauuugacaaauuguacauuugggggguucaccacccggguacggacaaggaccaaaucuuccuguaugcucaaucaucaggaagaaucacaguauccaccaaaagaagccaacaagcuguaaucccgaauaucggaucuagacccagaauaaggaauaucccuagcagaauaagcaucuauuggacaauaguaaaaccgggagacauacuuuugauuaacagcacagggaaucuaauugcuccuagggguuacuucaaaauacgaagugggaaaagcucaauaaugagaucagaugcauccauuggcaaaugcaagucugaaugcaucacuccaaauggaagcauucccaaugacaaaccauuccaaaauguaaacaggaucacauacggggccugucccagauauguuaagcaaagcacucugaaauuggcaacaggaaugcgaaauguaccagagaaacaaacuagaggcauauuuggcgcaauagcggguuucauagaaaaugguugggagggaaugaaggaugguugguacgguuucaggcaucaaaauucugagggaagaggacaagcagcagaucucaaaagcacucaagcagcaaucgaucaaaucaaugggaagcugaaucgauugaucgggaaaaccaacgagaaauuccaucagauugaaaaagaauucucagaaguagaagggagaauucaggaccuugagaaauauguugaggacacaaaaauagaucucuggucauacaacgcggagcuucuuguugcccuggagaaccaacauacaauugaucuaacugacucagaaaugaacaaacuguuugaaaaaacaaagaagcaacugagggaaaaugcugaggauaugggcaaugguuguuucaaaauauaccacaaaugugacaaugccugcauaggaucaaucagaaauggaacuuaugaccacgauguauacagggaugaagcuuuaaacaaccgguuccagaucaagggaguugagcugaagucaggguacaaagauuggauccuauggauuuccuuugccauaucauguuuuuugcuuuguguugcuuuguugggguucaucaugugggccugccaaaagggcaacauuaggugcaacauuugcauuuga

SEQ ID NO: 45310 - RNA, 1701 nt, Artificial Sequence
  derived and/or modified CDS sequence (wt) from hemagglutinin__InfluenzaA__ALE31777
augaagacuaucauugcuuugagcuacauucuaugucugguuuucgcucaaaaaauuccuggaaaugacaauagcacggcaacgcugugccuugggcaccaugcaguaccaaacggaacgauagugaaaacaaucacaaaugaccgaauugaaguuacuaaugcuacugaguugguucagaauuccucaauaggugaaauaugcgacaguccucaucagauccuugauggagaaaacugcacacuaauagaugcucuauugggagacccucagugugauggcuuucaaaauaagaaaugggaccuuuuuguugaacgaagcaaagccuacagcaacuguuacccuuaugaugugccggauuaugccucccuuaggucacuaguugccucauccggcacacuggaguuuaacaaugaaagcuucaauuggacuggagucacucaaaacggaacaaguucugcuugcauaaggagaucuaguaguaguuucuuuaguagauuaaauugguugacccacuuaaacuacacauacccagcauugaacgugacuaugccaaacaaugaacaauuugacaaauuguacauuugggggguucaccacccggguacggacaaggaccaaaucuuccuguaugcucaaucaucaggaagaaucacaguaucuaccaaaagaagccaacaagcuguagucccaaauaucggaucuagacccagaauaagggauaucccuagcagaauaagcaucuauuggacaauaguaaaaccgggagacauacuuuugauuaacagcacagggaaucuaauugcuccuagggguuacuucaaaauacgaagugggaaaagcucaauaaugagaucagaugcacccauuggcaaaugcaagucugaaugcaucacuccaaauggaagcauucccaaugacaaaccauuccaaaauguaaacaggaucacauacggggccugucccagauauguuaagcauagcacucugaaauuggcaacaggaaugcgaaauguaccagagaaacaaacuagaggcauauuuggcgcaauagcggguuucauagaaaaugguugggagggaaugguggaugguugguacgguuucaggcaucaaaauucugagggaagaggacaagcagcagaucucaaaagcacucaagcagcaaucgaucaaaucaaugggaagcugaaucgguugaucgggaaaaccaacgagaaauuccaucagauugaaaaagaauucucagaaguagaaggaagaauucaggaccuugagaaauauguugaggacacuaaaauagaucucuggucauacaacgcggagcuucuuguugcccuggagaaccaacauacaauugaucuaacugacucagaaaugaacaaacuguuugaaaaaacaaagaagcaacugagggaaaaugcugaggauaugggaaaugguuguuucaaaauauaccacaaaugugacaaugccugcauaggaucaauaagaaauggaacuuaugaccacaauguguacagggaugaagcauuaaacaaccgguuucagaucaagggaguugagcugaagucaggguacaaagauuggauccuauggauuuccuuugccauaucauguuuuuugcuuuguguugcuuuguugggguucaucaugugggccugccaaaaaggcaacauuaggugcaacauuugcauuuga

SEQ ID NO: 45311 - RNA, 1701 nt, Artificial Sequence
  derived and/or modified CDS sequence (wt) from hemagglutinin__InfluenzaA__ALE31778
augaagacuaucauugcuuugagcuacauucuaugucugguuuucgcucaaaaaauuccuggaaaugacaauagcacggcaacgcugugccuugggcaccaugcaguaccaaacggaacgauagugaaaacaaucacaaaugaccgaauugaaguuacuaaugcuacugaguugguucagaauuccucaauaggugaaauaugcgacaguccucaucagauccuugauggagaaaacugcacacuaauagaugcucuauugggagacccucagugugauggcuuucaaaauaagaaaugggaccuuuuuguugaacgaagcaaagccuacagcaacuguuacccuuaugaugugccggauuaugccucccuuaggucacuaguugccucauccggcacacuggaguuuaacaaugaaagcuucaauuggacuggagucacucaaaacggaacaaguucugcuugcauaaggagaucuaguaguaguuucuuuaguagauuaaauugguugacccacuuaaacuacacauacccagcauugaacgugacuaugccaaacaaugaacaauuugacaaauuguacauuugggggguucaccacccggguacggacaaggaccaaaucuuccuguaugcucaaucaucaggaagaaucacaguaucuaccaaaagaagccaacaagcuguaaucccaaauaucggaucuagacccagaauaagggauaucccuagcagaauaagcaucuauuggacaauaguaaaaccgggagacauacuuuugauuaacagcacagggaaucuaauugcuccuagggguuacuucaaaauacuaagugggaaaagcucaauaaugagaucagaugcacccauuggcaaaugcaagucugaaugcaucacuccaaauggaagcauucccaaugacaaaccauuccaaaauguaaacaggaucacauacggggccuguccuagauauguuaagcauagcacucugaaauuggcaacaggaaugcgaaauguaccagagaaacaaacuagaggcauauuuggcgcaauagcggguuucauagaaaaugguugggaaggaaugguggaugguugguacgguuucaggcaucaaaauucugagggaagaggacaagcagcagaucucaaaagcacucaagcagcaaucgaucaaaucaaugggaagcugaaucgguugaucgggaaaaccaacgagaaauuccaucagauugaaaaagaauucucagaaguagaaggaagaauucaggaccuugagaaauauguugaggacacuaaaauagaucucuggucauauaacgcggagcuucuuguugcccuggagaaccaacauacaauugaucuaacugacucagaaaugaacaaacuguuugaaaaaacaaagaagcaacugagggaaaaugcugaggauaugggaaaugguuguuucaaaauauaccacaaaugugacaaugccugcauaggaucaauaagaaauggaacuuaugaccacaauguguacagggaugaagcauuaaacaaccgguuccagaucaaggggguugagcugaagucaggguacaaagauuggauccuauggauuuccuuugccauaucauguuuuuugcuuuguguugcuuuguugggguucaucaugugggccugccaaaagggcaacauuaggugcaacauuugcauuuga

SEQ ID NO: 45312 - RNA, 1701 nt, Artificial Sequence; identical to SEQ ID NO: 45168
  derived and/or modified CDS sequence (wt) from hemagglutinin__InfluenzaA__ALE31779

SEQ ID NO: 45313 - RNA, 1701 nt, Artificial Sequence
  derived and/or modified CDS sequence (wt) from hemagglutinin__InfluenzaA__ALE31780
augaagacuaucauugcuuugagcuacauucuaugucugguuuucgcucaaaaaauuccgggaaaugacaauagcacggcaacgcugugccuugggcaccaugcaguaccaaacggaacgauagugaaaacaaucacaaaugaccgaauugaaguuacuaaugccacugagcugguucagaauuccucaauaggugaaauaugcgacaguccucaucagauccuugauggagaaaacugcacacuaauagaugcucuauugggagacccucagugugauggcuuucaaaauaagaaaugggaccuuuuuguugaacgaagcaaagcccacagcaacuguuacccuuaugaugugccggauuaugccucccuuaggucacuaguugccucauccggcacacuggaguuuaacaaugaaagcuucaauuggacuggagucacucaaaacggaacaaguucugcuugcauaaggagaucuaguaguaguuucuuuaguagauuaaauugguugacccacuuaaacuacacauacccagcauugaacgugacuaugccaaacaaugaacaauuugacaaauuguacauuugggggguucaccacccggguacggacaaggaccaaaucuuccuguaugcucaaucaucaggaagaaucacaguaucuaccaaaagaagccaacaagcuguaaucccaaauaucggaucuagacccagaauaagggauaucccuagcagaauaagcaucuauuggacaauaguaaaaccgggagacauacuuuugauuaacagcacagggaaucuaauugcuccuagggguuacuucaaaauacgaagugggaaaagcucaauaaugagaacagaugcacccauuggcaaaugcaagucugaaugcaucacuccaaauggaagcauucccaaugacaaaccauuccaaaauguaaacaggaucacauacggggccugucccagauauguuaagcauagcacucugaaauuggcaacaggaaugcgaaauguaccagagaaacaaacuagaggcauauuuggcgcaauagcgggcuucauagaaaaugguugggagggaaugguggaugguugguacgguuucaggcaucaaaauucugagggaagaggacaagcagcagaucucaaaagcacucaagcagcaaucgaucaaaucaaugggaagcugaaucgauugaucgggaaaaccaacgagaaauuccaucagauugaaaaagaauucucagaaguagaaggaagaauucaggaccuugagaaauauguugaggacacuaaaauagaucucuggucauacaacgcggagcuucuuguugcccuggagaaccaacauacaauugaucuaacugacucagaaaugaacaaacuguuugaaaaaacaaagaagcaacugagggaaaaugcugaggauaugggaaaugguuguuucaaaauauaccacaaaugugacaaugccugcauaggaucaauaagaaauggaacuuaugaccacaauguguacagggaugaagcauuaaacaaccgguuccagaucaagggaguugagcugaagucaggguacaaagauuggauccuauggauuuccuuugccauaucauguuuuuugcuuuguguugcuuuguugggguucaucaugugggccugccaaaagggcaacauuaggugcaacauuugcauuuga

SEQ ID NO: 45314 - RNA, 1701 nt, Artificial Sequence
  derived and/or modified CDS sequence (wt) from hemagglutinin__InfluenzaA__ALE31781
augaagacuaucauugcuuugagcuacauucuaugucugguuuucgcucaaaaaauuccuggaaaugacaauagcacggcaacgcugugccuugggcaccaugcaguaccaaacggaacgauagugaaaacaaucacaaaugaccgaauugaaguuacuaaugcuacugagcugguucagaauuccucaauaggugaaauaugcggcaguccucaucagauccucgauggagaaaacugcacacuaauagaugcucuauugggagacccucagugugauggcuuucaaaauaagaaaugggaccuuuuuguugaacgaagcaaagccuacagcaacuguuacccuuaugaugugccggauuaugccucccuuaggucacuaguugccucauccggcacacuggaguuuaacaaugaaagcuucaauuggacuggagucacucaaaacggaacaaguucugcuugcauaaggaaaucuaguaguaguuucuuuaguaaauuaaauugguugacccacuuaaacuacacauacccagcauugaacgugacuaugccaaacaaugaacaauuugacaaauuguacauuugggggguucaccacccggguacggacaaggaccaaaucuuccuguaugcucgaucaucaggaagaaucacaguaucuaccaaaagaagccaacaagcuguaaucccaaauaucggaucuagacccagaauaagggauaucccuagcagaauaagcaucuauuggacaauaguaaaaccgggagacauacuuuugauuaacagcacagggaaucuaauugcuccuagggguuacuucaaaauacgaagugggaaaagcucaauaaugagaucagaugcacccauuggcaaaugcaagucugaaugcaucacuccaaauggaagcauucccaaugacaaaccauuccaaaauguaaacaggaucacauacggggccugucccagauauguuaagcauagcacucugaaauuggcaacaggaaugcgaaauguaccagagaaacaaacuagaggcauauuuggcgcaauagcggguuucauagaaaaugguugggagggaaugguggaugguugguacgguuucaggcaucaaaauucugaggggagaggacaagcagcagaucucaaaagcacucaagcagcaaucgaucaaaucaaugggaagcugaaucgauugaucgggaaaaccaacgagaaauuccaucagauugaaaaagaauucucagaaguagaaggaagaauucaggaccuugagaaauauguugaggacacuaaaauagaucucuggucauacaacgcggagcuucuuguugcccuggagaaucaacauacaauugaucuaacugacucagaaaugaacaaacuguuugaaaaaacaaagaagcaacugagggaaaaugcugaggauaugggaaaugguuguuucaaaauauaccacaaaugugacaaugccugcauaggaucaauaagaaauggaacuuaugaccacaauguguacagggaugaagcauuaaacaaccgguuccagaucaagggaguugagcugaagucaggguacaaagauuggauccuauggauuuccuuugccauaucauguuuuuugcuuuguguugcuuuguugggguucaucaugugggccugccaaaagggcaacauuaggugcaacauuugcauuuga

SEQ ID NO: 45315 - RNA, 1701 nt, Artificial Sequence
  derived and/or modified CDS sequence (wt) from hemagglutinin__InfluenzaA__ALE31782
augaagacuaucauugcuuugagcuacauucuaugucugguuuucgcucaaaaaauuccuggaaaugacaauagcacggcaacgcugugccuugggcaccaugcaguaccaaacggaacgauagugaaaacaaucacaaaugaccgaauugaaguuacuaaugcuacugagcugguucagaauuccucaauaggugaaauaugcgacaguccucaucagauccuugauggagaaaacugcacacuaauagaugcucuauugggagacccucagugugauggcuuucaaaauaagaaaugggaccuuuuuguugaacgaagcaaagccuacagcaacuguuacccuuaugaugugccggauuaugucucccuuaggucacuaguugccucauccggcacacuggaguuuaacaaugaaagcuucaauuggacuggagucacucaaaacggaacaaguucugcuugcauaaggagaucuaguaguaguuucuuuaguagauuaaauugguugacccacuuaaacuacacauacccagcauugaacgugacuaugccaaacaaugaacaauuugacaaauuguacauuugggggguucaccacccggguacggacaaggaccaaaucuuccuguaugcucaaucaucaggaagaaucacaguaucuaccaaaagaagccaacaagcuguaaucccaaauaucggaucuagacccagaauaagggauaucccuagcagaauaagcaucuauuggacaauaguaaaaccgggagacauacuuuugauuaacagcacagggaaucuaauugcuccuagggguuacuucaaaauacgaagugggaaaagcucaauaaugagaucagaugcacccauuggcaaaugcaagucugaaugcaucacuccaaauggaagcauucccaaugacaaaccauuccaaaauguaaacaggaucacauacggggccugucccagauauguuaagcagagcacucugaaauuggcaacaggaaugcgaaauguaccagagaaacaaacuagaggcauauuuggcgcaauagcggguuucauagaaaaugguugggagggaaugguggaugguugguacgguuucaggcaucaaaauucugagggaagaggacaagcagcagaucucaaaagcacucaagcagcaaucgaucaaaucaaugggaagcugaaucgauugaucgggaaaaccaacgagaaauuccaucagauugaaaaagaauucucagaaguagaaggaagaauucaggaccuugagaaauauguugaagacacuaaaauagaucucuggucauacaacgcggagcuucuuguugcccuggagaaccaacauacaauugaucuaacugacucagaaaugaacaaacuguuugaaaaaacaaagaagcaacugagggaaaaugcugaggauaugggaaaugguuguuucaaaauauaccacaaaugugacaaugccugcauaggaucaauaagaaauggaacuuaugaccacaauguguacagggaugaagcauuaaacaaccgguuccagaucaagggaguugagcugaagucaggguacaaagauuggauccuauggauuuccuuugccauaucauguuuuuugcuuuguguugcuuuguugggguucaucaugugggccugccaaaagggcaacauuaggugcaacauuugcauuuga

SEQ ID NO: 45316 - RNA, 1701 nt, Artificial Sequence
  derived and/or modified CDS sequence (wt) from hemagglutinin__InfluenzaA__ALE31783
augaagacuaucauugcuuugagcuacauucuaugucugguuuucgcucaaaaaauuccuggaaaugacaauagcacggcaacgcugugccuugggcaccaugcaguaccaaacggaacgauagugaaaacaaucacaaaugaccgaauugaaguuacuaaugcuacugaguugguucagaauuccucaauaggugaaauaugcgacaguccucaucagauccuugauggagaaaacugcacgcuaauagaugcucuauugggagacccucagugugauggcuuucaaaauaagaaaugggaccuuuuuguugaacgaagcaaagccuacagcaacuguuacccuuaugaugugccggauuaugccucccuuaggucacuaguugccucauccggcacacuggaguuuaacaaugaaagcuucaauuggacuggagucacucaaaacggaacaaguucugcuugcauaaggagaucuaguaguaguuucuuuaguagauuaaauugguugacccacuuaaacuacacauacccagcauugaacgugacugugccaaacaaugaacaauuugacaaauuguacauuugggggguucaccacccggguacggacaaggaccaaaucuuccuguaugcucaaucaucaggaagaaucacaguaucuaccaaaagaagccaacaagcuguaaucccaaauaucggaucuagacccagaauaagggauaucccuagcagaauaagcaucuauuggacaauaguaaaaccgggagacauacuuuugauuaacagcacaggaaaucuaauugcuccuagggguuacuucaaaauacgaagugggaaaagcucaauaaugagaucagaugcacccauuggcaaaugcaagucugaaugcaucacuccaaauggaagcauucccaaugacaaaccauuccaaaauguaaacaggaucacauacggggccugucccagauauguuaagcauagcacucugaaauuggcaacaggaaugcgaaauguaccagagaaacaaacuagaggcauauuuggcgcaauagcggguuucauagaaaaugguugggagggaaugguggaugguugguacgguuucaggcaucaaaauucugagggaagaggacaagcagcagaucucaaaagcacucaagcagcaaucgaucaaaucaaugggaagcugaaucgguugaucgggaaaaccaacgagaaauuccaucagauugaaaaagaauucucagaaguagaaggaagaauucaggaccuugagaaauauguugaggacacuaaaauagaucucuggucauauaacgcggagcuucuuguugcccuggagaaccaacauacaauugaucuaacugacucagaaaugaacaaacuguuugaaaaaacaaagaagcaacugagggaaaaugcugaggauaugggaaaugguuguuucaaaauauaccacaaaugugacaaugccugcauaggaucaauaagaaauggaacuuaugaccacaauguguacagggaugaagcauuaaacaaccgguuccagaucaaggggguugagcugaagucaggguacaaagauuggauccuauggauuuccuuugccauaucauguuuuuugcuuuguguugcuuuguugggguucaucaugugggccugccaaaagggcaacauuaggugcaacauuugcauuuga

SEQ ID NO: 45317 - RNA, 1701 nt, Artificial Sequence; identical to SEQ ID NO: 45069
  derived and/or modified CDS sequence (wt) from hemagglutinin__InfluenzaA__ALE31784

SEQ ID NO: 45318 - RNA, 1701 nt, Artificial Sequence; identical to SEQ ID NO: 45175
  derived and/or modified CDS sequence (wt) from hemagglutinin__InfluenzaA__ALE31785

SEQ ID NO: 45319 - RNA, 1701 nt, Artificial Sequence
  derived and/or modified CDS sequence (wt) from hemagglutinin__InfluenzaA__ALE31786
augaagacuaucauugcuuugagcuacauucuaugucugguuuucgcucaaaaaauuccuggaaaugacaauagcacggcaacgcugugccuugggcaccaugcaguaccaaacggaacgauagugaaaacaaucacaaaugaccgaauugaaguuacuaaugcuacugaguugguucagaauuccucaauaggugaaauaugcgacaguccucaucagauccuugauggagaaaacugcacacuaauagaugcucuauugggagacccucagugugauggcuuucaaaauaagaaaugggaccuuuuuguugaacgaagcaaagccuacagcaacuguuacccuuaugaugugccggauuaugccucccuuaggucacuaguugccucauccggcacacuggaguuuaacaaugaaagcuucaauuggacuggagucacucaaaacggaacaaguucugcuugcauaaggagaucuaguaguaguuucuuuaguagacuaaauugguugacccacuuaaacuacacauacccagcauugaacgugacuaugccaaacaaugaacaauuugacaaauuguacauuugggggguucaccacccggguacggacaaggaccaaaucuuccuguaugcucaaucaucaggaagaaucacaguaucuaccaaaagaagccaacaagcuguaaucccaaauaucggaucuagacccagaauaagggauaucccuagcagaauaagcaucuauuggacaauaguaaaaccgggagacauacuuuugauuaacagcacagggaaucuaauugcuccuagggguuacuucaaaauacuaagugggaaaagcucaauaaugagaucagaugcacccauuggcaaaugcaagucugaaugcaucacuccaaauggaagcauucccaaugacaaaccauuccaaaauguaaacaggaucacauacggggccugucccagauauguuaagcauagcacucugaaauuggcaacaggaaugcgaaauguaccagagaaacaaacuagaggcauauuuggcgcaauagcggguuucauagaaaaugguugggaaggaaugguggaugguugguacgguuucaggcaucaaaauucugagggaagaggacaagcagcagaucucaaaagcacucaagcagcaaucgaucaaaucaaugggaagcugaaucgguugaucgggaaaaccaacgagaaauuccaucagauugaaaaagaauucucagaaguagaaggaagaauucaggaccuugagaaauauguugaggacacuaaaauagaucucuggucauauaacgcggagcuucuuguugcccuggagaaccaacauacaauugaucuaacugacucagaaaugaacaaacuguuugaaaaaacaaagaagcaacugagggaaaaugcugaggauaugggaaaugguuguuucaaaauauaccacaaaugugacaaugccugcauaggaucaauaagaaauggaacuuaugaccacaauguguacagggaugaagcauuaaacaaccgguuccagaucaaggggguugagcugaagucaggguacaaagauuggauccuauggauuuccuuugccauaucauguuuuuugcuuuguguugcuuuguugggguucaucaugugggccugccaaaagggcaacauuaggugcaacauuugcauuuga

SEQ ID NO: 45320 - RNA, 1701 nt, Artificial Sequence
  derived and/or modified CDS sequence (wt) from hemagglutinin__InfluenzaA__ALE31787
augaagacuaucauugcuuugagcuacauucuaugucugguuuucgcucaaaaaauuccuggaaaugacaauagcacggcaacgcugugccuugggcaccaugcaguaccaaacggaacgauagugaaaacaaucacaaaugaccgaauugaaguuacuaaugcuacugagcugguccagaauuccucaauaggugaaauaugcgacaguccucaucagauccuugauggagaaaacugcacacuaauagaugcucuauugggagacccucagugugauggcuuucaaaauaagaaaugggaccuuuuuguugaacgaagcaaagccuacagcaacuguuacccuuaugaugugccggauuaugccucccuuaggucacuaguugccucauccggcacacuggaguuuaacaaugaaagcuucaauuggacuggagucacucaaaacggaacaaguucugcuugcauaaggaaaucuaguaguaguuucuuuaguagauuaaauugguugacccacuuaaacuacacauacccagcauugaacgugacuaugccaaacaaugaacaauuugacaaauuguacauuugggggguucaccacccggguacggacaaggaccaaaucuuccuguaugcucgaucaucaggaagaaucacaguaucuaccaaaagaagccaacaagcuguaaucccaaauaucggaucuagacccagaauaagggauaucccuagcagaauaagcaucuauuggacaauaguaaaaccgggagacauacuuuugauuaacagcacagggaaucuaauugcuccuagggguuacuucaaaauacgaagugggaaaagcucaauaaugagaucagaugcacccauuggcaaaugcaagucugaaugcaucacuccaaauggaagcauucccaaugacaaaccauuccaaaauguaaacaggaucacauacggggccugucccagauauguuaagcauagcacucugaaauuggcaacaggaaugcgaaauguaccagagaaacaaacuagaggcauauuuggcgcaauagcggguuucauagaaaaugguugggagggaaugguggaugguugguacgguuucaggcaucaaaauucugagggaagaggacaagcagcagaucucaaaagcacucaagcagcaaucgaucaaaucaaugggaagcugaaucgauugaucgggaaaaccaacgagaaauuccaucagauugaaaaagaauucucagaaguagaaggaagaauucaggaccuugagaaauauguugaggacacuaaaauagaucucuggucauacaacgcggagcuucuuguugcccuggagaaucaacauacaauugaucuaacugacucagaaaugaacaaacuguuugaaaaaacaaagaagcaacugagggaaaaugcugaggauaugggaaaugguuguuucaaaauauaccacaaaugugacaaugccugcauaggaucaauaagaaauggaacuuaugaccacaauguguacagggaugaagcauuaaacaaccgguuccagaucaagggaguugagcugaagucaggguacaaagauuggauccuauggauuuccuuugccauaucauguuuuuugcuuuguguugcuuuguugggguucaucaugugggccugccaaaagggcaacauuaggugcaacauuugcauuuga

SEQ ID NO: 45321 - RNA, 1701 nt, Artificial Sequence
  derived and/or modified CDS sequence (wt) from hemagglutinin__InfluenzaA__ALE31788
augaagacuaucauugcuuugagcuacauucuaugucugguuuucgcucaaaaacuuccuggaaaugacaauagcacggcaacgcugugccuugggcaccaugcaguaccaaacggaacgauagugaaaacaaucacgaaugaccgaauugaaguuacuaaugcuacugagcugguucagaauuccucaauaggugaaauaugcgacaguccucaucagauccuugauggagaaaacugcacacuaauagaugcucuauugggagacccucagugugauggcuuucaaaauaagaaaugggaccuuuuuguugaacgaagcaaagccuacagcaacuguuacccuuaugaugugccggauuaugccucccuuaggucacuaguugccucauccggcacacuggaguuuaacaaugaaagcuucaauugggcuggagucacucaaaacggaacaaguucugcuugcauaaggggaucuaauaguaguuucuuuaguagauuaaauugguugacccacucaaacuucaaauacccagcauugaacgugacuaugccaaacaaugaacaauuugacaaauuguacauuugggggguucaccacccggguacggacaaggaccaaaucuuccuguaugcucaaucaucaggaagaaucacaguaucuaccaaaagaagccaacaagcuguaaucccgaauaucggaucuagacccagaauaaggaauaucccuagcagaauaaguaucuauuggacaauaguaaaaccgggagacauacuuuugaucaacagcacagggaaucuaauugcuccuagggguuacuucaaaauacgaagugggaaaagcucaauaaugagaucagaugcacccauuggcaaaugcaagucugaaugcaucacuccaaauggaagcauucccaaugacaagccauuccaaaauguaaacaggaucacauacggggccugucccagauauguuaagcaaagcacucugaaauuggcaacaggaaugcgaaauguaccagagaaacaaacuagaggcauauuuggcgcaauagcggguuucauagaaaaugguugggagggaaugauggaugguugguacgguuucaggcaucaaaauucugagggaagaggacaagcagcagaucucaaaagcacucaagcagcaaucgaucaaaucaaugggaagcugaaucgauugaucgggaaaaccaacgagaaauuccaucagauugaaaaagaauucucagaaguagaagggagaauucaggaccuugagaaauauguugaggacacaaaaauagaucucuggucauacaacgcggagcuucuuguugcccuggagaaccaacauacaauugaucuaacugacucagaaaugaacaaacuguuugaaaaaacaaagaagcaacugagggaaaaugcugaggauaugggcaaugguuguuucaaaauauaccacaaaugugacaaugccugcauaggaucaaucagaaauggaacuuaugaccacgauguauacagggaugaagcauuaaacaaccgguuccagaucaagggaguugagcugaagucaggguacaaagauuggauccuauggauuuccuuugccauaucauguuuuuugcuuuguguugcuuuguugggguucaucaugugggccugccaaaagggcaacauuaggugcaacauuugcauuuga

SEQ ID NO: 45322 - RNA, 1701 nt, Artificial Sequence; identical to SEQ ID NO: 45237
  derived and/or modified CDS sequence (wt) from hemagglutinin__InfluenzaA__ALE31789

SEQ ID NO: 45323 - RNA, 1701 nt, Artificial Sequence
  derived and/or modified CDS sequence (wt) from hemagglutinin__InfluenzaA__ALE31790
augaagacuaucauugccuugagcuacauucuaugucugguuuucgcucaaaaaauuccuggaaaugacaauagcacggcaacgcugugccuugggcaccaugcaguaccaaacggaacgauagugaaaacaaucacaaaugaccgaauugaaguuacuaaugcuacugagcugguucagaauuccucaauaggugaaauaugcgacaguccucaucagauccuugauggagaaaacugcacacuaauagaugcucuauugggagacccucagugugauggcuuucaaaauaagaaaugggaccuuuuuguugaacgaagcaaagccuacaguaacuguuacccuuaugaugugccggauuaugccucccuuaggucacuaguugccucauccggcacacuggaguuuaacaaugaaagcuucaauuggacuggagucacucaaaacggaacaaguucugccugcauaaggagaucuaguaguaguuucuuuaguagauuaaauugguugacccacuuaaacuacacauacccagcauugaacgugacuaugccaaacaaugaacaauuugacaaauuguacauuugggggguucaccacccggguacggacaaggaccaaaucuuccuguaugcucgaucaucaggaagaaucacaguaucuaccaaaggaagccaacaagcuguaaucccaaauaucggaucuagacccagaauaagggauaucccuagcagaauaagcaucuauuggacaauaguaaaaccgggagacauacuuuugauuaacagcacagggaaucuaauugcuccuagggguuacuucaaaauacgaagugggaaaagcucaauaaugagaucagaugcacccauuggcaaaugcaagucugaaugcaucacuccaaauggaagcauucccaaugacaaaccauuccaaaauguaaacaggaucacauacggggccugucccagauauguuaagcauagcacucugaaauuggcaacaggaaugcgaaauguaccagagaaacaaacuagaggcauauuuggcgcaauagcggguuucauagaaaaugguugggagggaaugguggaugguugguacgguuucaggcaucaaaauucugagggaagaggacaagcagcagaucucaaaagcacucaagcagcaaucgaucaaaucaaugggaagcugaaucgauugaucgggaaaaccaacgagaaauuccaucagauugaaaaagaauucucagaaguagaaggaagaauucaggaccuugagaaauauguugaggacacuaaaauagaucucuggucauacaacgcggagcuucuuguugcccuggagaaccaacauacaauugaucuaacugacucagaaaugaacaaacuguuugaaaaaacaaagaagcaacugagggaaaaugcugaggauaugggaaaugguuguuucaaaauauaccacaaaugugacaaugccugcauaggaucaauaagaaauggaacuuaugaccacaauguguacagggaugaagcauuaaacaaccgguuccagaucaagggaguugagcugaagucaggguacaaagauuggauccuauggauuuccuuugccauaucauguuuuuugcuuuguguugcuuuguugggguucaucaugugggccugccaaaagggcaacauuaggugcaacauuugcauuuga

SEQ ID NO: 45324 - RNA, 1701 nt, Artificial Sequence
  derived and/or modified CDS sequence (wt) from hemagglutinin__InfluenzaA__ALE31791
augaagacuaucauugcuuugagcuacauucuaugucugguuuucgcucaaaagcuuccugaaaaugacaauagcacggcaacgcugugccuugggcaccaugcaguaccaaacggaacgauagugaaaacaaucacgagugaccgaauugaaguuacuaaugcuacugagcugguucagaauuccucaauaggugaaauaugcgacaguccucaucagauccuugauggaaaaaacugcacacuaauagaugcucuauugggagacccucagugugauggcuuucaaaauaagaaaugggaccuuuuuguugaacgaagcacagccuacagcaacuguuacccuuaugaugugccggauuaugccucccuuaggucacuaguugccucauccgguacacuggaguuuaacgaugaaagcuucaauugggcuggagucacucaaaacggaacaaguucugcuugcauaaggggaucuaauaguaguuucuuuaguagauuaaauugguugacccacucaaacuucaaauacccagcauugaacgugacuaugccaaacaaugaacaauuugacaaauuguacauuugggggguucaccacccggguacggacaaggaccaaaucuuccuguaugcucaaucaucagggagaaucacaguauccaccaaaagaagccaacaagcuguaaucccgaauaucggaucuagacccagaauaaggaauaucccuagcagaauaagcaucuauuggacaauaguaaaaccgggagacauacuuuugauuaacagcacagggaaucuaauugcuccuagggguuacuucaaaauacgaagugggaaaagcucaauaaugagaucagaugcacccauuggcaaaugcaagucugaaugcaucacuccaaauggaagcauucccaaugacaaaccauuccaaaauguaaacaggaucacauacggggccugucccagauauguuaagcaaagcacucugaaauuggcaacaggaaugcgaaauguaccagagaaacaaacuagaggcauauuuggcgcaauagcggguuucauagaaaaugguugggagggaaugaaggaugguugguacgguuucaggcaucaaaauucugagggaagaggacaagcagcagaucucaaaagcacucaagcagcaaucgaucaaaucaaugggaagcugaaucgauugaucgggaaaaccaacgagaaauuccaucagauugaaaaagaauucucagaaguagaagggagaauucaggaccuugagaaauauguugaggacacaaaaauagaucucuggucauacaacgcggagcuucuuguugcccuggagaaccaacauacaauugaucuaacugacucagaaaugaacaaacuguuugaaaaaacaaagaagcaacugagggaaaaugcugaggauaugggcaaugguuguuucaaaauauaccacaaaugugacaaugccugcauaggaucaaucagaaauggaacuuaugaccacgauguauacagggaugaagcuuuaaacaaccgguuucagaucaagggaguugagcugaagucaggguacaaagauuggauccuauggauuuccuuugccauaucauguuuuuugcuuuguguugcuuuguugggguucaucaugugggccugccaaaagggcaacauuaggugcaacauuugcauuuga

SEQ ID NO: 45325 - RNA, 1701 nt, Artificial Sequence
  derived and/or modified CDS sequence (wt) from hemagglutinin__InfluenzaA__ALE31792
augaagacuaucauugccuugagcuacauucuaugucugguuuucgcucaaaaaauuccuggaaaugacaauagcacggcaacgcugugccuugggcaccaugcaguaccaaacggaacgauagugaaaacaaucacaaaugaccgaauugaaguuacuaaugcuacugagcugguucagaauuccucaauaggugaaauaugcgacaguccucaucagauccuugauggagaaaacugcacacuaauagaugcucuauugggagacccucagugugauggcuuucaaaauaagaaaugggaccuuuuuguugaacgaagcaaagccuacagcaacuguuacccuuaugaugugccggauuaugccucccuuaggucacuaguugccucauccggcacacuggaguuuaacaaugaaagcuucaauuggacuggagucacucaaaacggaacaaguucugcuugcauaaggagaucuaguaguaguuucuuuaguagauuaaauugguugacccacuuaaacuacauauacccagcauugaacgugacuaugccaaacaaugaacaauuugacaaauuguacauuugggggguucaccacccggguacggacaaggaccaaaucuuccuguaugcucaaucaucaggaagaaucacaguaucuaccaaaagaagccaacaagcuguaaucccaaauaucggaucuagacccagaauaagggauaucccuagcagaauaagcaucuauuggacaauaguaaaaccgggagacauacuuuugauuaacagcacagggaaucuaauugcuccuagggguuacuucaaaauacgaagugggaaaagcucaauaaugagaucagaugcacccauuggcaaaugcaagucugaaugcaucacuccaaauggaagcauucccaaugacaaaccauuccaaaauguaaacaggaucacauacggggccugucccagauauguuaagcauagcacucugaaauuggcaacaggaaugcgaaauguaccagagaaacaaacuagaggcauauuuggcgcaauagcggguuucauagaaaaugguugggagggaaugguggaugguugguacgguuucaggcaucaaaauucugagggaagaggacaagcagcagaucucaaaagcacucaagcagcaaucgaucaaaucaaugggaagcugaaucgauugaucgggaaaaccaacgagaaauuccaucagauugaaaaagaauucucagaaguagaaggaagaauucaggaccuugagaaauauguugaggacacuaaaauagaucucuggucauacaacgcggagcuucuuguugcccuggagaaucaacauacaauugaucuaacugacucagaaaugaacaaacuguuugaaaaaacaaagaagcaacugagggaaaaugcugaggauaugggaaaugguuguuucaaaauauaccacaaaugugacaaugccugcauaggaucaauaagaaauggaacuuaugaccacaauguguacagggaugaagcauuaaacaaccgguuccagaucaagggaguugagcugaagucaggguacaaagauuggauccuauggauuuccuuugccauaucauguuuuuugcuuuguguugcuuuguugggguucaucaugugggccugccaaaagggcaacauuaggugcaacauuugcauuuga

SEQ ID NO: 45326 - RNA, 1701 nt, Artificial Sequence
  derived and/or modified CDS sequence (wt) from hemagglutinin__InfluenzaA__ALE31793
augaagacuaucauugccuugagcuacauucuaugucugguuuucgcucaaaaaauuccuggaaaugacaauagcacggcaacgcugugccuugggcaccaugcaguaccaaacggaacgauagugaaaacaaucacaaaugaccgaauugaaguuacuaaugcuacugagcugguucagaauuccucaauaggugaaauaugcgacaguccucaucagauccuugauggagaaaacugcacacuaauagaugcucuauugggagacccucagugugauggcuuucaaaauaagaaaugggaccuuuuuguugaacgaagcaaagccuacagcaacuguuacccuuaugaugugccggauuaugccucccuuaggucacuaguugccucauccggcacacuggaguuuaacaaugaaagcuucaauuggacuggagucacucaaaacggaacaaguucugcuugcauaaggagaucuaguaguaguuucuuuaguagauuaaauugguugacccacuuaaacuacacauacccagcauugaacgugacuaugccaaacaaugaacaauuugacaaauuguacauuugggggguucaccacccggguacggacaaggaccaaaucucccuguaugcucaaucaucaggaagaaucacaguaucuaccaaaagaagccaacaagcuguaaucccaaauaucggaucuagacccagaauaagggauaucccuagcagaauaagcaucuauuggacaauaguaaaaccgggagacauacuuuugauuaacagcacagggaaucuaauugcuccuagggguuacuucaaaauacgaagugggaaaagcucaauaaugagaucagaugcacccauuggcaaaugcaagucugaaugcaucacuccaaauggaagcauucccaaugacaaaccauuccaaaauguaaacaggaucacauacggggccugucccagauauguuaagcauagcacucugaaauuggcaacaggaaugcgaaauguaccagagaaacaaacuagaggcauauuuggcgcaauagcggguuucauagaaaaugguugggagggaaugguggaugguugguacgguuucaggcaucaaaauucugagggaagaggacaagcagcagaucucaaaagcacucaagcagcaaucgaucaaaucaaugggaagcugaaucgauugaucgggaaaaccaacgagaaauuccaucagauugaaaaagaauucucagaaguagaaggaagaauucaggaccuugagaaauauguugaggacacuaaaauagaucucuggucauacaacgcggagcuucuuguugcccuggagaaccaacauacaauugaucuaacugacucagaaaugaacaaacuguuugaaaaaacaaagaagcaacugagggaaaaugcugaggauaugggaaaugguuguuucaaaauauaccacaaaugugacaaugccugcauaggaucaauaagaaauggaacuuaugaccacaauguguacagggaugaagcauuaaacaaccgguuccagaucaagggaguugagcugaagucaggguacaaagauuggauccuauggauuuccuuugccauaucauguuuuuugcuuuguguugcuuuguugggguucaucaugugggccugccaaaagggcaacauuaggugcaacauuugcauuuga

SEQ ID NO: 45327 - RNA, 1701 nt, Artificial Sequence
  derived and/or modified CDS sequence (wt) from hemagglutinin__InfluenzaA__ALE31794
augaagacuaucauugccuugagcuacauucuaugucugguuuucgcucaaaaaauuccuggaaaugacaauagcacggcaacgcugugccuugggcaccaugcaguaccaaacggaacgauagugaaaacaaucacaaaugaccgaauugaaguuacuaaugcuacugagcugguucagaauuccucaauaggugaaauaugcgacaguccucaucagauccuugauggagaaaacugcacacuaauagaugcucuauugggagacccucagugugauggcuuucaaaauaagaaaugggaccuuuuuguugaacgaagcaaagccuacagcaacuguuacccuuaugaugugccggauuaugccucccuuaggucacuaguugccucauccggcacacuggaguuuaacaaugaaagcuucaauuggacuggagucacucaaaacggaacaaguucugcuugcauaaggagaucuaguaguaguuucuuuaguagauuaaauugguugacccacuuaaacuacacauacccagcauugaacgugacuaugccaaacaaugaacaauuugacaaauuguacauuugggggguucaccacccggguacggacaaggaccaaaucuuccuguaugcucaaucaucaggaagaaucacaguaucuaccaaaagaagccaacaagcuguaaucccaaauaucggaucuagacccagaauaagggauaucccuagcagaauaagcaucuauuggacaauaguaaaaccgggagauauacuuuugauuaacagcacagggaaucuaauugcuccuagggguuacuucaaaauacgaagugggaaaagcucaauaaugagaucagaugcacccauuggcaaaugcaagucugaaugcaucacuccaaauggaagcauucccaaugacaaaccauuccaaaauguaaacaggaucacauacggggccugucccagauauguuaagcauagcacucugaaauuggcaacaggaaugcgaaauguaccagagaaacaaacuagaggcauauuuggcgcaauagcggguuucauagaaaaugguugggagggaaugguggaugguugguacgguuucaggcaucaaaauucugagggaagaggacaagcagcagaucucaaaagcacucaagcagcaaucgaucaaaucaaugggaagcugaaucgauugaucgggaaaaccaacgagaaauuccaucagauugaaaaagaauucucagaaguagaaggaagaauucaggaccuugagaaauauguugaggacacuaaaauagaucucuggucauacaacgcggagcuucuuguugcccuggagaaccaacauacaauugaucuaacugacucagaaaugaacaaacuguuugaaaaaacaaagaagcaacugagggaaaaugcugaggauaugggaaaugguuguuucaaaauauaccacaaaugugacaaugccugcauaggaucaauaagaaauggaacuuaugaccacaauguguacagggaugaagcauuaaacaaccgguuccagaucaagggaguugagcugaagucaggguacaaagauuggauccuauggauuuccuuugccauaucauguuuuuugcuuuguguugcuuuguugggguucaucaugugggccugccaaaagggcaacauuaggugcaacauuugcauuuga

SEQ ID NO: 45328 - RNA, 1701 nt, Artificial Sequence; identical to SEQ ID NO: 45006
  derived and/or modified CDS sequence (wt) from hemagglutinin__InfluenzaA__ALE31795

SEQ ID NO: 45329 - RNA, 1701 nt, Artificial Sequence; identical to SEQ ID NO: 45008
  derived and/or modified CDS sequence (wt) from hemagglutinin__InfluenzaA__ALE31796

SEQ ID NO: 45330 - RNA, 1701 nt, Artificial Sequence
  derived and/or modified CDS sequence (wt) from hemagglutinin__InfluenzaA__ALE31797
augaagacuaucauugcuuugagcuacauucuaugucugguuuucgcucaaaaaauuccuggaaaugacaauagcacggcaacgcugugccuugggcaccaugcaguaccaaacggaacgauagugaaaacaaucacaaaugaccgaauugaaguuacuaaugcuacugagcugguucagaauuccucaauaggugaaauaugcgacaguccucaucagauccuugauggagaaaacugcacacuaauagaugcucuauugggagacccucagugugauggcuuucaaaauaagaaaugggaccuuuuuguugaacgaagcaaagccuacagcaacuguuacccuuaugaugugccggauuaugccucccuuaggucacuaguugccucauccggcacacuggaguuuaacaaugaaagcuucaauuggacuggagucacacaaaacggaacaaguucugcuugcauaaggaaaucuaguaguaguuucuuuaguagauuaaauugguugacccacuuaaacuacacauacccagcauugaacgugacuaugccaaacaaugaacaauuugacaaauuguacauuugggggguucaccacccggguacggacaaggaccaaaucuuccuguaugcucgaucaucaggaagaaucacaguaucuaccaaaagaagccaacaagcuguaaucccaaauaucggaucuagacccagaauaagggauaucccuagcagaauaagcaucuauuggacaauaguaaaaccgggagacauacuuuugauuaacagcacagggaaucuaauugcuccuagggguuacuucaaaauacgaagugggaaaagcucaauaaugagaucagaugcacccauuggcaaaugcaagucugaaugcaucacuccaaauggaagcauucccaaugacaaaccauuccaaaauguaaacaggaucacauacggggccugucccagauauguuaagcauagcacucugaaauuggcaacaggaaugcgaaauguaccagagaaacaaacuaggggcauauuuggcgcaauagcggguuucauagaaaaugguugggagggaaugguggaugguugguacgguuucaggcaucaaaauucugaggggagaggacaagcagcagaucucaaaagcacucaagcagcaaucgaucaaaucaaugggaagcugaaucgauugaucgggaaaaccaacgagaaauuccaucagauugaaaaagaauucucagaaguagaaggaagaauucaggaccuugagaaauauguugaggacacuaaaauagaucucuggucauacaacgcggagcuucuuguugcccuggagaaucaacauacaauugaucuaacugacucagaaaugaacaaacuguuugaaaaaacaaagaagcaacugagggaaaaugcugaggauaugggaaaugguuguuucaaaauauaccacaaaugugauaaugccugcauaggaucaauaagaaauggaacuuaugaccacaauguguacagggaugaagcauuaaacaaccgguuccagaucaagggaguugagcugaagucaggguacaaagauuggauccuauggauuuccuuugccauaucauguuuuuugcuuuguguugcuuuguugggguucaucaugugggccugccaaaagggcaacauuaggugcaacauuugcauuuga

SEQ ID NO: 45331 - RNA, 1701 nt, Artificial Sequence; identical to SEQ ID NO: 45140
  derived and/or modified CDS sequence (wt) from hemagglutinin__InfluenzaA__ALE31798

SEQ ID NO: 45332 - RNA, 1701 nt, Artificial Sequence; identical to SEQ ID NO: 45031
  derived and/or modified CDS sequence (wt) from hemagglutinin__InfluenzaA__ALE31799

SEQ ID NO: 45333 - RNA, 1701 nt, Artificial Sequence; identical to SEQ ID NO: 45059
  derived and/or modified CDS sequence (wt) from hemagglutinin__InfluenzaA__ALE31800

SEQ ID NO: 45334 - RNA, 1701 nt, Artificial Sequence; identical to SEQ ID NO: 45006
  derived and/or modified CDS sequence (wt) from hemagglutinin__InfluenzaA__ALE31801

SEQ ID NO: 45335 - RNA, 1701 nt, Artificial Sequence
  derived and/or modified CDS sequence (wt) from hemagglutinin__InfluenzaA__ALE31802
augaagacuaucauugcuuugagcuacauucuaugucugguuuucgcucaaaaaauuccuggaaaugacaauagcacggcaacgcugugccuugggcaccaugcaguaccaaacggaacgauagugaaaacaaucacaaaugaccgaauugaaguuacuaaugcuacugaguugguucagaauuccucaauaggugaaauaugcgacaguccucaucagauccuugauggagaaaacugcacacuaauagaugcucuauugggagacccucagugugauggcuuucaaaauaagaaaugggaccuuuuuguugaacgaagcaaagccuacagcaacuguuacccuuaugaugugccggauuaugccucccuuaggucacuaguugccucauccggcacacuggaguuuaacaaugaaagcuucaauuggacuggagucacucaaaacggaacaagcucugcuugcauaaggagaucuaguaguaguuucuuuaguagauuaaauugguugacccacuuaaacuacacauacccagcauugaacgugacuaugccaaacaaugaacaauuugacaaauuguacauuugggggguucaccacccggguacggacaaggaccaaaucuuccuguaugcucaaucaucaggaagaaucacaguaucuaccaaaagaagccaacaagcuguaaucccaaauaucggaucuagacccagaauaagggauaucccuagcagaauaagcaucuauuggacaauaguaaaaccgggagacauacuuuugauuaacagcacagggaaucuaauugcuccuagggguuacuucaaaauacgaagugggaaaagcucaauaaugagaucagaugcacccauuggcaaaugcaagucugaaugcaucacuccaaauggaagcauucccaaugacaaaccauuccaaaauguaaacaggaucacauacggggccugucccagauauguuaagcauagcacucugaaauuggcaacaggaaugcgaaauguaccagagaaacaaacuagaggcauauuuggcgcaauagcggguuucauagaaaaugguugggagggaaugguggaugguugguacgguuucaggcaucaaaauucugagggaagaggacaagcagcagaucucaaaagcacucaagcagcaaucgaucaaaucaaugggaagcugaaucgguugaucgggaaaaccaacgagaaauuccaucagauugaaaaagaauucucagaaguagaaggaagaauucaggaccuugagaaauauguugaggacacuaaaauagaucucuggucauauaacgcggagcuucuuguugcccuggagaaccaacauacaauugaucuaacugacucagaaaugaacaaacuguuugaaaaaacaaagaagcaacugagggaaaaugcugaggauaugggaaaugguuguuucaaaauauaccacaaaugugacaaugccugcauaggaucaauaagaaauggaacuuaugaccacaauguguacagggaugaagcauuaaacaaccgguuccagaucaaggggguugagcugaagucaggguacaaagauuggauccuauggauuuccuuugccauaucauguuuuuugcuuuguguugcuuuguugggguucaucaugugggccugccaaaagggcaacauuaggugcaacauuugcauuuga

SEQ ID NO: 45336 - RNA, 1701 nt, Artificial Sequence; identical to SEQ ID NO: 45059
  derived and/or modified CDS sequence (wt) from hemagglutinin__InfluenzaA__ALE31803

SEQ ID NO: 45337 - RNA, 1701 nt, Artificial Sequence
  derived and/or modified CDS sequence (wt) from hemagglutinin__InfluenzaA__ALE31805
augaagacuaucauugcuuugagcuacauucuaugucugguuuucgcucaaaagcuuccugaaaaugacaauagcacggcaacgcugugccuugggcaccaugcaguaccaaacggaacgauagugaaaacaaucacgagugaccgaauugaaguuacuaaugcuacugagcugguucagaauuccucaauaggugaaauaugcgacaguccucaucagauccuugauggaaaaaacugcacacuaauagaugcucuauugggagacccucagugugauggcuuucaaaauaagaaaugggaccuuuuuguugaacgaagcaaagccuacagcaacuguuacccuuaugaugugccggauuaugccucccuuaggucacuaguugccucauccgguacacuggaguuuaacgaugaaagcuucaauugggcuggagucacucaaaacggaacaaguucugcuugcauaaggggaucuaauaguaguuucuuuaguagauuaaauugguugacccacucaaacuucaaauauccagcauugaacgugacuaugccaaacaaugaacaauuugacaaauuguacauuugggggguucaccacccggguacggacaaggaccaaaucuuccuguaugcucaaucaucaggaagaaucacaguauccaccaaaagaagccaacaagcuguaaucccgaauaucggaucuagacccagaauaaggaauaucccuagcagaauaagcaucuauuggacaauaguaaaaccgggagacauacuuuugauuaacagcacagggaaucuaauugcuccuagggguuacuucaaaauacgaagugggaaaagcucaauaaugagaucagaugcacccauuggcaaaugcaagucugaaugcaucacuccaaauggaagcauucccaaugacaaaccauuccaaaauguaaacaggaucacauacggggccugucccagauauguuaagcaaagcacucugaaauuggcaacaggaaugcgaaauguaccagagaaacaaacuagaggcauauuuggcgcaauagcggguuucauagaaaaugguugggagggaaugaaggaugguugguaugguuucaggcaucagaauucugagggaagaggacaagcagcagaucucaaaagcacucaagcagcaaucgaucaaaucaaugggaagcugaaucgauugaucgggaaaaccaacgagaaauuccaucagauugaaaaagaauucucagaaguagaagggagaauucaggaccuugagaaauauguugaggacacaaaaauagaucucuggucauacaacgcggagcuucuuguugcccuggagaaccaacauacaauugaucuaacugacucagaaaugaacaaacuguuugaaaaaacaaagaagcaacugagggaaaaugcugaggauaugggcaaugguuguuucaaaauauaccacaaaugugacaaugccugcauaggaucaaucagaaauggaacuuaugaccacgauguauacagggaugaagcuuuaaacaaccgguuccagaucaagggaguugagcugaagucaggguacaaagauuggauccuauggauuuccuuugccauaucauguuuuuugcuuuguguugcuuuguugggguucaucaugugggccugccaaaagggcaacauuaggugcaacauuugcauuuga

SEQ ID NO: 45338 - RNA, 1701 nt, Artificial Sequence
  derived and/or modified CDS sequence (wt) from hemagglutinin__InfluenzaA__ALE31806
augaagacuaucauugcuuugagcuacauucuaugucugguuuucgcucaaaaaauuccuggaaaugacaauagcacggcaacgcugugccuugggcaccaugcaguaccaaacggaacgauagugaaaacaaucacaaaugaccgaauugaaguuacuaaugcuacugagcugguucagaauuccucaauaggugaaauaugcgacaguccucaucagauccuugauggagaaaacugcacacuaauagaugcucuauugggagacccucagugugauggcuuucaaaauaagaaaugggaccuuuuuguugaacgaagcaaagccuacagcaacuguuacccuuaugauguaccggauuaugccucccuuaggucacuaguugccucauccggcacacuggaguuuaacaaugaaagcuucaauuggacuggagucacucaaaacggaacaaguucugcuugcauaaggagaucuaguaguaguuucuuuaguagauuaaauugguugacccacuuaaacuacacauacccagcauugaacgugacuaugccaaacaaugaacaauuugacaaauuguacauuugggggguucaccacccggguacggacaaggaccaaaucuuccuguaugcucaaucaucaggaagaaucacaguaucuaccaaaagaagccaacaagcuguaaucccaaauaucggaucuagacccagaauaagggauaucccuagcagaauaagcaucuauuggacaauaguaaaaccgggagacacacuuuugauuaacagcacagggaaucuaauugcuccuagggguuacuucaaaauacgaagugggaaaagcucaauaaugagaucagaugcacccauuggcaaaugcaagucugaaugcaucacuccaaauggaagcauucccaaugacaaaccauuccaaaauguaaacaggaucacauacggggccugucccagauauguuaagcauagcacucugaaauuggcaacaggaaugcgaaauguaccagagaaacaaacuagaggcauauuuggcgcaauagcggguuucauagaaaaugguugggagggaaugguggaugguugguacgguuucaggcaucaaaauucugagggaagaggacaagcagcagaucucaaaagcacucaagcagcaaucgaucaaaucaaugggaagcugaaucgauugaucgggaaaaccaacgagaaauuccaucagauugaaaaagaauucucagaaguagaaggaagaauucaggaccuugagaaauauguugaggacacuaaaauagaucucuggucauacaacgcggagcuucuuguugcccuggagaaccaacauacaauugaucuaacugacucagaaaugaacaaacuguuugaaaaaacaaagaagcaacugagggaaaaugcugaggauaugggaaaugguuguuucaaaauauaccacaaaugugacaaugccugcauaggaucaauaagaaauggaacuuaugaccacaauguguacagggaugaagcauuaaacaaccgguuccagaucaagggaguugagcugaagucaggguacaaagauuggauccuauggauuuccuuugccauaucauguuuuuugcuuuguguugcuuuguugggguucaucaugugggccugccaaaagggcaacauuaggugcaacauuugcauuuga

SEQ ID NO: 45339 - RNA, 1701 nt, Artificial Sequence
  derived and/or modified CDS sequence (wt) from hemagglutinin__InfluenzaA__ALE31807
augaagacuaucauugcuuugagcuacauucuaugucugguuuucgcucaaaaacuuccuggaaaugacaauagcacggcaacgcugugccuugggcaccaugcaguaccaaacggaacgauagugaaaacaaucacaaaugaccgaauugaaguuacuaaugcuacugagcugguucagaauuccucaauaggugaaauaugcgacaguccucaucagauccuugauggagaaaacugcacacuaauagaugcucuauugggagacccucagugugauggcuuucaaaauaagaaaugggaccuuuuuguugaacgaagcaaagccuacagcaacuguuacccuuaugaugugccggauuaugccucccuuaggucacuaguugccucauccggcacacuggaguuuaacaaugaaagcuucaauuggacuggagucacucaaaacggaacaaguucugcuugcauaaggagaucuaguaguaguuucuuuaguagauuaaauugguugacccacuuaaacuucacauacccagcauugaacgugacuaugccaaacaaugaacaauuugacaaauuguacguuugggggguucaccacccggguacggacaaggaccaaaucuuccuguaugcucaaucaucaggaagaaucacaguaucuaccaaaagaagccaacaagcuguaaucccaaauaucggaucuagacccagaauaaggaauaucccuagcagaauaagcaucuauuggacaauaguaaaaccgggagacauacuuuugauuaacagcacagggaaucuaauugcuccuagggguuacuucaaaauacgaagugggaaaagcucaauaaugagaucagaugcacccauuggcaaaugcaagucugaaugcaucacuccaaauggaagcauucccaaugacaaaccauuccaaaauguaaacagaaucacauacggggccugucccagauauguuaagcauagcacucugaaauuggcaacaggaaugcgaaauguaccagagaaacaaacuagaggcauauuuggcgcaauagcggguuucauagaaaaugguugggagggaaugguggaugguugguacgguuucaggcaucaaaauucugagggaagaggacaagcagcagaucucaaaagcacucaagcagcaaucgaucaaaucaauggaaagcugaaucgauugaucgggaaaaccaacgagaaauuccaucagauugaaaaagaauucucagaaguagaaggaagaauucaggaccuugagaaauauguugaggacacuaaaauagaucucuggucauacaacgcggagcuucuuguugcccuggagaaccaacauacaauugaucuaacugacucagaaaugaacaaacuguuugaaaaaacaaagaagcaacugagggaaaaugcugaggauaugggaaaugguuguuucaaaauauaccacaaaugugacaaugccugcauaggaucaauaagaaauggaacuuaugaccacaauguguacagggaugaagcauuaaacaaccgguuccagaucaagggaguugagcugaagucaggguacaaagauuggauccuauggauuuccuuugccauaucauguuuuuugcuuuguguugcuuuguugggguucaucaugugggccugccaaaagggcaacauuaggugcaacauuugcauuuga

SEQ ID NO: 45340 - RNA, 1701 nt, Artificial Sequence
  derived and/or modified CDS sequence (wt) from hemagglutinin__InfluenzaA__ALE31808
augaagacuaucauugcuuugggcuacauucuaugucugguuuucgcucaaaaaauuccuggaaaugacaauagcacggcaacgcugugccuugggcaccaugcaguaccaaacggaacgauagugaaaacaaucacaaaugaccgaauugaaguuacuaaugcuacugagcugguucagaauuccucaauaggugaaauaugcgacaguccucauaagauccuugauggagaaaacugcacacuaauagaugcucuauugggagacccucagugugauggcuuucaaaauaagaaaugggaccuuuuuguugaacgaagcaaagccuacagcaacuguuacccuuaugaugugccggauuaugccucccuuaggucacuaguugccucauccggcacacuggaguuuaacaaugaaagcuucaauuggacuggagucacucaaaacggaacaaguucugcuugcauaaggagaucuaguaguaguuucuuuaguagauuaaauugguugacccacuuaaacuacacauacccagcauugaacgugacuaugccaaacaaugaacaauuugacaaauuguacauuugggggguucaccacccggguacggacaaggaccaaaucuuccuguaugcucaaucaucaggaagaaucacaguaucuaccaaaagaagccaacaagcuguaaucccaaauaucggaucuagacccagaauaagggauaucccuagcagaauaagcaucuauuggacaauaguaaaaccgggagacauacuuuugauuaacagcacagggaaucuaauugcuccuagggguuacuucaaaauacgaagugggaaaagcucaauaaugagaucagaugcacccauuggcaaaugcaagucugaaugcaucacuccaaauggaagcauucccaaugacaaaccauuccaaaauguaaacaggaucacauacggggccugucccagauauguuaagcauagcacucugaaauuggcaacaggaaugcgaaauguaccagagaaacaaacuagaggcauauuuggcgcaauagcggguuucauagaaaaugguugggagggaaugguggaugguugguacgguuucaggcaucaaaauucugagggaagaggacaagcagcagaucucaaaagcacucaagcagcaaucgaucaaaucaaugggaagcugaaucgauugaucgggaaaaccaacgagaaauuccaucagauugaaaaagaauucucagaaguagaaggaagaauucaggaccuugagaaauauguugaggacacuaaaauagaucucuggucauacaacgcggagcuucuuguugcccuggagaaccaacauacaauugaucuaacugacucagaaaugaacaaacuguuugaaaaaacaaagaagcaacugagggaaaaugcugaggauaugggaaaugguuguuucaaaauauaccacaaaugugacaaugccugcauaggaucaauaagaaauggaacuuaugaccacaauguguacagggaugaagcauuaaacaaccgguuccagaucaagggaguugagcugaagucaggguacaaagauuggauccuauggauuuccuuugccauaucauguuuuuugcuuuguguugcuuuguugggguucaucaugugggccugccaaaagggcaacauuaggugcaacauuugcauuuga

SEQ ID NO: 45341 - RNA, 1701 nt, Artificial Sequence
  derived and/or modified CDS sequence (wt) from hemagglutinin__InfluenzaA__ALE31810
augaagacuaucauugcuuugagcuacauucuaugucugguuuucgcccaaaaaauuccuggaaaugacaauagcacggcaacgcugugccuugggcaccaugcaguaccaaacggaacgauagugaaaacaaucacgaaugaccgaauugaaguuacuaaugcuacugagcugguucagaauuccucaauaggugaaauaugcgacaguccucaucagauccuugauggagaaaacugcacacuaauagaugcucuauugggagacccucagugugauggcuuucaaaauaagaaaugggaccuuuuuguugaacgaagcaaagccuacagcaacuguuacccuuaugaugugccggauuaugccucccuuaggucacuaguugccucauccggcacacuggaguuuaacaaugaaagcuucaauuggacuggagucacucaaaacggaacaaguucugcuugcauaaggagaucuaguaguaguuucuuuaguagauuaaauugguugacccacuuaaacuacacauacccagcauugaacguaacuaugccaaacaaugaacaauuugacaaauuguacauuugggggguucaccacccggguacggacaaggaccaaaucuuccuguaugcucaaucaucaggaagaaucacaguaucuaccaaaagaagccaacaagcuguaaucccaaauaucggaucuagacccagaauaagggauaucccuagcagaauaagcaucuauuggacaauaguaaaaccgggagacauacuuuugauuaacagcacagggaaucuaauugcuccuagggguuacuucaaaauacgaagugggaaaagcucaauaaugagaucagaugcacccauuggcaaaugcaagucugaaugcaucacuccaaauggaagcauucccaaugacaaaccauuccaaaauguaaacaggaucacauacggggccugucccagauauguuaagcauagcacucugaaauuggcaacaggaaugcgaaauguaccagagaaacaaacuagaggcauauuuggcgcaauagcggguuucauagaaaaugguugggagggaaugguggaugguugguacgguuucaggcaucaaaauucugagggaagaggacaagcagcagaucucaaaagcacucaagcagcaaucgaucaaaucaaugggaagcugaaucgauugaucgggaaaaccaacgagaaauuccaucagauugaaaaagaauucucagaaguagaaggaagaauucaggaccuugagaaauauguugaggacacuaaaauagaucucuggucauacaacgcggagcuucuuguugcccuggagaaccaacauacaauugaucuaaccgacucagaaaugaacaaacuguuugaaaaaacaaagaagcaacugagggaaaaugcugaggauaugggaaaugguuguuucaaaauauaccacaaaugugacaaugccugcauaggaucaauaaggaauggaacuuaugaccacaauguguacagggaugaagcauuaaacaaccgguuccaaaucaagggaguugagcugaagucaggguacaaagauuggauccuauggauuuccuuugccauaucauguuuuuugcuuuguguugcuuuguugggguucaucaugugggccugccaaaagggcaacauuaggugcaacauuugcauuuga

SEQ ID NO: 45342 - RNA, 1701 nt, Artificial Sequence
  derived and/or modified CDS sequence (wt) from hemagglutinin__InfluenzaA__ALE31812
augaagacuaucauugcuuugagcuacauucuaugucugguuuucgcucaaaaaauuccuggaaaugacaauagcacggcaacgcugugccuugggcaccaugcaguaccaaacggaacgauagugaaaacaaucacaaaugaccgaauugaaguuacuaaugcuacugagcugguucagaauuccucaauaggugaaauaugcgacaguccucaucagauccuugauggagaaaacugcacacuaauagaugcucuauugggagacccucagugugauggcuuucaaaauaagaaaugggaccuuuuuguugaacgaagcaaagccuacagcaacuguuacccuuaugaugugccggauuaugccucccuuaggucacuaguugccucauccggcacacuggaguuuaacaaugaaagcuucaauuggacuggagucacucaaaacggaacaaguucugcuugcauaaggagaucuaguaguaguuucuucaguagauuaaauugguugacccacuuaaacuacacauacccagcauugaacgugacuaugccaaacaaugaacaauuugacaaauuguacauuugggggguucaccacccggguacggacaaggaccaaaucuuccuguaugcucaaucaucaggaagaaucacaguaucuaccaaaagaagccaacaagcuguaaucccaaauaucggaucuagacccagaauaagggauaucccuagcagaauaagcaucuauuggacaauaguaaaaccgggagacauacuuuugauuaacagcacagggaaucuaauugcuccuagggguuacuucaaaauacgaagugggaaaagcucaauaaugagaucagaugcacccauuggcaaaugcaagucugaaugcaucacuccaaauggaagcauucccaaugacaaaccauuccaaaauguaaacaggaucacauacggggccugucccagauauguuaagcauagcacucugaaauuggcaacaggaaugcgaaauguaccagagaaacaaacuagaggcauauuuggcgcaauagcggguuucauagaaaaugguugggagggaaugguggaugguugguacgguuucaggcaucaaaauucugagggaagaggacaagcagcagaucucaaaagcacucaagcagcaaucgaucaaaucaaugggaagcugaaucgauugaucgggaaaaccaacgagaaauuccaucagauugaaaaagaauucucagaaguagaaggaagaauucaggaccuugagaaauauguugaggacacuaaaauagaucucuggucauacaacgcggagcuucuuguugcccuggagaaccaacauacaauugaucuaacugacucagaaaugaacaaacuguuugaaaaaacaaagaagcaacugagggaaaaugcugaggauaugggaaaugguuguuucaaaauauaccacaaaugugacaaugccugcauaggaucaauaagaaauggaacuuaugaccacaauguguacagggaugaagcauuaaacaaccgguuccagaucaagggaguugagcugaagucaggguacaaagauuggauccuauggauuuccuuugccauaucauguuuuuugcuuuguguugcuuuguugggguucaucaugugggccugccaaaagggcaacauuaggugcaacauuugcauuuga

SEQ ID NO: 45343 - RNA, 1701 nt, Artificial Sequence
  derived and/or modified CDS sequence (wt) from hemagglutinin__InfluenzaA__ALE31814
augaagacuaucauugcuuugagcuacauucuaugucugguuuucgcucaaaaacuuccuggaaaugacaauagcacggcaacgcugugccuugggcaccaugcaguaccaaacggaacgauagugaaaacaaucacgaaugaccgaauugaaguuacuaaugcuacugagcugguucagaauuccucaauaggugaaauaugcgacaguccucaucagauccuugauggaaaaaacugcacacuaauagaugcucuauugggagacccucagugugauggcuuucaaaacaagaaaugggaccuuuuuguugaacgaagcaaagcccacagcaacuguuaccccuaugaugugccggauuaugccucccuuaggucacuaguugccucauccggcacacuggaguuuaacaaugaaagcuucaauugggcuggagucacucaaaacggaacaaguucuucuugcauaaggggaucuaauaguaguuucuuuaguagauuaaauugguugacccacuuaaacuccaaauacccagcauuaaacgugacuaugccaaacaaugaacaauuugacaaauuguacauuugggggguucaccacccggguacggacaaggaccaaaucuuccuguaugcacaaccaucaggaagaaucacaguaucuaccaaaagaagccaacaagcuguaaucccgaauaucggaucuagacccagaauaagggauaucccuagcagaauaagcaucuauuggacaauaguaaaaccgggagacauacuuuugauuaacagcacagggaaucuaauugcuccuagggguuacuucaaaauacgaagugggaaaagcucaauaaugagaucagaugcaccuauuggcaaaugcaagucugaaugcaucacuccaaauggaagcauucccaaugacaaaccauuccaaaauguaaacaggaucacauacggggccugucccagauauguuaagcaaagcacucuaaaauuggcaacaggaaugcgaaauguaccagagagacaaacuagaggcauauuuggcgcaauagcggguuucauagaaaaugguugggagggaaugguggaugguugguacggcuucaggcaucaaaauucugagggaagaggacaagcggcagaucucaaaagcacucaagcagcaaucgaucaaaucaaugggaagcugaaucgauugaucgggaaaaccaacgagaaauuccaucagauugaaaaagaauucucagaaguagaagggagaauucaggaccuugagaaauauguugaggacacaaaaauagaucucuggucauacaacgcggagcuucuuguugcccuggagaaccaacauacaauugaucuaacugacucagaaaugaacaaacuguuugaaaaaacaaagaagcaacugagggaaaaugcugaggauaugggcaaugguuguuucaaaauauaccacaaaugugacaaugccugcauaggaucaaucagaaauggaacuuaugaccacgauguauacagggaugaagcauuaaacaaccgguuccagaucaagggaguugagcugaagucaggguacaaagauuggauccuauggauuuccuuugccauaucauguuuuuugcuuuguguugcuuuguugggguucaucaugugggccugccaaaagggcaacauuaggugcaacauuugcauuuga

SEQ ID NO: 45344 - RNA, 1701 nt, Artificial Sequence; identical to SEQ ID NO: 45343
  derived and/or modified CDS sequence (wt) from hemagglutinin__InfluenzaA__ALE31815

SEQ ID NO: 45345 - RNA, 1701 nt, Artificial Sequence; identical to SEQ ID NO: 45006
  derived and/or modified CDS sequence (wt) from hemagglutinin__InfluenzaA__ALE31818

SEQ ID NO: 45346 - RNA, 1701 nt, Artificial Sequence
  derived and/or modified CDS sequence (wt) from hemagglutinin__InfluenzaA__ALE31819
augaagacuaucauugcuuugagcuacauucuaugucugguuuucgcucaaaaaauuccuggaaaugacaauagcacggcaacgcugugccuugggcaccaugcaguaccaaacggaacgauagugaaaacaaucacaaaugaccgaauugaaguuacuaaugcuacugagcugguucagaauuccucaauaggugaaauaugcgacaguccucaucagauccuugauggagaaaacugcacacuaauagaugcucuauugggagacccucagugugauggcuuucaaaauaagaaaugggaccuuuuuguugaacgaagcaaagccuacagcaacuguuacccuuaugaugugccggauuaugccucccuuaggucacuaguugccucauccggcacacuggaguuuaacaaugaaagcuucaauuggacuggagucacucaaaacggaacaaguucugcuugcauaaggggaucuaguaguaguuucuuuaguagauuaaauugguugacccacuuaaacuacacauacccagcauugaacgugacuaugccaaacaaggaacaauuugacaaauuguacauuugggggguucaccacccggguacggacaaggaccaaaucuuccuguaugcucaaucaucaggaagaaucacaguaucuaccaaaagaagccaacaagcuguaaucccaaauaucggaucuagacccagaauaagggauaucccuagcagaauaagcaucuauuggacaauaguaaaaccgggagacauacuuuugauuaacagcacagggaaucuaauugcuccuagggguuacuucaaaauacgaagugggaaaagcucaauaaugagaucagaugcacccauuggcaaaugcaagucugaaugcaucacuccaaauggaagcauucccaaugacaaaccauuccaaaauguaaacaggaucacauacggggccugucccagauauguuaagcauagcacucugaaauuggcaacaggaaugcgaaauguaccagagaaacaaacuagaggcauauuuggcgcaauagcggguuucauagaaaaugguugggagggaaugguggaugguugguacgguuucaggcaucaaaauucugagggaagaggacaagcagcagaucucaaaagcacucaagcagcaaucgaucaaaucaaugggaagcugaaucgauugaucgggaaaaccaacgagaaauuccaucagauugaaaaagaauucucagaaguagaaggaagaauucaggaccuugagaaauauguugaggacacuaaaauagaucucuggucauacaacgcggagcuucuuguugcccuggagaaccaacauacaauugaucuaacugacucagaaaugaacaaacuguuugaaaaaacaaagaagcaacugagggaaaaugcugaggauaugggaaaugguuguuucaaaauauaccacaaaugugacaaugccugcauaggaucaauaagaaauggaacuuaugaccacaauguguacagggaugaagcauuaaacaaccgguuccagaucaagggaguugagcugaagucaggguacaaagauuggauccuauggauuuccuuugccauaucauguuuuuugcuuuguguugcuuuguugggguucaucaugugggccugccaaaagggcaacauuaggugcaacauuugcauuuga

SEQ ID NO: 45347 - RNA, 1701 nt, Artificial Sequence
  derived and/or modified CDS sequence (wt) from hemagglutinin__InfluenzaA__ALE31820
augaagacuaucauugccuugagcuacauucuaugucugguuuucgcucaaaaaauuccuggaaaugacaauagcacggcaacgcugugccuugggcaccaugcaguaccaaacggaacgauagugaaaacaaucacaaaugaccgaauugaaguuacuaaugcuacugagcugguucagaauuccucaauaggugaaauaugcgacaguccucaucagauccuugauggagaaaacugcacacuaauagaugcucuauugggagacccucagugugauggcuuucaaaauaagaaaugggaccuuuuuguugaacgaagcaaagccuacagcaacuguuacccuuaugaugugccggauuaugccucccuuaggucacuaguugccucauccggcacacuggaguuuaacaaugaaagcuucaauuggacuggagucacucaaaacggaacaaguucugcuugcauaaggagaucuaguaguaguuucuuuaguagauuaaauugguugacccacuuaaacuacacauacccagcauugaacgugacuaugccaaacaaugaacaauuugacaaauuguacauuugggggguucaucacccggguacggacaaggaccaaaucuuccuguaugcucaaucaucaggaagaaucacaguaucuaccaaaggaagccaacaagcuguaaucccaaauaucggaucuagacccagaauaagggauaucccuagcagaauaagcaucuauuggacaauaguaaaaccgggagacauacuuuugauuaacagcacagggaaucuaauugcuccuagggguuacuucaaaauacgaagugggaaaagcucaauaaugagaucagaugcacccauuggcaaaugcaagucugaaugcaucacuccaaauggaagcauucccaaugacaaaccauuccaaaauguaaacaggaucacauacggggccugucccagauauguuaagcauagcacucugaaauuggcaacaggaaugcgaaauguaccagagaaacaaacuagaggcauauuuggcgcaauagcggguuucauagaaaaugguugggagggaaugguggaugguugguacgguuucaggcaucaaaauucugagggaagaggacaagcagcagaucucaaaagcacucaagcagcaaucgaucaaaucaaugggaagcugaaucgauugaucgggaaaaccaacgagaaauuccaucagauugaaaaagaauucucagaaguagaaggaagaauucaggaccuugagaaauauguugaggacacuaaaauagaucucuggucauacaacgcggagcuucuuguugcccuggagaaccaacauacaauugaucuaacugacucagaaaugaacaaacuguuugaaaaaacaaagaagcaacugagagaaaaugcugaggauaugggaaaugguuguuucaaaauauaccacaaaugugacaaugccugcauaggaucaauaagaaauggaacuuaugaccacaauguguacagggaugaagcauuaaacaaccgguuccagaucaagggaguugagcugaagucaggguacaaagauuggauccuauggauuuccuuugccauaucauguuuuuugcuuuguguugcuuuguugggguucaucaugugggccugccaaaagggcaacauuaggugcaacauuugcauuuga

SEQ ID NO: 45348 - RNA, 1701 nt, Artificial Sequence
  derived and/or modified CDS sequence (wt) from hemagglutinin__InfluenzaA__ALE31821
augaagacuaucauugcuuugagcuacacucuaugucugguuuucgcucaaaaaauuccuggaaaugacaauagcacggcaacgcugugccuugggcaccaugcaguaccaaacggaacgauagugaaaacaaucacgaaugaccgaauugaaguuacuaaugcuacugagcugguucagaauuccucaauaggugaaauaugcgacaguccucaucagauccuugauggagaaaauugcacacuaauagaugcucuauugggagacccucagugugauggcuuucaaaauaagaaaugggaccuuuuuguugaacgaagcaaagcccacagcaacuguuacccuuaugaugugccggauuaugccucccuuaggucacuaguugccucauccggcacacuggaguuuaacaaugaaagcuucaauuggacuggagucacucaaaacggaacaaguucugcuugcauaaggagaucuaguaguaguuucuuuaguagauuaaauugguugacccacuuaaacuacacauacccagcauugaacgugacuaugccaaacaacgaacaauuugacaaauuguacauuugggggguucaccacccggguacggacaaggaccaaaucuuccuguaugcucaaucaucaggaagaaucacaguaucuaccaaaagaagccaacaagcuguaaucccaaauaucggaucuagacccagaauaagggauaucccuagcagaauaagcaucuacuggacaauaguaaaaccgggagacauacuuuugauuaacagcacagggaaucuaauugcuccuagggguuacuucaaaauacgaagugggaaaagcucaauaaugagaucagaugcacccauuggcaaaugcaagucugaaugcauuacuccaaaugggagcauucccaaugacaaaccauuccaaaauguaaacaggaucacauacggggccugucccagauauguuaagcauagcacucugaaauuggcaacaggaaugcgaaauguaccagagaaacaaacuagaggcauauuuggcgcaauagcggguuucauagaaaaugguugggagggaaugguggaugguugguacgguuucaggcaucaaaauucugagggaagaggacaagcagcagaucucaaaagcacucaagcagcaaucgaucaaaucaaugggaagcugaaucgauugaucgggaaaaccaacgagaaauuccaucagauugaaaaagaauucucagaaguagaaggaagaauucaggaccuugagaaauauguugaggacacuaaaauagaucucuggucauacaacgcggagcuucuuguugcccuggagaaccaacauacaauugaucuaacugacucagaaaugaacaaacuguuugaaaaaacaaagaagcaacugagggaaaaugcugaggauaugggcaaugguuguuucaaaauauaccacaaaugugacaaugccugcauagggucaauaagaaauggaacuuaugaccacaauguguacagggaugaagcauuaaacaaucgguuccagaucaagggaguugagcugaaaucaggguacaaagauuggauccuauggauuuccuuugccauaucauguuuuuugcuuuguguugcuuuguugggguucaucaugugggccugccaaaagggcaacauuaggugcaacauuugcauuuga

SEQ ID NO: 45349 - RNA, 1701 nt, Artificial Sequence; identical to SEQ ID NO: 45158
  derived and/or modified CDS sequence (wt) from hemagglutinin__InfluenzaA__ALE31822

SEQ ID NO: 45350 - RNA, 1701 nt, Artificial Sequence; identical to SEQ ID NO: 45347
  derived and/or modified CDS sequence (wt) from hemagglutinin__InfluenzaA__ALE31823

SEQ ID NO: 45351 - RNA, 1701 nt, Artificial Sequence
  derived and/or modified CDS sequence (wt) from hemagglutinin__InfluenzaA__ALE31824
augaagacuaucauugcuuugagcuacauucuaugucugguuuucgcucaaaaaauuccuggaaaugacaauagcacggcaacgcugugccuugggcaccaugcaguaccaaacggaacgauagugaaaacaaucacaaaugaccgaauugaaguuacuaaugcuacugaguugguucagaauuccucaauaggugaaauaugcgacaguccucaucagauccuugauggagaaaacugcacacuaauagaugcucuauugggagacccucagugugauggcuuucaaaauaagaaaugggaccuuuuuguugaacgaagcaaagccuacagcaacuguuacccuuaugaugugccggauuaugccucccuuaggucacuaguugccucauccggcacacuggaguuuaacaaugaaagcuucaauuggacuggagucacucaaaacggaacaaguucugcuugcauaaggagaucuaguaguaguuucuuuaguagauuaaauugguugacccacuuaaacuacacauacccagcauugaacgugacuaugccaaacaaugaacaauuugacaaauuguacauuugggggguucaccacccggguacggacaaggaccaaaucuuccuguaugcucaaucaucaggaagaaucacaguaucuaccaaaagaagccaacaagcuguaaucccaaauaucggaucuagacccagaauaagggauaucccuagcagaauaagcaucuauuggacaauaguaaaaccgggagacauacuuuugauuaacagcacagggaaucuaauugcuccuagggguuacuucaaaauacgaagugggaaaagcucaauaaugagaucagaugcacccauuggcaaaugcaagucugaaugcaucacuccaaauggaagcauucccaaugacaaaccauuccaaaauguaaacaggaucacauacggggccugucccagauauguuaagcauagcacucugaaauuggcaacaggaaugcgaaauguaccagagaaacaaacuagaggcauauuuggcgcaauagcggguuucauagaaaaugguugggagggaaugguggaugguugguacgguuucaggcaucaaaauucugagggaagaggacaagcagcagaucucaaaagcacucaagcagcaaucgaucaaaucaaugggaagcugaaucgauugaucgggaaaaccaacgagaaauuccaucagauugaaaaagaauucucagaaguagaaggaagaauucaggaccuugagaaauauguugaggacacuaaaauagaucucuggucauacaacgcggagcuucuuguugcccuggagaaccaacauacaauugaucuaacugacucagaaaugaacaaacuguuugaaaaaacaaagaagcaacugagggaaaaugcugaggauaugggaaaugguuguuucaaaauauaccacaaaugugacaaugccugcauaggaucaauaagaaauggaacuuaugaccacaauguguacagggaugaagcauuaaacaaccgguuccagaucaagggaguugagcugaagucaggguacaaagauuggauccuauggauuuccuuugccauaucauguuuuuugcuuuguguugcuuuguugggguucaucaugugggccugccaaaaaggcaacauuaggugcaacauuugcauuuga

SEQ ID NO: 45352 - RNA, 1701 nt, Artificial Sequence
  derived and/or modified CDS sequence (wt) from hemagglutinin__InfluenzaA__ALE31825
augaagaccaucauugcuuugagcuacauucuaugucugguuuucgcucaaaaaauuccuggaaaugacaauagcacggcaacgcugugccuugggcaccaugcaguaccaaacggaacgauagugaaaacaaucacaaaugaccgaauugaaguuacuaaugcuacugagcugguucagaauuccucaauaggugaaauaugcgacaguccucaucagauccuugauggagaaaacugcacacuaauagaugcucuauugggagacccucagugugauggcuuucaaaauaagaaaugggaccuuuuuguugaacgaagcaaagccuacagcaacuguuacccuuaugaugugccggauuaugccucccuuaggucacuaguugccucauccggcacacuggaguuuaacaaugaaagcuucaauuggacuggagucacucaaaacggaacaaguucugcuugcauaaggagaucuaguaguaguuucuuuaguagauuaaauugguugacccacuuaaacuacagauacccagcauugaacgugacuaugccaaacaaugaacaauuugacaaauuguacauuugggggguucaccacccggguacggacaaggaccaaaucuuccuguaugcucaaucaucaggaagaaucacaguaucuaccaaaagaagccaacaagcuguaaucccaaauaucggaucuagacccagaauaagggauaucccuagcagaauaagcaucuauuggacaauaguaaaaccgggagacauacuuuugauuaacagcacagggaaucuaauugcuccuagggguuacuucaaaauacgaagugggaaaagcucaauaaugagaucagaugcacccauuggcaaaugcaagucugaaugcaucacuccaaauggaagcauucccaaugacaaaccauuccaaaauguaaacaggaucacauacggggccugucccagauauguuaagcauagcacucugaaauuggcaacaggaaugcgaaauguaccagagaaacaaacuagaggcauauuuggcgcaauagcggguuucauagaaaaugguugggagggaaugguggaugguugguacgguuucaggcaucaaaauucugagggaagaggacaagcagcagaucucaaaagcacucaagcagcaaucgaucaaaucaauggaaagcugaaucgauugaucgggaaaaccaacgagaaauuccaucagauugaaaaagaauucucagaaguagaaggaagaauucaggaccuugagaaauauguugaggacacuaaaauagaucucuggucauacaacgcggagcuucuuguugcccuggagaaccaacauacaauugaucuaacugacucagaaaugaacaaacuguuugaaaaaacaaagaagcaacugagggaaaaugcugaggauaugggaaaugguuguuucaaaauauaccacaaaugugacaaugccugcauaggaucaauaagaaauggaacuuaugaccacaauguguacagggaugaagcauuaaacaaccgguuccagaucaagggaguugagcugaagucaggguacaaagauuggauccuauggauuuccuuugccauaucauguuuuuugcuuuguguugcuuuguugggguucaucaugugggccugccaaaagggcaacauuaggugcaacauuugcauuuga

SEQ ID NO: 45353 - RNA, 1701 nt, Artificial Sequence
  derived and/or modified CDS sequence (wt) from hemagglutinin__InfluenzaA__ALE31826
augaagacuaucauugccuugagcuacauucuaugucugguuuucgcucaaaaaaucccuggaaaugacaauagcacggcaacgcugugccuugggcaccaugcaguaccaaacggaacgauagugaaaacaaucacaaaugaccgaauugaaguuacuaaugcuacugagcugguucagaauuccucaauaggugaaauaugcgacaguccucaucagauccuugauggagaaaacugcacacuaauagaugcucuauugggagacccucagugugauggcuuucaaaauaagaaaugggaccuuuuuguugaacgaagcaaagccuacagcaacuguuacccuuaugaugugccggauuaugccucccuuaggucacuaguugccucauccgguacacuggaguuuaacaaugaaagcuucaauuggacuggagucacucaaaacggaacaaguucugcuugcauaaggagaucuaguaguaguuucuuuaguagauuaaauugguugacccacuuaaacuacacauacccagcauugaacgugacuaugccaaacaaugaacaauuugacaaauuguacauuugggggguucaccacccggguacggacaaggaccaaaucuuccuguaugcucaaucaucaggaagaaucacaguaucuaccaaaagaagccaacaagcuguaaucccaaauaucggaucuagacccagaauaagggauaucccuagcagaauaagcaucuauuggacaauaguaaaaccgggagacauacuuuugauuaacagcacagggaaucuaauugcuccuagggguuacuucaaaauacgaagugggaaaagcucaauaaugagaucagaugcacccauuggcaaaugcaagucugaaugcaucacuccaaauggaagcauucccaaugacaaaccauuccaaaauguaaacaggaucacauacggggccugucccagauauguuaagcauagcacucugaaauuggcaacaggaaugcgaaauguaccagagaaacaaacuagaggcauauuuggcgcaauagcggguuucauagaaaaugguugggagggaaugguggaugguugguacgguuucaggcaucaaaauucugagggaagaggacaagcagcagaucucaaaagcacucaagcagcaaucgaucaaaucaaugggaagcugaaucgauugaucgggaaaaccaacgagaaauuccaucagauugaaaaagaauucucagaaguagaaggaagaauucaggaccuugagaaauauguugaggacacuaaaauagaucucuggucauacaacgcggagcuucuuguugcccuggagaaccaacauacaauugaucuaacugacucagaaaugaacaaacuguuugaaaaaacaaagaagcaacugagggaaaaugcugaggauaugggaaaugguuguuucaaaauauaccacaaaugugacaaugccugcauaggaucaauaagaaauggaacuuaugaccacaauguguacagggaugaagcauuaaacaaccgguuccagaucaagggaguugagcugaagucaggguacaaagauuggauccuauggauuuccuuugccauaucauguuuuuugcuuuguguugcuuuguugggguucaucaugugggccugccaaaagggcaacauuaggugcaacauuugcauuuga

SEQ ID NO: 45354 - RNA, 1701 nt, Artificial Sequence; identical to SEQ ID NO: 45006
  derived and/or modified CDS sequence (wt) from hemagglutinin__InfluenzaA__ALE31827

SEQ ID NO: 45355 - RNA, 1701 nt, Artificial Sequence
  derived and/or modified CDS sequence (wt) from hemagglutinin__InfluenzaA__ALE31828
augaagacuaucauugccuugagcuacauucuaugucugguuuucgcucaaaaaauuccuggaaaugacaauagcacggcaacgcugugccuugggcaccaugcaguaccaaacggaacgauagugaaaacaaucacaaaugaccgaauugaaguuacuaaugcuacugaguugguucagaauuccucaauaggugaaauaugcgacaguccucaucagauccuugauggagaaaacugcacacuaauagaugcucuauugggagauccucagugugauggcuuucaaaauaagaaaugggaccuuuuuguugaacgaagcaaagccuacagcaacuguuacccuuaugaugugccggauuaugccucccuuaggucacuaguugccucauccggcacacuggaguuuaacaaugaaagcuucaauuggacuggagucacucaaaacggaacaaguucugcuugcauaaggagaucuaguaguaguuucuuuaguagauuaaauugguugacccacuuaaacuacacauacccagcauugaacgugacuaugccaaacaaugaacaauuugacaaauuguacauuugggggguucaccacccggguacggacaaggaccaaaucuuccuguaugcucaaucaucaggaagaaucacaguaucuaccaaaagaagccaacaagcuguaaucccaaauaucggaucuagacccagaauaagggauaucccuagcagaauaagcaucuauuggacaauaguaaaaccgggagacauacuuuugauuaacagcacagggaaucuaauugcuccuagggguuacuucaaaauacgaagugggaaaagcucaauaaugagaucagaugcacccauuggcaaaugcaagucugaaugcaucacuccaaauggaagcauucccaaugacaaaccauuccaaaauguaaacaggaucacauacggggccugucccagauauguuaagcauagcacucugaaauuggcaacaggaaugcgaaauguaccagagaaacaaacuagaggcauauuuggcgcaauagcggguuucauagaaaaugguugggaaggaaugguggaugguugguacgguuucaggcaucaaaauucugagggaagaggacaagcagcagaucucaaaagcacucaagcagcaaucgaucaaaucaaugggaagcugaaucgauugaucgggaaaaccaacgagaaauuccaucagauugaaaaagaauucucagaaguagaaggaagaauucaggaccuugagaaauauguugaggacacuaaaauagaucucuggucauacaacgcggagcuucuuguugcccuggagaaccaacauacaauugaucuaacugacucagaaaugaacaaacuguuugaaaaaacaaagaagcaacugagggaaaaugcugaggauaugggaaaugguuguuucaaaauauaccacaaaugugacaaugccugcauaggaucaauaagaaauggaacuuaugaccacaauguguacagggaugaagcauuaaacaaccgguuccagaucaagggaguugagcugaagucaggguacaaagauuggauccuauggauuuccuuugccauaucauguuuuuugcuuuguguugcuuuguugggguucaucaugugggccugccaaaagggcaacauuaggugcaacauuugcauuuga

SEQ ID NO: 45356 - RNA, 1701 nt, Artificial Sequence
  derived and/or modified CDS sequence (wt) from hemagglutinin__InfluenzaA__ALE31829
augaagacuaucauugcuuugagcuacauucuaugucugguuuucgcucaaaagcuuccugaaaaugacaauagcacggcaacgcugugccuugggcaccaugcaguaccaaacggaacgauagugaaaacaaucacgagugaccgaauugaaguuacuaaugcuacugagcugguucagaauuccucaauaggugaaauaugcgacaguccucaucagauccuugauggaaaaaacugcacacuaauagaugcucuauugggagacccucagugugauggcuuucaaaauaagaaaugggaccuuuuuguugaacgaagcaaagccuacagcaacuguuacccuuaugaugugccggauuaugccucccuuaggucacuaguugccucauccgguacacuggaguuuaacgaugaaagcuucaauugggcuggagucacucaaaacggaacaaguucugcuugcauaaggggauccaauaguaguuucuuuaguagauuaaauugguugacccacucaaacuucaaauacccagcauugaacgugacuaugccaaacaaugaacaauuugacaaauuguacauuugggggguucaccacccggguacggacaaggaccaaaucuuccuguaugcucaaucaucaggaagaaucacaguauccaccaaaagaagccaacaagcuguaaucccgaauaucggaucuagacccagaauaaggaauaucccuagcagaauaagcaucuauuggacaauaguaaaaccgggagacauacuuuugauuaacagcacagggaaucuaauugcuccuagggguuacuucaaaauacgaagugggaaaagcucaauaaugagaucagaugcacccauuggcaaaugcaagucugaaugcaucacuccaaauggaagcauucccaaugacaaaccauuccaaaauguaaacaggaucacauacggggccugucccagauauguuaagcaaagcacucugaaauuggcaacaggaaugcgaaauguaccagagaaacaaacuagaggcauauuuggcgcaauagcggguuucauagaaaaugguugggagggaaugaaggaugguugguacgguuucaggcaucaaaauucugagggaagaggacaagcagcagaucucaaaagcacucaagcagcaaucgaucaaaucaaugggaagcugaaucgauugaucgggaaaaccaacgagaaauuccaucagauugaaaaagaauucucagaaguagaagggagaauucaggaccuugagaaauauguugaggacacaaaaauagaucucuggucauacaacgcggagcuucuuguugcccuggagaaccaacauacaauugaucuaacugacucagaaaugaacaaacuguuugaaaaaacaaagaagcaacugagggaaaaugcugaggauaugggcaaugguuguuucaaaauauaccacaaaugugacaaugccugcauaggaucaaucagaaauggaacuuaugaccacgauguauacagggaugaagcuuuaaacaaccgguuccagaucaagggaguugagcugaagucaggguacaaagauuggauccuauggauuuccuuugccauaucauguuuuuugcuuuguguugcuuuguugggguucaucaugugggccugccaaaagggcaacauuaggugcaacauuugcauuuga

SEQ ID NO: 45357 - RNA, 1701 nt, Artificial Sequence
  derived and/or modified CDS sequence (wt) from hemagglutinin__InfluenzaA__ALE31830
augaagacuaucauugcuuugagcuacauucuaugucugguuuucgcucaaaaaauuccuggaaaugacaauagcacggcaacgcugugccuugggcaccaugcaguaccaaacggaacgauagugaaaacaaucacaaaugaccgaauugaaguuacuaaugcuacugagcugguucagaauuccucaauaggugaaauaugcgacaguccucaucagauccuugauggagaaaacugcacacuaauagaugcucuauugggagacccucagugugauggcuuucaaaauaagaaaugggaccuuuuuguugaacgaagcaaggccuacagcaacuguuacccuuaugaugugccggauuaugccucccuuaggucacuaguugccucauccggcacacuggaguuuaacaaugaaagcuucaauuggacuggagucacucaaaacggaacaaguucugcuugcauaaggagaucuaguaguaguuucuuuaguagauuaaauugguugacccacuuaaacuacacauacccagcauugaacgugacuaugccaaacaaugagcaauuugacaaauuguacauuugggggguucaccacccggguacggacaaggaccaaaucuuccuguaugcucaaucaucaggaagaaucacaguaucuaccaaaagaagccaacaagcuguaaucccaaauaucggaucuagacccagaauaagggauaucccuagcagaauaagcaucuauuggacaauaguaaaaccgggagacauacuuuugauuaacagcacagggaaucuaauugcuccuagggguuacuucaaaauacgaagugggaaaagcucaauaaugagaucagaugcacccauuggcaaaugcaagucugaaugcaucacuccaaauggaagcauucccaaugacaaaccauuccaaaauguaaacaggaucacauacggggccugucccagauauguuaagcauagcacucugaaauuggcaacaggaaugcgaaauguaccagagaaacaaacuagaggcauauuuggcgcaauagcggguuucauagaaaaugguugggagggaaugguggaugguugguacgguuucaggcaucaaaauucugagggaagaggacaagcagcagaucucaaaagcacucaagcagcaaucgaucaaaucaaugggaagcugaaucgauugaucgggaaaaccaacgagaaauuccaucagauugaaaaagaauucucagaaguagaaggaagaauucaggaccuugagaaauauguugaggacacuaaaauagaucucuggucauacaacgcggagcuucuuguugcccuggagaaccaacauacaauugauauaacugacucagaaaugaacaaacuguuugaaaaaacaaagaagcaacugagggaaaaugcugaggauaugggaaaugguuguuucaaaauauaccacaaaugugacaaugccugcauaggaucaauaagaaauggaacuuaugaccacaauguguacagggaugaagcauuaaacaaccgguuccagaucaagggaguugagcugaagucaggguacaaagauuggauccuauggauuuccuuugccauaucauguuuuuugcuuuguguugcuuuguugggguucaucaugugggccugccaaaagggcaacauuaggugcaacauuugcauuuga

SEQ ID NO: 45358 - RNA, 1701 nt, Artificial Sequence
  derived and/or modified CDS sequence (wt) from hemagglutinin__InfluenzaA__ALE31832
augaagaauaucauugcuuugagcuacauucuaugucugguuuucgcucaaaaaauuccuggaaaugacaauagcacggcaacgcugugccuugggcaccaugcaguaccaaacggaacgauagugaaaacaaucacaaaugaccgaauugaaguuacuaaugcuacugagcugguucagaauuccucaauaggugaaauaugcgacaguccucaucagauccuugauggagaaaacugcacacuaauagaugcucuauugggagacccucagugugauggcuuucaaaauaagaaaugggaccuuuuuguugaacgaagcaaagccuacagcaacuguuacccuuaugaugugccggauuaugccucccuuaggucacuaguugccucauccggcacacuggaguuuaacaaugaaagcuucaauuggacuggagucacucaaaacggaacaaguucugcuugcauaaggagaucuaauaguaguuucuuuaguagauuaaauugguugacccacuuaaacuacacauacccagcauugaacgugacuaugccaaacaaugagcaauuugacaaauuguacauuugggggguucaccacccggguacggacaaggaccaaaucuuccuguaugcucaaucaucaggaagaaucacaguaucuaccaaaagaagccaacaagcuguaaucccaaauaucggaucuagacccagaauaagggauaucccuagcagaauaagcaucuauuggacaauaguaaaaccgggagacauacuuuugauuaacagcacagggaaucuaauugcuccuagggguuacuucaaaauacgaagugggaaaagcucaauaaugagaucagaugcacccauuggcaaaugcaagucugaaugcaucacuccaaauggaagcauucccaaugacaaaccauuccaaaauguaaacaggaucacauacggggccugucccagauauguuaagcauagcacucugaaauuggcaacaggaaugcgaaauguaccagagaaacaaacuagaggcauauuuggcgcaauagcggguuucauagaaaaugguugggagggaaugguggaugguugguacgguuucaggcaucaaaauucugagggaagaggacaagcagcagaucucaaaagcacucaagcagcaaucgaucaaaucaauggaaagcugaaucgauugaucgggaaaaccaacgagaaauuccaucagauugaaaaagaauucucagaaguagaaggaagaauucaggaccuugagaaauauguugaggacacuaaaauagaucucuggucauacaacgcggagcuucuuguugcccuggagaaccaacauacaauugaucuaacugacucagaaaugaacaaacuguuugaaaaaacaaagaagcaacugagggaaaaugcugaggauaugggaaaugguuguuucaaaauauaccacaaaugugacaaugccugcauaggaucaauaagaaauggaacuuaugaccacaauguguacagggaugaagcauuaaacaaccgguuccagaucaagggaguugagcugaagucaggguacaaagauuggauccuauggauuuccuuugccauaucauguuuuuugcuuuguguugcuuuguugggguucaucaugugggccugccaaaagggcaacauuaggugcaacauuugcauuuga

SEQ ID NO: 45359 - RNA, 1701 nt, Artificial Sequence
  derived and/or modified CDS sequence (wt) from hemagglutinin__InfluenzaA__ALE31833
augaagacuaucauugccuugagcuacauucuaugucugguuuccgcucaaaaaauuccuggaaaugacaauagcacggcaacgcugugccuugggcaccaugcaguaccaaacggaacgauagugaaaacaaucacaaaugaccgaauugaaguuacuaaugcuacugagcugguucagaauuccucaauaggugaaauaugcaacaguccucaucagauccuugauggagaaaacugcacacuaauagaugcucuauugggagacccucagugugauggcuuucaaaauaagaaaugggaccuuuuuguugaacgaagcaaagccuacagcaacuguuacccuuaugaugugccggauuaugccucccuuaggucacuaguugccucauccggcacacuggaguuuaacaaugaaagcuucaauuggacuggagucacucaaaacggaacaaguucugcuugcauaaggagaucuaguaguaguuucuuuaguagauuaaauugguugacccacuuaaacuacacauacccagcauugaacgugacuaugccaaacaaugaacaauuugacaaauuguacauuugggggguucaccacccggguacggacaaggaccaaaucuuccuguaugcucaaucaucaggaagaaucacaguaucuaccaaaagaagccaacaagcuguaaucccaaauaucggaucuagacccagaauaagggauaucccuagcagaauaagcaucuauuggacaauaguaaaaccgggagacauacuuuugauuaacagcacagggaaucuaauugcuccuagggguuacuucaaaauacgaagugggaaaagcucaauaaugagaucagaugcacccauuggcaaaugcaagucugaaugcaucacuccaaauggaagcauucccaaugacaaaccauuccaaaauguaaacaggaucacauacggggccugucccagauauguuaagcauagcacucugaaauuggcaacaggaaugcgaaauguaccagagaaacaaacuagaggcauauuuggcgcaauagcggguuucauagaaaaugguugggagggaaugguggaugguugguacgguuucaggcaucaaaauucugagggaagaggacaagcagcagaucucaaaagcacucaagcagcaaucgaucaaaucaaugggaagcugaaucgguugaucgggaaaaccaacgagaaauuccaucagauugaaaaagaauucucagaaguagaaggaagaauucaggaccuugagaaauauguugaggacacuaaaauagaucucuggucauacaacgcggagcuucuuguugcccuggagaaccaacauacaauugaucuaacugacucagaaaugaacaaacuguuugaaaaaacaaagaagcaacugagggaaaaugcugaggauaugggaaaugguuguuucaaaauauaccacaaaugugacaaugccugcauaggaucaauaagaaauggaacuuaugaccacaauguguacagggaugaagcauuaaacaaccgguuccagaucaagggaguugagcugaagucaggguacaaagauuggauccuauggauuuccuuugccauaucauguuuuuugcuuuguguugcuuuguugggguucaucaugugggccugccaaaaaggcaacauuaggugcaacauuugcauuuga

SEQ ID NO: 45360 - RNA, 1701 nt, Artificial Sequence
  derived and/or modified CDS sequence (wt) from hemagglutinin__InfluenzaA__ALE31834
augaagacuaucauugcuuugagcuacauucuaugucugguuuucgcucaaaaacuuccuggaaaugacaauagcacggcaacgcugugccuugggcaccaugcaguaccaaacggaacgauagugaaaacaaucacgaaugaccgaauugaaguuacuaaugcuacugaacugguucagaauuccucaauaggugaaauaugcgacaguccucaucagauccuugauggagaaaacugcacacuaauagaugcucuauugggagacccucagugugauggcuuucaaaauaagaaaugggaccuuuuuguugaacgaagcaaagcccacagcaacuguuacccuuaugaugugccggauuaugccucccuuaggucacuaguugccucauccggcacacuggaguuuaacaaugaaagcuucaauugggcuggagucacucaaaacggaacaaguucuucuugcauaaggggaucuaauaguaguuucuuuaguagauuaaauugguugacccacuuaaacuccaaauacccagcauuaaacgugacuaugccaaacaaugaacaauuugacaaauuguacauuugggggguucaccacccggguacggacaaggaccaaaucuuccuguaugcacaaucaucaggaagaaucacaguaucuaccaaaagaagccaacaagcuguaaucccgaauaucggaucuagacccagaauaagggauaucccuagcagaauaagcaucuauuggacaauaguaaaaccgggagacauacuuuugauuaauagcacagggaaucuaauugcuccuagggguuacuucaaaauacgaagugggaaaagcucaauaaugagaucagaugcacccauuggcaaaugcaagucugagugcaucacuccaaauggaagcauucccaaugacaaaccauuccaaaauguaaacaggaucacauacggggccugucccagauauguuaagcaaagcacucugaaauuggcaacaggaaugcgaaauguaccagagaaacaaacuagaggcauauuuggcgcaauagcggguuucauagaaaaugguugggagggaaugguggaugguugguacggcuucaggcaucaaaauucugagggaagaggacaagcagcagaucucaaaagcacucaagcagcaaucgaucaaaucaaugggaagcugaaucgauugaucgggaaaaccaacgagaaauuccaucagauugaaaaagaauucucagaaguagaagggagaauucaggaccuugagaaauauguugaggacacaaaaauagaucucuggucauacaacgcggagcuucuuguugcccuggagaaccaacauacaauugaucuaacugacucagaaaugaacaaacuguuugaaaaaacaaagaagcagcugagagaaaaugcugaggauaugggcaaugguuguuucaaaauauaccacaaaugugacaaugccugcauaggaucaaucagaaauggaacuuaugaccacgauguauacagggaugaagcauuaaacaaccgguuccagaucaagggaguugagcugaagucaggguacaaagauuggauccuauggauuuccuuugccauaucauguuuuuugcuuuguguugcuuuguugggguucaucaugugggccugccaaaagggcaacauuaggugcaacauuugcauuuga

SEQ ID NO: 45361 - RNA, 1701 nt, Artificial Sequence
  derived and/or modified CDS sequence (wt) from hemagglutinin__InfluenzaA__ALE31835
augaagacuaucauugcuuugagcuacauucuaugucugguuuucgcucaaaaaauuccuggaaaugacaauagcacggcaacgcugugccuugggcaccaugcaguaccaaacggaacgauagugaaaacaaucacaaaugaccgaauugaaguuacuaaugcuacugagcugguucagaauuccucaauaggugaaauaugcgacaguccucaucagauccuugauggagaaaacugcacacuaauagaugcucuauugggagacccucagugugauggcuuucaaaauaagaaaugggaccuuuuuguugaacgaagcaaagccuacagcaacuguuacccuuaugaugugccggauuaugccucccuuaggucacuaguugccucauccggcacacuggaguuuaacaaugaaagcuucaauuggacuggagucacucaaaauggaacaaguucugcuugcauaaggaaaucuaguaguaguuucuuuaguagauuaaauugguugacccacuuaaacuacacauacccagcauugaacgugacuaugccaaacaacgaacaauuugacaaauuguacauuugggggguucaccacccggguacggacaaggaccaaaucuuccuguaugcucgaucaucaggaagaaucacaguaucuaccaaaagaagccaacaagcuguaaucccaaauaucggaucuagacccagaauaagggauaucccuagcagaauaagcaucuauuggacaauaguaaaaccgggagacauacuuuugauuaacagcacagggaaucuaauugcuccuagggguuacuucaaaauacgaagugggaaaagcucaauaaugagaucagaugcacccauuggcaaaugcaagucugaaugcaucacuccaaauggaagcauucccaaugacaaaccauuccaaaauguaaacaggaucacauacggggccugucccagauauguuaagcauagcacucugaaauuggcaacaggaaugcgaaauguaccagagaaacaaacuagaggcauauuuggcgcaauagcggguuucauagaaaaugguugggagggaaugguggaugguugguacgguuucaggcaucaaaauucugagggaagaggacaagcagcagaucucaaaagcacucaagcagcaaucgaucaaaucaaugggaagcugaaucgauugaucgggaaaaccaacgagaaauuccaucagauugaaaaagaauucucagaaguagaaggaagaauucaggaccuugagaaauauguugaggacacuaaaauagaucucuggucauacaacgcggagcuucuuguugcccuggagaaucaacauacaauugaucuaacugacucagaaaugaacaaacuguuugaaaaaacaaagaaacaacugagggaaaaugcugaggauaugggaaaugguuguuucaaaauauaccacaaaugugacaaugccugcauaggaucaauaagaaauggaacuuaugaccacaauguguacagggaugaagcauuaaacaaccgguuccagaucaagggaguugagcugaagucaggguacaaagauuggauccuauggauuuccuuugccauaucauguuuuuugcuuuguguugcuuuguugggguucaucaugugggccugccaaaagggcaacauuaggugcaacauuugcauuuga

SEQ ID NO: 45362 - RNA, 1701 nt, Artificial Sequence
  derived and/or modified CDS sequence (wt) from hemagglutinin__InfluenzaA__ALE31836
augaagacuaucauugccuugagcuacauucuaugucugguuuucgcucaaaaaauuccuggaaaugacaauagcacggcaacgcugugccuugggcaccaugcaguaccaaacggaacgauagugaaaacaaucacaaaugaccgaauugaaguuacuaaugcuacugagcugguucagaauuccucaauaggugaaauaugcgacaguccucaucagauccuugauggagaaaacugcacacuaauagaugcucuauugggagacccucagugugauggcuuucaaaauaagaaaugggaccuuuuuguugaacgaagcaaagccuacagcaacuguuacccuuaugaugugccggauuaugccucccuuaggucacuaguugccucauccggcacacuggaguuuaacaaugaaaguuucaauuggacuggagucacucaaaacggaacaaguucugcuugcauaaggagaucuaguaguaguuucuuuaguagauuaaauugguugacccaccuaaacuacacauacccagcauugaacgugaccaugccaaacaaugaacaauuugacaaauuguacauuugggggguucaccacccggguacggacaaggaccaaaucuuccuguaugcucaaucaucaggaagaaucacaguaucuaccaaaagaagccaacaagcuguaaucccaaauaucggaucuagacccagaauaagggauaucccuagcagaauaagcaucuauuggacaauaguaaaaccgggagacauacuuuugauuaacagcacagggaaucuaauugcuccuagggguuacuucaaaauacgaagugggaaaagcucaauaaugagaucagaugcacccauuggcaaaugcaagucugaaugcaucacuccaaauggaagcauucccaaugacaaaccauuccaaaauguaaacaggaucacauacggggccugucccagauauguuaagcauagcacucugaaauuggcaacaggaaugcgaaauguaccagagaaacaaacuagaggcauauuuggcgcaauagcggguuucauagaaaaugguugggagggaaugguggaugguugguacgguuucaggcaucaaaauucugagggaagaggacaagcagcagaucucaaaagcacucaagcagcaaucgaucaaaucaaugggaagcugaaucgauugaucgggaaaaccaacgagaaauuccaucagauugaaaaagaauucucagaaguagaaggaagaauucaggaccuugagaaauauguugaggacacuaaaauagaucucuggucauacaacgcggagcuucuuguugcccuggagaaccaacauacaauugaucuaacugacucagaaaugaacaaacuguuugaaaaaacaaagaagcaacugagggaaaaugcugaggauaugggaaaugguuguuucaaaauauaccacaaaugugacaaugccugcauaggaucaauaagaaauggaacuuaugaccacaauguguacagggaugaagcauuaaacaaccgguuccagaucaagggaguugagcugaagucaggguacaaagauuggauccuauggauuuccuuugccauaucauguuuuuugcuuuguguugcuuuguugggguucaucaugugggccugccaaaagggcaacauuaggugcaacauuugcauuuga

SEQ ID NO: 45363 - RNA, 1701 nt, Artificial Sequence
  derived and/or modified CDS sequence (wt) from hemagglutinin__InfluenzaA__ALE31837
augaagacuaucauugcuuugagcuacauucuaugucugguuuacgcucaaaaaauuccuggaaaugacaauagcacggcaacgcugugccuugggcaccaugcaguaccaaacggaacgauagugaaaacaaucacaaaugaccgaauugaaguuacuaaugcuacugagcugguucagaauuccucaauaggugaaauaugcgacaguccucaucagauccuugauggagaaaacugcacacuaauagaugcucuauugggagacccucagugugauggcuuucaaaauaagaaaugggaccuuuuuguugaacgaagcaaagccuacagcaacuguuacccuuaugaugugccggauuaugccucccuuaggucacuaguugccucauccggcacacuggaguuuaacaaugaaagcuucaauuggacuggagucacucaaaacggaacaaguucugcuugcauaaggagaucuaguaguaguuucuuuaguagauuaaauugguugacccacuuaaacuacacauacccagcauugaacgugacuaugccaaacaaugagcaauuugacaaauuguacauuugggggguucaccacccggguacggacaaggaccaaaucuuccuguaugcucaaucaucaggaagaauaacaguaucuaccaaaagaagccaacaagcuguaaucccaaauaucggaucuagacccagaauaagggauaucccuagcagaauaagcaucuauuggacaauaguaaaaccgggagacauacuuuugauuaacagcacagggaaucuaauugcuccuagggguuacuucaaaauacgaagugggaaaagcucaauaaugagaucagaugcacccauuggcaaaugcaagucugagugcaucacuccaaauggaagcauucccaaugacaaaccauuccaaaauguaaacaggaucacauacggggccugucccagauauguuaagcauagcacucugaaauuggcaacaggaaugcgaaauguaccagagaaacaaacuagaggcauauuuggcgcaauagcggguuucauagaaaaugguugggagggaaugguggaugguugguacgguuucaggcaucaaaauucugagggaagaggacaagcagcagaucucaaaagcacucaagcagcaaucgaucaaaucaaugggaagcugaaucgauugaucgggaaaaccaacgagaaauuccaucagauugaaaaagaauucucagaaguagaaggaagaauucaggaccuugagaaauauguugaggacacuaaaauagaucucuggucauacaacgcggagcuucuuguugcccuggagaaccaacauacaauugaucuaacugacucagaaaugaacaaacuguuugaaaaaacaaagaagcaauugagggaaaaugcugaggauaugggaaaugguuguuucaaaauauaccacaaaugugacaaugccugcauaggaucaauaagaaauggaacuuaugaccacaauguguacagggaugaagcauuaaacaaccgguuccagaucaagggaguugagcugaagucaggguacaaagauuggauccuauggauuuccuuugccauaucauguuuuuugcuuuguguugcuuuguugggguucaucaugugggccugccaaaagggcaacauuaggugcaacauuugcauuuga

SEQ ID NO: 45364 - RNA, 1701 nt, Artificial Sequence
  derived and/or modified CDS sequence (wt) from hemagglutinin__InfluenzaA__ALE31838
augaagacuaucauugcuuugagcuacauucuaugucugguuuucgcucaaaaaauuccuggaaaugacaauagcacggcaacgcugugccuugggcaccaugcaguaccaaacggaacgauagugaaaacaaucacaaaugaccgaauugaaguuacuaaugcuacugagcugguucagaauuccucaauaggugaaauaugcgacaguccucaucagauccuugauggagaaaacugcacacuaauagaugcucuauugggagacccucagugugauggcuuucaaaauaagaaaugggaccuuuuuguugaacgaagcaaagccuacagcaacuguuacccuuaugaugugccggauuaugccucccuuaggucacuaguugccucauccggcacacuggaguuuaacaaugaaagcuucaauuggacuggagucacucaaaacggaacaaguucugcuugcauaaggagaucuaguaguaguuucuuuaguagauuaaauugguugacccacuuaaacuacacauacccagcauugaacgugacuaugccaaacaaugaacaauuugacaaauuguacauuugggggguucaccacccggguacggacaaggaccaaaucuuccuguaugcucaaucaucaggaagaaucacaguaucuaccaaaagaagccaacaagcuguaaucccaaauaucggaucuagacccagaauaagggauaucccuagcagaauaagcaucuauuggacaauaguaaaaccgggggacauacuuuugauuaacagcacagggaaucuaauugcuccuagggguuacuucaaaauacggagugggaaaagcucaauaaugagaucagaugcacccauuggcaaaugcaagucugaaugcaucacuccaaauggaagcauucccaaugacaaaccauuccaaaauguaaacaggaucacauacggggccugucccagauauguuaagcauagcacucugaaauuggcaacaggaaugcgaaauguaccagagaaacaaacuagaggcauauuuggcgcaauagcggguuucauagaaaaugguugggagggaaugguggaugguugguacgguuucaggcaucaaaauucugagggaagaggacaagcagcagaucucaaaagcacucaagcagcaaucgaucaaaucaaugggaagcugaaucgauugaucgggaaaaccaacgagaaauuccaucagauugaaaaagaauucucagaaguagaaggaagaauucaggaccuugagaaauauguugaggacacuaaaauagaucucuggucauacaacgcggagcuucuuguugcccuggagaaccaacauacaauugaucuaacugacucagaaaugaacaaacuguuugaaaaaacaaagaagcaacugagggaaaaugcugaggauaugggaaaugguuguuucaaaauauaccacaaaugugacaaugccugcauaggaucaauaagaaauggaacuuaugaccacaauguguacagggaugaagcauuaaacaaccgguuccagaucaaaggaguugagcugaagucaggguacaaagauuggauccuauggauuuccuuugccauaucauguuuuuugcuuuguguugcuuuguugggguucaucaugugggccugccaaaagggcaacauuaggugcaacauuugcauuuga

SEQ ID NO: 45365 - RNA, 1701 nt, Artificial Sequence
  derived and/or modified CDS sequence (wt) from hemagglutinin__InfluenzaA__ALE31839
augaagacuaucauugcuuugagcuacauucuaugucugguuuucgcucaaaaaauuccuggaaaugacaauagcacggcaacgcugugccuugggcaccaugcaguaccaaacggaacgauagugaaaacaaucacaaaugaccgaauugaaguuacuaaugcuacugaguugguucagaauuccucaauaggugaaauaugcgacaguccucaucagauccuugauggagaaaacugcacacuaauagaugcucuauugggagacccucagugugauggcuuucaaaauaagaaaugggaccuuuuuguugaacgaagcaaagccuacagcaacuguuacccuuaugaugugccggauuaugccucccuuaggucacuaguugccucauccggcacacuggaguuuaacaaugaaagcuucaauuggacuggagucacucaaaacggaacaaguucugcuugcauaaggagaucuaguaguaguuucuuuaguagauuaaauugguugacccacuuaaacuacacauacccagcauugaacgugacuaugccaaacaaugaacaauuugacaaauuguacauuugggggguucaccacccggguacggacaaggaccaaaucuuccuguaugcucaaucaucaggaagaaucacaguaucuaccaaaagaagccaacaagcuguaaucccaaauaucggaucuagacccagaauaagggauaucccuagcagaauaagcaucuauuggacaauaguaaaaccgggagacauacuuuugauuaacagcacagggaaucuaauugcuccuagggguuacuucaaaauacgaagugggaaaagcucaauaaugagaucagaugcacccauuggcaaaugcaagucugaaugcaucacuccaaauggaagcauucccaaugacaaaccauuccaaaauguaaacaggaucacauacggggccugucccagauauguuaagcauagcacucugaaauuggcaacaggaaugcgaaauguaccagagaaacaaacuagaggcauauuuggcgccauagcggguuucauagaaaaugguugggagggaaugguggaugguugguacgguuucaggcaucaaaauucugagggaagaggacaagcagcagaucucaaaagcacucaagcagcaaucgaucaaaucaaugggaagcugaaucgguugaucgggaaaaccaacgagaaauuccaucagauugaaaaagaauucucagaaguagaaggaagaauucaggaccuugagaaauauguugaggacacuaaaauagaucucuggucauacaacgcggagcuucuuguugcccuggagaaccaacauacaauugaucuaacugacucagaaaugaacaaacuguuugaaaaaacaaagaagcaacugagggaaaaugcugaggauaugggaaaugguuguuucaaaauauaccacaaaugugacaaugccugcauaggaucaauaagaaauggaacuuaugaccacaauguguacagggaugaagcauuaaacaaccgguuucagaucaagggaguugagcugaagucaggguacaaagauuggauccuauggauuuccuuugccauaucauguuuuuugcuuuguguugcuuuguugggguucaucaugugggccugccaaaaaggcaacauuaggugcaacauuugcauuuga

SEQ ID NO: 45366 - RNA, 1701 nt, Artificial Sequence
  derived and/or modified CDS sequence (wt) from hemagglutinin__InfluenzaA__ALE31840
augaagacuaucauugcuuugagcuacauucuaugucugguuuucgcucaaaaaauuccuggaaaugacaauagcacggcaacgcugugccuugggcaccaugcaguaccaaacggaacgauagugaaaacaaucacaaaugaccgaauugaaguuacuaaugcuacugagcugguucagaauuccucaauaggugaaauaugcgacaguccucaucagauccuugauggagaaaacugcacacuaauagaugcucuauugggagacccucagugugauggcuuucaaaauaagaaaugggaccuuuuuguugaacgaagcaaagccuacagcaacuguuacccuuaugaugugccggauuaugccucccuuaggucacuaguugccucauccggcacacuggaguuuaacaaugaaagcuucaauuggacuggagucacucaaaacggaacaaguucugcuugcauaaggagaucuaguaguaguuucuuuaguagauuaaauugguugacccacuuaaacuacacauacccagcauugaacgugacuaugccaaacaaugaacaauuugacaaauuguacauuugggggguucaccacccggguacggacaaggaccaaaucuuccuguaugcucaaucaucaggaagaaucacaguaucuaccaaaagaagccaacaagcuguaaucccaaauaucggaucuagacucagaauaagggauaucccuagcagaauaagcaucuauuggacaauaguaaaaccgggggacauacuuuugauuaacagcacagggaaucuaauugcuccuagggguuacuucaaaauacgaagugggaaaagcucaauaaugagaucagaugcacccauuggcaaaugcaagucugaaugcaucacuccaaauggaagcauucccaaugacaaaccauuccaaaauguaaacaggaucacauacggggccugucccagauauguuaagcauagcacucugaaauuggcaacaggaaugcgaaauguaccagagaaacaaacuagaggcauauuuggcgcaauagcggguuucauagaaaaugguugggagggaaugguggaugguugguacgguuucaggcaucaaaauucugagggaagaggacaagcagcagaucucaaaagcacucaagcagcaaucgaucaaaucaaugggaagcugaaucgauugaucgggaaaaccaacgagaaauuccaucagauugaaaaagaauucucagaaguagaaggaagaauucaggaccuugagaaauauguugaggacacuaaaauagaucucuggucauacaacgcggagcuucuuguugcccuggagaaccaacauacaauugaucuaacugacucagaaaugaacaaacuguuugaaaaaacaaagaagcaacugagggaaaaugcugaggauaugggaaaugguuguuucaaaauauaccacaaaugugacaaugccugcauaggaucaauaagaaauggaacuuaugaccacaauguguacagggaugaagcauuaaacaaccgguuccagaucaaaggaguugagcugaagucaggguacaaagauuggauccuauggauuuccuuugccauaucauguuuuuugcuuuguguugcuuuguugggguucaucaugugggccugccaaaagggcaacauuaggugcaacauuugcauuuga

SEQ ID NO: 45367 - RNA, 1701 nt, Artificial Sequence; identical to SEQ ID NO: 45076
  derived and/or modified CDS sequence (wt) from hemagglutinin__InfluenzaA__ALE31842

SEQ ID NO: 45368 - RNA, 1701 nt, Artificial Sequence
  derived and/or modified CDS sequence (wt) from hemagglutinin__InfluenzaA__ALE31843
augcagacuaucauugcuuugagcuacauucuaugucugguuuucgcucaaaaaauuccuggaaaugacaauagcacggcaacgcugugccuugggcaccaugcaguaccaaacggaacgauagugaaaacaaucacaaaugaccgaauugaaguuacuaaugcuacugaguugguucagaauuccucaauaggugaaauaugcgacaguccucaucagauccuugauggagaaaacugcacacuaauagaugcucuauugggagacccucagugugauggcuuucaaaauaagaaaugggaccuuuuuguugaacgaagcaaagccuacagcaacuguuacccuuaugaugugccggauuaugccucccuuaggucacuaguugccucauccggcacacuggaguuuaacaaugaaagcuucaauuggacuggagucacucaaaacggaacaaguucugcuugcauaaggaaaucuaguaguaguuucuuuaguagauuaaauugguugacccacuuaaacuacacauacccagcauugaacgugacuaugccaaacaaugaacaauuugacaaauuguacauuugggggguucaccacccggguacggacaaggaccaaaucuuccuguaugcucaaucaucaggaagaaucacaguaucuaccaaaagaagccaacaagcuguaaucccaaauaucggaucuagacccagaauaagggauaucccuagcagaauaagcaucuauuggacaauaguaaaaccgggagacauacuuuugauuaacagcacagggaaucuaauugcuccuagggguuacuucaaaauacuaagugggaaaagcucaauaaugagaucagaugcacccauuggcaaaugcaagucugaaugcaucacuccaaauggaagcauucccaaugacaaaccauuccaaaauguaaacaggaucacauacggggccugucccagauauguuaagcauagcacucugaaauuggcaacaggaaugcgaaauguaccagagaaacaaacuagaggcauauuuggcgcaauagcggguuucauagaaaaugguugggaaggaaugguggaugguugguacgguuucaggcaucaaaauucugagggaagaggacaagcagcagaucucaaaagcacucaagcagcaaucgaucaaaucaaugggaagcugaaucgguugaucgggaaaaccaacgagaaauuccaucagauugaaaaagaauucucagaaguagaaggaagaauucaggaccuugagaaauauguugaggacacuaaaauagaucucuggucauauaacgcggagcuucuuguugcccuggagaaccaacauacaauugaucuaacugacucagaaaugaacaaacuguuugaaaaaacaaagaagcaacugagggaaaaugcugaggauaugggaaaugguuguuucaaaauauaccacaaaugugacaaugccugcauaggaucaauaagaaauggaacuuaugaccacaauguguacagggaugaagcauuaaacaaccgguuccagaucaaggggguugagcugaagucaggguacaaagauuggauccuauggauuuccuuugccauaucauguuuuuugcuuuguguugcuuuguugggguucaucaugugggccugccaaaagggcaacauuaggugcaacauuugcauuuga

SEQ ID NO: 45369 - RNA, 1701 nt, Artificial Sequence
  derived and/or modified CDS sequence (wt) from hemagglutinin__InfluenzaA__ALE31844
augaagacuaucauugcuuugagcuacauucuaugucugguuuucgcucaaaagcuuccugaaaaugacaauagcacggcaacgcugugccuugggcaccaugcaguaccaaacggaacgauagugaaaacaaucacgagugaccgaauugaaguuacuaaugcuacugagcugguucagaauuccucaauaggugaaauaugcgacaguccucaucagauccuugauggaaaaaacugcacacuaauagaugcucuauugggagacccucagugugauggcuuucaaaauaagaaaugggaccuuuuuguugaacgaagcaaagccuacagcaacuguuacccuuaugaugugccggauuaugcaucccuuaggucacuaguugccucauccgguacacuggaguuuaacgaugaaagcuucaauugggcuggagucacucaaaacggaacaaguucugcuugcauaaggggaucuaauaguaguuucuuuaguagauuaaauugguugacucacucaaacuucaaauacccagcauugaacgugacuaugccaaacaaugaacaauuugacaaauuguacauuugggggguucaccacccggguacggacaaggaccaaaucuuccuguaugcucaaucaucaggaagaaucacaguauccaccaaaagaagccaacaagcuguaaucccgaauaucggaucuagacccagaauaaggaauaucccuagcagaauaagcaucuauuggacaauaguaaaaccgggagacauacuuuugauuaacagcacagggaaucuaauugcuccuagggguuacuucaaaauacgaagugggaaaagcucaauaaugagaucagaugcacccauuggcaaaugcaagucugaaugcaucacuccaaauggaagcauucccaaugacaaaccauuccaaaauguaaacaggaucacauacggggccugucccagauauguuaagcaaagcacucugaaauuggcaacaggaaugcgaaauguaccagagaaacaaacuagaggcauauuuggcgcaauagcggguuucauagaaaaugguugggagggaaugaaggaugguugguacgguuucaggcaucaaaauucugagggaagaggacaagcagcagaucucaaaagcacucaagcagcaaucgaucaaaucaaugggaagcugaaucgauugaucgggaaaaccaacgagaaauuccaucagauugaaaaagaauucucagaaguagaagggagaauucaggaccuugagaaauauguugaggacacaaaaauagaucucuggucauacaacgcggagcuucuuguugcccuggagaaccaacauacaauugaucuaacugacucagaaaugaacaaacuguuugaaaaaacaaagaagcaacugagggaaaaugcugaggauaugggcaaugguuguuucaaaauauaccacaaaugugacaaugccugcauaggaucaaucagaaauggaacuuaugaccacgauguauacagggaugaagcuuuaaacaaccgguuccagaucaagggaguugagcugaagucaggguacaaagauuggauccuauggauuuccuuugccauaucauguuuuuugcuuuguguugcuuuguugggguucaucaugugggccugccaaaagggcaacauuaggugcaacauuugcauuuga

SEQ ID NO: 45370 - RNA, 1701 nt, Artificial Sequence
  derived and/or modified CDS sequence (wt) from hemagglutinin__InfluenzaA__ALE31846
augaagacuaucauugcuuugagcuacauucuaugucugguuuucgcucaaaaacuuccuggaaaugacaauagcacggcaacgcugugccuugggcaccaugcaguaccaaacggaacgauagugaaaacaaucacgaaugaccgaauugaaguuacuaaugcuacugagcugguucagaauuccucaauaggugaaauaugcgacaguccucaucagauccuugauggaaaaaacugcacucuaauagaugcucuauugggagacccucagugugauggcuuucaaaauaagagaugggaccuuuuuguugaacgaagcaaagccuacagcaacuguuacccuuaugaugugccggauuaugccucccuuaggucacuaguugccucauccggcacacuggaguuuaacgaugaaagcuucaauugggcuggagucacucaaaacggaacaaguucugcuugcauaaggggaucuaauaguaguuucuuuaguagauuaaauugguugacccacucaaacuucaaauacccagcauugaacgugacuaugccaaacaaugaacaauuugacaaauuguacauuugggggguucaccacccggguacagacaaggaccaaaucuuccuguacgcucaaucaucaggaagaaucacaguaucuaccaaaagaagccaacaagcuguaaucccgaauaucggaucuagacccagaauaaggaauaucccuagcagaauaagcaucuauuggacaauaguaaaaccgggagacauacuuuugauuaacagcacagggaaucuaauugcuccuagggguuacuucaaaauacaaagugggaaaagcucaauaaugagaucagaugcacccauuggcaaaugcaagucugaaugcaucacuccaaauggaagcauucccaaugacaaaccauuccaaaauguaaacaggaucacauacggggccugucccagauauguuaagcaaagcacucugaaauuggcaacaggaaugcgaaauguaccagagaaacaaacuagaggcauauuuggcgcaauagcggguuucauagaaaaugguugggagggaaugaaggaugguugguacgguuucaggcaucaaaauucugagggaagaggacaagcagcagaucucaaaagcacucaagcagcaaucgaucaaaucaaugggaagcugaaucgauugaucgggaaaaccaacgagaaauuccaucagauugaaaaagaauucucagaaguagaagggagaauucaggaccuugagaaauauguugaggacacaaaaauagaucucuggucauacaacgcggagcuucuuguugcccuggagaaccaacauacaauugaucuaacugacucagaaaugaacaaacuguuugaaaaaacaaagaagcaacugagggaaaaugcugaggauaugggcaaugguuguuucaaaauauaccacaaaugugacaaugccugcauaggaucaaucagaaauggaacuuaugaccacgauguauacagggaugaagcuuuaaacaaccgguuccagaucaagggaguugagcugaagucaggguacaaagauuggauccuauggauuuccuuugccauaucauguuuuuugcuuuguguugcuuuguugggguucaucaugugggccugccaaaagggcaacauuaggugcaacauuugcauuuga

SEQ ID NO: 45371 - RNA, 1701 nt, Artificial Sequence; identical to SEQ ID NO: 45099
  derived and/or modified CDS sequence (wt) from hemagglutinin__InfluenzaA__ALE31847

SEQ ID NO: 45372 - RNA, 1701 nt, Artificial Sequence; identical to SEQ ID NO: 45006
  derived and/or modified CDS sequence (wt) from hemagglutinin__InfluenzaA__ALE31848

SEQ ID NO: 45373 - RNA, 1701 nt, Artificial Sequence
  derived and/or modified CDS sequence (wt) from hemagglutinin__InfluenzaA__ALE31850
augaagacuaucauugcuuugagcuacauucuaugucugguuuucgcucaaaaacuuccuggaaaugacaauagcacggcaacgcugugccuugggcaccaugcaguaccaaacggaacgauagugaaaacaaucacgaaugaccgaauugaaguuacuaaugcuacugagcugguucagaauuccucaauaggugaaauaugcgacaguccucaucagauccuugauggagaaaacugcacacuaauagaugcucuauugggagacccucagugugauggcuuucaaaauaagaaaugggaccuuuuuguugaacgaagcaaagccuacagcaacuguuacccuuaugaugugccggauuaugccucccuuaggucacuaguugccucauccggcacacuggaguuuaacaaugaaagcuucaauugggcuggagucacucaaaacggaacaaguucuucuugcauaaggggaucuaauaguaguuucuuuaguagauuaaauugguugacccacuuaaacuccaaauacccagcauuaaacgugacuaugccaaacaaugaacaauuugacaaauuguacauuugggggguucaccacccggguacggacaaggaccaaaucuuccuguaugcacaaccaucaggaagaaucacaguaucuaccaaaagaagccaacaagcuguaaucccgaauaucggaucuagacccagaauaagggauaucccuagcagaauaagcaucuauuggacaauaguaaaaccgggagauauacuuuugauuaacagcacagggaaucuaauugcuccuagggguuacuucaaaauacgaagugggaaaagcucaauaaugagaucagaugcacccauuggcaaaugcaagucugaaugcaucacuccaaauggaagcauucccaaugacaaaccauuccaaaauguaaacagggucacauacggggccugucccagauauguuaagcaaagcacucugaaauuggcaacaggaaugcgaaauguaccagagagacaaacuagaggcauauuuggcgcaauagcggguuucauagaaaaugguugggagggaaugguggaugguugguacggcuucaggcaucaaaauucugagggaagaggacaagcagcagaucucaaaagcacucaagcagcaaucgaucaaaucaaugggaagcugaaucgauugaucgggaaaaccaacgagaaauuccaucagauugaaaaagaauucucagaaguagaagggagaauucaggaccuugagaaauauguugaggacacaaaaauagaucucuggucauacaacgcggagcuucuuguggcccuggagaaccaacauacaauugaucuaacugacucagaaaugaacaaacuguuugaaaaaacaaagaagcaacugagggaaaaugcugaggauaugggcaaugguuguuucaaaauauaccacaaaugugacaaugccugcauaggaucaaucagaaauggaacuuaugaccacgauguauacagggaugaagcauuaaacaaccgguuccagaucaagggaguugagcugaagucaggguacaaagauuggauccuauggauuuccuuugccauaucauguuuuuugcuuuguguugcuuuguugggguucaucaugugggccugccaaaagggcaacauuaggugcaacauuugcauuuga

SEQ ID NO: 45374 - RNA, 1701 nt, Artificial Sequence
  derived and/or modified CDS sequence (wt) from hemagglutinin__InfluenzaA__ALE31851
augaagacuaucauugcuuugagcuacauucuaugucugguuuucgcucaaaaaauuccuggaaaugacaauagcacggcaacgcugugccuugggcaccaugcaguaccaaacggaacgauagugaaaacaaucacaaaugaccgaauugaaguuacuaaugcuacugagcugguucagaauuccucaauaggugaaauaugcgacaguccucaucagauccuugauggagaaaacugcacacuaauagaugcucuauugggagacccucagugugauggcuuucaaaauaagaaaugggaccuuuuuguugaacgaagcaaagccuacagcaacuguuacccuuaugaugugccggauuaugccucccuuaggucacuaguugccucauccggcacacuggaguuuaacaaugaaagcuucaauuggacuggagucacucaaaacggaacaaguucugcuugcauaaggaaaucuaguaguaguuucuuuaguagauuaaauugguugacccacuuaaacuacacauacccagcauugaacgugacuaugccaaacaaugaacaauuugacaaauuguacauuugggggguucaccacccggguacggacaaggaccaaaucuuccuguaugcucgaucaucaggaagaaucacaguaucuaccaaaagaagccaacaagcuguaaucccaaauaucggaucuagacccagaauaagggauaucccuagcagaauaagcaucuauuggacaauaguaaaaccgggagacauacuuuugauuaacagcauagggaaucuaauugcuccuagggguuacuucaaaauacgaagugggaaaagcucaauaaugagaucagaugcacccauuggcaaaugcaagucugaaugcaucacuccaaauggaagcauucccaaugacaaaccauuccaaaauguaaacaggaucacauacggggccugucccagauauguuaagcauagcacucugaaauuggcaacaggaaugcgaaauguaccagagaaacaaacuagaggcauauuuggcgcaauagcggguuucauagaaaaugguugggagggaaugguggaugguugguacgguuucaggcaucaaaauucugagggaagaggacaagcagcagaucucaaaagcacucaagcagcaaucgaucaaaucaaugggaagcugaaucgauugaucgggaaaaccaacgagaaauuccaucagauugaaaaagaauucucagaaguagaaggaagaauucaggaccuugagaaauauguugaggacacuaaaauagaucucuggucauacaacgcggagcuucuuguugcccuggagaaucaacauacaauugaucuaacugacucagaaaugaacaaacuguuugaaaaaacaaagaagcaacugagggaaaaugcugaggauaugggaaaugguuguuucaaaauauaccacaaaugugacaaugccugcauaggaucaauaagaaauggaacuuaugaccacaauguguacagggaugaagcauuaaacaaccgguuccagaucaagggaguugagcugaagucaggguacaaagauuggauccuauggauuuccuuugccauaucauguuuuuugcuuuguguugcuuuguugggguucaucaugugggccugccaaaagggcaacauuaggugcaacauuugcauuuga

SEQ ID NO: 45375 - RNA, 1701 nt, Artificial Sequence; identical to SEQ ID NO: 44999
  derived and/or modified CDS sequence (wt) from hemagglutinin__InfluenzaA__ALE31852

SEQ ID NO: 45376 - RNA, 1701 nt, Artificial Sequence
  derived and/or modified CDS sequence (wt) from hemagglutinin__InfluenzaA__ALE31853
augaagacuaucauugcuuugagcuacauucuaugucugguuuucacucaaaaaauuccuggaaaugacaauagcacggcaacgcugugccuugggcaccaugcaguaccaaacggaacgauagugaaaacaaucacaaaugaccgaauugaaguuacuaaugcuacugaguugguucagaauuccucaauaggugaaauaugcgacaguccucaucagauccuugauggagaaaacugcacacuaauagaugcucuauugggagacccucagugugauggcuuucaaaauaagaaaugggaccuuuuuguugaacgaagcaaagccuacagcaacuguuacccuuaugaugugccggauuaugccucccuuaggucacuaguugccucauccggcacacuggaguuuaacaaugaaagcuucaauuggacuggagucacucaaaacggaacaaguucugcuugcauaaggagaucuaguaguaguuucuuuaguagauuaaauugguugacccacuuaaacuacacauacccagcauugaacgugacuaugccaaacaaugaacaauuugacaaauuguacauuugggggguucaccacccggguacggacaaggaccaaaucuuccuguaugcucaaucaucaggaagaaucacaguaucuaccaaaagaagccaacaagcuguaaucccaaauaucggaucuagacccagaauaagggauaucccuagcagaauaagcaucuauuggacaauaguaaaaccgggagacauacuuuugauuaacagcacagggaaucuaauugcuccuagggguuacuucaaaauacgaagugggaaaagcucaauaaugagaucagaugcacccauuggcaaaugcaagucugaaugcaucacuccaaauggaagcauucccaaugacaaaccauuccaaaauguaaacaggaucacauacggggccugucccagauauguuaagcauagcacucugaaauuggcaacaggaaugcgaaauguaccagagaaacaaacuagaggcauauuuggcgcaauagcggguuucauagaaaaugguugggagggaaugguggaugguugguacgguuucaggcaucaaaauucugagggaagaggacaagcagcagaucucaaaagcacucaagcagcaaucgaucaaaucaaugggaagcugaaucgguugaucgggaaaaccaacgagaaauuccaucagauugaaaaagaauucucagaaguagaaggaagaauucaggaccuugagaaauauguugaggacacuaaaauagaucucuggucauauaacgcggagcuucuuguugcccuggagaaccaacauacaauugaucuaacugacucagaaaugaacaaacuguuugaaaaaacaaagaagcaacugagggaaaaugcugaggauaugggaaaugguuguuucaaaauauaccacaaaugugacaaugccugcauaggaucaauaagaaauggaacuuaugaccacaauguguacagggaugaagcauuaaacaaccgguuccagaucaaggggguugagcugaagucaggguacaaagauuggauccuauggauuuccuuugccauaucauguuuuuugcuuuguguugcuuuguugggguucaucaugugggccugccaaaagggcaacauuaggugcaacauuugcauuuga

SEQ ID NO: 45377 - RNA, 1701 nt, Artificial Sequence
  derived and/or modified CDS sequence (wt) from hemagglutinin__InfluenzaA__ALE31854
augaagacuaucauugccuugagcuacauucuaugucugguuuucgcucaaaaaauuccuggaaaugacaauagcacggcaacgcugugccuugggcaccaugcaguaccaaacggaacgauagugaaaacaaucacaaaugaccgaauugaaguuacuaaugcuacugagcugguucagaauuccucaauaggugaaauaugcgacaguccucaucagauccuugauggagaaaacugcacacuaauagaugcucuauugggagacccucagugugauggcuuucaaaauaagaaaugggaccuuuuuguugaacgaagcaaagccuacagcaacuguuacccuuaugaugugccggauuaugccucccuuaggucacuaguugccucauccggcacacuggaguuuaacaaugaaagcuucaauuggacuggagucacucaaaacggaacaaguucugcuugcauaaggagaucuaguaguaguuucuuuaguagauuaaauugguugacccacuuaaacuacacauacccagcauugaacgugacuaugccaaacaaugaacaauuugacaaauuguacauuugggggguucaccacccggguacggacaaggaccaaaucuuccuguaugcucgaucaucaggaagaaucacaguaucuaccaaaggaagccaacaagcuguaaucccaaauaucggaucuagacccagaauaagggauaucccuagcagaauaagcaucuauuggacaauaguaaaaccgggagacauacuuuugauuaacagcacagggaaucuaauugcuccuagggguuacuucaaaauacgaagugggaaaagcucaauaaugagaucagaugcacccauuggcagaugcaagucugaaugcaucacuccaaauggaagcauucccaaugacaaaccauuccaaaauguaaacaggaucacauacggggccugucccagauauguuaagcauagcacucugaaauuggcaacaggaaugcgaaauguaccagagaaacaaacuagaggcauauuuggcgcaauagcggguuucauagaaaaugguugggagggaaugguggaugguugguacgguuucaggcaucaaaauucugagggaagaggacaagcagcagaucucaaaagcacucaagcagcaaucgaucaaaucaaugggaagcugaaucgauugaucgggaaaaccaacgagaaauuccaucagauugaaaaagaauucucagaaguagaaggaagaauucaggaccuugagaaauauguugaggacacuaaaauagaucucuggucauacaacgcggagcuucuuguugcccuggagaaccaacauacaauugaucuaacugacucagaaaugaacaaacuguuugaaaaaacaaagaagcaacugagggaaaaugcugaggauaugggaaaugguuguuucaaaauauaccacaaaugugacaaugccugcauaggaucaauaagaaauggaacuuaugaccacaauguguacagggaugaagcauuaaacaaccgguuccagaucaagggaguugagcugaagucaggguacaaagauuggauccuauggauuuccuuugccauaucauguuuuuugcuuuguguugcuuuguugggguucaucaugugggccugccaaaagggcaacauuaggugcaacauuugcauuuga

SEQ ID NO: 45378 - RNA, 1701 nt, Artificial Sequence; identical to SEQ ID NO: 45139
  derived and/or modified CDS sequence (wt) from hemagglutinin__InfluenzaA__ALE31855

SEQ ID NO: 45379 - RNA, 1701 nt, Artificial Sequence
  derived and/or modified CDS sequence (wt) from hemagglutinin__InfluenzaA__ALE31856
augaagacuaucauugccuugagcuacauucuaugucugguuuucgcucaaaaaauuccuggaaaugacaauagcacggcaacgcugugccuugggcaccaugcaguaccaaacggaacgauagugaaaacaaucacaaaugaccgaauugaaguuacuaaugcuacugagcugguucagaauuccucaauaggugaaauaugcgacaguccucaucagauccuugauggagaaaacugcacacuaauagaugcucuauugggagacccucagugugauggcuuucaaaauaagaaaugggaccuuuuuguugaacgaagcaaagccuacagcaacuguuacccuuaugaugugccggauuaugccucccuuaggucacuaguugccucauccggcacacuggaguuuaacaaugaaagcuucaauuggacuggagucacucaaaacggaacaaguucugcuugcauaaggagaucuaguaguaguuucuuuaguagauuaaauugguugacccacuuaaacuacacauacccagcauugaacgugacuaugccaaacaaugaacaauuugacaaauuguacauuugggggguucaccacccggguacggacaaggaccaaaucuuccuguaugcucaaucaucaggaagaaucacaguaucuaccaaaagaagccaacaagcuguaaucccaaauaucggaucuagacccagaauaagggauaucccuagcagaauaagcaucuauuggacaauaguaaaaccgggagacauacuuuugauuaacagcacagggaaucuaauugcuccuagggguuacuucaaaauacgaagugggaaaagcucaauaaugagaucagaugcacccauuggcaaaugcaagucugaaugcaucacuccaaauggaagcauucccaaugacaaaccauuccaaaauguaaacaggaucacauacggggccugucccagauauguuaagcauagcacucugaaauuggcaacaggaaugcgaaauguaccagagaaacaaacuagaggcauauuuggcgcaauagcggguuucauagaaaaugguugggagggaaugguggaugguugguacgguuucaggcaucaaaauucugagggaagaggacaagcagcagaucucaaaagcacucaagcagcaaucgaucaaaucaaugggaagcugaaucgauugaucgggaaaaccaacgagaaauuccaucagauugaaaaagaauucucagaaguagaaggaagaauucaggaccuugagaaauauguugaggacacuaaaauagaucucuggucauacaacgcggagcuucuuguugcccuggagaaccaacauacaauugaucuaacugacucggaaaugaacaaacuguuugaaaaaacaaagaagcaacugagggaaaaugcugaggauaugggaaaugguuguuucaaaauauaccacaaaugugacaaugccugcauaggaucaauaagaaauggaacuuaugaccacaauguguacagggaugaagcauuaaacaaccgguuccagaucaagggaguugagcugaagucaggguacaaagauuggauccuauggauuuccuuugccauaucauguuuuuugcuuuguguugcuuuguugggguucaucaugugggccugccaaaagggcaacauuaggugcaacauuugcauuuga

SEQ ID NO: 45380 - RNA, 1701 nt, Artificial Sequence; identical to SEQ ID NO: 45115
  derived and/or modified CDS sequence (wt) from hemagglutinin__InfluenzaA__ALE31857

SEQ ID NO: 45381 - RNA, 1701 nt, Artificial Sequence
  derived and/or modified CDS sequence (wt) from hemagglutinin__InfluenzaA__ALE31858
augaagacuaucauugcuuugagcuacauucuaugucugguuuucgcucaaaaaauuccuggaaaugacaauagcacggcaacgcugugccuugggcaccaugcaguaccaaacggaacgauagugaaaacaaucacaaaugaccgaauugaaguuacuaaugcuacugagcugguucagaauuccucaauaggugaaauaugcgacaguccucaucagauccuugauggagaaaacugcacacuaauagaugcucuauugggagacccucagugugauggcuuucaaaauaagaaaugggaccuuuuuguugaacgaagcaaagccuacagcaacuguuacccuuaugaugugccggauuaugccucccuuaggucacuaguugccucauccggcacacuggaguuuaacaaugaaagcuucaauuggacuggagucacucaaaacggaacaaguucugcuugcauaaggagaucuaguaguaguuucuuuaguagauuaaauugguugacccacuuaaaauacacauacccagcauugaacgugacuaugccaaacaaugaacaauuugacaaauuguacauuugggggguucaccacccggguacggacaaggaccaaaucuuccuguaugcucaaucaucaggaagaaucacaguaucuaccaaaagaagccaacaagcuguaaucccaaauaucggaucuagacccagaauaagggauaucccuagcagaauaagcaucuauuggacaauaguaaaaccgggagacauacuuuugauuaacagcacagggaaucuaauugcuccuagggguuacuucaaaauacgaagugggaaaagcucaauaaugagaucagaugcacccauuggcaaaugcaagucugaaugcaucacuccaaauggaagcauucccaaugacaaaccauuccaaaauguaaacaggaucacauacggggccugucccagauauguuaagcauagcacucugaaauuggcaacaggaaugcgaaauguaccagagaaacaaacuagaggcauauuuggcgcaauagcggguuucauagaaaaugguugggagggaaugguggaugguugguacgguuucaggcaucaaaauucugagggaagaggacaagcagcagaucucaaaagcacucaagcagcaaucgaucaaaucaaugggaagcugaaucgauugaucgggaaaaccaacgagaaauuccaccagauugaaaaagaauucucagaaguagaaggaagaauucaggaccuugagaaauauguugaggacacuaaaauagaucucuggucauacaacgcggagcuucuuguugcccuggagaaccaacauacaauugaucuaacugacucagaaaugaacaaacuguuugaaaaaacaaagaagcaacugagggaaaaugcugaggauaugggaaaugguuguuucaaaauauaccacaaaugugacaaugccugcauaggaucaauaagaaauggaacuuaugaccacaauguguacagggaugaagcauuaaacaaccgguuccagaucaaaggaguugagcugaagucaggguacaaagauuggauccuauggauuuccuuugccauaucauguuuuuugcuuuguguugcuuuguugggguucaucaugugggccugccaaaagggcaacauuaggugcaacauuugcauuuga

SEQ ID NO: 45382 - RNA, 1701 nt, Artificial Sequence
  derived and/or modified CDS sequence (wt) from hemagglutinin__InfluenzaA__ALE31859
augaagacuaucauugcuuugagcuacauucuaugucugguuuucgcucaaaaaauuccuggaaaugacaauagcacggcaacgcugugccuugggcaccaugcaguaccaaacggaacgauagugaaaacaaucacaaaugacagaauugaaguuacuaaugcuacugagcugguucagaauuccucaauaggugaaauaugcgacaguccucaucagauccuugauggagaaaacugcacacuaauagaugcucuauugggagacccucagugugauggcuuucaaaauaagaaaugggaccuuuuuguugaacgaagcaaagccuacagcaacuguuacccuuaugaugugccggauuaugccucccuuaggucacuaguugccucauccggcacacuggaguuuaacaaugaaagcuucaauuggacuggagucacucaaaacggaacaaguucugcuugcacaaggagaucuaguaguaguuucuuuaguagauuaaauugguugacccacuuaaacuacacauacccagcauugaacgugacuaugccaaacaaugagcaauuugacaaauuguacauuugggggguucaccacccggguacggacaaggaccaaaucuuccuguaugcucaaucaucaggaagaaucacaguaucuaccaaaagaagccaacaagcuguaaucccaaauaucggaucuagacccagaauaagggauaucccuagcagaauaagcaucuauuggacaauaguaaaaccgggagacaugcuuuugauuaacagcacagggaaucuaauugcuccuagggguuacuucaaaauacgaagugggaaaagcucaauaaugagaucagaugcacccauuggcaaaugcaagucugaaugcaucacuccaaauggaagcauucccaaugacaaaccauuccaaaauguaaacaggaucacauacggggccugucccagauauguuaagcauagcacucugaaauuggcaacaggaaugcgaaauguaccagagaaacaaacuagaggcauauuuggcgcaauagcggguuucauagaaaaugguugggagggaaugguggaugguugguacgguuucaggcaucaaaauucugagggaagaggacaagcagcagaucucaaaagcacucaagcagcaaucgaucaaaucaaugggaagcugaaucgauugaucgggaaaaccaacgagaaauuccaucagauugaaaaagaauucucagaaguagaaggaagaauucaggaccuugagaaauauguugaggacacuaaaauagaucucuggucauacaacgcggagcuucuuguugcccuggagaaccaacauacaauugaucuaacugacucagaaaugaacaaacuguuugaaaaaacaaagaagcaacugagggaaaaugcugaggauaugggaaaugguuguuucaaaauauaccacaaaugugacaaugccugcauaggaucaauaagaaauggaacuuaugaccacaauguguacagggaugaagcauuaaacaaccgguuccagaucaagggaguugagcugaagucaggguacaaagauuggauccuauggauuuccuuugccauaucauguuuuuugcuuuguguugcuuuguugggguucaucaugugggccugccaaaagggcaacauuaggugcaacauuugcauuuga

SEQ ID NO: 45383 - RNA, 1701 nt, Artificial Sequence
  derived and/or modified CDS sequence (wt) from hemagglutinin__InfluenzaA__ALE31860
augaagacuaucauugcuuugagcuacauucuaugucugguuuucgcucaaaaaauuccuggaaaugacaauagcacggcaacgcugugccuugggcaccaugcaguaccaaacggaacgauagugaaaacaaucacaaaugaccgaauugaaguuacuaaugcuacugagcugguucagaauuccucaauagguaaaauaugcgacaguccucaucagauccuugauggagaaaacugcacacuaauagaugcucuauugggagauccucagugugauggcuuucaaaauaagaaaugggaccuuuuuguugaacgaagcaaagccuacagcaacuguuacccuuaugaugugccggauuaugccucccuuaggucacuaguugccucauccggcacacuggaguuuaacaaugaaagcuucaauuggacuggagucacucaaaacggaacaaguucugcuugcauaaggagaucuaguaguaguuucuuuaguagauuaaauugguugacccacuuaaacuacacauacccagcauugaacgugacuaugccaaacaaugaacaauuugacaaauuguacauuugggggguucaccacccggguacggacaaggaccaaaucuuccuguaugcucaaucaucaggaagaaucacaguaucuaccaaaagaagccaacaagcuguaaucccaaauaucggaucuagacccagaauaagggauaucccuagcagaauaagcaucuauuggacaauaguaaaaccgggagacauacuuuugauuaacagcacagggaaucuaauugcuccuagggguuacuucaaaauacgaaguggggaaagcucaauaaugagaucagaugcacccauuggcaaaugcaagucugaaugcaucacuccaaauggaagcauucccaaugacaaaccauuccaaaauguaaacaggaucacauacggggccugucccagauauguuaagcauagcacucugaaauuggcaacaggaaugcgaaauguaccagagaaacaaacuagaggcauauuuggcgcaauagcggguuucauagaaaaugguugggagggaaugguggaugguugguacgguuucaggcaucaaaauucugagggaagaggacaagcagcagaucucaaaagcacucaagcagcaaucgaucaaaucaaugggaagcugaaucgauugaucgggaaaaccaacgagaaauuccaucagauugaaaaagaauucucagaaguagaaggaagaauucaggaccuugagaaauauguugaggacacuaaaauagaucucuggucauacaacgcggagcuucuuguugcccuggagaaccaacauacaauugaucuaacugacucagaaaugaacaaacuguuugaaaaaacaaagaagcaacugagggaaaaugcugaggauaugggaaaugguuguuucaaaauauaccacaaaugugacaaugccugcauaggaucaauaagaaauggaacuuaugaccacaauguguacagggaugaagcauuaaacaaccgguuccagaucaagggaguugagcugaagucaggguacaaagauuggauccuauggauuuccuuugccauaucauguuuuuugcuuuguguugcuuuguugggguucaucaugugggccugccaaaagggcaacauuaggugcaacauuugcauuuga

SEQ ID NO: 45384 - RNA, 1701 nt, Artificial Sequence; identical to SEQ ID NO: 45108
  derived and/or modified CDS sequence (wt) from hemagglutinin__InfluenzaA__ALE31861

SEQ ID NO: 45385 - RNA, 1701 nt, Artificial Sequence
  derived and/or modified CDS sequence (wt) from hemagglutinin__InfluenzaA__ALE31862
augaagaugaucauugcuuugagcuacauucuaugucugguuuucgcucaaaaaauuccuggaaaugacaauagcacggcaacgcugugccuugggcaccaugcaguaccaaacggaacgauagugaaaacaaucacaaaugaccgaauugaaguuacuaaugcuacugagcugguucagaauuccucaauaggugaaauaugcgacaguccucaucagauccuugauggagaaaacugcacacuaauagaugcucuauugggagacccucagugugauggcuuucaaaauaagaaaugggaccuuuuuguugaacgaagcaaagccuacagcaacuguuacccuuaugaugugccggauuaugccucccuuaggucacuaguugccucauccggcacacuggaguuuaacaaugaaagcuucaauuggacuggagucacucaaaacggaacaaguucugcuugcauaaggaaaucuaguaguaguuucuuuaguagauuaaauugguugacccacuuaaacuacacauacccagcauugaacgugacuaugccaaacaaugaacaauuugacaaauuguacauuugggggguucaccacccggguacggacaaggaccaaaucuuccuguaugcucgaucaucaggaagaaucacaguaucuaccaaaagaagccaacaagcuguaaucccaaauaucggaucuagacccagaauaagggauaucccuagcagaauaagcaucuauuggacaauaguaaaaccgggagacauacuuuugauuaacagcacagggaaucuaauugcuccuagggguuacuucaaaauacgaagugggaaaagcucaauaaugagaucagaugcacccauuggcaaaugcaagucugaaugcaucacuccaaauggaagcauucccaaugacaaaccauuccaaaauguaaacaggaucacauacggggccugucccagauauguuaagcauagcacucugaaauuggcaacaggaaugcgaaauguaccagagaaacaaacuagaggcauauuuggcgcaauagcggguuucauagaaaaugguugggagggaaugguggaugguugguacgguuucaggcaucaaaauucugagggaagaggacaagcagcagaucucaaaagcacucaagcagcaaucgaucaaaucaaugggaagcugaaucgauugaucgggaaaaccaacgagaaauuccaucagauugaaaaagaauucucagaaguagaaggaagaauucaggaccuugagaaauauguugaggacacuaaaauagaucucuggucauacaacgcggaguuucuuguugcccuggagaaucaacauacaauugaucuaacugacucagaaaugaacaaacuguuugaaaaaacaaagaagcaacugagggaaaaugcugaggauaugggaaaugguuguuucaaaauauaccacaaaugugacaaugccugcauaggaucaauaagaaauggaacuuaugaccacaauguguacagggaugaagcauuaaacaaccgguuccagaucaagggaguugagcugaagucaggguacaaagauuggauccuauggauuuccuuugccauaucauguuuuuugcuuuguguugcuuuguugggguucaucaugugggccugccaaaagggcaacauuaggugcaacauuugcauuuga

SEQ ID NO: 45386 - RNA, 1701 nt, Artificial Sequence; identical to SEQ ID NO: 45145
  derived and/or modified CDS sequence (wt) from hemagglutinin__InfluenzaA__ALE31863

SEQ ID NO: 45387 - RNA, 1701 nt, Artificial Sequence; identical to SEQ ID NO: 45140
  derived and/or modified CDS sequence (wt) from hemagglutinin__InfluenzaA__ALE31865

SEQ ID NO: 45388 - RNA, 1701 nt, Artificial Sequence
  derived and/or modified CDS sequence (wt) from hemagglutinin__InfluenzaA__ALE31866
augaagacuaucauugcuuugagcuacauucuaugucugguuuucgcucaaaaaauuccuggaaaugacaauagcacggcaacgcugugccuugggcaccaugcaguaccaaacggaacgauagugaaaacaaucacaaaugaccgaauugaaguuacuaaugcuacugagcugguucagaauuccucaauaggugaaauaugcgacaguccucaucagauccuugauggagaaaacugcacacuaauagaugcucuauugggagacccucagugugauggcuuucaaaauaagaaaugggaccuuuuuguugaacgaagcaaagccuacagcaacuguuacccuuaugaugugccggauuaugccucccuuaggucacuaguugccucauccggcacacuggaguuuaacaaugaaagcuucaauuggacuggagucacucaaaacggaacaaguucugcuugcauaaggaaaucuaguaguaguuucuuuaguagauuaaauugguugacccacuuaaacuacacauacccagcauugaacgugacuaugccaaacaaugaacaauuugacaaauuguacauuugggggguucaccacccggguacggacaaggaccaaaucuuccuguaugcucgaucaucaggaagaaucacaguaucuaccaaaagaagccaacaagcuguaaucccaaauaucggaucuagacccagaauaagggauauccccagcagaauaagcaucuauuggacaauaguaaaaccgggagacauacuuuugauuaacagcacagggaaucuaauugcuccuagggguuacuucaaaauacgaagugggaaaagcucaauaaugagaucagaugcacccauuggcaaaugcaagucugaaugcaucacuccaaauggaagcauucccaaugacaaaccauuccaaaauguaaacaggaucacauacggggccugucccagauauguuaagcauagcacucugaaauuggcaacaggaaugcgaaauguaccagagaaacaaacuagaggcauauuuggcgcaauagcggguuucauagaaaaugguugggagggaaugguggaugguugguacgguuucaggcaucaaaauucugaggggagaggacaagcagcagaucucaaaagcacucaagcagcaaucgaucaaaucaaugggaagcugaaucgauugaucgggaaaaccaacgagaaauuccaucagauugaaaaagaauucucagaaguagaaggaagaauucaggaccuugagaaauauguugaggacacuaaaauagaucucuggucauacaacgcggagcuucuuguugcccuggagaaucaacauacaauugaucuaacugacucagaaaugaacaaacuguuugaaaaaacaaagaagcaacugagggaaaaugcugaggauaugggaaaugguuguuucaaaauauaccacaaaugugacaaugccugcauaggaucaauaagaaauggaacuuaugaccacaauguguacagggaugaagcauuaaacaaccgguuccagaucaagggaguugagcugaagucaggguacaaagauuggauccuauggauuuccuuugccauaucauguuuuuugcuuuguguugcuuuguugggguucaucaugugggccugccaaaagggcaacauuaggugcaacauuugcauuuga

SEQ ID NO: 45389 - RNA, 1701 nt, Artificial Sequence
  derived and/or modified CDS sequence (wt) from hemagglutinin__InfluenzaA__ALE31867
augaagacuaucauugcuuugagcuacauucuaugucugguuuucgcucaaaaaauuccuggaaaugacaauagcacggcaacgcugugccuugggcaccaugcaguaccaaacggaacgauagugaaaacaaucacaaaugaccgaauugaaguuacuaaugcuacugagcugguucagaauuccucaauaggugaaauaugcgacaguccucaucagauccuugauggagaaaacugcacacuaauagaugcucuauugggagacccucagugugauggcuuucaaaauaagaaaugggaccuuuuuguugaacgaagcaaagccuacagcaacuguuacccuuaugaugugccggauuaugccucccuuaggucacuaguugccucauccggcacacuggaguuuaacaaugaaagcuucaauuggacuggagucacucaaaacggaacaaguucugcuugcauaaggaaaucuaguaguaguuucuuuaguagauuaaauugguugacccacuuaaacuacacauacccagcauugaacgugacuaugccaaacaaugaacaauuugacaaauuguacauuugggggguucaccacccggguacggacaaggaccaaaucuuccuguaugcucgaucaucaggaagaaucacaguaucuaccaaaagaagccaacaagcuguaaucccaaauaucggaucuagacccagaauaagggauaucccuagcagaauaagcaucuauuggacaauaguaaaaccgggagacauacuuuugauuaacagcacagggaaucuaauugcuccuagggguuacuucaaaauacgaagugggaaaagcucaauaaugagaucagaugcacccauuggcaaaugcaagucugaaugcaucacuccaaauggaagcauucccaaugacaaaccauuccaaaauguaaacaggaucacauacggggccugucccagauauguuaagcauagcacucugaaauuggcaacaggaaugcgaaauguaccagagaaacaaacuagaggcauauuuggcgcaauagcggguuucauagaaaaugguugggagggaaugguggaugguugguacgguuucaggcaucaaaauucugaggggagaggacaagcagcagaucucaaaagcacucaagcagcaaucgaucaaaucaaugggaagcugaaucgauugaucgggaaaaccaacgagaaauuccaucagauugaaaaagaauucucagaaguagaaggaagaauucaggaccuugagaaauauguugaggacacuaaaauagaucucuggucauacaacgcggagcuucuuguugcccuggagaaucaacauacaauugaucuaacugacucagaaaugaacaaacuguuugaaaaaacaaagaagcaacugagggaaaaugcugaggauaugggaaaugguuguuucaaaauauaccacaaaugugacaaugccugcauaggaucaauaagaaauggaacuuaugaccacaauguguacagggaugaagcauuaaacaaccgguuccagaucaagggaguugagcugaagucaggguacaaagauuggauccuauggauuuccuuugccauaucauguuuuuugcuuuguguugcuuuguugggguucaucaugugggccugccaaaauggcaacauuaggugcaacauuugcauuuga

SEQ ID NO: 45390 - RNA, 1701 nt, Artificial Sequence; identical to SEQ ID NO: 45108
  derived and/or modified CDS sequence (wt) from hemagglutinin__InfluenzaA__ALE31868

SEQ ID NO: 45391 - RNA, 1701 nt, Artificial Sequence; identical to SEQ ID NO: 45389
  derived and/or modified CDS sequence (wt) from hemagglutinin__InfluenzaA__ALE31869

SEQ ID NO: 45392 - RNA, 1701 nt, Artificial Sequence; identical to SEQ ID NO: 45389
  derived and/or modified CDS sequence (wt) from hemagglutinin__InfluenzaA__ALE31870

SEQ ID NO: 45393 - RNA, 1701 nt, Artificial Sequence
  derived and/or modified CDS sequence (wt) from hemagglutinin__InfluenzaA__ALE31871
augaagacuaucauugcuuugagcuacauucuaugucugguuuucgcucaaaaaauuccuggaaaugacaauagcacggcaacgcugugccuugggcaccaugcaguaccaaacggaacgauagugaaaacaaucacaaaugaccgaauugaaguuacuaaugcuacugagcugguucagaauuccucaauaggugaaauaugcaacaguccucaucagauccuugauggagaaaacugcacacuaauagaugcucuauugggagacccucagugugauggcuuucaaaauaagaaaugggaccuuuuuguugaacgaagcaaagccuacagcaacuguuacccuuaugaugugccggauuaugccucccuuaggucacuaguugccucauccggcacacuggaguuuaacaaugaaagcuucaauuggacuggagucacucaaaacggaacaaguucugcuugcauaaggaaaucuaguaguaguuucuuuaguagauuaaauugguugacccacuuaaacuacacauacccagcauugaacgugacuaugccaaacaaugaacaauuugacaaauuguacauuugggggguucaccacccggguacggacaaggaccaaaucuuccuguaugcucgaucaucaggaagaaucacaguaucuaccaaaagaagccaacaagcuguaaucccaaauaucggaucuagacccagaauaagggauaucccuagcagaauaagcaucuauuggacaauaguaaaaccgggagacauacuuuugauuaacagcacagggaaucuaauugcuccuagggguuacuucaaaauacgaagugggaaaagcucaauaaugagaucagaugcacccauuggcaaaugcaagucugaaugcaucacuccaaauggaagcauucccaaugacaaaccauuccaaaauguaaacaggaucacauacggggccugucccagauauguuaagcauagcacucugaaauuggcaacaggaaugcgaaauguaccagagaaacaaacuagaggcauauuuggcgcaauagcggguuucauagaaaaugguugggagggaaugguggaugguugguacgguuucaggcaucaaaauucugaggggagaggacaagcagcagaucucaaaagcacucaagcagcaaucgaucaaaucaaugggaagcugaaucgauugaucgggaaaaccaacgagaaauuccaucagauugaaaaagaauucucagaaguagaaggaagaauucaggaccuugagaaauauguugaggacacuaaaauagaucucuggucauacaacgcggagcuucuuguugcccuggagaaucaacauacaauugaucuaacugacucagaaaugaacaaacuauuugaaaaaacaaagaagcaacugagggaaaaugcugaggauaugggaaaugguuguuucaaaauauaccacaaaugugacaaugccugcauaggaucaauaagaaauggaacuuaugaccacaauguguacagggaugaagcauuaaacaaccgguuccagaucaagggaguugagcugaagucaggguacaaagauuggauccuauggauuuccuuugccauaucauguuuuuugcuuuguguugcuuuguugggguucaucaugugggccugccaaaagggcaacauuaggugcaacauuugcauuuga

SEQ ID NO: 45394 - RNA, 1701 nt, Artificial Sequence
  derived and/or modified CDS sequence (wt) from hemagglutinin__InfluenzaA__ALE31872
augaagacuaucauugcuuugagcuacauucuaugucugguuuucgcucaaaaacuuccuggaaaugacaauagcacggcaacgcugugccuugggcaccaugcaguaccaaacggaacgauagugaaaacaaucacgaaugaccgaauugaaguuacuaaugcuacugagcugguucagaauuccucaauaggugaaauaugcgacaguccucaucagauccuugauggagaaaacugcacacuaauagaugcucuauugggagacccucagugugauggcuuucaaaauaagaaaugggaccuuuuuguugaacgaagcaaagccuacagcaacuguuacccuuaugaugugccggauuaugccucccuuaggucacuaguugccucauccggcacacuggaguuuaacaaugaaagcuucaauugggcuggagucacucaaaacggaacaaguucuucuugcauaaggggaucuaauaguaguuucuuuaguagauuaaauugguugacccacuuaaacuccaaauacccagcauuaaacgugacuaugccaaacaaugaacaauuugacaaauuguacauuugggggguucaccacccggguacggacaaggaccaaaucuuccuguaugcacaaucaucaggaagaaucacaguaucuaccaaaagaagccaacaagcuguaaucccgaauaucggaucuagacccagaauaagggauaucccuagcagaauaagcaucuauuggacaauaguaaaaccgggagacauacuuuugauuaacagcacagggaaucuaauugcuccuagggguuacuucaaaauacgaagugggaaaagcucaauaaugagaucagaugcacccauuggcaaaugcaagucugaaugcaucacuccaaauggaagcauucccaaugacaaaccauuccaaaauguaaacaggaucacauacggggccugucccagauauguuaagcaaagcacucugaaauuggcaacaggaaugcgaaauguaccagagagacaaacuagaggcauauuuggcgcaauagcggguuucauagaaaaugguugggagggaaugguggaugguugguacggcuucaggcaucaaaauucugagggaagaggacaagcagcagaucucaaaagcacucaagcagcaauugaucaaaucaaugggaagcugaaucgauugaucgggaaaaccaacgagaaauuccaucagauugaaaaagaauucucagaaguagaagggagaauucaggaccuugagaaauauguugaggacacaaaaauagaucucuggucauacaacgcggagcuucuuguugcccuggagaaccaacauacaauugaucuaacugacucagaaaugaacaaacuguuugaaaaaacaaagaagcaacugagggaaaaugcugaggauaugggcaaugguuguuucaaaauauaccacaaaugugacaaugccugcauaggaucaaucagaaauggaacuuaugaccacgauguauacagggaugaagcauuaaacaaccgguuccagaucaagggaguugagcugaagucaggguacaaagauuggauccuauggauuuccuuugccauaucauguuuuuugcuuuguguugcuuuguugggguucaucaugugggccugccaaaagggcaacauuaggugcaacauuugcauuuga

SEQ ID NO: 45395 - RNA, 1701 nt, Artificial Sequence
  derived and/or modified CDS sequence (wt) from hemagglutinin__InfluenzaA__ALE31873
augaagacuaucauugcuuugagcuacauucuaugucugguuuucgcucaaaaaauuccuggaaaugacaauagcacggcaacgcugugccuugggcaccaugcaguaccaaacggaacgauagugaaaacaaucacaaaugaccgaauugaaguuacuaaugcuacugagcugguucagaauuccucaauaggugaaauaugcgacaguccucaucaaauccuugauggagaaaacugcacacuaauagaugcucuauugggagauccucagugugauggcuuucaaaauaagaaaugggaccuuuuuguugaacgaagcaaagccuacagcaacuguuacccuuaugaugugccggauuaugccucccuuaggucacuaguugccucauccggcacacuggaguuuaacaaugaaagcuucaauuggacuggagucacucaaaacggaacaaguucugcuugcauaaggagaucuaguaguaguuucuuuaguagauuaaauugguugacccacuuaaacuacacauacccagcauugaacgugacuaugccaaacaaugaacaauuugacaaauuguacauuugggggguucaccacccggguacggacaaggaccaaaucuuccuguaugcucaaucaucaggaagaaucacaguaucuaccaaaagaagccaacaagcuguaaucccaaauaucggaucuagacccagaauaagggauaucccuagcagaauaagcaucuauuggacaauaguaaaaccgggagacauacuuuugauuaacagcacagggaaucuaauugcuccuagggguuacuucaaaauacgaagugggaaaagcucaauaaugagaucagaugcacccauuggcaaaugcaagucugaaugcaucacuccaaauggaagcauucccaaugacaaaccauuccaaaauguaaacaggaucacauacggggccugucccagauauguuaagcauagcacucugaaauuggcaacaggaaugcgaaauguaccagagaaacaaacuagaggcauauuuggcgcaauagcggguuucauagaaaaugguugggagggaaugguggaugguugguacgguuucaggcaucaaaauucugagggaagaggacaagcagcagaucucaaaagcacucaagcagcaaucgaucaaaucaaugggaagcugaaucgauugaucgggaaaaccaacgagaaauuccaucagauugaaaaagaauucucagaaguagaaggaagaauucaggaccuugagaaauauguugaggacacuaaaauagaucucuggucauacaacgcggagcuucuuguugcccuggagaaccaacauacaauugaucuaacugacucagaaaugaacaaacuguuugaaaaaacaaagaagcaacugagggaaaaugcugaggauaugggaaaugguuguuucaaaauauaccacaaaugugacaaugccugcaucggaucaauaagaaauggaacuuaugaccacaauguguacagggaugaagcauuaaacaaccgguuccagaucaagggaguugagcugaagucaggguacaaagauuggauccuauggauuuccuuugccauaucauguuuuuugcuuuguguugcuuuguugggguucaucaugugggccugccaaaagggcaacauuaggugcaacauuugcauuuga

SEQ ID NO: 45396 - RNA, 1701 nt, Artificial Sequence
  derived and/or modified CDS sequence (wt) from hemagglutinin__InfluenzaA__ALE31874
augaagacuaucauugcuuugagcuacauucuaugucugguuuucgcucaaaaacuuccuggaaaugacaauagcgcggcaacgcugugccuugggcaccaugcaguaccaaacggaacgauagugaaaacaaucacgaaugaccgaauugaaguuacuaaugcuacugaacugguucagaauuccucaauaggugaaauaugcgacaguccucaucagauccuugauggagaaaacugcacacuaauagaugcucuauugggagacccucagugugauggcuuucaaaauaagaaaugggaccuuuuuguugaacgaagcaaagcccacagcaacuguuacccuuaugaugugccggauuaugccucccuuaggucacuaguugccucauccggcacacuggaguuuaacaaugaaagcuucaauugggcuggagucacucaaaacggaacaaguucuucuugcauaaggggaucuaauaguaguuucuuuaguagauuaaauugguugacccacuuaaacuccaaauacccagcauuaaacgugacuaugccaaacaaugaacaauuugacaaauuguacauuugggggguucaccacccggguacggacaaggaccaaaucuuccuguaugcacaaucaucaggaagaaucacaguaucuaccaaaagaagccaacaagcuguaaucccgaauaucggaucuagacccagaauaagggauaucccuagcagaauaagcaucuauuggacaauaguaaaaccgggagacauacuuuugauuaauagcacagggaaucuaauugcuccuagggguuacuucaaaauacgaagugggaaaagcucaauaaugagaucagaugcacccauuggcaaaugcaagucugaaugcaucacuccaaauggaagcauucccaaugacaaaccauuccaaaauguaaacaggaucacauacggggccugucccagauauguuaagcaaagcacucugaaauuggcaacaggaaugcgaaauguaccagagaaacaaacuagaggcauauuuggcgcaauagcggguuucauagaaaaugguugggagggaaugguggaugguugguacggcuucaggcaucaaaauucugagggaagaggacaagcagcagaucucaaaagcacucaagcagcaaucgaucaaaucaaugggaagcugaaucgauugaucgggaaaaccaacgagaaauuccaucagauugaaaaagaauucucagaaguagaagggagaauucaggaccuugagaaauauguugaggacacaaaaauagaucucuggucauacaacgcggagcuucuuguugcccuggagaaccaacauacaauugaucuaacugacucagaaaugaacaaacuguuugaaaaaacaaagaagcagcugagggaaaaugcugaggauaugggcaaugguuguuucaaaauauaccacaaaugugacaaugccugcauaggaucaaucagaaauggaacuuaugaccacgauguauacagggaugaagcauuaaacaaccgguuccagaucaaaggaguugagcugaagucaggguacaaagauuggauccuauggauuuccuuugccauaucauguuuuuugcuuuguguugcuuuguugggguucaucaugugggccugccaaaagggcaacauuaggugcaacauuugcauuuga

SEQ ID NO: 45397 - RNA, 1701 nt, Artificial Sequence; identical to SEQ ID NO: 45396
  derived and/or modified CDS sequence (wt) from hemagglutinin__InfluenzaA__ALE31875

SEQ ID NO: 45398 - RNA, 1701 nt, Artificial Sequence; identical to SEQ ID NO: 45396
  derived and/or modified CDS sequence (wt) from hemagglutinin__InfluenzaA__ALE31876

SEQ ID NO: 45399 - RNA, 1701 nt, Artificial Sequence
  derived and/or modified CDS sequence (wt) from hemagglutinin__InfluenzaA__ALE31877
augaagacuaucauugcuuugagcuacauucuaugucugguuuucgcucaaaagcuuccugaaaaugacaauagcacggcaacgcugugccuugggcaccaugcaguaccaaacggaacgauagugaaaacaaucacgagugaccgaauugaaguuacuaaugcuacugagcugguucagaauuccucaauaggugaaauaugcgacaguccucaucagauccuugauggaaaaaacugcacacuaauagaugcucuauugggagacccucagugugauggcuuucaaaauaagaaaugggaccuuuuuguugaacgaagcaaagccuacagcaacuguuacccuuaugaugugccggauuaugccucccuuaggucacuaguugccucauccgguacacuggaguuuaacgaugaaagcuucaauugggcuggagucacucaaaacggaacaaguucugcuugcauaaggggaucuaauaguaguuucuuuaguagauuaaauugguugacccacucaaacuucaaauacccagcauugaacgugacuaugccaaacaaugaacaauuugacaaauuguacauuugggggguucaccacccggguacggacaaggaccaaaucuuccuguaugcucaaucaucaggaagaaucacaguauccaccaaaagaagccaacaagcuguaaucccgaauaucggaucuagacccagaauaaggaauaucccuagcagaauaagcaucuauuggacaauaguaaaaccgggagacauacuuuugauuaacagcacagggaaucuaauugcuccuagggguuacuucaaaauacgaagugggaaaagcucaauaaugagaucagaugcacccauuggcaaaugcaagucugaaugcaucacuccaaauggaagcauucccaaugacaaaccauuccaaaauguaaacaggaucacauacggggccugucccagauauguuaagcaaagcacucugaaauuggcaacaggaaugcgaaauguaccagagaaacaaacuagaggcauauuuggcgcaauagcggguuucauagaaaaugguugggagggaaugaaggaugguugguacgguuucaggcaucaaaauucugagggaagaggacaagcagcagaucucaaaagcacucaagcagcaaucgaucaaaucaaugggaagcugaauagauugaucgggaaaaccaacgagaaauuccaucagauugaaaaagaauucucagaaguagaagggagaauucaggaccuugagaaauauguugaggacacaaaaauagaucucuggucauacaacgcggagcuucuuguugcccuggagaaccaacauacaauugaucuaacugacucagaaauaaacaaacuguuugaaaaaacaaagaagcaacugagggaaaaugcugaggauaugggcaaugguuguuucaaaauauaccacaaaugugacaaugccugcauaggaucaaucagaaauggaacuuaugaccacgauguauacagggaugaagcuuuaaacaaccgguuccagaucaagggaguugagcugaagucaggguacaaagauuggauccuauggauuuccuuugccauaucauguuuuuugcuuuguguugcuuuguugggguucaucaugugggccugccaaaagggcaacauuaggugcaacauuugcauuuga

SEQ ID NO: 45400 - RNA, 1701 nt, Artificial Sequence
  derived and/or modified CDS sequence (wt) from hemagglutinin__InfluenzaA__ALE31878
augaagacuaucauugcuuugagcuacauucuaugucugguuuucgcucaaaaaauuccuggaaaugacaauagcacggcaacgcugugccuugggcaccaugcaguaccaaacggaacuauagugaaaacaaucacaaaugaccgaauugaaguuacuaaugcuacugagcugguucagaauuccucaauaggugaaauaugcgacaguccucaucagauccuugauggagaaaacugcacacuaauagaugcucuauugggagacccucagugugauggcuuucaaaauaagaaaugggaccuuuuuguugaacgaagcaaagccuacagcaacuguuacccuuaugaugugccggauuaugccucccuuaggucacuaguugccucauccggcacacuggaguuuaacaaugaaagcuucaauuggacuggagucacucaaaacggaacaaguucugcuugcauaaggagaucuaguaguaguuucuuuaguagauuaaauugguugacccacuuaaacuacacauacccagcauuaaacgugacuaugccaaacaaugaacaauuugacaaauuguacauuugggggguucaccacccggguacggacaaggaccaaaucuuccuguaugcucaaucaucaggaagaaucacaguaucuaccaaaagaagccaacaagcuguaaucccaaauaucggaucuagacccagaauaagggauaucccuagcagaauaagcaucuauuggacaauaguaaaaccgggagacauacuuuugauuaacagcacagggaaucuaauugcuccuagggguuacuucaaaauacgaagugggaagagcucaauaaugagaucagaugcacccauuggcaaaugcaagucugaaugcaucacuccaaauggaagcauucccaaugacaaaccauuccaaaauguaaacaggaucacauacggggccugucccagauauguuaagcauagcacucugaaauuggcaacaggaaugcgaaauguaccagagaaacaaacuagaggcauauuuggcgcaauagcggguuucauagaaaaugguugggagggaaugguggaugguugguacgguuucaggcaucaaaauucugagggaagaggacaagcagcagaucucaaaagcacucaagcagcaaucgaucaaaucaaugggaagcugaaucgauugaucgggaaaaccaacgagaaauuccaucagauugaaaaagaauucucagaaguagaaggaagaauucaggaccuugagaaauauguugaggacacuaaaauagaucucuggucauacaacgcggagcuucuuguugcccuggagaaccaacauacaauugaucuaacugacucagaaaugaacaaacuguuugaaaaaacaaagaagcaacugagggaaaaugcugaggauaugggaaaugguuguuucaaaauauaccacaaaugugacaaugccugcauaggaucaauaagaaauggaacuuaugaccacaauguguacagggaugaagcauuaaacaaccgguuccagaucaagggaguugagcugaagucaggguacaaagauuggauccuauggauuuccuuugccauaucauguuuuuugcuuuguguugcuuuguugggguucaucaugugggccugccaaaagggcaacauuaggugcaacauuugcauuuga

SEQ ID NO: 45401 - RNA, 1701 nt, Artificial Sequence
  derived and/or modified CDS sequence (wt) from hemagglutinin__InfluenzaA__ALE31879
augaagacuaucauugcuuugagcuacauucuaugucugguuuucgcucaaaaaauuccuggaaaugacaauagcacggcaacgcugugccuugggcaccaugcaguaccaaacggaacgauagugaaaacaaucacaaaugaccgaauugaaguuacuaaugcuacugagcugguucagaauuccucaauaggugaaauaugcgacaguccucaucagauccuugauggagaaaacugcacacuaauagaugcucuauugggagacccucagugugauggcuuucaaaauaagaaaugggaccuuuuuguugaacgaagcaaagccuacagcaacuguuacccuuaugaugugccggauuaugccucccuuaggucacuaguugccucauccggcacacuggaguuuaacaaugaaagcuucaauuggacuggagucacucaaaacggaacaaguucugcuugcauaaggagaucuaguaguaguuucuuuaguagauuaaauugguugacccacuuaaacuacacauacccagcauugaacgugacuaugccaaacaaugaacaauuugacaaauuguacauuugggggguucaccacccggguacggacaaggaccaaaucuuccuguaugcucaaucaucaggaagaauaacaguaucuaccaaaagaagccaacaagcuguaaucccaaauaucggaucuagacccagaauaagggauaucccuagcagaauaagcaucuauuggacaauaguaaaaccgggagacauacuuuugauuaacagcacagggaaucuaauugcuccuagggguuacuucaaaauacgaagugggaaaagcucaauaaugagaucagaugcacccauuggcaaaugcaagucugagugcaucacuccaaauggaagcauucccaaugacaaaccauuccaaaauguaaacaggaucacauacggggccugucccagauauguuaagcauagcacucugaaauuggcaacaggaaugcgaaauguaccagagaaacaaacuagaggcauauuuggcgcaauagcggguuucauagaaaaugguugggagggaaugguggaugguugguacgguuucaggcaucaaaauucugagggaagaggacaagcagcagaucucaaaagcacucaagcagcaaucgaucaaaucaaugggaagcugaaucgauugaucgggaaaaccaacgagaaauuccaucagauugaaaaagaauucucagaaguagaaggaagaauucaggaccuugagaaauauguugaggacacuaaaauagaucucuggucauacaacgcggagcuucuuguugcccuggagaaccaacauacaauugaucuaacugacucagaaaugaacaaacuauuugaaaaaacaaagaagcaacugagggaaaaugcugaggauaugggaaaugguuguuucaaaauauaccacaaaugugacaaugccugcauaggaucaauaagaaauggaacuuaugaccacaauguguacagggaugaagcauuaaacaaccgguuccagaucaagggaguugagcugaagucaggguacaaagauuggauccuauggauuuccuuugccauaucauguuuuuuacuuuguguugcuuuguugggguucaucaugugggccugccaaaagggcaacauuaggugcaacauuugcauuuga

SEQ ID NO: 45402 - RNA, 1701 nt, Artificial Sequence; identical to SEQ ID NO: 45006
  derived and/or modified CDS sequence (wt) from hemagglutinin__InfluenzaA__ALE31880

SEQ ID NO: 45403 - RNA, 1701 nt, Artificial Sequence
  derived and/or modified CDS sequence (wt) from hemagglutinin__InfluenzaA__ALE31881
augaagacuaucauugccuugagccacauucuaugucugguuuucgcucaaaaaauuccuggaaaugacaauagcacggcaacgcugugccuugggcaccaugcaguaccaaacggaacgauagugaaaacaaucacaaaugaccgaauugaaguuacuaaugcuacugagcugguucagaauuccucaauaggugaaauaugcgacaguccucaucagauccuugauggagaaaacugcacacuaauagaugcucuauugggagacccucagugugauggcuuucaaaauaagaaaugggaccuuuuuguugaacgaagcaaagccuacagcaacuguuacccuuaugaugugccggauuaugccucccuuaggucauuaguugccucauccggcacacuggaguuuaacaaugaaagcuucaauuggacuggagucacucaaaacggaacaaguucugcuugcauaaggagaucuaguaguaguuucuuuaguagauuaaauugguugacccacuuaaacuacacauacccagcauugaacgugacuaugccaaacaaugaacaauuugacaaauuguacauuugggggguucaccacccggguacggacaaggaccaaaucuuccuguaugcucaaucaucaggaagaaucacaguaucuaccaaaagaagccaacaagcuguaaucccaaauaucggaucuagacccagaauaagggauaucccuagcagaauaagcaucuauuggacaauaguaaaaccgggagacauacuuuugauuaacagcacagggaaucuaguugcuccuagggguuacuucaaaauacgaagugggaaaagcucaauaaugagaucagaugcacccauuggcaaaugcaagucugaaugcaucacuccaaauggaagcauucccaaugacaaaccauuccaaaauguaaacaggaucacauacggggccugucccagauauguuaagcauagcacccugaaauuggcaacaggaaugcgaaauguaccagagaaacaaacuagaggcauauuuggcgcaauagcggguuucauagaaaaugguugggagggaaugguggaugguugguacgguuucaggcaucaaaauucugagggaagaggacaagcagcagaucucaagaguacucaagcagcaaucgaucaaaucaaugggaagcugaaucgauugaucgggaaaaccaacgagaaauuccaucagauugaaaaagaauucucagaaguagaaggaagaauucaggaccuugagaaauauguugaggacacuaaaauagaucucuggucauacaacgcagagcuucuuguugcccuggagaaccaacauacaauugaucuaacugacucagaaaugaacaaacuguuugaaaaaacaaagaagcaacugagggaaaaugcugaggauaugggaaaugguuguuucaaaauauaccacaaaugugacaaugccugcauaggaucaauaagaaauggaacuuaugaccacaauguguacagggaugaagcauuaaacaaccgguuccagaucaagggaauugagcugaagucaggguacaaagauuggauccuauggauuuccuuugccauaucauguuuuuugcuuuguguugcuuuguugggguucaucaugugggccugccaaaagggcaacauuaggugcaacauuugcauuuga

SEQ ID NO: 45404 - RNA, 1701 nt, Artificial Sequence; identical to SEQ ID NO: 45006
  derived and/or modified CDS sequence (wt) from hemagglutinin__InfluenzaA__ALE31882

SEQ ID NO: 45405 - RNA, 1701 nt, Artificial Sequence
  derived and/or modified CDS sequence (wt) from hemagglutinin__InfluenzaA__ALE31888
augaagacuaucauugcuuugagcuacauucuaugucugguuuucgcucaaaaaauuccuggaaaugacaauagcacggcaacgcugugccuugggcaccaugcaguaccaaacggaacgauagugaaaacaaucacaaaugaccgaauugaaguuacuaaugcuacugagcugguucagaauuccucaauaggugaaauaugcgacaguccucaucagauccuugauggagaaaacugcacacuaauagaugcucuauugggagacccucagugugauggcuuucaaaauaagaaaugggaccuuuuuguugaacgaagcaaagccuacagcaacuguuaccccuaugaugugccggauuaugccucccuuaggucacuaguugccucauccggcacacuggaguuuaacaaugaaagcuucaauuggacuggagucacucaaaacggaacaaguucugcuugcauaaggagaucuaguaguagcuucuuuaguagauuaaauugguugacccacuuaaacuacacauacccagcauugaacgugacuaugccaaacaaugaacaauuugacaaauuguacauuugggggguucaccacccggguacggacaaggaccaaaucuuccuguaugcucaaucaucaggaagaaucacaguaucuaccaaaagaagccaacaagcuguaaucccaaauaucggaucuagacccagaauaagggauaucccuagcagaauaagcaucuauuggacaauaguaaaaccgggagacauacuuuugauuaacagcacagggaaucuaauugcuccuagggguuacuucaaaauacgaagugggaaaagcucaauaaugagaucagaugcacccauuggcaaaugcaagucugaaugcaucacuccaaauggaagcauucccaaugacaaaccauuccaaaauguaaacaggaucacauacggggccugucccagauauguuaagcauagcacucugaaauuggcaacaggaaugcgaaauguaccagagaaacaaacuagaggcauauuuggcgcaauagcagguuucauagaaaaugguugggagggaaugguggaugguugguacgguuucaggcaucaaaauucugagggaagaggacaagcagcagaucucaaaagcacucaagcagcaaucgaucaaaucaaugggaagcugaaucgauugaucgggaaaaccaacgagaaauuccaucagauugaaaaagaauucucagaaguagaaggaagaauucaggaccuugagaaauauguugaggacacuaaaauagaucucuggucauacaacgcggagcuucuuguugcccuggagaaccaacauacaauugaucuaacugacucagaaaugaacaaacuguuugaaaaaacaaagaagcaacugagggaaaaugcugaggauaugggaaaugguuguuucaaaauauaccacaaaugugacaaugccugcauaggaucaauaagaaauggaacuuaugaccacaauguguacagggaugaagcauuaaacaaccgguuccagaucaagggaguugagcugaagucaggguacaaagauuggauccuauggauuuccuuugccauaucauguuuuuugcuuuguguugcuuuguugggguucaucaugugggccugccaaaagggcaacauuaggugcaacauuugcauuuga

SEQ ID NO: 45406 - RNA, 1701 nt, Artificial Sequence; identical to SEQ ID NO: 45115
  derived and/or modified CDS sequence (wt) from hemagglutinin__InfluenzaA__ALE31889

SEQ ID NO: 45407 - RNA, 1701 nt, Artificial Sequence
  derived and/or modified CDS sequence (wt) from hemagglutinin__InfluenzaA__ALE31890
augaagacuaucauugcuuugagcuacauucuaugucugguuuucgcucaaaaaauuccuggaaaugacaauagcacggcaacgcugugccuugggcaccaugcaguaccaaacggaacgauagugaaaacaaucacaaaugaccgaauugaaguuacuaaugcuacugagcugguucagaauuccucaauaggugaaauaugcgacaguccucaucagauccuugauggagaaaacugcacacuaauagaugcucuauugggagacccucagugugauggcuuucaaaauaagaaaugggaccuuuuuguugaacgaagcaaagccuacagcaacuguuacccuuaugaugugccggauuaugccucccuuaggucacuaguugccucauccggcacacuggaguuuaacaaugaaagcuucaauuggacuggagucacucaaaacggaacaaguucugcuugcauaaggaaaucuaguaguaguuucuuuaguagauuaaauugguugacccacuuaaacuacacauacccagcauugaacgugacuaugccaaacaaugaacaauuugacaaauuguacauuugggggguucaccacccggguacggacaaggaccaaaucuuccuguaugcucgaucaucaggaagaaucacaguaucuaccaaaagaagccaacaagcuguaaucccaaauaucggaucuagacccagaauaagggauaucccuagcagaauaagcaucuauuggacaauaguaaaaccgggagacauacuuuugauuaacagcacagggaaucuaauugcucccagggguuacuucaaaauacgaagugggaaaagcucaauaaugagaucagaugcacccauuggcaaaugcaagucugaaugcaucacuccaaauggaagcauucccaaugacaaaccauuccaaaauguaaacaggaucacauacggggccugucccagauauguuaagcauagcacucugaaauuggcaacaggaaugcgaaauguaccagagaaacaaacuagaggcauauuuggcgcaauagcggguuucauagaaaaugguugggagggaaugguggaugguugguacgguuucaggcaucaaaauucugaggggagaggacaagcagcagaucucaaaagcacucaagcagcaaucgaucaaaucaaugggaagcugaaucgauugaucgggaaaaccaacgagaaauuccaucagauugaaaaagaauucucagaaguagaaggaagaauucaggaccuugagaaauauguugaggacacuaaaauagaucucuggucauacaacgcggagcuucuuguugcccuggagaaucaacauacaauugaucuaacugacucagaaaugaacaaacuguuugaaaaaacaaagaagcaacugagggaaaaugcugaggauaugggaaaugguuguuucaaaauauaccacaaaugugacaaugccugcauaggaucaauaagaaauggaacuuaugaccacaauguguacagggaugaagcauuaaacaaccgguuccagaucaagggaguugagcugaagucaggguacaaagauuggauccuauggauuuccuuugccauaucauguuuuuugcuuuguguugcuuuguugggguucaucaugugggccugccaaaagggcaacauuaggugcaacauuugcauuuga

SEQ ID NO: 45408 - RNA, 1701 nt, Artificial Sequence; identical to SEQ ID NO: 45407
  derived and/or modified CDS sequence (wt) from hemagglutinin__InfluenzaA__ALE31891

SEQ ID NO: 45409 - RNA, 1701 nt, Artificial Sequence
  derived and/or modified CDS sequence (wt) from hemagglutinin__InfluenzaA__ALE31892
augaagacuaucauugcuuugagcuacauucuaugucugguuuucgcucaaaaaauuccuggaaaugacaauagcacggcaacgcugugccuugggcaccaugcaguaccaaacggaacgauagugaaaacaaucacaaaugaccgaauugaaguuacuaaugcuacugagcugguucagaauuccucaauaggugaaauaugcgacaguccucaucagauccuugauggagaaaacugcacacuaauagaugcucuauugggagacccucagugugauggcuuucaaaauaagaaaugggaccuuuuuguugaacgaagcaaagccuacagcaacuguuacccuuaugaugugccggauuaugccucccuuaggucacuaguugccucauccggcacacuggaguuuaacaaugaaagcuucaauuggacuggagucacucaaaacggaacaaguucugcuugcauaaggagaucuaguaguaguuucuuuaguagauuaaauugguugacccacuuaaacuacacauacccagcauugaacgugacuaugccaaacaaugaacaauuugacaaauuguacauuugggggguucaccacccggguacggacaaggaccaaaucuuccuguaugcucaaucaucaggaagaaucacaguaucuaccaaaagaagccaacaagcuguaaucccaaauaucggaucuagacccagaauaagggauaucccuagcagaauaagcaucuauuggacaauaguaaaaccgggagacauacuuuugauuaacagcacagggaaucuaauugcuccuagggguuacuucaaaauacgaagugggaaaagcucaauaaugagaucagaugcacccauuggcaaaugcaagucugaaugcaucacuccaaauggaagcauucccaaugacaaaccauuccaaaauguaaacaggaucacauacggggccugucccagauauguuaagcauagcacucugaaauuggcaacaggaaugcgaaauguaccagagaaacaaacuagaggcauauuuggcgcaauagcggguuucauagaaaaugguugggagggaaugguggaugguugguacgguuucaggcaucaaaauucugagggaagaggacaagcagcagaucucaaaagcacucaagcagcaaucgaucaaaucaaugggaagcugaaucgauugaucgggaaaaccaacgagaaauuccaucagauugaaaaagaauucucagaaguagaaggaagaauucaggaccuugagaaauauguugaggacacuaaaauagaucucuggucauacaacgcggagcuucuuguugcccuggagaaccaacauacaauugaucuaacugacucagaaaugaacaaacuguuugaaaaaacaaagaagcaacugagggaaaaugcugaggauaugggaaaugguuguuucaaaauauaccacaaaugugacaaugccugcauaggaucaauaagaaauggaacuuaugaccacaauguguacagggaugaagcauuaaacaaccgguuccagaucaaaggaguugagcugaagucaggguacaaagauuggauccuauggauuuccuuugccauaucauguuuuuugcuuuguguugcuuuguugggguucaucaugugggccugccaaaagggcaacauuaggugcaacauuugcauuuga

SEQ ID NO: 45410 - RNA, 1701 nt, Artificial Sequence; identical to SEQ ID NO: 45028
  derived and/or modified CDS sequence (wt) from hemagglutinin__InfluenzaA__ALE31893

SEQ ID NO: 45411 - RNA, 1701 nt, Artificial Sequence
  derived and/or modified CDS sequence (wt) from hemagglutinin__InfluenzaA__ALE31894
augaagacuaucauugcuuugagcuacauucuaugucugguuuucgcucaaaaaauuccuggaaaugacaauagcacggcaacgcugugccuugggcaccaugcaguaccaaacggaacgauagugaaaacaaucacaaaugaccgaauugaaguuacuaaugcuacugaguugguucagaauuccucaauaggugaaauaugcgacaguccucaucagauccuugauggagaaaacugcacacuaauagaugcucuauugggagacccucagugugauggcuuucaaaauaagaaaugggaccuuuuuguugaacgaagcaaagccuacagcaacuguuacccuuaugaugugccggauuaugccucccuuaggucacuaguugccucauccggcacacuggaguuuaacaaugaaagcuucaauuggacuggagucacucaaaacggaacaaguucugcuugcauaaggagaucuaguaguaguuucuuuaguagauuaaauugguugacccacuuaaacuacacauacccagcauugaacgugacuaugccaaacaaugaacaauuugacaaauuguacauuugggggguucaccacccggguacggacaaggaccaaaucuuccuguaugcucaaucaucaggaagaaucacaguaucuaccaaaagaagccaacaagcuguaaucccaaauaucggaucuagacccagaauaagggauaucccuagcagaauaagcaucuauuggacaauaguaaaaccgggagacauacuuuugauuaacagcacaggaaaucuaauugcuccuagggguuacuucaaaauacuaagugggaaaagcucaauaaugagaucagaugcacccauuggcaaaugcaagucugaaugcaucacuccaaauggaagcauucccaaugacaaaccauuccaaaauguaaacaggaucacauacggggccugucccagauauguuaagcauagcacucugaaauuggcaacaggaaugcgaaauguaccagagaaacaaacuagaggcauauuuggcgcaauagcggguuucauagaaaaugguugggaaggaaugguggaugguugguacgguuucaggcaucaaaauucugagggaagaggacaagcagcagaucucaaaagcacucaagcagcaaucgaucaaaucaaugggaagcugaaucgguugaucgggaaaaccaacgagaaauuccaucagauugaaaaagaauucucagaaguagaaggaagaauucaggaccuugagaaauauguugaggacacuaaaauagaucucuggucauauaacgcggagcuucuuguugcccuggagaaccaacauacaauugaucuaacugacucagaaaugaacaaacuguuugaaaaaacaaagaagcaacugagggaaaaugcugaggauaugggaaaugguuguuucaaaauauaccacaaaugugacaaugccugcauaggaucaauaagaaauggaacuuaugaccacaauguguacagggaugaagcauuaaacaaccgguuccagaucaaggggguugagcugaagucaggguacaaagauuggauccuauggauuuccuuugccauaucauguuuuuugcuuuguguugcuuuguugggguucaucaugugggccugccaaaagggcaacauuaggugcaacauuugcauuuga

SEQ ID NO: 45412 - RNA, 1701 nt, Artificial Sequence
  derived and/or modified CDS sequence (wt) from hemagglutinin__InfluenzaA__ALE31895
augaagacuaucauugcuuugagcuacauucuaugucugguuuucgcucaaaaacuuccugggaaugacaauagcacggcaacgcugugccuugggcaccaugcaguaccaaacggaacgauagugaaaacaaucacgaaugaccgaauugaaguuacuaaugcuacugagcugguucagaauuccucaauaggugaaauaugcgacaguccucaucagauccuugauggagaaaacugcacacuaauagaugcucuauugggagacccucagugugauggcuuucaaaauaagaaaugggaccuuuuuguugaacgaagcaaagccuacagcaacuguuacccuuaugaugugccggauuaugccucccuuaggucacuaguugccucauccggcacacuggaguuuaacaaugaaagcuucaauugggcuggagucacucaaaacgggacaaguucuucuugcauaaggggaucuaauaguaguuucuuuaguagauuaaauugguugacccacuuaaacuccaaauacccagcauuaaacgugacuaugccaaacaaugaacaauuugacaaauuguacauuugggggguucaccacccggguacggacaaggaccaaaucuuccuguaugcacaaucaucaggaagaaucacaguaucuaccaaaagaagccaacaagcuguaaucccgaauaucggaucuagacccagaauaagggauaucccuagcagaauaagcaucuauuggacaauaguaaaaccgggagacauacuuuugauuaacagcacagggaaucuaauugcuccuagggguuacuucaaaauacgaagugggaaaagcucaauaaugagaucagaugcacccauuggcaaaugcaagucugaaugcaucacuccaaauggaagcauucccaaugacaaaccauuccaaaauguaaacaggaucacauacggggccugucccagauauguuaagcaaagcacucugaaauuggcaacaggaaugcgaaauguaccagagagacaaacuagaggcauauuuggcgccauagcggguuucauagaaaaugguugggagggaaugguggaugguugguacggcuucaggcaucaaaauucugagggaagaggacaagcagcagaucucaaaagcacucaagcagcaaucgaucaaaucaaugggaagcugaaucgauugaucggaaaaaccaacgagaaauuccaucagauugaaaaagaauucucagaaguagaagggagaauucaggaccuugagaaauauguugaggacacaaaaauagaucucuggucauacaacgcggagcuucuuguugcccuggagaaccaacauacaauugaucuaacugacucagaaaugaacaaacuguuugaaaaaacaaagaagcaacugagggaaaaugcugaggauaugggcaaugguuguuucaaaauauaccacaaaugugacaaugccugcauaggaucaaucagaaauggaacuuaugaccacgauguauacagggaugaagcauuaaacaaccgguuccagaucaagggaguugagcugaagucaggguacaaagauuggauccuauggauuuccuuugccauaucauguuuuuugcuuuguguugcuuuguugggguucaucaugugggccugccaaaagggcaacauuaggugcaacauuugcauuuga

SEQ ID NO: 45413 - RNA, 1701 nt, Artificial Sequence
  derived and/or modified CDS sequence (wt) from hemagglutinin__InfluenzaA__ALE31896
augaagacuaucauugcuuugagcuacauucuaugucugguuuucgcucaaaaaauuccuggaaaugacaauagcacggcaacgcugugccuugggcaccaugcaguaccaaacggaacgauagugaaaacaaucacaaaugaccgaauugaaguuacuaaugcuacugaguugguucagaauuccucaauaggugaaauaugcgacaguccucaucagauccuugauggagaaaacugcacacuaauagaugcucuauugggagacccucagugugauggcuuucaaaauaagaaaugggaccuuuuuguugaacgaagcaaagccuacagcaacuguuacccuuaugaugugccggauuaugccucccuuaggucacuaguugccucauccggcacacuggaguuuaacaaugaaagcuucaauuggacuggagucacucaaaacggaacaaguucugcuugcauaaggagaucuaguaguaguuucuuuaguagauuaaauugguugacccacuuaaacuacacauacccagcauugaacgugacuaugccaaacaaugaacaauuugacaaauuguacauuugggggguucaccacccggguacggacaaggaccaaaucuuccuguaugcucaaucaucaggaagaaucacaguaucuaccaaaagaagccaacaagcuguaaucccaaauaucggaucuagacccagaauaagggauaucccuagcagaauaagcaucuauuggacaauaguaaaaccgggagacauacuuuugauuaacagcacagggaaucuaauugcuccuagggguuacuucaaaauacgaagugggaaaagcucaauaaugagaucagaugcacccauuggcaaaugcaagucugaaugcaucacuccaaauggaagcauucccaaugacaaaccauuccaaaauguaaacaggaucacauacggggccugucccagauauguuaagcauagcacucugaaauuggcaacaggaaugcgaaauguaccagagaaacaaacuagaggcauauuuggcgcaauagcggguuucauagaaaaugguugggagggaaugguggaugguugguacgguuucaggcaucaaaauucugagggaagaggacaagcagcagaucucaaaagcacucaagcagcaaucgaucaaaucaaugggaagcugaaucgguugauugggaaaaccaacgagaaauuccaucagauugaaaaagaauucucagaaguagaaggaagaauucaggaccuugagaaauauguugaggacacuaaaauagaucucuggucauauaacgcggagcuucuuguugcccuggagaaccaacauacaauugaucuaacugacucagaaaugaacaaacuguuugaaaaaacaaagaagcaacugagggaaaaugcugaggauaugggaaaugguuguuucaaaauauaccacaaaugugacaaugccugcauaggaucaauaagaaauggaacuuaugaccacaauguguacagggaugaagcauuaaacaaccgguuccagaucaaggggguugagcugaagucaggguacaaagauuggauccuauggauuuccuuugccauaucauguuuuuugcuuuguguugcuuuguugggguucaucaugugggccugccaaaagggcaacauuaggugcaacauuugcauuuga

SEQ ID NO: 45414 - RNA, 1701 nt, Artificial Sequence
  derived and/or modified CDS sequence (wt) from hemagglutinin__InfluenzaA__ALE31897
augaagacuaucauugcuuugagcuacauucuaugucugguuuucgcucaaaaaauuccuggaaaugacaauagcacggcaacgcugugccuugggcaccaugcaguaccaaacggaacgauagugaaaacaaucacaaaugaccgaauugaaguuacuaaugcuacugaguugguucagaauuccucaauaggugaaauaugcgacaguccucaucagauccuugauggagaaaacugcacacuaauagaugcucuauugggagacccucagugugauggcuuucaaaauaagaaaugggaccuuuuuguugaacgaagcaaagccuacagcaacuguuacccuuaugaugugccggauuaugccucccuuaggucacuaguugccucauccggcacacuggaguuuaacaaugaaagcuucaauuggacuggagucacucaaaacggaacaaguucugcuugcauaaggagaucuaguaguaguuucuuuaguagauuaaauugguugacccacuuaaacuacacauacccagcauugaacgugacuaugccaaacaaugaacaauuugacaaauuguacauuugggggguucaccacccggguacggacaaggaccaaaucuuccuguaugcucaaucaucaggaagaaucacaguaucuaccaaaagaagccaacaagcuguaaucccaaauaucggaucuagacccagaauaagggauaucccuagcagaauaagcaucuauuggacaauaguaaaaccgggagacauacuuuugauuaacagcacagggaaucuaauugcuccuagggguuacuucaaaauacgaagugggaaaagcucaauaaugagaucagaugcacccauuggcaaaugcaagucugaaugcaucacuccaaauggaagcauucccaaugacaaaccauuucaaaauguaaacaggaucacauacggggccugucccagauauguuaagcauagcacucugaaauuggcaacaggaaugcgaaauguaccagagaaacaaacuagaggcauauuuggcgcaauagcggguuucauagaaaaugguugggagggaaugguggaugguugguacgguuucaggcaucaaaauucugagggaagaggacaagcagcagaucucaaaagcacucaagcagcaaucgaucaaaucaaugggaagcugaaucgguugaucgggaaaaccaacgagaaauuccaucagauugaaaaagaauucucagaaguagaaggaagaauucaggaccuugagaaauauguugaggacacuaaaauagaucucuggucauauaacgcggagcuucuuguugcccuggagaaccaacauacaauugaucuaacugacucagaaaugaacaaacuguuugaaaaaacaaagaagcaacugagggaaaaugcugaggauaugggaaaugguuguuucaaaauauaccacaaaugugacaaugccugcauaggaucaauaagaaauggaacuuaugaccacaauguguacagggaugaagcauuaaacaaccgguuccagaucaaggggguugagcugaagucaggguacaaagauuggauccuauggauuuccuuugccauaucauguuuuuugcuuuguguugcuuuguugggguucaucaugugggccugccaaaagggcaacauuaggugcaacauuugcauuuga

SEQ ID NO: 45415 - RNA, 1701 nt, Artificial Sequence
  derived and/or modified CDS sequence (wt) from hemagglutinin__InfluenzaA__ALE31898
augaagacuaucauugcuuugagcuacauucuaugucugguuuucgcucaaaaaauuccuggaaaugacaauagcacggcaacgcugugccuugggcaccaugcaguaccaaacggaacgauagugaaaacaaucacaaaugaccgaauugaaguuacuaaugcuacugagcugguucagaauuccucaauaggugaaauaugcgacaguccucaucagauccuugauggagaaaacugcacacuaauagaugcucuauugggagauccucagugugauggcuuucaaaauaagaaaugggaccuuuuuguugaacgaagcaaagccuacagcaacuguuacccuuaugaugugccggauuaugccucccuuaggucacuaguugccucauccggcacacuggaguuuaacaaugaaagcuucaauuggacuggagucacucaaaacggaacaaguucugcuugcauaaggagaucuaguaguaguuucuuuaguagauuaaauugguugacccacuuaaacuacacauacccagcauugaacgugacuaugccaaacaaugaacaauuugacaaauuguacauuugggggguucaccacccggguacggacaaggaccaaaucuuccuguaugcucaaucaucaggaagaaucacaguaucuaccaaaagaagccaacaagcugugaucccaaauaucggaucuagacccagaauaagggauaucccuagcagaauaagcaucuauuggacaauaguaaaaccgggagacauacuuuugauuaacagcacaggaaaucuaauugcuccuagggguuacuucaaaauacgaagugggaaaagcucaauaaugagaucagaugcacccauuggcaaaugcaagucugaaugcaucacuccaaauggaagcauucccaaugacaaaccauuccaaaauguaaacaggaucacauacggggccugucccagauauguuaagcauagcacucugaaauuggcaacaggaaugcgaaauguaccagagaaacaaacuagaggcauauuuggcgcaauagcggguuucauagaaaaugguugggagggaaugguggaugguugguacgguuucaggcaucaaaauucugagggaagaggacaagcagcagaucucaaaagcacucaagcagcaaucgaucaaaucaaugggaagcugaaucgauugaucgggaaaaccaacgagaaauuccaucagauugaaaaagaauucucagaaguagaaggaagaauucaggaccuugagaaauauguugaggacacuaaaauagaucucuggucauacaacgcggagcuucuuguugcccuggagaaccaacauacaauugaucuaacugacucagaaaugaacaaacuguuugaaaaaacaaagaagcaacugagggaaaaugcugaggauaugggaaaugguuguuucaaaauauaccacaaaugugacaaugccugcauaggaucaauaagaaauggaacuuaugaccacaauguguacagggaugaagcauuaaacaaccgguuccagaucaagggaguugagcugaagucaggguacaaagauuggauccuauggauuuccuuugccauaucauguuuuuugcuuuguguugcuuuguugggguucaucaugugggccugccaaaagggcaacauuaggugcaacauuugcauuuga

SEQ ID NO: 45416 - RNA, 1701 nt, Artificial Sequence
  derived and/or modified CDS sequence (wt) from hemagglutinin__InfluenzaA__ALE31899
augaagacuaucauugcuuugagcuacauucuaugucugguuuucgcucaaaaaauuccuggaaaugacaauagcacggcaacgcugugccuugggcaccaugcaguaccaaacggaacgauagugaaaacaaucacaaaugaccgaauugaaguaacuaaugcuacugagcugguucagaauuccucaauaggugaaauaugcgacaguccucaucagauccuugauggagaaaacugcacacuaauagaugcucuauugggagacccucagugugauggcuuucaaaauaagaaaugggaccuuuuuguugaacgaagcaaagccuacagcaacuguuacccuuaugaugugccggauuaugccucccuuaggucacuaguugccucauccggcacacuggaguuuaacaaugaaagcuucaauuggacuggagucacucaaaacggaacaaguucugcuugcauaaggaaaucuaguaguaguuucuuuaguagauuaaauugguugacccacuuaaacuacacauacccagcauugaacgugacuaugccaaacaaugaacaauuugacaaauuguacauuugggggguucaccacccggguacggacaaggaccaaaucuuccuguaugcucgaucaucaggaagaaucacaguaucuaccaaaagaagccaacaagcuguaaucccaaauaucggaucuagacccagaauaagggauaucccuagcagaauaagcaucuauuggacaauaguaaaaccuggagacauacuuuugauuaacagcacagggaaucuaauugcuccuagggguuacuucaaaauacgaagugggaaaagcucaaugaugagaucagaugcacccauuggcaaaugcaagucugaaugcaucacuccaaauggaagcauucccaaugacaaaccauuccaaaauguaaacaggaucacauacggggccugucccagauauguuaagcauagcacucugaaauuggcaacaggaaugcgaaauguaccagagaaacaaacuagaggcauauuuggcgcaauagcggguuucauagaaaaugguugggagggaaugguggaugguugguacgguuucaggcaucaaaauucugaggggagaggacaagcagcagaucucaaaagcacccaagcagcaaucgaucaaaucaaugggaagcugaaucgauugaucgggaaaaccaacgagaaauuccaucagauugaaaaagaauucucagaaguagaaggaagaauucaggaccuugagaaauauguugaggacacuaaaauagaucucuggucauacaacgcggagcuucuuguugcccuggagaaucaacauacaauugaucuaacugacucagaaaugaacaaacuguuugaaaaaacaaagaagcaacugagggaaaaugcugaggauaugggaaaugguuguuucaaaauauaccacaaaugugacaaugccugcauaggaucaauaagaaauggaacuuaugaccacaauguguacagggaugaagcauuaaacaaccgguuccagaucaagggaguugagcugaagucaggguacaaagauuggauccuauggauuuccuuugccauaucauguuuuuugcuuuguguugcuuuguugggguucaucaugugggccugccaaaagggcaacauuaggugcaacauuugcauuuga

SEQ ID NO: 45417 - RNA, 1701 nt, Artificial Sequence; identical to SEQ ID NO: 45059
  derived and/or modified CDS sequence (wt) from hemagglutinin__InfluenzaA__ALE31901

SEQ ID NO: 45418 - RNA, 1701 nt, Artificial Sequence
  derived and/or modified CDS sequence (wt) from hemagglutinin__InfluenzaA__ALE31902
augaagacuaucauugccuugagcuacauucuaugucugguuuucgcucaaaaaauuccuggaaaugacaauagcacggcaacgcugugccuugggcaccaugcaguaccaaacggaacgauagugaaaacaaucacaaaugaccgaauugaaguuacuaaugcuacugagcugguucagaauuccucaauaggugaaauaugcgacaguccucaucagauccuugauggagaaaacugcacacuaauagaugcucuauugggagacccucagugugauggcuuucaaaauaagaaaugggaccuuuuuguugaacgaagcaaagccuacagcaacuguuacccuuaugaugugccggauuaugccucccuuaggucacuaguugccucauccggcacacuggaguuuaacaaugaaagcuucaauuggacuggagucacucaaaacggaacaaguucugcuugcauaaggagaucuaguaguaguuucuuuaguagauuaaauugguugacccacuuaaacuacacauacccagcauugaacgugacuaugccaaacaaugaacaauuugacaaauuguacauuugggggguucaccacccggguacggacaaggaccaaaucuuccuguaugcucaaucaucaggaagaaucacaguaucuaccaaaagaagccaacaagcuguaaucccaaauaucggaucuagacccagaauaagggauaucccuagcagaauaagcaucuauuggacaauaguaaaaccgggagacauacuuuugauuaacagcacagggaaucuaauugcuccuagggguuacuucaaaauacgaagugggaaaagcucaauaaugagaucagaugcacccauuggcaaaugcaagucugaaugcaucacuccaaauggaagcauucccaaugacaaaccauuccaaaauguaaacaggaucacauacggggccugucccagauauguuaagcauagcacucugaaauuggcaacaggaaugcgaaauguaccagagaaacaaacuagaggcauauuuggcgcaauagcggguuucauagaaaaugguugggagggaaugguggaugguugguacgguuucaggcaucaaaauucugagggaagaggacaagcagcagaucucaaaagcacucaagcagcaaucgaucaaaucaaugggaagcugaaucgauugaucgggaaaaccaacgagaaauuccaucagauugaaaaagaauucucagaaguagaaggaagaauucaggaccuugagaaauauguugaggacacuaaaauagaucucuggucauacaacgcggagcuucuuguugcccuggagaaccaacauacaauugaucuaacugacucagaaaugaacaaacuguuugaaagaacaaagaagcaacugagggaaaaugcugaggauaugggaaaugguuguuucaaaauauaccacaaaugugacaaugccugcauaggaucaauaagaaauggaacuuaugaccacaauguguacagggaugaagcauuaaacaaccgguuccagaucaagggaguugagcugaagucaggguacaaagauuggauccuauggauuuccuuugccauaucauguuuuuugcuuuguguugcuuuguugggguucaucaugugggccugccaaaagggcaacauuaggugcaacauuugcauuuga

SEQ ID NO: 45419 - RNA, 1701 nt, Artificial Sequence
  derived and/or modified CDS sequence (wt) from hemagglutinin__InfluenzaA__ALE31903
augaagacuaucauugcuuugagcuacauucuaugucugguuuucgcucaaaaaauuccuggaaaugacaauagcacggcaacgcugugccuugggcaccaugcaguaccaaacggaacgauagugaaaacaaucacaaaugaccgaauugaaguuacuaaugcuacugagcugguucagaauuccucaauaggugaaauaugcgacaguccucaucagauccuugauggagaaaacugcacacuaauagaugcucuauugggagacccucagugugauggcuuucaaaauaagaaaugggaccuuuuuguugaacgaagcaaagccuacagcaacuguuacccuuaugaugugccagauuaugccucccuuaggucacuaguugccucauccggcacacuggaguuuaacaaugaaagcuucaauuggacuggagucacucaaaacggaacaaguucugcuugcauaaggagaucuaguaguaguuucuuuaguagauuaaauugguugacccacuuaaacuacacauacccagcauugaacgugacuaugccaaacaaugaacaauuugacaaauuguacauuugggggguucaccacccggguacggacaaggaccaaaucuuccuguaugcucaaucaucaggaagaaucacaguaucuaccaaaagaagccaacaagcuguaaucccaaauaucggaucuagacccagaauaagggauaucccuagcagaauaagcaucuauuggacaauaguaaaaccgggagacauacuuuugauuaacagcacagggaaucuaauugcuccuagggguuacuucaaaauacgaagugggaaaagcucaauaaugagaucagaugcacccauuggcaaaugcaagucugaaugcaucacuccaaauggaagcauucccaaugacaaaccauuccaaaauguaaacaggaucacauacggggccugucccagauauguuaagcauagcacucugaaauuggcaacaggaaugcgaaauguaccagagaaacaaacuagaggcauauuuggcgcaauagcggguuucauagaaaaugguugggagggaaugguggaugguugguacgguuucaggcaucaaaauucugagggaagaggacaagcagcagaucucaaaagcacucaagcagcaaucgaucaaaucaauggaaagcugaaucgauugaucgggaaaaccaacgagaaauuccaucagauugaaaaagaauucucagaaguagaaggaagaauucaggaccuugagaaauauguugaggacacuaaaauagaucucuggucauacaacgcggagcuucuuguugcccuggagaaccaacauacaauugaucuaacugacucagaaaugaacaaacuguuugaaaaaacaaagaagcaacugagggaaaaugcugaggauaugggaaaugguuguuucaaaauauaccacaaaugugacaaugccugcauaggaucaauaagaaauggaacuuaugaccacaauguguacagggaugaagcauuaaacaaccgguuccagaucaagggaguugagcugaagucaggguacaaagauuggauccuauggauuuccuuugccauaucauguuuuuugcuuuguguugcuuuguugggguucaucaugugggccugccaaaagggcaacauuaggugcaacauuugcauuuga

SEQ ID NO: 45420 - RNA, 1701 nt, Artificial Sequence
  derived and/or modified CDS sequence (wt) from hemagglutinin__InfluenzaA__ALE31904
augaagacuaucauugcuuugagcuacauucuaugucugguuuucgcucaaaaaauuccuggaaaugacaauagcacggcaacgcugugccuugggcaccaugcaguaccaaacggaacgauagugaaaacaaucacaaaugaccgaauugaaguuacuaaugcuacugaguugguucagaauuccucaauaggugaaauaugcgacaguccucaucagauccuugauggagaaaacugcacacuaauagaugcucuauugggagacccucagugugauggcuuucaaaauaagaaaugggaccuuuuuguugaacgaagcaaagccuacagcaacuguuacccuuaugaugugccggauuaugccucccuuaggucacuaguugccucauccggcacacuggaguuuaacaaugaaagcuucaauuggacuggagucacucaaaacggaacaaguucugcuugcauaaggagaucuaguaguaguuucuuuaguagauuaaauugguugacccacuuaaacuacacauacccagcauugaacgugacuaugccaaacaaugaacaauuugacaaauuguacauuugggggguucaucacccggguacggacaaggaccaaaucuuccuguaugcucaaucaucaggaagaaucacaguaucuaccaaaagaagccaacaagcuguaaucccaaauaucggaucuagacccagaauaagggauaucccuagcagaauaagcaucuauuggacaauaguaaaaccgggagacauacuuuugauuaacagcacagggaaucuaauugcuccuagggguuacuucaaaauacgaagugggaaaagcucaauaaugagaucagaugcacccauuggcaaaugcaagucugaaugcaucacuccaaauggaagcauucccaaugacaaaccauuccaaaauguaaacaggaucacauacggggccugucccagauauguuaagcauagcacucugaaauuggcaacaggaaugcgaaauguaccagagaaacaaacuagaggcauauuuggcgcaauagcggguuucauagaaaaugguugggagggaaugguggaugguugguacgguuucaggcaucaaaauucugagggaagaggacaagcagcagaucucaaaagcacucaagcagcaaucgaucaaaucaaugggaagcugaaucgguugaucgggaaaaccaacgagaaauuccaucagauugaaaaagaauucucagaaguagaaggaagaauucaggaccuugagaaauauguugaggacacuaaaauagaucucuggucauacaacgcggagcuucuuguugcccuggagaaccaacauacaauugaucuaacugacucagaaaugaacaaacuguuugaaaaaacaaagaagcaacugagggaaaaugcugaggauaugggaaaugguuguuucaaaauauaccacaaaugugacaaugccugcauaggaucaauaagaaauggaacuuaugaccacaauguguacagggaugaagcauuaaacaaccgguuucagaucaagggaguugagcugaagucaggguacaaagauuggauccuauggauuuccuuugccauaucauguuuuuugcuuuguguugcuuuguugggguucaucaugugggccugccaaaaaggcaacauuaggugcaacauuugcauuuga

SEQ ID NO: 45421 - RNA, 1701 nt, Artificial Sequence
  derived and/or modified CDS sequence (wt) from hemagglutinin__InfluenzaA__ALE31905
augaagacuaucauugcuuugggcuacauucuaugucuggguuucgcucaaaaaauuccuggaaaugacaauagcacggcaacgcugugccuugggcaccaugcaguaccaaacggaacgauagugaaaacaaucacaaaugaccgaauugaaguuacuaaugcuacugagcugguucagaauuccucaauaggugaaauaugcgacaguccucauaagauccuugauggagaaaacugcacacuaauagaugcucuauugggagacccucagugugauggcuuucaaaauaagaaaugggaccuuuuuguugaacgaagcaaagccuacagcaacuguuacccuuaugaugugccggauuaugccucccuuaggucacuaguugccucauccggcacacuggaguuuaacaaugaaagcuucaauuggacuggagucacucaaaacggaacaaguucugcuugcauaaggagaucuaguaguaguuucuuuaguagauuaaauugguugacccacuuaaacuacacauacccagcauugaacgugacuaugccaaacaaugaacaauuugacaaauuguacauuugggggguucaccacccggguacggacaaggaccaaaucuuccuguaugcucaaucaucaggaagaaucacaguaucuaccaaaagaagccaacaagcuguaaucccaaauaucggaucuagacccagaauaagggauaucccuagcagaauaagcaucuauuggacaauaguaaaaccgggagacauacuuuugauuaacagcacagggaaucuaauugcuccuagggguuacuucaaaauacgaagugggaaaagcucaauaaugagaucagaugcacccauuggcaaaugcaagucugaaugcaucacuccaaauggaagcauucccaaugacaaaccauuccaaaauguaaacaggaucacauacggggccugucccagauauguuaagcauagcacucugaaauuggcaacaggaaugcgaaauguaccagagaaacaaacuagaggcauauuuggcgcaauagcggguuucauagaaaaugguugggagggaaugguggaugguugguacgguuucaggcaucaaaauucugagggaagaggacaagcagcagaucucaaaagcacucaagcagcaaucgaucaaaucaaugggaagcugaaucgauugaucgggaaaaccaacgagaaauuccaucagauugaaaaagaauucucagaaguagaaggaagaauucaggaccuugagaaauauguugaggacacuaaaauagaucucuggucauacaacgcggagcuucuuguugcccuggagaaccaacauacaauugaucuaacugacucagaaaugaacaaacuguuugaaaaaacaaagaagcaacugagggaaaaugcugaggauaugggaaaugguuguuucaaaauauaccacaaaugugacaaugccugcauaggaucaauaagaaauggaacuuaugaccacaauguguacagggaugaagcauuaaacaaccgguuccagaucaagggaguugagcugaagucaggguacaaagauuggauccuauggauuuccuuugccauaucauguuuuuugcuuuguguugcuuuguugggguucaucaugugggccugccaaaagggcaacauuaggugcaacauuugcauuuga

SEQ ID NO: 45422 - RNA, 1701 nt, Artificial Sequence
  derived and/or modified CDS sequence (wt) from hemagglutinin__InfluenzaA__ALE31906
augaagacuaucauugcuuugagcuacauucuaugucugguuuucgcccaaaaaauuccuggaaaugacaauagcacggcaacgcugugccuugggcaccacgcaguaccaaacggaacgauagugaaaacaaucacgaaugaccgaauugaaguuacuaaugcuacugagcugguucagaauuccucaauaggugaaauaugcgacaguccucaucagauccuugauggagaaaacugcacacuaauagaugcucuauugggagacccucagugugauggcuuucaaaauaagaaaugggaccuuuuuguugaacgaagcaaagccuacagcaacuguuacccuuaugaugugccggauuaugccucccuuaggucacuaguugccucauccggcacacuggaguuuaacaaugaaagcuucaauuggacuggagucacucaaaacggaacaaguucugcuugcauaaggagaucuaguaguaguuucuuuaguagauuaaauugguugacccacuuaaacuacacauacccagcauugaacguaacuaugccaaacaaugaacaauuugacaaauuguacauuugggggguucaccacccggguacggacaaggaccaaaucuuccuguaugcucaaucaucaggaagaaucacaguaucuaccaaaagaagccaacaagcuguaaucccaaauaucggaucuagacccagaauaagggauaucccuagcagaauaagcaucuauuggacaauaguaaaaccgggagacauacuuuugauuaacagcacagggaaucuaauugcuccuagggguuacuucaaaauacgaagugggaaaagcucaauaaugagaucagaugcacccauuggcaaaugcaagucugaaugcaucacuccaaauggaagcauucccaaugacaaaccauuccaaaauguaaacaggaucacauacggggccugucccagauauguuaagcauagcacucugaaauuggcaacaggaaugcgaaauguaccagagaaacaaacuagaggcauauuuggcgcaauagcggguuucauagaaaaugguugggagggaaugguggaugguugguacgguuucaggcaucaaaauucugagggaagaggacaagcagcagaucucaaaagcacucaagcagcaaucgaucaaaucaaugggaagcugaaucgauugaucgggaaaaccaacgagaaauuccaucagauugaaaaagaauucucagaaguagaaggaagaauucaggaccuugagaaauauguugaggacacuaaaauagaucucuggucauacaacgcggagcuucuuguugcccuggagaaccaacauacaauugaucuaacugacucagaaaugaacaaacuguuugaaaaaacaaagaagcaacugagggaaaaugcugaggauaugggaaaugguuguuucaaaauauaccacaaaugugacaaugccugcauaggaucaauaaggaauggaacuuaugaccacaauguguacagggaugaagcauuaaacaaccgguuccaaaucaagggaguugagcugaagucaggguacaaagauuggauccuauggauuuccuuugccauaucauguuuuuugcuuuguguugcuuuguugggguucaucaugugggccugccaaaagggcaacauuaggugcaacauuugcauuuga

SEQ ID NO: 45423 - RNA, 1701 nt, Artificial Sequence
  derived and/or modified CDS sequence (wt) from hemagglutinin__InfluenzaA__ALE31907
augaagacuaucauugccuugagcuacauucuaugucugguuuucgcucaaaaaauuccuggaaaugacaauagcacggcaacgcugugccuugggcaccaugcaguaccaaacggaacgauagugaaaacaaucacaaaugaccgaauugaaguuacuaaugcuacugagcugguucagaauuccucaauaggugaaauaugcgacaguccucaucagauccuugauggagaaaacugcacacuaauagaugcucuauugggagauccucagugugauggcuuucaaaauaagaaaugggaccuuuuuguugaacgaagcaaagccuacagcaacuguuacccuuaugaugugccggauuaugccucccuuaggucacuaguugccucauccggcacacuggaguuuaacaaugaaagcuucaauuggacuggagucacucaaaacggaacaaguucugcuugcauaaggagaucuaguaguaguuucuuuaguagauuaaauugguugacccacuuaaacuacaaauacccagcauugaacgugacuaugccaaacaaugaacaauuugacaaauuguacauuugggggguucaccacccggguacggacaaggaccaaaucuuccuguaugcucaaucaucaggaagaaucacaguaucuaccaaaagaagccaacaagcuguaaucccaaauaucggaucuagacccagaauaagggauaucccuagcagaauaagcaucuauuggacaauaguaaaaucgggagacauacuuuugauuaacagcacagggaaucuaauugcuccuagggguuacuucaaaauacgaagugggaaaagcucaauaaugagaucagaugcacccauuggcaaaugcaagucugaaugcaucacuccaaauggaagcauucccaaugacaaaccauuccaaaauguaaacaggaucacauacggggccugucccagauauguuaagcauagcacucugaaauuggcaacaggaaugcgaaauguaccagagaaacaaacuagaggcauauuuggcgcaauagcggguuucauagaaaaugguugggagggaaugguggaugguugguacgguuucaggcaucaaaauucugagggaagaggacaagcagcagaucucaaaagcacucaagcagcaaucgaucaaaucaaugggaagcugaaucgauugaucgggaaaaccaacgagaaauuccaucagauugaaaaagaauucucagaaguagaaggaagaauucaggaccuugagaaauauguugaggacacuaaaauagaucucuggucauacaacgcggagcuucuuguugcccuggagaaccaacauacaauugaucuaacugacucagaaaugaacaaacuguuugaaaaaacaaagaagcaacugagggaaaaugcugaggauaugggaaaugguuguuucaaaauauaccacaaaugugacaaugccugcauaggaucaauaagaaauggaacuuaugaccacaauguguacagggaugaagcauuaaacaaccgguuccagaucaagggaguugagcugaagucaggguacaaagauuggauccuauggauuuccuuugccauaucauguuuuuugcuuuguguugcuuuguugggguucaucaugugggccugccaaaagggcaacauuaggugcaacauuugcauuuga

SEQ ID NO: 45424 - RNA, 1701 nt, Artificial Sequence
  derived and/or modified CDS sequence (wt) from hemagglutinin__InfluenzaA__ALE31908
augaagacuaucauugcuuugagcuacauucuaugucugguuuucgcucaaaaaauuccuggaaaugacaauagcacggcaacgcugugccuugggcaccaugcaguaccaaacggaacgauagugaaaacaaucacaaaugaccgaauugaaguuacuaaugcuacugaguugguucagaauuccucaauaggugaaauaugcgacaguccucaucagauccuugauggagaaaacugcacacuaauagaugcucuauugggagacccucagugugauggcuuucaaaauaagaaaugggaccuuuuuguugaacgaagcaaagccuacagcaacuguuacccuuaugaugugccggauuaugccucccuuaggucacuaguugccucauccggcacacuggaguuuaacaaugaaagcuucaauuggacuggagucacucaaaacggaacaaguucugcuugcauaaggagaucuaguaguaguuucuuuaguagauuaaauugguugacccacuuaaacuacacauacccagcauugaacgugacuaugccaaacaaugaacaauuugacaaauuguacauuugggggguucaccacccggguacggacaaggaccaaaucuuccuguaugcucaaucaucaggaagaaucacaguaucuaccaaaagaagccaacaagcuguaaucccaaauaucggaucuagacccagaauaagggauaucccuagcagaauaagcaucuauuggacaauaguaaaaccgggagacauacuuuugauuaacagcacagggaaucuaauugcuccuagggguuacuucaaaauacgaagugggaaaagcucaauaaugagaucagaugcacccauuggcaaaugcaagucugaaugcaucacuccaaauggaagcauucccaaugacaaaccauuccaaaauguaaacaggaucacauacggggccugucccagauauguuaagcauagcacucugaaauuggcaacaggaaugcgaaauguaccagagaaacaaacuagaggcauauuuggcgcaauagcggguuucauagaaaaugguugggagggaaugguggaugguugguacgguuucaggcaucaaaauucugagggaagaggacaagcagcagaucuuaaaagcacucaagcagcaaucgaucaaaucaaugggaagcugaaucgguugaucgggaaaaccaacgagaaauuccaucagauugaaaaagaauucucagaaguagaaggaagaauucaggaccuugagaaauauguugaggacacuaaaauagaucucuggucauauaacgcggagcuucuuguugcccuggagaaccaacauacaauugaucuaacugacucagaaaugaacaaacuguuugaaaaaacaaagaagcaacugagggaaaaugcugaggauaugggaaaugguuguuucaaaauauaccacaaaugugacaaugccugcauaggaucaauaagaaauggaacuuaugaccacaauguguacagggaugaagcauuaaacaaccgguuccagaucaaggggguugagcugaagucaggguacaaagauuggauccuauggauuuccuuugccauaucauguuuuuugcuuuguguugcuuuguugggguucaucaugugggccugccaaaagggcaacauuaggugcaacauuugcauuuga

SEQ ID NO: 45425 - RNA, 1701 nt, Artificial Sequence
  derived and/or modified CDS sequence (wt) from hemagglutinin__InfluenzaA__ALE31909
augaagacuaucauugccuugagcuacauucuaugucugguuuucgcucaaaaaauuccuggaaaugacaauagcacggcaacgcugugccuugggcaccaugcaguaccaaacggaacgauagugaaaacaaucacaaaugaccgaauugaaguuacuaaugcuacugagcugguucagaauuccucaauaggugaaauaugcgacaguccucaucagauccuugauggagaaaacugcacacuaauagaugcucuauugggagauccucagugugauggcuuucaaaauaagaaaugggaccuuuuuguugaacgaagcaaagccuacagcaacuguuacccuuaugaugugccggauuaugccucccuuaggucacuaguugccucauccggcacacuggaguuuaacaaugaaagcuucaauuggacuggagucacucaaaacggaacaaguucugcuugcauaaggagaucuaguaguaguuucuuuaguagauuaaauugguugacccacuuaaacuacacauacccagcauugaacgugacuaugccaaacaaugaacaauuugacaaauuguacauuugggggguucaccacccggguacggacaaggaccaaaucuuccuguaugcucaaucaucaggaagaaucacaguaucuaccaaaagaagccaacaagcuguaaucccaaauaucggaucuagacccagaauaagggauaucccuagcagaauaagcaucuauuggacaauaguaaaaucgggagacauacuuuugauuaacagcacagggaaucuaauugcuccuagggguuacuucaaaauacgaagugggaaaagcucaauaaugagaucagaugcacccauuggcaaaugcaagucugaaugcaucacuccaaauggaagcauucccaaugacaaaccauuccaaaauguaaacaggaucacauacggggccugucccagauauguuaagcauagcacucugaaauuggcaacaggaaugcgaaauguaccagagaaacaaacuagaggcauauuuggcgcaauagcggguuucauagaaaaugguugggagggaaugguggaugguugguacgguuucaggcaucaaaauucugagggaagaggacaagcagcagaucucaaaagcacucaagcagcaaucgaucaaaucaaugggaagcugaaucgauugaucgggaaaaccaacgagaaauuccaucagauugaaaaagaauucucagaaguagaaggaagaauucaggaccuugagaaauauguugaggacacuaaaauagaucucuggucauacaacgcggagcuucuuguugcccuggagaaccaacauacaauugaucuaacugacucagaaaugaacaaacuguuugaaaaaacaaagaagcaacugagggaaaaugcugaggauaugggaaaugguuguuucaaaauauaccacaaaugugacaaugccugcauaggaucaauaagaaauggaacuuaugaccacaauguguacagggaugaagcauuaaacaaccgguuccagaucaagggaguugagcugaagucaggguacaaagauuggauccuauggauuuccuuugccauaucauguuuuuugcuuuguguugcuuuguugggguucaucaugugggccugccaaaagggcaacauuaggugcaacauuugcauuuga

SEQ ID NO: 45426 - RNA, 1701 nt, Artificial Sequence; identical to SEQ ID NO: 45424
  derived and/or modified CDS sequence (wt) from hemagglutinin__InfluenzaA__ALE31910

SEQ ID NO: 45427 - RNA, 1701 nt, Artificial Sequence
  derived and/or modified CDS sequence (wt) from hemagglutinin__InfluenzaA__ALE31912
augaagacuaucauugcuuugagcuacauucuaugucugguuuucacucaaaaaauuccuggaaaugacaauagcacggcaacgcugugccuugggcaccaugcaguaccaaacggaacgauagugaaaacaaucacaaaugaccgaauugaaguuacuaaugcuacugaguugguucagaauuccucaauaggugaaauaugcgacaguccccaucagauccuugauggagaaaacugcacacuaauagaugcucuauugggagacccucagugugauggcuuucaaaauaagaaaugggaccuuuuuguugaacgaagcaaagccuacagcaacuguuacccuuaugaugugccggauuaugccucccuuaggucacuaguugccucauccggcacacuggaguuuaacaaugaaagcuucaauuggacuggagucacucaaaacggaacaaguucugcuugcauaaggagaucuaguaguaguuucuuuaguagauuaaauugguugacccacuuaaacuacacauacccagcauugaacgugacuaugccaaacaaugaacaauuugacaaauuguacauuugggggguucaccacccggguacggacaaggaccaaaucuuccuguaugcucaaucaucaggaagaaucacaguaucuaccaaaagaagccaacaagcuguaaucccaaauaucggaucuagacccagaauaagggauaucccuagcagaauaagcaucuauuggacaauaguaaaaccgggagacauacuuuugauuaacagcacagggaaucuaauugcuccuagggguuacuucaaaauacgaagugggaaaagcucaauaaugagaucagaugcacccauuggcaaaugcaagucugaaugcaucacuccaaauggaagcauucccaaugacaaaccauuccaaaauguaaacaggaucacauacggggccugucccagauauguuaagcauagcacucugaaauuggcaacaggaaugcgaaauguaccagagaaacaaacuagaggcauauuuggcgcaauagcggguuucauagaaaaugguugggagggaaugguggaugguugguacgguuucaggcaucaaaauucugagggaagaggacaagcagcagaucucaaaagcacucaagcagcaaucgaucaaaucaaugggaagcugaaucgguugaucgggaaaaccaacgagaaauuccaucagauugaaaaagaauucucagaaguagaaggaagaauucaggaccuugagaaauauguugaggacacuaaaauagaucucuggucauacaacgcggagcuucuuguugcccuggagaaccaacauacaauugaucuaacugacucagaaaugaacaaacuguuugaaaaaacaaagaagcaacugagggaaaaugcugaggauaugggaaaugguuguuucaaaauauaccacaaaugugacaaugccugcauaggaucaauaagaaauggaacuuaugaccacaauguguacagggaugaagcauuaaacaaccgguuccagauuaagggaguugagcugaagucaggguacaaagauuggauccuauggauuuccuuugccauaucauguuuuuugcuuuguguugcuuuguugggguucaucaugugggccugccaaaagggcaacauuaggugcaacauuugcauuuga

SEQ ID NO: 45428 - RNA, 1701 nt, Artificial Sequence
  derived and/or modified CDS sequence (wt) from hemagglutinin__InfluenzaA__ALE31913
augaagacuaucauugcuuugggcuacauucuaugucugguuuucgcucaaaaaauuccuggaaaugacaauagcacggcaacgcugugccuugggcaccaugcaguaccaaacggaacgauagugaaaacaaucacaaaugaccgaauugaaguuacuaaugcuacugagcugguucagaauuccucaauaggugaaauaugcgacaguccucauaagauccuugauggagaaaacugcacacuaauagaugcucuauugggagacccucagugugauggcuuucaaaauaagaaaugggaccuuuuuguugaacgaagcaaagccuacagcaacuguuacccuuaugaugugccggauuaugccucccuuaggucacuaguugccucauccggcacacuggaguuuaacaaugaaagcuucaauuggacuggagucacucaaaacggaacaaguucugcuugcauaaggagaucuaguaguaguuucuuuaguagauuaaauugguugacccacuuaaacuacacauacccagcauugaacgugacuaugccaaacaaugaacaauuugacaaauuguacauuugggggguucaccacccggguacggacaaggaccaaaucuuccuguaugcucaaucaucaggaagaaucacaguaucuaccaaaagaagccaacaagcuguaaucccaaauaucggaucuagacccagaauaagggauaucccuagcagaauaagcaucuauuggacaauaguaaaaccgggagacauacuuuugauuaacagcacagggaaucuaauugcuccuagggguuacuucaaaauacgaagugggaaaagcucaauaaugagaucagaugcacccauuggcaaaugcaagucugaaugcaucacuccaaauggaagcauucccaaugacaaaccauuccaaaauguaaacaggaucacauacggggccugucccagauauguuaagcauagcacucugaaauuggcaacaggaaugcgaaauguaccagagaaacaaacuagaggcauauuuggcgcaauagcggguuucauagaaaaugguugggagggaaugguggaugguugguacgguuucaggcaucaaaauucugagggaagaggacaagcagcagaucucaaaagcacucaagcagcaaucgaucaaaucaaugggaagcugaaucgauugaucgggaaaaccaacgagaaauuccaucagauugaaaaagaauucucagaaguagaaggaagaauucaggaccuugagaaauauguugaggacacuaaaauagaucucuggucauacaacgcggagcuucuuguugcccuggagaaccaacauacaauugaucuaacugacucagaaaugaacaaacuguuugaaaaaacaaagaagcaacugagggaaaaugcugaggauaugggaaaugguuguuucaaaauauaccacaaaugugacaaugccugcauagaaucaauaagaaauggaacuuaugaccacaauguguacagggaugaagcauuaaacaaccgguuccagaucaagggaguugagcugaagucaggguacaaagauuggauccuauggauuuccuuugccauaucauguuuuuugcuuuguguugcuuuguugggguucaucaugugggccugccaaaagggcaacauuaggugcaacauuugcauuuga

SEQ ID NO: 45429 - RNA, 1701 nt, Artificial Sequence; identical to SEQ ID NO: 45065
  derived and/or modified CDS sequence (wt) from hemagglutinin__InfluenzaA__ALE31914

SEQ ID NO: 45430 - RNA, 1701 nt, Artificial Sequence
  derived and/or modified CDS sequence (wt) from hemagglutinin__InfluenzaA__ALE31915
augaagacuaucauugcuuugagcuacauucuaugucugguuuucgcucaaaaaauuccuggaaaugacaauagcacggcaacgcugugccuugggcaccaugcaguaccaaacggaacgauagugaaaacaaucacaaaugaccgaauugaaguuacuaaugcuacugaguugguucagaauuccucaauaggugaaauaugcgacaguccucaucagauccuugauggagaaaacugcacacuaauagaugcucuauugggagacccucagugugauggcuuucaaaauaagaaaugggaccuuuuuguugaacgaagcaaagccuacagcaacuguuacccuuaugaugugccggaauaugccucccuuaggucacuaguugccucauccggcacacuggaguuuaacaaugaaagcuucaauuggacuggagucacucaaaacggaacaaguucugcuugcauaaggagaucuaguaguaguuucuuuaguagauuaaauugguugacccacuuaaacuacacauacccagcauugaacgugacuaugccaaacaaugaacaauuugacaaauuguacauuugggggguucaccacccggguacggacaaggaccaaaucuuccuguaugcucaaucaucaggaagaaucacaguaucuaccaaaagaagccaacaagcugugaucccaaauaucggaucuagacccagaauaagggauauccccagcagaauaagcaucuauuggacaauaguaaaaccgggagacauacuuuugauuaacagcacagggaaucuaauugcuccuagggguuacuucaaaauacgaagugggaaaagcucaauaaugagaucagaugcacccauuggcaaaugcaagucugaaugcaucacuccaaauggaagcauucccaaugacaaaccauuccaaaauguaaacaggaucacauacggggccugucccagauauguuaagcauagcacucugaaauuggcaacaggaaugcgaaauguaccagagaaacaaacuagaggcauauuuggcgcaauagcggguuucauagaaaaugguugggagggaaugguggaugguugguacgguuucaggcaucaaaauucugagggaagaggacaagcagcagaucucaaaagcacucaagcagcaaucgaucaaaucaaugggaagcugaaucgguugaucgggaaaaccaacgagaaauuccaucagauugaaaaagaauucucagaaguagaaggaagaauucaggaccuugagaaauauguugaggacacuaaaauagaucucuggucauauaacgcggagcuucuuguugcccuggagaaccaacauacaauugaucuaacugacucagaaaugaacaaacuguuugaaaaaacaaagaagcaacugagggaaaaugcugaggauaugggaaaugguuguuucaaaauauaccacaaaugugacaaugccugcauaggaucaauaagaaauggaacuuaugaccacaauguguacagggaugaagcauuaaacaaccgguuccagaucaaggggguugagcugaagucaggguacaaagauuggauccuauggauuuccuuugccauaucauguuuuuugcuuuguguugcuuuguugggguucaucaugugggccugccaaaagggcaacauuaggugcaacauuugcauuuga

SEQ ID NO: 45431 - RNA, 1701 nt, Artificial Sequence
  derived and/or modified CDS sequence (wt) from hemagglutinin__InfluenzaA__ALE31916
augaagacuaucauugcuuugagcuacauucuaugucugguuuucgcucaaaaaauuccuggaaaugacaauagcacggcaacgcugugccuugggcaccaugcaguaccaaacggaacgauagugaaaacaaucacaaaugaccgaauugaaguuacuaaugcuacugagcugguucagaauuccucaauaggugaaauaugcgacaguccucaucagauccuugauggagaaaacugcacacuaauagaugcucuauugggagacccucagugugauggcuuucaaaauaagaaaugggaccuuuuuguugaacgaagcaaagccuacagcaacuguuacccuuaugaugugccggauuaugccucccuuaggucacuaguugccucauccggcacacuggaguuuaacaaugaaagcuucaauuggacuggagucacucaaaacggaacaaguucugcuugcauaaggagaucuaguaguaguuucuuuaguagauuaaauugguugacccacuuaaacuacacauacccagcauugaacgugacuaugccaaacaaugaacaauuugacaaauuguacauuugggggguucaccacccggguacggacaaggaccaaaucuuccuguaugcucaaucaucaggaagaaucacaguaucuaccaaaagaagccaacaagcuguaaucccaaauaucggaucuagacccagaauaagggauaucccuagcagaauaagcaucuauuggacaauaguaaaaccgggagacauacuuuugauuaacagcacagggaaucuaauugcuccuagggguuacuucaaaauacgaagugggaaaagcucaauaaugagaucagaugcacccauuggcaaaugcaagucugaaugcaucacuccaaauggaagcauucccaaugacaaaccauuccaaaauguaaacaggaucacauacggggccugucccagauauguuaagcauaguacucugaaauuggcaacaggaaugcgaaauguaccagagaaacaaacuagaggcauauuuggcgcaauagcggguuucauagaaaaugguugggagggaaugguggaugguugguacgguuucaggcaucaaaauucugagggaagaggacaagcagcagaucucaaaagcacucaagcagcaaucgaucaaaucaauggaaagcugaaucgauugaucgggaaaaccaacgagaaauuccaucagauugaaaaagaauucucagaaguagaaggaagaauucaggaccuugagaaauauguugaggacacuaaaauagaucucuggucauacaacgcggagcuucuuguugcccuggaaaaccaacauacaauugaucuaacugacucagaaaugaacaaacuguuugaaaaaacaaagaagcaacugagggaaaaugcugaggauaugggaaaugguuguuucaaaauauaccacaaaugugacaaugccugcauaggaucaauaagaaauggaacuuaugaccacaauguguacagggaugaagcauuaaacaaccgguuccagaucaagggaguugagcugaagucaggguacaaagauuggauccuauggauuuccuuugccauaucauguuuuuugcuuuguguugcuuuguugggguucaucaugugggccugccaaaagggcaacauuaggugcaacauuugcauuuga

SEQ ID NO: 45432 - RNA, 1701 nt, Artificial Sequence; identical to SEQ ID NO: 45431
  derived and/or modified CDS sequence (wt) from hemagglutinin__InfluenzaA__ALE31917

SEQ ID NO: 45433 - RNA, 1701 nt, Artificial Sequence
  derived and/or modified CDS sequence (wt) from hemagglutinin__InfluenzaA__ALE31918
augaagacuaucauugcuuugagcuacauucuaugucugguuuucgcucaaaaacuuccuggaaaugacaauagcacggcaacgcugugccuugggcaccaugcaguaccaaacggaacgauagugaaaacaaucacgaaugaccgaauugaaguuacuaaugcuacugagcugguucagaauuccucaauaggugaaauaugcgacaguccucaucagauccuugauggaaaaaacugcacucuaauagaugcucuauugggagacccucagugugauggcuuucaaaauaagagaugggaccuuuuuguugaacgaagcaaagccuacagcaacuguuacccuuaugaugugccggauuaugccucccuuaggucgcuaguugccucauccggcacacuggaguuuaacgaugaaagcuucaauugggcuggagucacucaaaacggaacaaguucugcuugcauaaggggaucuaauaguaguuucuuuaguagauuaaauugguugacccacucaaacuucaaauacccagcauugaacgugacuaugccaaacaaugaacaauuugacaaauuguacauuugggggguucaccacccggguacagacaaggaccaaaucuuccuguacgcucaaucaucaggaagaaucacaguaucuaccaaaagaagccaacaagcuguaaucccgaauaucggaucuagacccagaauaaggaauaucccuagcagaauaagcaucuauuggacaauaguaaaaccgggagacauacuuuugauuaacagcacagggaaucuaauugcuccuagggguuacuucaaaauacaaagugggaaaagcucaauaaugagaucagaugcacccauuggcaaaugcaagucugaaugcaucacuccaaauggaagcauucccaaugacaaaccauuccaaaauguaaacaggaucacauacggggccugucccagauauguuaagcaaagcacucugaaauuggcaacaggaaugcgaaauguaccagagaaacaaacuagaggcauauuuggcgcaauagcggguuucauagaaaaugguugggagggaaugaaggaugguugguacgguuucaggcaucaaaauucugagggaagaggacaagcagcagaucucaaaagcacucaagcagcaaucgaucaaaucaaugggaagcugaaucgauugaucgggaaaaccaacgagaaauuccaucagauugaaaaagaauucucagaaguagaagggagaauucaggaccuugagaaauauguugaggacacaaaaauagaucucuggucauacaacgcggagcuucuuguugcccuggagaaccaacauacaauugaucuaacugacucagaaaugaacaaacuguuugaaaaaacaaagaagcaacugagggaaaaugcugaggauaugggcaaugguuguuucaaaauauaccacaaaugugacaaugccugcauaggaucaaucagaaauggaacuuaugaccacgauguauacagggaugaagcuuuaaacaaccgguuccagaucaagggaguugagcugaagucaggguacaaagauuggauccuauggauuuccuuugccauaucauguuuuuugcuuuguguugcuuuguugggguucaucaugugggccugccaaaagggcaacauuaggugcaacauuugcauuuga

SEQ ID NO: 45434 - RNA, 1701 nt, Artificial Sequence
  derived and/or modified CDS sequence (wt) from hemagglutinin__InfluenzaA__ALE31920
augaagacuaucauugcuuugagcuacauucuaugucugguuuucgcucaaaaaauuccuggaaaugacaauagcacggcaacgcugugccuugggcaccaugcaguaccaaacggaacgauagugaaaacaaucacaaaugaccgaauugaaguuacuaaugcuacugagcugguucagaauuccucaauaggugaaauaugcgacaguccucaucagauccuugauggagaaaacugcacacuaauagaugcucuauugggagacccucagugugauggcuuucaaaauaagaaaugggaccuuuuuguugaacgaagcaaagccuacagcaacuguuacccuuaugaugugccggauuaugccucccuuaggucacuaguugccucauccggcacacuggaguucaacaaugaaagcuucaauuggacuggagucacucaaaacggaacaaguucugcuugcauaaggaaaucuaguaguaguuucuuuaguagauuaaauugguugacccacuuaaacuacacauacccagcauugaacgugacuaugccaaacaaugaacaauuugacaaauuguacauuugggggguucaccacccggguacggacaaggaccaaaucuuccuguaugcucgaucaucaggaagaaucacaguaucuaccaaaagaagccaacaagcuguaaucccaaauaucggaucuagacccagaauaagggauaucccuagcagaauaagcaucuauuggacaauaguaaaaccgggagacauacuuuugauuaacagcacagggaaucuaauugcuccuagggguuacuucaaaauacgaagugggaaaagcucaauaaugagaucagaugcacccauuggcaaaugcaagucugaaugcaucacuccaaauggaagcauucccaaugacaaaccauuccaaaauguaaacaggaucacauacggggccugucccagauauguuaagcauagcacucugaaauuggcaacaggaaugcgaaauguaccagagaaacaaacuagaggcauauuuggcgcaauagcggguuucauagaaaaugguugggagggaaugguggaugguugguacgguuucaggcaucaaaauucugagggaagaggacaagcagcagaucucaaaagcacucaagcagcaaucgaucaaaucaaugggaagcugaaucgauugaucgggaaaaccaacgagaaauuccaucagauugaaaaagaauucucagaaguagaaggaagaauucaggaccuugagaaauauguugaggacacuaaaauagaucucuggucauacaacgcggagcuucuuguugcccuggagaaucaacauacaauugaucuaacugacucagaaaugaacaaacuguuugaaaaaacaaagaagcaacugagggaaaaugcugaggauaugggaaaugguuguuucaaaauauaccacaaaugugacaaugccugcauaggaucaauaagaaauggaacuuaugaccacaauguguacagggaugaagcauuaaacaaccgguuccagaucaagggaguugagcugaagucaggguacaaagauuggauccuauggauuuccuuugccauaucauguuuuuugcuuuguguugcuuuguugggguucaucaugugggccugccaaaagggcaacauuaggugcaacauuugcauuuga

SEQ ID NO: 45435 - RNA, 1701 nt, Artificial Sequence
  derived and/or modified CDS sequence (wt) from hemagglutinin__InfluenzaA__ALE31921
augaagacuaucauugcuuugagcuacauucuaugucugguuuucgcucaaaaaauuccuggaaaugacaauagcacggcaacgcugugccuugggcaccaugcaguaccaaacggaacgauagugaaaacaaucacaaaugaccgaauugaaguuacuaaugcuacugaguugguucagaauuccucaauaggugaaauaugcgacaguccucaucagauccuugauggagaaaacugcacacuaauagaugcucuauugggagacccucagugugauggcuuucaaaauaagaaaugggaccuuuuuguugaacgaagcaaagccuacagcaacuguuacccuuaugaugugccggauuaugccucccuuaggucacuaguugccucauccggcacacuggaguuuaacaaugaaagcuucaauuggacuggagucacucaaaacggaacaaguucugcuugcauaaggagaucuaguaguaguuucuuuaguagauuaaauugguugacccacuuaaacuacacauacccagcauugaacgugacuaugccaaacaaugaacaauuugacaaauuguacauuugggggguucaccacccggguacggacaaggaccaaaucuuccuguaugcucaaucaucaggaagaaucacaguaucuaccaaaagaagccaacaagcuguaaucccaaauaucggaucuagacccagaauaagggauaucccuagcagaauaagcaucuauuggacaauaguaaaaccgggagacauacuuuugauuaacagcacagggaaucuaauugcuccuagggguuacuucaaaauacgaagugggaaaagcucaauaaugagaucagaugcacccauuggcaaaugcaagucugaaugcaucacuccaaauggaagcauucccaaugacaaaccauuccaaaauguaaacaggaucacauacggggccugucccagauauguuaagcauagcacucugaaauuggcaacaggaaugcgaaauguaccagagaaacaaacuagaggcauauuuggcgcaauagcggguuucauagaaaaugguugggagggaaugguggaugguugguacgguuucaggcaucaaaauucugagggaagaggacaagcagcagaucucaaaagcacucaagcagcaaucgaucaaaucaaugggaagcugaaucgguugaucgggaaaaccaacgagaaauuccaucagauugaaaaagaauucucagaaguagaaggaagaauucaggaccuugagaaauauguugaggacacuaaaauagaucucuggucauauaacgcggagcuucuuguugcccuggagaaccaacauacaauugaucuaacugacucagaaaugaacaaacuguuugaaaaaacaaagaagcaacugagggaaaaugcugaggauaugggaaaugguuguuucaaaauauaccacaaaugugacaaugccugcauaggcucaauaagaaauggaacuuaugaccacaauguguacagggaugaagcauuaaauaaccgguuccagaucaaggggguugagcugaagucaggguacaaagauuggauccuauggauuuccuuugccauaucauguuuuuugcuuuguguugcuuuguugggguucaucaugugggccugccaaaagggcaacauuaggugcaacauuugcauuuga

SEQ ID NO: 45436 - RNA, 1701 nt, Artificial Sequence; identical to SEQ ID NO: 45028
  derived and/or modified CDS sequence (wt) from hemagglutinin__InfluenzaA__ALE31922

SEQ ID NO: 45437 - RNA, 1701 nt, Artificial Sequence; identical to SEQ ID NO: 44999
  derived and/or modified CDS sequence (wt) from hemagglutinin__InfluenzaA__ALE31923

SEQ ID NO: 45438 - RNA, 1701 nt, Artificial Sequence; identical to SEQ ID NO: 45115
  derived and/or modified CDS sequence (wt) from hemagglutinin__InfluenzaA__ALE31924

SEQ ID NO: 45439 - RNA, 1701 nt, Artificial Sequence; identical to SEQ ID NO: 45028
  derived and/or modified CDS sequence (wt) from hemagglutinin__InfluenzaA__ALE31925

SEQ ID NO: 45440 - RNA, 1701 nt, Artificial Sequence
  derived and/or modified CDS sequence (wt) from hemagglutinin__InfluenzaA__ALE31926
augaagacuaucauugcuuugagcuacauucuaugucugguuuucgcucaaaaaauuccuggaaaugacaauagcacggcaacgcugugccuugggcaccaugcaguaccaaacggaacgauagugaaaacaaucacaaaugaccgaauugaaguuacuaaugcuacugagcugguucagaauuccucaauaggugaaauaugcgacaguccucaucagauccuugauggagaaaacugcacacuaauagaugcucuauugggagacccucagugugauggcuuucaaaauaagaaaugggaccuuuuuguugaacgaagcaaagccuacagcaacuguuacccuuaugaugugccggauuaugccucccuuaggucacuaguugccucauccggcacacuggaguuuaacaaugaaggcuucaauuggacuggagucacucaaaacggaacaaguucugcuugcauaaggagaucuaguaguaguuucuuuaguagauuaaauugguugacccacuuaaacuacaaauacccagcauugaacgugacuaugccaaacaaugaacaauuugacaaauuguacauuugggggguucaccacccggguacggacaaggaccaaaucuuccuguaugcucaaucaucaggaagaaucacaguaucuaccaaaagaagccaacaagcuguaaucccaaauaucggaucuagacccagaauaagggauaucccuagcagaauaagcauauauuggacaauagugaaaccgggagacauacuuuugauuaacagcacagggaaucuaauugcuccuagggguuacuucaaaauacgaagugggaaaagcucaauaaugagaucagaugcacccauuggcaaaugcaagucugaaugcaucacuccaaauggaagcauucccaaugacaaaccauuccaaaauguaaacaggaucacauacggggccugucccagauauguuaagcauagcacucugaaauuggcaacaggaaugcgaaauguaccagagaaacaaacuagaggcauauuuggcgcaauagcggguuucauagaaaaugguugggagggaaugguggaugguugguacgguuucaggcaucaaaauucugagggaagaggacaagcagcagaucucaaaagcacucaagcagcaaucgaucaaaucaaugggaagcugaaucgauugaucgggaaaaccaacgagaaauuccaucagauugaaaaagaauucucagaaguagaaggaagaauucaggaucuugagaaauauguugaggacacuaaaauagaucucuggucauacaacgcggagcuucuuguugcccuggagaaccaacauacaauugaucuaacugacucagaaaugaacaaacuguuugaaaaaacaaagaagcaacugagggaaaaugcugaggauaugggaaaugguuguuucaaaauauaccacaaaugugacaaugccugcauaggaucaauaagaaauggaacuuaugaccacaauguguacagggaugaagcauuaaacaaccgguuccagaucaagggaguugagcugaagucaggguacaaagauuggauccuauggauuuccuuugccauaucauguuuuuugcuuuguguugcuuuguugggguucaucaugugggccugccaaaagggcaacauuaggugcaacauuugcauuuga

SEQ ID NO: 45441 - RNA, 1701 nt, Artificial Sequence
  derived and/or modified CDS sequence (wt) from hemagglutinin__InfluenzaA__ALE31927
augaagacuaucauugcuuugagcuacauucuaugucugguuuucgcucaaaaaauuccuggaaaugacaauagcacggcaacgcugugccuugggcaccaugcaguaccaaacggaacgauagugaaaacaaucacaaaugaccgaauugaaguuacuaaugcuacugagcugguucagaauuccucaauaggugaaauaugcgacaguccucaucagauccuugauggagaaaacugcacacuaauagaugcucuauugggagacccucagugugauggcuuucaaaauaagaaaugggaccucuuuguugaacgaagcaaagccuacagcaacuguuacccuuaugaugugccggauuaugccucccuuaggucacuaguugccucauccggcacacuggaguuuaacaaugaaagcuucaauuggacuggagucacucaaaacggaacaaguucugcuugcauaaggagaucuaguaguaguuucuuuaguagauuaaauugguugacccacuuaaacuacacauacccagcauugaacgugacuaugccaaacaaugaacaauuugacaaauuguacauuugggggguucaccacccggguacggacaaggaccaaaucuuccuguaugcucaaucaucaggaagaaucacaguaucuaccaaaagaagccaacaagcuguaaucccaaauaucggaucuagacccagaauaagggauaucccuagcagaauaagcaucuauuggacaauaguaaaaccgggagacauacuuuugauuaacagcacagggaaucuaauugcuccuagggguuacuucaaaauacgaagugggaaaagcucaauaaugagaucagaugcacccauuggcaaaugcaagucugaaugcaucacuccaaauggaagcauucccaaugacaaaccauuccaaaauguaaacaggaucacauacggggccugucccagauauguuaagcauagcacucugaaauuggcaacaggaaugcgaaauguaccagagaaacaaacuagaggcauauuuggcgcaauagcggguuucauagaaaaugguugggagggaaugguggaugguugguacgguuucaggcaucaaaauucugagggaagaggacaagcagcagaucucaaaagcacucaagcagcaaucgaucaaaucaauggaaagcugaaucgauugaucgggaaaaccaacgagaaauuccaucagauugaaaaagaauucucagaaguagaaggaagaauucaggaccuugagaaauauguugaggacacuaaaauagaucucuggucauacaacgcggagcuucuuguugcccuggagaaccaacauacaauugaucuaacugacucagaaaugaacaaacuguuugaaaaaacaaagaagcaacugagggaaaaugcugaggauaugggaaaugguuguuucaaaauauaccacaaaugugacaaugccugcauaggaucaauaagaaauggaacuuaugaccacaauguguacagggaugaagcauuaaacaaccgguuccagaucaagggaguugagcugaagucaggguacaaagauuggauccuauggauuuccuuugccauaucauguuuuuugcuuuguguugcuuuguugggguucaucaugugggccugccaaaagggcaacauuaggugcaacauuugcauuuga

SEQ ID NO: 45442 - RNA, 1701 nt, Artificial Sequence
  derived and/or modified CDS sequence (wt) from hemagglutinin__InfluenzaA__ALE31928
augaagacuaucauugcuuugagcuacauucuaugucugguuuucgcucaaaaacuuccuggaaaugacaauagcacggcaacgcugugccuugggcaccaugcaguaccaaauggaacgauagugaaaacaaucacgaaugaccgaauugaaguuacuaaugcuacugagcugguucagaauuccucaauaggugaaauaugcgacaguccucaucagauccuugauggagaaaacugcacacuaauagaugcucuauugggagacccucaaugugauggcuuucaaaauaagaaaugggaccuuuuuguugaacggagcaaagccuacagcaacuguuacccuuaugaugugccggauuaugccucccuuaggucacuaguugccucauccggcacacuggaguuuaacaaugaaagcuucaauugggcuggagucacucaaaacggaacaaguucugcuugcauaaggggaucuaauaguaguuucuuuaguagauuaaauugguugacccacucaaacuucaaauacccagcauugaacgugacuaugccgaacaaugaacaauuugacaaauuguacauuuggggaguucaccacccggguacggacaaggaccaaaucuuccuguaugcucaaucgucaggaagaaucacaguaucuaccaaaagaagccaacaagcuguaaucccgaauaucggaucuagacccagaauaagggauaucccuagcagaauaagcaucuauuggacaauaguaaaaccgggagacauacuuuugauuaacagcacagggaaccuaauugcuccuagggguuacuucaaaauacgaagugggaaaagcucaauaaugagaucagaugcacccauuggcaaaugcaagucugaaugcaucacuccaaauggaagcauucccaaugacaaaccauuccaaaauguaaacaggaucacguacggggccugucccagauauguuaagcaaagcacucugaaauuggcaacaggaaugcgaaauguaccagagaaacaaacuagaggcauauuuggcgcaauagcggguuucauagaaaaugguugggagggaaugguggaugguugguacgguuucaggcaucaaaauucugagggaagaggacaagcagcagaucucaaaagcacucaagcagcaaucgaucaaaucaaugggaagcugaaucgauugaucgggaaaaccaacgagaaauuccaucagauugaaaaagaauucucagaaguagaagggagaauucaggaccuugagaaauauguugaagacacaaaaauagaucucuggucauacaacgcagagcuucuuguugcccuggagaaccaacauacaauugaucuaacugacucagaaaugaacaaacuguuugaaaaaacaaagaaacaacugagggaaaaugcugaggauaugggcaaugguuguuucaaaauauaccacaaaugugacaaugccugcauaggaucaaucagaaauggaacuuaugaccacgauguguacagggaugaagcauuaaacaaccgguuccagaucaagggaguugagcugaagucaggguacaaagauuggauccuauggauuuccuuugccauaucauguuuuuugcuuuguguugcuuuguugggguucaucaugugggccugccaaaagggcaacauuaggugcaacauuugcauuuga

SEQ ID NO: 45443 - RNA, 1701 nt, Artificial Sequence
  derived and/or modified CDS sequence (wt) from hemagglutinin__InfluenzaA__ALE31930
augaagacuaucauugcuuugagcuacauucuaugucugguuuucgcucaaaaaauuccuggaaaugacaauagcacggcaacgcugugccuugggcaccaugcaguaccaaacggaacgauagugaaaacaaucacaaaugaccgaauugaaguuacuaaugcuacugaguugguucagaauuccucaauaggugaaauaugcgacaguccucaucagauccuugauggagaaaacugcacacuaauagaugcucuauugggagacccucagugugauggcuuucaaaauaagaaaugggaccuuuuuguugaacgaagcaaagccuacagcaacuguuacccuuaugaugugccggauuaugccucccuuaggucacuaguugccucauccggcacacuggaguuuaacaaugaaagcuucaauuggacuggagucacucaaaacggaacaaguucugcuugcauaaggagaucuaguaguaguuucuuuaguagauuaaauugguugacccacuuaaacuacauauacccagcauugaacgugacuaugccaaacaaugaacaauuugacaaauuguacauuugggggguucaccacccggguacggacaaggaccaaaucuuccuguaugcucaaucaucaggaagaaucacaguaucuaccaaaagaagccaacaagcuguaaucccaaauaucggaucuagacccagaauaagggauaucccuagcagaauaagcaucuauuggacaauaguaaaaccgggagacauacuuuugauuaacagcacagggaaucuaauugcuccuagggguuacuucaaaauacgaagugggaaaagcucaauaaugagaucagaugcacccauuggcaaaugcaagucugaaugcaucacuccaaauggaagcauucccaaugacaaaccauuccaaaauguaaacaggaucacauacggggccugucccagauauguuaagcauagcacucugaaauuggcaacaggaaugcgaaauguaccagagaaacaaacuagaggcauauuuggcgcaauagcggguuucauagaaaaugguugggagggaaugguggaugguugguacgguuucaggcaucaaaauucugagggaagaggacaagcagcagaucucaaaagcacucaagcagcaaucgaucaaaucaaugggaagcugaaucgguugaucgggaaaaccaacgagaaauuccaucagauugaaaaagaauucucagaaguagaaggaagaauucaggaccuugagaaauauguugaggacacuaaaauagaucucuggucauacaacgcggagcuucuuguugcccuggagaaccaacauacaauugaucuaacugacucagaaaugaacaaacuguuugaaaaaacaaagaagcaacugagggaaaaugcugaggauaugggaaaugguuguuucaaaauauaccacaaaugugacaaugccugcauaggaucaauaagaaauggaacuuaugaccacaauguguacagggaugaagcauuaaacaaccgguuucagaucaagggaguugagcugaagucaggguacaaagauuggauccuauggauuuccuuugccauaucauguuuuuugcuuuguguugcuuuguugggguucaucaugugggccugccaaaaaggcaacauuaggugcaacauuugcauuuga

SEQ ID NO: 45444 - RNA, 1701 nt, Artificial Sequence; identical to SEQ ID NO: 45076
  derived and/or modified CDS sequence (wt) from hemagglutinin__InfluenzaA__ALE31931

SEQ ID NO: 45445 - RNA, 1701 nt, Artificial Sequence
  derived and/or modified CDS sequence (wt) from hemagglutinin__InfluenzaA__ALE31932
augaagacuaucauugccuugagcuacauucuaugucugguuuucgcucaaaaaauuccuggaaaugacaauagcacggcaacgcugugccuugggcaccaugcaguaccaaacggaacgauagugaaaacaaucacaaaugaccgaauugaaguuacuaaugcuacugagcugguucagaauuccucaauaggugaaauaugcgacaguccucaucagauccuugauggagaaaacugcacacuaauagaugcucuauugggagacccucagugugauggcuuucaaaauaagaaaugggaccuuuuuguugaacgaagcaaagccuacagcaacuguuacccuuaugaugugccggauuaugccucccuuaggucacuaguugccucauccggcacacuggaguuuaacaaugaaagcuucaauuggacuggagucacucaaaacggaacaaguucugcuugcauaaggagaucuaguaguaguuucuuuaguagauuaaauugguugacccacuuaaacuacacauacccagcauugaacgugacuaugccaaacaaugaacaauuugacaaauuguacauuugggggguucaccacccggguacggacaaggaccaaaucuuccuguaugcucaaucaucaggaagaaucacaguaucuaccaaaagaagccaacaagcuguaaucccaaauaucggaucuagacccagaauaagggauaucccuagcagaauaagcaucuauuggacaauaguaaaaccgggagacauacuuuugauuaacagcacagggaaucuaauugcuccuagggguuacuucaaaauacgaagugggaaaagcucaauaaugagaucagaugcacccauuggcaaaugcaagucugaaugcaucacuccaaauggaagcauucccaaugacaaaccauuccaaaauguaaacaggaucacauacggggccugucccagauauguuaagcauagcacucugaaauuggcaacaggaaugcgaaauguaccagagaaacaaacuagaggcauauuuggcgcaauagcggguuucauagaaaaugguugggagggaaugguggaugguugguacgguuucaggcaucaaaauucugagggaagaggacaagcagcagaccucaaaagcacucaagcagcaaucgaucaaaucaaugggaagcugaaucgauugaucgggaaaaccaacgagaaauuccaucagauugaaaaagaauucucagaaguagaaggaagaauucaggaccuugagaaauauguugaggacacuaaaauagaucucuggucauacaacgcggagcuucuuguugcccuggagaaccaacauacaauugaucuaacugacucagaaaugaacaaacuguuugaaaaaacaaagaagcaacugagggaaaaugcugaggauaugggaaaugguuguuucaaaauauaccacaaaugugacaaugccugcauaggaucaauaagaaauggaacuuaugaccacaauguguacagggaugaagcauuaaacaaccgguuccagaucaagggaguugagcugaagucaggguacaaagauuggauccuauggauuuccuuugccauaucauguuuuuugcuuuguguugcuuuguugggguucaucaugugggccugccaaaagggcaacauuaggugcaacauuugcauuuga

SEQ ID NO: 45446 - RNA, 1701 nt, Artificial Sequence
  derived and/or modified CDS sequence (wt) from hemagglutinin__InfluenzaA__ALE31933
augaagacuaucauugcuuugagcuacauucuaugucugguuuacgcucaaaaaauuccuggaaaugacaauagcacggcaacgcugugccuugggcaccaugcaguaccaaacggaacgauagugaaaacaaucacaaaugaccgaauugaaguuacuaaugcuacugagcugguucagaauuccucaauaggugaaauaugcgacaguccucaucagauccuugauggagaaaacugcacacuaauagaugcucuauugggagacccucagugugauggcuuucaaaauaagaaaugggaccuuuuuguugaacgaagcaaagccuacagcaacuguuacccuuaugaugugccggauuaugccucccuuaggucacuaguugccucauccggcacacuggaguuuaacaaugaaagcuucaauuggacuggagucacucaaaacggaacaaguucugcuugcauaaggagaucuaguaguaguuucuuuaguagauuaaauugguugacccacuuaaaauacacauacccagcauugaacgugacuaugccaaacaaugagcaauuugacaaauuguacauuugggggguucaccacccggguacggacaaggaccaaaucuuccuguaugcucaaucaucaggaagaauaacaguaucuaccaaaagaagccaacaagcuguaaucccaaauaucggaucuagacccagaauaagggauaucccuagcagaauaagcaucuauuggacaauaguaaaaccgggagacauacuuuugauuaacagcacagggaaucuaauugcuccuagggguuacuucaaaauacgaagugggaaaagcucaauaaugagaucagaugcacccauuggcaaaugcaagucugagugcaucacuccaaauggaagcauucccaaugacaaaccauuccaaaauguaaacaggaucacauacggggccugucccagauauguuaagcauagcacucugaaauuggcaacaggaaugcgaaauguaccagagaaacaaacuagaggcauauuuggcgcaauagcggguuucauagaaaaugguugggagggaaugguggaugguugguacgguuucaggcaucaaaauucugagggaagaggacaagcagcagaucucaaaagcacucaagcagcaaucgaucaaaucaaugggaagcugaaucgauugaucgggaaaaccaacgagaaauuccaucagauugaaaaagaauucucagaaguagaaggaagaauucaggaccuugagaaauauguugaggacacuaaaauagaucucuggucauacaacgcggagcuucuuguugcccuggagaaccaacauacaauugaucuaacugacucagaaaugaacaaacuguuugaaaaaacaaagaagcaauugagggaaaaugcugaggauaugggaaaugguuguuucaaaauauaccacaaaugugacaaugccugcauaggaucaauaagaaauggaacuuaugaccacaauguguacagggaugaagcauuaaacaaccgguuccagaucaagggaguugagcugaagucaggguacaaagauuggauccuauggauuuccuuugccauaucauguuuuuugcuuuguguugcuuuguugggguucaucaugugggccugccaaaagggcaacauuaggugcaacauuugcauuuga

SEQ ID NO: 45447 - RNA, 1701 nt, Artificial Sequence
  derived and/or modified CDS sequence (wt) from hemagglutinin__InfluenzaA__ALE31934
augaagacuaucauugcuuugagcuacauucuaugucugguuuucgcucaaaaaauuccuggaaaugacaauagcacggcaacgcugugccuugggcaccaugcaguaccaaacggaacgauagugaaaacaaucacaaaugaccgaauugaaguuacuaaugcuacugagcugguucagaauuccucaauaggugaaauaugcgacaguccucaucagauccuugauggagaaaacugcacacuaauagaugcucuauugggagacccucagugugauggcuuucaaaauaagaaaugggaccuuuuuguugaacgaagcaaagccuacagcaacuguuacccuuaugaugugccggauuaugccucccuuaggucacuaguugccucauccggcacacuggaguuuaacaaugaaagcuucaauuggacuggagucacucaaaacggaacaaguucugcuugcauaaggaaaucuaguaguaguuucuuuaguagauuaaauugguugacccacuuaaacuacacauaccaagcauugaacgugacuaugccaaacaaugaacaauuugacaaauuguacauuugggggguucaccacccggguacggacaaggaccaaaucuuccuguaugcucgaucaucaggaagaaucacaguaucuaccaaaagaagccaacaagcuguaaucccaaauaucggaucuagacccagaauaagggauaucccuagcagaauaagcaucuauuggacaauaguaaaaccgggagacauacuuuugauuaacagcacagggaaucuaauugcuccuagggguuacuucaaaauacgaagugggaaaagcucaauaaugagaucagaugcacccauuggcaaaugcaagucugaaugcaucacuccaaauggaagcauucccaaugacaaaccauuccaaaauguaaacaggaucacauacggggccugucccagauauguuaagcauagcacucugaaauuggcaacaggaaugcgaaauauaccagagaaacaaacuagaggcauauuuggcgcaauagcggguuucauagaaaaugguugggagggaaugguggaugguugguacgguuucaggcaucaaaauucugaggggagaggacaagcagcagaccucaaaagcacucaagcagcaaucgaucaaaucaaugggaagcugaaucgauugaucgggaaaaccaacgagaaauuccaucagauugaaaaagaauucucagaaguagaaggaagaauucaggaccuugagaaauauguugaggacacuaaaauagaucucuggucauacaacgcggagcuucuuguugcccuggagaaucaacauacaauugaucuaacugacucagaaaugaacaaacuguuugaaaaaacaaagaagcaacugagggaaaaugcugaggauaugggaaaugguuguuucaaaauauaccacaaaugugacaaugccugcauaggaucaauaagaaauggaacuuaugaccacaauguguacagggaugaagcauuaaacaaccgguuccagaucaagggaguugagcugaagucaggguacaaagauuggauccuauggauuuccuuugccauaucauguuuuuugcuuuguguugcuuuguugggguucaucaugugggccugccaaaagggcaacauuaggugcaacauuugcauuuga

SEQ ID NO: 45448 - RNA, 1701 nt, Artificial Sequence
  derived and/or modified CDS sequence (wt) from hemagglutinin__InfluenzaA__ALE31935
augaagacuaucauugccuugagcuacauucuaugucugguuuucgcucaaaaaauuccuggaaaugacaauagcacggcaacgcugugccuugggcaccaugcaguaccaaacggaacgauagugaaaacaaucacaaaugaccgaauugaaguuacuaaugcuacugagcugguucagaauuccucaauaggugaaauaugcgacaguccucaucagauccuugauggagaaaacugcacacuaauagaugcucuauugggagacccucagugugauggcuuucaaaauaagaaaugggaccuuuuuguugaacgaagcaaagccuacagcaacuguuacccuuaugaugugccggauuaugccucccuuaggucacuaguugccucauccggcacacuggaguuuaacaaugaaagcuucaauuggacuggagucacucaaaacggaacaaguucugcuugcauaaggagaucuaguaguaguuucuuuaguagauuaaauugguugacccacuuaaacuacacauacccagcauugaacgugacuaugccaaacaaugaacaauuugacaaauuguacauuugggggguucaccacccggguacggacaaggaccaaaucuuccuguaugcucaaucaucaggaagaaucacaguaucuaccaaaagaagccaacaagcuguaaucccaaauaucggaucuagacccagaauaagggauaucccuagcagaauaagcaucuauuggacaauaguaaaaccgggagacauacuuuugauuaacagcacagggaaucuaauugcuccuagggguuacuucaaaauacgaagugggaaaagcucaauaaugagaucagaugcacccauuggcaaaugcaagucugaaugcaucacuccaaauggaagcauucccaaugacaaaccauuccaaaauguaaacaggaucacauacggggccugucccagauauguuaagcauagcacucugaaauuggcaacaggaaugcgaaauguaccagagaaacaaacuagaggcauauuuggcgcaauagcggguuucauagaaaaugguugggagggaaugguggaugguugguacgguuucaggcaucaaaauucugagggaagaggacaagcagcagaucucaaaagcacucaagcagcaaucgaucaaaucaaugggaagcugaaucgauugaucgggaaaaccaacgagaaauuccaucagauugaaaaagaauucucagaaguagaaggaagaauucaggaccuugagaaauauguugaggacacuaaaauagaucucuggucauacaacgcggagcuucuuguugcccuggagaaccaacauacaauugaucuaacugacucagaaaugaacaaacuguuugaaaaaacaaagaagcaacuaagggaaaaugcugaggauaugggaaaugguuguuucaaaauauaccacaaaugugacaaugccugcauaggaucaauaagaaauggaacuuaugaccacaauguguacagggaugaagcauuaaacaaccgguuccagaucaagggaguugagcugaagucaggguacaaagauuggauccuauggauuuccuuugccauaucauguuuuuugcuuuguguugcuuuguugggguucaucaugugggccugccaaaagggcaacauuaggugcaacauuugcauuuga

SEQ ID NO: 45449 - RNA, 1701 nt, Artificial Sequence; identical to SEQ ID NO: 45235
  derived and/or modified CDS sequence (wt) from hemagglutinin__InfluenzaA__ALE31936

SEQ ID NO: 45450 - RNA, 1701 nt, Artificial Sequence
  derived and/or modified CDS sequence (wt) from hemagglutinin__InfluenzaA__ALE31937
augaagacuaucauugcuuugagcuacauucuaugucugguuuucgcucaaaaacuuccugaaaaugacaauagcacggcaacgcugugccuugggcaccaugcaguaccaaacggaacgauagugaaaacaaucacgaaugaccgaauugaaguuacuaaugcuacugagcugguucagaauuccucaauaggugaaauaugcgacaguccucaucagauccuugauggagaaaacugcacacuaauagaugcucuauugggagacccucagugugauggcuuucaaaauaagaaaugggaccuuuuuguugaacgaagcaaagccuacagcaacuguuacccuuaugaugugccggauuaugccucccuuaggucacuaguugccucauccggcacacuggaguuuaacaaugaaagcuucaauugggcuggagucacucaaaacggaacaaguucuucuugcauaaggggaucuaauaguaguuucuuuaguagauuaaauugguugacccacuuaaacuccaaauacccagcauuaaacgugacuaugccaaacaaugaacaauuugacaaauuguacauuugggggguucaccacccggguacggacaaggaccaaaucuuccuguaugcacaaccaucaggaagaaucacaguaucuaccaaaagaagccaacaagcuguaaucccgaauaucggaucuagacccagaauaagggauaucccuagcagaauaagcaucuauuggacaauaguaaaaccgggagacauacuuuugauuaacagcacagggaaucuaauugcuccuagggguuacuucaaaauacgaagugggaaaagcucaauaaugagaucagaugcacccauuggcaaaugcaagucugaaugcaucacuccaaauggaagcauucccaaugacaaaccauuccaaaauguaaacaggaucacauacggggccugucccagauauguuaagcaaagcacucugaaauuggcaacaggaaugcgaaauguaccagagagacaaacuagaggcauauuuggcgcaauagcggguuucauagaaaaugguugggagggaaugguggaugguugguacggcuucaggcaucaaaauucugagggaagaggacaagcagcagaucucaaaagcacucaagcagcaaucgaucaaaucaaugggaagcugaaucgauugaucgggaaaaccaacgagaaauuccaucagauugaaaaagaauucucagaaguagaagggagaauucaggaccuugagaaauauguugaggacacaaaaauagaucucuggucauacaacgcggagcuucuuguugcccuggagaaccaacauacaauugaucuaacugacucagaaaugaacaaacuguuugaaaaaacaaagaagcaacugagggaaaaugcugaggauaugggcaaugguuguuucaaaauauaccacaaaugugacaaugccugcauaggaucaaucagaaauggaacuuaugaccacgauguauacagggaugaagcauuaaacaaccgguuccagaucaagggaguugagcugaagucaggguacaaagauuggauccuauggauuuccuuugccauaucauguuuuuugcuuuguguugcuuuguugggguucaucaugugggccugccaaaagggcaacauuaggugcaacauuugcauuuga

SEQ ID NO: 45451 - RNA, 1701 nt, Artificial Sequence
  derived and/or modified CDS sequence (wt) from hemagglutinin__InfluenzaA__ALE31938
augaagacuaucauugccuugagcuacauucuaugucugguuuucgcucaaaaaauuccuggaaaugacaauagcacggcaacgcugugccuugggcaccaugcaguaccaaacggaacgauagugaaaacaaucacgaaugaccgaauugaaguuacuaaugcuacugagcugguucagaauuccucaauaggugaaauaugcgacaguccucaucagauccuugauggagaaaacugcacacuaauagaugcucuauugggagacccucagugugauggcuuucaaaauaagaaaugggaccuuuuuguugaacgaagcaaagccuacagcaacuguuacccuuaugaugugccggauuaugccucccuuaggucacuaguugccucauccggcacacuggaguuuaacaaugaaagcuucaauuggacuggagucacucaaaacggaacaaguucugcuugcauaaggagaucuaguaguaguuucuuuaguagauuaaauugguugacccacuuaaacuacacauacccagcauugaacgugacuaugccaaacaaugaacaauuugacaaauuguacauuugggggguucaccauccggguacggacaaggaccaaaucuuccuguaugcucaaucaucaggaagaaucacaguaucuaccaaaagaagccaacaagcuguaaucccaaauaucggaucuagacccagaauaagggauaucccuagcagaauaagcaucuauuggacaauaguaaaaccgggagacauacuuuugauuaacagcacagggaaucuaauugcuccuagggguuacuucaaaauacgaagugggaaaagcucaauaaugagaucagaugcacccauuggcaaaugcaagucugaaugcaucacuccaaauggaagcauucccaaugacaaaccauuccaaaauguaaacaggaucacauacggggccugucccagauauguuaagcauaguacucugaaauuggcaacaggaaugcgaaauguaccagagaaacaaacuagaggcauauuuggcgcaauagcggguuucauagaaaaugguugggagggaaugguggaugguugguacgguuucaggcaucaaaauucugagggaagaggacaagcagcagaucucaaaagcacucaagcagcaaucgaucaaaucaaugggaagcugaaucgauugaucgggaaaaccaacgagaaauuccaucagauugaaaaagaauucucagaaguagaaggaagaauucaggaccuugagaaauauguugaggacacuaaaauagaucucuggucauacaacgcggagcuucuuguugcccuggagaaccaacauacaauugaucuaacugacucagaaaugaacaaacuguuugaaaaaacaaagaagcaacugagggaaaaugcugaggauaugggaaaugguuguuucaaaauauaccacaaaugugacaaugccugcauaggaucaauaagaaauggaacuuaugaccacaauguguacagggaugaagcauuaaacaaccgguuccagaucaagggaguugagcugaagucaggguacaaagauuggauccuauggauuuccuuugccauaucauguuuuuugcuuuguguugcuuuguugggguucaucaugugggccugccaaaagggcaacauuaggugcaacauuugcauuuga

SEQ ID NO: 45452 - RNA, 1701 nt, Artificial Sequence
  derived and/or modified CDS sequence (wt) from hemagglutinin__InfluenzaA__ALE31939
augaagacuaucauugcuuugagcuacauucuaugucugguuuucgcucaaaaaauuccuggaaaugacaauagcacggcaacgcugugccuugggcaccaugcaguaccaaacggaacgauagugaaaacaaucacaaaugaccgaauugaaguuacuaaugcuacugaguugguucagaauuccucaauaggugaaauaugcgacaguccucaucagauucuugauggagaaaacugcacacuaauagaugcucuauugggagacccucagugugauggcuuucaaaauaagaaaugggaccuuuuuguugaacgaagcaaagccuacagcaacuguuacccuuaugaugugccggauuaugccucccuuaggucacuaguugccucauccggcacacuggaguuuaacaaugaaagcuucaauuggacuggagucacucaaaacggaacaaguucugcuugcauaaggagaucuaguaguaguuucuuuaguagauuaaauugguugacccacuuaaacuacacauacccagcauugaacgugacuaugccaaacaaugaacaauuugacaaauuguacauuugggggguucaccacccggguacggacaaggaccaaaucuuccuguaugcucaaucaucaggaagaaucacaguaucuaccaaaagaagccaacaagcuguaaucccaaauaucggaucuagacccagaauaagggauaucccuagcagaauaagcaucuauuggacaauaguaaaaccgggagacauacuuuugauuaacagcacagggaaucuaauugcuccuagggguuacuucaaaauacuaagugggaaaagcucaauaaugagaucagaugcacccauuggcaaaugcaagucugaaugcaucacuccaaauggaagcauucccaaugacaaaccauuccaaaauguaaacaggaucacauacggggccugucccagauauguuaagcauagcacucugaaauuggcaacaggaaugcgaaauguaccagagaaacaaacuagaggcauauuuggcgcaauagcggguuucauagaaaaugguugggaaggaaugguggaugguugguacgguuucaggcaucaaaauucugagggaagaggacaagcagcagaucucaaaagcacucaagcagcaaucgaucaaaucaaugggaagcugaaucgguugaucgggaaaaccaacgagaaauuccaucagauugaaaaagaauucucagaaguagaaggaagaauucaggaccuugagaaauauguugaggacacuaaaauagaucucuggucauauaacgcggagcuucuuguugcccuggagaaccaacauacaauugaucuaacugacucagaaaugaacaaacuguuugaaaaaacaaagaagcaacugagggaaaaugcugaggauaugggaaaugguuguuucaaaauauaccacaaaugugacaaugccugcauaggaucaauaagaaauggaacuuaugaccacaauguguacagggaugaagcauuaaacaaccgguuccagaucaaggggguugagcugaagucaggguacaaagauuggauccuauggauuuccuuugccauaucauguuuuuugcuuuguguugcuuuguugggguucaucaugugggccugccaaaagggcaacauuaggugcaacauuugcauuuga

SEQ ID NO: 45453 - RNA, 1701 nt, Artificial Sequence
  derived and/or modified CDS sequence (wt) from hemagglutinin__InfluenzaA__ALE31941
augaagacuaucauugcuuugagcuacauucuaugucugguuuucgcucaaaaaauuccuggaaaugacaauagcacggcaacgcugugccuugggcaccaugcaguaccaaacggaacgauagugaaaacaaucacaaaugaccgaauugaaguuacuaaugcuacugaguugguucagaauuccucaauaggugaaauaugcgacaguccucaucagauccuugauggagaaaacugcacacuaauagaugcucuauugggggacccucagugugauggcuuucaaaauaagaaaugggaccuuuuuguugaacgaagcaaagccuacagcaacuguuacccuuaugaugugccggauuaugccucccuuaggucacuaguugccucauccggcacacuggaguuuaacaaugaaagcuucaauuggacuggagucacucaaaacggaacaaguucugcuugcauaaggagaucuaguaguaguuucuuuaguagauuaaauugguugacccacuuaaacuacacauacccagcauugaacgugacuaugccaaacaaugaacaauuugacaaauuguacauuugggggguucaccacccggguacggacaaggaccaaaucuuccuguaugcucaaucaucaggaagaaucacaguaucuaccaaaagaagccaacaagcuguaaucccaaauaucggaucuagacccagaauaagggauaucccuagcagaauaagcaucuauuggacaauaguaaaaccgggagacauacuuuugauuaacagcacagggaaucuaauugcuccuagggguuacuucaaaauacgaagugggaaaagcucaauaaugagaucagaugcacccauuggcaaaugcaagucugaaugcaucacuccaaauggaagcauucccaaugacaaaccauuccaaaauguaaacaggaucacauacggggccugucccagauauguuaagcauagcacucugaaauuggcaacaggaaugcgaaauguaccagagaaacaaacuagaggcauauuuggcgcaauagcggguuucauagaaaaugguugggagggaaugguggaugguugguacgguuucaggcaucaaaauucugagggaagaggacaagcagcagaucucaaaagcacucaagcagcaaucgaucaaaucaaugggaagcugaaucgguugaucgggaaaaccaacgagaaauuccaucagauugaaaaagaauucucagaaguagaaggaagaauucaggaccuugagaaauauguugaggacacuaaaauagaucucuggucauauaacgcggagcuucuuguugcccuggagaaccaacauacaauugaucuaacugacucagaaaugaacaaacuguuugaaaaaacaaagaagcaacugagggaaaaugcugaggauaugggaaaugguuguuucaaaauauaccacaaaugugacaaugccugcauaggaucaauaagaaauggaacuuaugaccacaauguguacagggaugaagcauuaaacaaccgguuccagaucaaggggguugagcugaagucaggguacaaagauuggauccuauggauuuccuuugccauaucauguuuuuugcuuuguguugcuuuguugggguucaucaugugggccugccaaaagggcaacauuaggugcaacauuugcauuuga

SEQ ID NO: 45454 - RNA, 1701 nt, Artificial Sequence
  derived and/or modified CDS sequence (wt) from hemagglutinin__InfluenzaA__ALE31943
augaagacuaucauugcuuugagcuacauucuaugucugguuuucgcucaaaagcuuccugaaaaugacaauagcacggcaacgcugugccuugggcaccaugcaguaccaaacggaacgauagugaaaacaaucacgagugaccgaauugaaguuacuaaugcuacugagcugguucagaauuccucaauaggugaaauaugcgacaguccucaucagauccuugauggaaaaaacugcacacuaauagaugcucuauugggagacccucagugugauggcuuucaaaauaagaaaugggaccuuuuuguugaacgaagcaaagccuacagcaacuguuacccuuaugaugugccggauuaugccucccuuaggucacuaguugccucauccgguacacuggaguuuaacgaugaaagcuucaauugggcuggagucacucaaaacggaacaaguucugcuugcauaaggggaucuaauaguaguuucuuuaguagauuaaauugguugacccacucaaacuucaaauacccagcauugaacgugacuaugccaaacaaugaacaauuugacaaauuguacauuugggggguucaccacccggguacggacaaggaccaaaucuuccuguaugcucaaucaucaggaagaaucacaguauccaccaaaagaagccaacaagcuguaaucccgaauaucggaucuagacccagaauaaggaauaucccuagcagaauaagcaucuauuggacaauaguaaaaccgggagacauacuuuugauuaacagcacagggaaucuaauugcuccuagggguuacuucaaaauacgaagugggaaaagcucaauaaugagaucagaugcacccauuggcaaaugcaagucugaaugcaucacuccaaauggaagcauucccaaugacaaaccauuccaaaauguaaacaggaucacauacggggccugucccagauauguuaagcaaagcacucugaaauuggcaacaggaaugcgaaauguaccagagaaacaaacuagaggcauauuuggcgcaauagcggguuucauagaaaaugguugggagggaaugaaggaugguugguacgguuucaggcaucaaaauucugaaggaagaggacaagcagcagaucucaaaagcacucaagcagcaaucgaucaaaucaaugggaagcugaaucgauugaucgggaaaaccaacgagaaauuccaucagauugaaaaagaauucucagaaguagaagggagaauucaggaccuugagaaauauguugaggacacaaaaauagaucucuggucauacaacgcggagcuucuuguugcacuggagaaccaacauacaauugaucuaacugacucagaaaugaacaaacuguuugaaaaaacaaagaagcaacugagggaaaaugcugaggauaugggcaaugguuguuucaaaauauaccacaaaugugacaaugccugcauaggaucaaucagaaauggaacuuaugaccacgauguauacagggaugaagcuuuaaacaaccgguuccagaucaagggaguugagcugaagucaggguacaaagauuggauccuauggauuuccuuugccauaucauguuuuuugcuuuguguugcuuuguugggguucaucaugugggccugccaaaagggcaacauuaggugcaacauuugcauuuga

SEQ ID NO: 45455 - RNA, 1701 nt, Artificial Sequence
  derived and/or modified CDS sequence (wt) from hemagglutinin__InfluenzaA__ALE31944
augaagacuaucauugcuuugagcuacauucuaugucugguuuucgcucaaaagcuuccugaaaaugacaauagcacggcaacgcugugccuugggcaccaugcaguaccaaacggaacgauagugaaaacaaucacgagugaccgaauugaaguuacuaaugcuacugagcugguucagaauuccucaauaggugaaauaugcgacaguccucaucagauccuugauggaaaaaacugcacacuaauagaugcucuauugggagacccucagugugauggcuuucaaaauaagaaaugggaccuuuuuguugaacgaagcaaagccuacagcaacuguuacccuuaugaugugccggauuaugccucccuuaggucacuaguugccucauccgguacacuggaguuuaacgaugaaagcuucaauugggcuggagucacucaaaacggaacaaguucugcuugcauaaggggaucuaauaguaguuucuuuaguagauuaaauugguugacccacucaaacuucaaauacccagcauugaacgugacuaugccaaacaaugaacaauuugacaaauuguacauuugggggguucaccacccggguacggacaaggaccaaaucuuccuguaugcucaaucaucaggaagaaucacaguauccaccaaaagaagccaacaagcuguaaucccgaauaucggaucuagacccagaauaagggauaucccuagcagaauaagcaucuauuggacaauaguaaaaccgggagacauacuuuugauuaacagcacagggaaucuaauugcuccuagggguuacuucaaaauacgaagugggaaaagcucaauaaugagaucagaugcacccauuggcaaaugcaagucugaaugcaucacuccaaauggaagcauucccaaugacaaaccauuccaaaauguaaacaggaucacauacggggccugucccagauauguuaagcaaagcacucugaaauuggcaacaggaaugcgaaauguaccagagaaacaaacuagaggcauauuuggcgcaauagcggguuucauagaaaaugguugggagggaaugaaggaugguugguacgguuucaggcaucaaaauucugaaggaagaggacaagcagcagaucucaaaagcacucaagcagcaaucgaucaaaucaaugggaagcugaaucgauugaucgggaaaaccaacgagaaauuccaucagauugaaaaagaauucucagaaguagaagggagaauucaggaccuugagaaauauguugaggacacaaaaauagaucucuggucauacaacgcggagcuucuuguugcacuggagaaccaacauacaauugaucuaacugacucagaaaugaacaaacuguuugaaaaaacaaagaagcaacugagggaaaaugcugaggauaugggcaaugguuguuucaaaauauaccacaaaugugacaaugccugcauaggaucaaucagaaauggaacuuaugaccacgauguauacagggaugaagcuuuaaacaaccgguuccagaucaagggaguugagcugaagucaggguacaaagauuggauccuauggauuuccuuugccauaucauguuuuuugcuuuguguugcuuuguugggguucaucaugugggccugccaaaagggcaacauuaggugcaacauuugcauuuga

SEQ ID NO: 45456 - RNA, 1701 nt, Artificial Sequence
  derived and/or modified CDS sequence (wt) from hemagglutinin__InfluenzaA__ALE31945
augaagacuaucauugccuugagcuacauucuaugucugguuuucgcucaaaaaauuccuggaaaugacaauagcacggcaacgcugugccuugggcaccaugcaguaccaaacggaacgauagugaaaacaaucacaaaugaccgaauugaaguuacuaaugcuacugagcugguucagaauuccucaauaggugaaauaugcgacaguccucaucagauccuugauggagaaaacugcacacuaauagaugcucuauugggagacccucaaugugauggcuuucaaaauaagaaaugggaccuuuuuguugaacgaagcaaagccuacagcaacuguuacccuuaugaugugccggauuaugccucccuuaggucacuaguugccucauccggcacacuggaguuuaacaaugaaagcuucaauuggacuggagucacucaaaacggaacaaguucugcuugcauaaggagaucuaguaguaguuucuuuaguagauuaaauugguugacccacuuaaacuacacauacccagcauugaacgugacuaugccaaacaaugaacaauuugacaaauuguacauuugggggguucaccacccggguacggacaaggaccaaaucuuccuguaugcucaaucaucaggaagaaucacaguaucuaccaaaggaagccaacaagcuguaaucccaaaugucggaucuagacccagaauaagggauaucccuagcagaauaagcaucuauuggacaauaguaaaaccgggagacauacuuuugauuaacagcacagggaaucuaauugcuccuagggguuacuucaaaauacgaagugggaaaagcucaauaaugagaucagaugcacccauuggcaaaugcaagucugaaugcaucacuccaaauggaagcauucccaaugacaaaccauuccaaaauguaaacaggaucacauacggggccugucccagauauguuaagcauagcacucugaaauuggcaacaggaaugcgaaauguaccagagaaacaaacuagaggcauauuuggcgcaauagcggguuucauagaaaaugguugggagggaaugguggaugguugguacgguuucaggcaucaaaauucugagggaagaggacaagcagcagaucucaaaagcacucaagcagcaaucgaucaaaucaaugggaagcugaaucgauugaucgggaaaaccaacgagaaauuccaccagauugaaaaagaauucucagaaguagaaggaagaauucaggacauugagaaauauguugaggacacuaaaauagaucucuggucauacaacgcggagcuucuuguugcccuggagaaccaacauacaauugaucuaacugacucagaaaugaacaaacuguuugaaaaaacaaagaagcaacugagggaaaaugcugaggauaugggaaaugguuguuucaaaauauaccacaaaugugacaaugccugcauaggaucaauaagaaauggaacuuaugaccacaauguguacagggaugaagcauuaaacaaccgguuccagaucaagggaguugagcugaagucaggguacaaagauuggauccuauggauuuccuuugccauaucauguuuuuugcuuuguguugcuuuguugggguucaucaugugggccugccaaaagggcaacauuaggugcaacauuugcauuuga

SEQ ID NO: 45457 - RNA, 1701 nt, Artificial Sequence; identical to SEQ ID NO: 45140
  derived and/or modified CDS sequence (wt) from hemagglutinin__InfluenzaA__ALE31946

SEQ ID NO: 45458 - RNA, 1701 nt, Artificial Sequence; identical to SEQ ID NO: 45145
  derived and/or modified CDS sequence (wt) from hemagglutinin__InfluenzaA__ALE31947

SEQ ID NO: 45459 - RNA, 1701 nt, Artificial Sequence
  derived and/or modified CDS sequence (wt) from hemagglutinin__InfluenzaA__ALE31948
augaagacuaucauugcuuugagcuacauucuaugucugguuuucgcucaaaaaauuccuggaaaugacaauagcacggcaacgcugugccuugggcaccaugcaguaccaaacggaacgauagugaaaacaaucacaaaugaccgaauugaaguuacuaaugcuacugagcugguucagaauuccucaauaggugaaauaugcgacaguccucaucagauccuugauggagaaaacugcacacuaauagaugcucuauugggagacccucagugugauggcuuucaaaauaagaaaugggaccuuuuuguugaacgaagcaaagccuacagcaacuguuacccuuaugaugugccggauuaugccucccuuaggucacuaguugccucauccggcacacuggaguuuaacaaugaaagcuucaauuggacuggagucacucaaaacggaacaaguucugcuugcauaaggaaaucuaguaguaguuucuuuaguagauuaaauugguugacccacuuaaacuacacauacccagcauugaacgugacuaugccaaacaaugaacaauuugacaaauuguacauuugggggguucaccacccggguacggacaaggaccaaaucuuccuguaugcucgaucaucaggaagaaucacaguaucuaccaaaagaagccaacaagcuguaaucccaaauaucggaucuagacccagaauaagggauaucccuagcagaauaagcaucuauuggacaauaguaaaaccgggagacauacuuuugauuaacagcacagggaaucuaauugcuccuagggguuacuucaaaauacgaagugggaaaagcucaauaaugagaucagaugcacccauuggcaaaugcaagucugaaugcaucacuccaaauggaagcauucccaaugacaaaccauuccaaaauguaaacaggaucacauacggggccugucccagauauguuaagcauagcacucugaaauuggcaacaggaaugcgaaauguaccagagaaacaaacuagaggcauauuuggcgcaauagcggguuucauagaaaaugguugggagggaaugguggaugguugguacgguuucaggcaucaaaauucugagggaagaggacaagcagcagaucucaaaagcacucaagcagcaaucgaucaaaucaaugggaagcugaaucgauuggucgggaaaaccaacgagaaauuccaucagauugaaaaagaauucucagaaguagaaggaagaauucaggaccuugagaaauauguugaggacacuaaaauagaucucuggucauacaacgcggaguuucuuguugcccuggagaaucaacauacaauugaucuaacugacucagaaaugaacaaacuguuugaaaaaacaaagaagcaacugagggaaaaugcugaggauaugggaaaugguuguuucaaaauauaccacaaaugugacaaugccugcauaggaucaauaagaaauggaacuuaugaccacaauguguacagggaugaagcauuaaacaaccgguuccagaucaagggaguugagcugaagucaggguacaaagauuggauccuauggauuuccuuugccauaucauguuuuuugcuuuguguugcuuuguugggguucaucaugugggccugccaaaagggcaacauuaggugcaacauuugcauuuga

SEQ ID NO: 45460 - RNA, 1701 nt, Artificial Sequence; identical to SEQ ID NO: 45140
  derived and/or modified CDS sequence (wt) from hemagglutinin__InfluenzaA__ALE31949

SEQ ID NO: 45461 - RNA, 1701 nt, Artificial Sequence
  derived and/or modified CDS sequence (wt) from hemagglutinin__InfluenzaA__ALE31950
augaagacuaucauugcuuugagcuacauucuaugucugguuuucgcucaaaaaauuccuggaaaugacaauagcacggcaacgcugugccuugggcaccaugcaguaccaaacggaacgauagugaaaacaaucacaaaugaccgaauugaaguuacuaaugcuacugagcugguucagaauuccucaauaggugaaauaugcgacaguccucaucagauccuugauggagaaaacugcacacuaauagaugcucuauugggagacccucagugugauggcuuucaaaauaagaaaugggaccuuuuuguugaacgaagcaaagccuacagcaacuguuacccuuaugaugugccggauuaugccucccuuaggucacuaguugccucauccggcacacuggaguuuaacaaugaaagcuucaauuggacuggagucacucaaaacggaacaaguucugcuugcauaaggagaucuaguaguaguuucuuuaguagauuaaauugguugacccacuuaaacuacacauacccagcauugaacgugacuaugccaaacaaugaacaauuugacaaauuguacauuugggggguucaccacccggguacggacaaggaccaaaucuuccuguaugcucaaucaucaggaagaaucacaguaucuaccaaaagaagccaacaagcuguaaucccaaauaucggaucuagacccagaauaagggauaucccuagcagaauaagcaucuauuggacaauaguaaaaccgggagacauacuuuugauuaacagcacagggaaucuaauugcuccuagggguuacuucaaaauacgaagugggaaaagcucaauaaugagaucagaugcacccauuggcaaaugcaagucugaaugcaucacuccaaauggaagcauucccaaugacaaaccauuccaaaauguaaacaggaucacauacggggccugucccagauauguuaagcacaguacucugaaauuggcaacaggaaugcgaaauguaccagagaaacaaacuagaggcauauuuggcgcgauagcggguuucauagaaaaugguugggagggaaugguggaugguugguacgguuucaggcaucaaaauucugagggaagaggacaagcagcagaucucaaaagcacucaagcagcaaucgaucaaaucaauggaaagcugaaucgauugaucgggaaaaccaacgagaaauuccaucagauugaaaaagaauucucagaaguagaaggaagaauucaggaccuugagaaauauguugaggacacuaaaauagaucucuggucauacaacgcggagcuucuuguugcccuggaaaaccaacauacaauugaucuaacugacucagaaaugaacaaacuguuugaaaaaacaaagaagcaacugagggaaaaugcugaggauaugggaaaugguuguuucaaaauauaccacaaaugugacaaugccugcauaggaucaauaagaaauggaacuuaugaccacaauguguacagggaugaagcauuaaacaaccgguuccagaucaagggaguugagcugaagucaggguacaaagauuggauccuauggauuuccuuugccauaucauguuuuuugcuuuguguugcuuuguugggguucaucaugugggccugccaaaagggcaacauuaggugcaacauuugcauuuga

SEQ ID NO: 45462 - RNA, 1701 nt, Artificial Sequence
  derived and/or modified CDS sequence (wt) from hemagglutinin__InfluenzaA__ALE31951
augaagacuaucauugccuugagcuacauucuaugucugguuuucgcucaaaaaauuccuggaaaugacaauagcacggcaacgcugugccuugggcaccaugcaguaccaaacggaacgauagugaaaacaaucacaaaugaccgaauugaaguuacuaaugcuacugagcugguucagaauuccucaauaggugaaauaugcgacaguccucaucagauccuugauggagaaaacugcacacuaauagaugcucuauugggagacccucagugugauggcuuucaaaauaagaaaugggaccuuuuuguugaacgaagcaaagccuacagcaacuguuacccuuaugaugugccggauuaugccucccuuaggucacuaguugccucauccggcacacuggaguuuaacaaugaaagcuucaauuggacuggagucacucaaaacggaacaaguucugcuugcauaaggagaucuaguaguaguuucuuuaguagauuaaauugguugacccacuuaaacuacacauacccagcauugaacgugacuaugccaaacaaugaacaauuugacaaauuguacauuugggggguucaccacccggguacggacaaggaccaaaucuuccuguaugcucaaucaucaggaagaaucacaguaucuaccaaaggaagccaacaagcuguaaucccaaauaucggaucuagacccagaauaagggauaucccuagcagaauaaguaucuauuggacaauaguaaaaccgggagacauacuuuugauuaacaguacagggaaucuaauugcuccuagggguuacuucaaaauacgaagugggaaaagcucaauaaugagaucagaugcacccauuggcaaaugcaagucugaaugcaucacuccaaauggaagcauucccaaugacaaaccauuccaaaauguaaacaggaucacauacggggccugucccagauauguuaagcauagcacucugaaauuggcaacaggaaugcgaaauguaccagagaaacaaacuagaggcauauuuggcgcaauagcggguuucauagaaaaugguugggagggaaugguggaugguugguacgguuucaggcaucaaaauucugagggaagaggacaagcagcagaucucaaaagcacucaagcagcaaucgaucaaaucaaugggaagcugaaucgauugaucgggaaaaccaacgagaaauuccaucagauugaaaaagaauucucagaaguagaaggaagaauucaggaccuugagaaauauguugaggacacuaaaauagaucucuggucauacaacgcggagcuucuuguugcccuggagaaccaacauacaauugaucuaacugacucagaaaugaacaaacuguuugaaaaaacaaagaagcaacugagggaaaaugcugaggauaugggaaaugguuguuucaaaauauaccacaaaugugacaaugccugcauaggaucaauaagaaauggaacuuaugaccacaauguguacagggaugaagcauuaaacaaccgguuccagaucaagggaguugagcugaagucaggguacaaagauuggauccuauggauuuccuuugccauaucauguuuuuugcuuuguguugcuuuguugggguucaucaugugggccugccaaaagggcaacauuaggugcaacauuugcauuuga

SEQ ID NO: 45463 - RNA, 1701 nt, Artificial Sequence
  derived and/or modified CDS sequence (wt) from hemagglutinin__InfluenzaA__ALE31952
augaagacuaucauugcuuugagcuacauucuaugucugguuuucgcucaaaaaauuccuggaaaugacaauagcacggcaacgcugugccuugggcaccaugcaguaccaaacggaacgauagugaaaacaaucacaaaugaccgaauugaaguuacuaaugcuacugagcugguucagaauuccucaauaggugaaauaugcgacaguccucaucagauccuugauggagaaaacugcacacuaauagaugcucuauugggagacccucagugugauggcuuucaaaauaagaaaugggaccuuuuuguugaacgaagcaaagccuacagcaacuguuacccuuaugaugugccggauuaugccucccuuaggucacuaguugccucauccggcacacuggaguuuaacaaugaaagcuucaauuggacuggagucacucaaaacggaacaaguucugcuugcauaaggagaucuaguaguaguuucuuuaguagauuaaauugguugacccacuuaaacuacacauacccagcauugaacgugacuaugccaaacaaugagcaauuugacaaauuguacauuugggggguucaccacccggguacggacaaggaccaaaucuuccuguaugcucaaucaucaggaagaauaacaguaucuaccaaaagaagccaacaagcuguaaucccaaauaucggaucuagacccagaauaagggauaucccuagcagaauaagcaucuauuggacaauaguaaaaccgggagacauacuuuugauuaacagcacagggaaucuaauugcuccuagggguuacuucaaaauacgaagugggaaaagcucaauaaugagaucagaugcacccauuggcaaaugcaagucugagugcaucacuccaaauggaagcauucccaaugacaaaccauuccaaaauguaaacaggaucacauacggggccugucccagauauguuaagcauagcacucugaaauuggcaacaggaaugcgaaauguaccagagaaacaaacuagaggcauauuuggcgcaauagcggguuucauagaaaaugguugggagggaaugguggaugguugguacgguuucaggcaucaaaauucugagggaagaggacaagcagcagaucucaaaagcacucaagcagcaaucgaucaaaucaacgggaagcugaaucgauugaucgggaaaaccaacgagaaauuccaucagauugaaaaagaauucucagaaguagaaggaagaauucaggaccuugagaaauauguugaggacacuaaaauagaucucuggucauacaacgcggagcuucuuguugcccuggagaaccaacauacaauugaucuaacugacucagaaaugaacaaacuguuugaaaaaacaaagaagcaacugagggaaaaugcugaggauaugggaaaugguuguuucaaaauauaccacaaaugugacaaugccugcauaggaucaauaagaaauggaacuuaugaccacaauguguacagggaugaagcauuaaacaaccgguuccagaucaagggaguugagcugaagucaggguacaaagauuggauccuauggauuuccuuugccauaucauguuuuuugcuuuguguugcuuuguugggguucaucaugugggccugccaaaagggcaacauuaggugcaacauuugcauuuga

SEQ ID NO: 45464 - RNA, 1701 nt, Artificial Sequence
  derived and/or modified CDS sequence (wt) from hemagglutinin__InfluenzaA__ALE31953
augaagacuaucauugcuuugagcuacauucuaugucugguuuucgcucaaaaaauuccuggaaaugacaauagcacggcaacgcugugccuugggcaccaugcaguaccaaacggaacgauagugaaaacaaucacaaaugaccgaauugaaguuacuaaugcuacugagcugguucagaauuccucaauaggugaaauaugcgacaguccucaucagauccuugauggagaaaacugcacacuaauagaugcucuauugggagacccucagugugauggcuuucaaaauaagaaaugggaccuuuuuguugaacgaagcaaagccuacagcaacuguuacccuuaugaugugccggauuaugccucccuuaggucacuaguugccucauccggcacacuggaguuuaacaaugaaagcuucaauuggacuggagucacucaaaacggaacaaguucugcuugcauaaggaaaucuaguaguaguuucuuuaguagauuaaauugguugacccacuuaaacuacacauacccagcauugaacgugacuaugccaaacaaugaacaauuugacaaauuguacauuugggggguucaccacccagguacggacaaggaccaaaucuuccuguuugcucgaucaucaggaagaaucacaguaucuaccaaaagaagccaacaagcuguaaucccaaauaucggaucuagacccagaauaagggauaucccuagcagaauaagcaucuauuggacaauaguaaaaccgggagacauacuuuugauuaacagcacagggaaucuaauugcuccuagggguuacuucaaaauacgaagugggaaaagcucaauaaugagaucagaugcacccauuggcaaaugcaagucugaaugcaucacuccaaauggaagcauucccaaugacaaaccauuccaaaauguaaacaggaucacauacggggccugucccagauauguuaagcauagcacucugaaauuggcaacaggaaugcgaaauguaccagagaaacaaacuagaggcauauuuggcgcaauagcggguuucauagaaaaugguugggagggaaugguggaugguugguacgguuucaggcaucaaaauucugaggggagaggacaagcagcagaucucaaaagcacucaagcagcaaucgaucaaaucaaugggaagcugaaucgauugaucgggaaaaccaacgagaaauuccaccagauugaaaaagaauucucagaaguagaaggaagaauucaggaccuugagaaauauguugaggacacuaaaauagaucucuggucauacaacgcggagcuucuuguugcccuggagaaucaacauacaauugaucuaacugacucagaaaugaacaaacuguuugaaaaaacaaagaagcaacugagggaaaaugcugaggauaugggaaaugguuguuucaaaauauaccacaaaugugacaaugccugcauaggaucaauaagaaauggaacuuaugaccacaauguguacagggaugaagcauuaaacaaccgguuccagaucaagggaguugagcugaagucaggguacaaagauuggauccuauggauuuccuuugccauaucauguuuuuugcuuuguguugcuuuguugggguucaucaugugggccugccaaaagggcaacauuaggugcaacauuugcauuuga

SEQ ID NO: 45465 - RNA, 1701 nt, Artificial Sequence
  derived and/or modified CDS sequence (wt) from hemagglutinin__InfluenzaA__ALE31954
augaagacuaucauugcuuugagcuacauucuaugucugguuuucgcucaaaaacuuccuggaaaugacaauagcacggcaacgcugugccuugggcaccaugcaguaccaaacggaacgauagugaaaacaaucacgaaugaccgaauugaaguuacuaaugcuacugagcugguucagaauuccucaauaggugaaauaugcgacaguccucaucagauccuugauggaaaaaacugcacacuaauagaugcucuauugggagacccucagugugauggcuuucaaaauaagagaugggaccuuuuuguugaacgaagcaaagccuacagcaacuguuacccuuaugaugugccggauuaugccucccuuaggucacuaguugccucauccggcacacuggaguuuaacgaugaaagcuucaauugggcuggagucacucaaaacggaacaaguucugcuugcauaaggggaucuaauaguaguuucuuuaguagauuaaauugguugacccacucaaacuucaaauacccagcauugaacgugacuaugccaaacaaugaacaauuugacaaauuguacauuugggggguucaccacccggguacagacaaggaccaaaucuuccuguaugcucacucaucaggaagaaucacaguaucuaccaaaagaagccaacaagcuguaaucccgaaugucggaucuagacccagaauaaggaauaucccuagcagaauaagcaucuauuggacaauaguaaaaccgggagacauacuuuugauuaacagcacagggaaucuaauugcuccuagggguuacuucaaaauacaaagugggaaaagcucaauaaugagaucagaugcacccauuggcaaaugcaagucugaaugcaucacuccaaauggaagcauucccaaugacaaaccauuccaaaauguaaacaggaucacauacggggccugucccagauauguuaagcaaagcacucugaaauuggcaacaggaaugcgaaauguaccagagaaacaaacuagaggcauauuuggcgcaauagcggguuucauagaaaaugguugggagggaaugaaggaugguugguacgguuucaggcaucaaaauucugagggaagaggacaagcagcagaucucaaaagcacucaagcagcaaucgaucaaaucaaugggaagcugaaucgauuggucgggaaaaccaacgagaaauuccaucagauugaaaaagaauucucagaaguagaagggagaauucaggaccuugagaaauauguugaggacacaaaaauagaucucuggucauacaacgcagagcuucuuguugcccuggagaaccaacauacaauugaucuaacugacucagaaaugaacaaacuguuugaaaaaacaaagaagcaacugagggaaaaugcugaggauaugggcaaugguuguuucaaaauauaccacaaaugugacaaugccugcauaggaucaaucagaaauggaacuuaugaccacuauguauacagggaugaagcuuuaaacaaccgguuccagaucaagggaguugagcugaagucaggguacaaagauuggauccuauggauuuccuuugccauaucauguuuuuugcuuuguguugcuuuguugggguucaucaugugggccugccaaaagggcaacauuaggugcaacauuugcauuuga

SEQ ID NO: 45466 - RNA, 1701 nt, Artificial Sequence
  derived and/or modified CDS sequence (wt) from hemagglutinin__InfluenzaA__ALE31955
augaagacuaucauugccuugagcuacauucuaugucugguuuucgcucaaaaaauuccuggaaaugacaauaguacggcaacgcugugccuugggcaccaugcaguaccaaacggaacgauagugaaaacaaucacaaaugaccgaauugaaguuacuaaugcuacugagcugguucagaauuccucaauaggugaaauaugcgacaguccucaucagauccuugauggagaaaacugcacacuaauagaugcucuauugggagacccucagugugauggcuuucaaaauaagaaaugggaccuuuuuguugaacgaagcaaagccuacagcaacuguuacccuuaugaugugccggauuaugccucccuuaggucacuaguugccucauccggcacacuggaguuuaacaaugaaagcuucaauuggacuggagucacucaaaacggaacaaguucugcuugcauaaggagaucuaguaguaguuucuuuaguagauuaaauugguugacccacuuaaacuacacauacccagcauugaacgugacuaugccaaacaaugaacaauuugacaaauuguacauuugggggguucaccacccggguacggacaaggaccaaaucuuccuguaugcucaaucaucaggaagaaucacaguaucuaccaaaagaagccaacaagcuguaaucccaaauaucggaucuagacccagaauaagggauaucccuagcagaauaagcaucuauuggacaauaguaaaaccgggagacauacuuuugauuaacagcacagggaaucuaauugcuccuagggguuacuucaaaauacgaagugggaaaagcucaauaaugagaucagaugcacccauuggcaaaugcaagucugaaugcaucacuccaaauggaagcauucccaaugacaaaccauuccaaaauguaaacaggaucacauacggggccugucccagauauguuaagcauagcacucugaaauuggcaacaggaaugcgaaauguaccagagaaacaaacuagaggcauauuuggcgcaauagcggguuucauagaaaaugguugggagggaaugguggaugguugguacgguuucaggcaucaaaauucugagggaagaggacaagcagcagaucucaaaagcacucaagcagcaaucgaucaaaucaaugggaagcugaaucgauugaucgggaaaaccaacgagaaauuccaucagauugaaaaagaauucucagaaguagaaggaagaauucaggaccuugagaaauauguugaggacacuaaaauagaucucuggucauacaacgcggagcuucuuguugcccuggagaaccaacauacaauugaucuaacugacucagaaaugaacaaacuguuugaaaaaacaaagaagcaacugagggaaaaugcugaggauaugggaaaugguuguuucaaaauauaccacaaaugugacaaugccugcauaggaucaauaagaaauggaacuuaugaccacaauguguacagggaugaagcauuaaacaaccgguuccagaucaagggaguugagcugaagucaggguacaaagauuggauccuauggauuuccuuugccauaucauguuuuuugcuuuguguugcuuuguugggguucaucaugugggccugccaaaagggcaacauuaggugcaacauuugcauuuga

SEQ ID NO: 45467 - RNA, 1701 nt, Artificial Sequence
  derived and/or modified CDS sequence (wt) from hemagglutinin__InfluenzaA__ALE31956
augaagacuaucauugccuugagcuacauucuaugucugguuuucgcucaaaaaauuccuggaaaugacaauagcacggcaacgcugugccuugggcaccaugcaguaccaaacggaacgauagugaaaacaaucacaaaugaccgaauugaaguuacuaaugcuacugagcugguucagaauuccucaauaggugaaauaugcaacaguccucaucagauccuugauggagaaaacugcacacuaauagaugcucuauugggagacccucagugugauggcuuucaaaauaagaaaugggaccuuuuuguugaacgaagcaaagccuacagcaacuguuacccuuaugaugugccggauuaugccucccuuaggucacuaguugccucauccggcacacuggaguuuaacaaugaaagcuucaauuggacuggagucacucaaaacggaacaaguucugcuugcauaaggagaucuaguaguaguuucuuuaguagauuaaauugguugacccacuuaaacuacacauacccagcauugaacgugacuaugccaaacaaugaacaauuugacaaauuguacauuugggggguucaccacccggguacggacaaggaccaaaucuuccuguaugcucaaucaucaggaagaaucacaguaucuaccaaaagaagccaacaagcuguaaucccaaauaucggaucuagacccagaauaagggacaucccuagcagaauaagcaucuauuggacaauaguaaaaccgggagacauacuuuugauuaacagcacagggaaucuaauugcuccuagggguuacuucaaaauacgaagugggaaaagcucaauaaugagaucagaugcacccauuggcaaaugcaagucugaaugcaucacuccaaauggaagcauucccaaugacaaaccauuccaaaauguaaacaggaucacauacggggccugucccagauauguuaagcauagcacucugaaauuggcaacaggaaugcgaaauguaccagagaaacaaacuagaggcauauuuggcgcaauagcggguuucauagaaaaugguugggagggaaugguggaugguugguacgguuucaggcaucaaaauucugagggaagaggacaagcagcagaucucaaaagcacucaagcagcaaucgaucaaaucaaugggaagcugaaucgguugaucgggaaaaccaacgagaaauuccaucagauugaaaaagaauucucagaaguagaaggaagaauucaggaccuugagaaauauguugaggacacuaaaauagaucucuggucauacaacgcggagcuucuuguugcccuggagaaccaacauacaauugaucuaacugacucagaaaugaacaaacuguuugaaaaaacaaagaagcaacugagggaaaaugcugaggauaugggaaaugguuguuucaaaauauaccacaaaugugacaaugccugcauaggaucaauaagaaauggaacuuaugaccacaauguguacagggaugaagcauuaaacaaccgguuccagaucaagggaguugagcugaagucaggguacaaagauuggauccuauggauuuccuuugccauaucauguuuuuugcuuuguguugcuuuguugggguucaucaugugggccugccaaaagggcaacauuaggugcaacauuugcauuuga

SEQ ID NO: 45468 - RNA, 1701 nt, Artificial Sequence
  derived and/or modified CDS sequence (wt) from hemagglutinin__InfluenzaA__ALE31957
augaagacuaucauugcuuugagcuacauucuaugucugguuuucgcucaaaaaauuccuggaaaugacaauagcacggcaacgcugugccuugggcaccaugcaguaccaaacggaacgauagugaaaacaaucacaaaugaccgaauugaaguuacuaaugcuacugaguugguucagaauuccucaauaggugaaauaugcgacaguccucaucagauccuagauggagaaaacugcacacuaauagaugcucuauugggagacccucagugugauggcuuucaaaauaagaaaugggaccuuuuuguugaacgaagcaaagccuacagcaacuguuacccuuaugaugugccggauuaugccucccuuaggucacuaguugccucauccggcacacuggaguuuaacaaugaaagcuucaauuggacuggagucacucaaaacggaacaaguucugcuugcauaaggagaucuaguaguaguuucuuuaguagauuaaauugguugacccacuuaaacuacacauacccagcauugaacgugacuaugccaaacaaugaacaauuugacaaauuguacauuugggggguucaccacccggguacggacaaggaccaaaucuuccuguaugcucaaucaucaggaagaaucacaguaucuaccaaaagaagccaacaagcuguaaucccaaauaucggaucuagacccagaauaagggauaucccuagcagaauaagcaucuauuggacaauaguaaaaccgggagacauacuuuugauuaacagcacagggaaucuaauugcuccuagggguuacuucaaaauacuaagugggaaaagcucaauaaugagaucagaugcacccauuggcaaaugcaagucugaaugcaucacuccaaauggaagcauucccaaugacaaaccauuccaaaauguaaacaggaucacauacggggccugucccagauauguuaagcauagcacucugaaauuggcaacaggaaugcgaaauguaccagagaaacaaacuagaggcauauuuggcgcaauagcggguuucauagaaaaugguugggaaggaaugguggaugguugguacgguuucaggcaucaaaauucugagggaagaggacaagcagcagaucucaaaagcacucaagcagcaaucgaucaaaucaaugggaagcugaaucgguugaucgggaaaaccaacgagaaauuccaucagauugaaaaagaauucucagaaguagaaggaagaauucaggaccuugagaaauauguugaggacacuaaaauagaucucuggucauauaacgcggagcuucuuguugcccuggagaaccaacauacaauugaucuaacugacucagaaaugaacaaacuguuugaaaaaacaaagaagcaacugagggaaaaugcugaggauaugggaaaugguuguuucaaaauauaccacaaaugugacaaugccugcauaggaucaauaagaaauggaacuuaugaccacaauguguacagggaugaagcauuaaacaaccgguuccagaucaaggggguugagcugaagucaggguacaaagauuggauccuauggauuuccuuugccauaucauguuuuuugcuuuguguugcuuuguugggguucaucaugugggccugccaaaagggcaacauuaggugcaacauuugcauuuga

SEQ ID NO: 45469 - RNA, 1701 nt, Artificial Sequence
  derived and/or modified CDS sequence (wt) from hemagglutinin__InfluenzaA__ALE31958
augaagacuaucauugcuuugagcuacauucuaugucugguuuucgcucaaaaaauuccuggaaaugacaauagcacggcaacgcugugccuugggcaccaugcaguaccaaacggaacgauagugaaaacaaucacaaaugaccgaauugaaguuacuaaugcuacugaguugguucagaauuccucaauaggugaaauaugcgacaguccucaucagauccuugauggagaaaacugcacacuaauagaugcucuauugggagacccucagugugauggcuuucaaaauaagaaaugggaccuuuuuguugaacgaagcaaagccuacagcaacuguuacccuuaugaugugccggauuaugccucccuuaggucacuaguugccucauccggcacacuggaguuuaacaaugaaagcuucaauuggacuggagucacucaaaacggaacaaguucugcuugcauaaggagaucuaguaguaguuucuuuaguagauuaaauugguugacccacuuaaacuacacauacccagcauugaacgugacuaugccaaacaaugaacaauuugacaaauuguacauuugggggguucaccacccggguacggacaaggaccaaaucuuccuguaugcucaaucaucaggaagaaucacaguaucuaccaaaagaagccaacaagcuguaaucccaaauaucggaucuaaacccagaauaagggauaucccuagcagaauaagcaucuauuggacaauaguaaaaccgggagacauacuuuugauuaacagcacagggaaucuaauugcuccuagggguuacuucaaaauacgaagugggaaaagcucaauaaugagaucagaugcacccauuggcaaaugcaagucugaaugcaucacuccaaauggaagcauucccaaugacaaaccauuccaaaauguaaacaggaucacauacggggccugucccagauauguuaagcauagcacucugaaauuggcaacaggaaugcgaaauguaccagagaaacaaacuagaggcauauuuggcgcaauagcggguuucauagaaaaugguugggagggaaugguggaugguugguacgguuucaggcaucaaaauucugagggaagaggacaagcagcagaucucaaaagcacucaagcagcaaucgaucaaaucaaugggaagcugaaucgguugaucgggaaaaccaacgagaaauuccaucagauugaaaaagaauucucagaaguagaaggaagaauucaggaccuugagaaauauguugaggacacuaaaauagaucucuggucauacaacgcggagcuucuuguugcccuggagaaccaacauacaauugaucuaacugacucagaaaugaacaaacuguuugaaaaaacaaagaagcaacugagggaaaaugcugaggauaugggaaaugguuguuucaaaauauaccacaaaugugacaaugccugcauaggaucaauaagaaauggaacuuaugaccacaauguguacagggaugaagcauuaaacaaccgguuucagaucaagggaguugagcugaagucaggguacaaagauuggauccuauggauuuccuuugccauaucauguuuuuugcuuuguguugcuuuguugggguucaucaugugggccugccaaaaaggcaacauuaggugcaacauuugcauuuga

SEQ ID NO: 45470 - RNA, 1701 nt, Artificial Sequence
  derived and/or modified CDS sequence (wt) from hemagglutinin__InfluenzaA__ALE31959
augaagacuaucauugcuuugagcuacauucuaugucugguuuucgcucaaaaaauuccuggaaaugacaauagcacggcaacgcugugccuugggcaccaugcaguaccaaacggaacgauagugaaaacaaucacaaaugaccgaauugaaguuacuaaugcuacugagcugguucagaauuccucaauaggugaaauaugcgacaguccucaucagauccuugauggagaaaacugcacacuaauagaugcucuauugggagacccucagugugauggcuuucaaaauaagaaaugggaccuuuuuguugaacgaagcaaagccuacagcaacuguuacccuuaugaugugccggauuaugccucccuuaggucacuaguugccucauccggcacacuggaguuuaacaaugaaagcuucaauuggacuggagucacucaaaacggaacaaguucugcuugcauaaggaaaucuaguaguaguuucuuuaguagauuaaauugguugacccacuuaaacuacgcauacccagcauugaacgugacuaugccaaacaaugaacaauuugacaaauuguacauuugggggguucaccacccggguacggacaaggaccaaaucuuccuguaugcucgaucaucaggaagaaucacaguaucuaccaaaagaagccaacaagcuguaaucccaaauaucggaucuagacccagaauaagggauaucccuagcagaauaagcaucuauuggacaauaguaaaaccgggagacauacuuuugauuaacagcacagggaaucuaauugcuccuagggguuacuucaaaauacgaagugggaaaagcucaauaaugagaucagaugcacccauuggcaaaugcaagucugaaugcaucacuccaaauggaagcauucccaaugacaaaccauuccaaaauguaaacaggaucacauacggggccugucccagauauguuaagcauagcacucugaaauuggcaacaggaaugcgaaauguaccagagaaacaaacuagaggcauauuuggcgcaauagcggguuucauagaaaaugguugggagggaaugguggaugguugguacgguuucaggcaucaaaauucugaggggagaggacaagcagcagaucucaaaagcacucaagcagcaaucgaucaaaucaaugggaagcugaaucgauugaucgggaaaaccaacgagaaauuccaucagauugaaaaagaauucucagaaguagaaggaagaauucaggaccuugagaaauauguugaggacacuaaaauagaucucuggucauacaacgcggagcuucuuguugcccuggagaaucaacauacaauugaucuaacugacucagaaaugaacaaacuguuugaaaaaacaaagaagcaacugagggaaaaugcugaggauaugggaaaugguuguuucaaaauauaccacaaaugugacaaugccugcauaggaucaauaagaaauggaacuuaugaccacaauguguacagggaugaagcauuaaacaaccgguuccagaucaagggaguugagcugaagucaggguacaaagauuggauccuauggauuuccuuugccauaucauguuuuuugcuuuguguugcuuuguugggguucaucaugugggccugccaaaagggcaacauuaggugcaacauuugcauuuga

SEQ ID NO: 45471 - RNA, 1701 nt, Artificial Sequence
  derived and/or modified CDS sequence (wt) from hemagglutinin__InfluenzaA__ALE31960
augaagacuaucauugcuuugagcuacauucuaugucugguuuucgcucaaaaaauuccuggaaaugacaauagcacggcaacgcugugccuugggcaccaugcaguaccaaacggaacgauagugaaaacaaucacaaaugaccgaauugaaguuacuaaugcuacugagcuaguucagaauuccucaauaggugaaauaugcgacaguccucaucagauccuugauggagaaaacugcacacuaauagaugcucuauugggagacccucagugugauggcuuucaaaauaagaaaugggaccuuuuuguugaacgaagcaaagccuacagcaacuguuacccuuaugaugugccggauuaugccucccuuaggucacuaguugccucauccggcacacuggaguuuaacaaugaaagcuucaauuggacuggagucacucaaaacggaacaaguucugcuugcauaaggagaucuaguaguaguuucuuuaguagauuaaauugguugacccacuuaaacuacacauacccagcauugaacgugacuaugccaaacaaugaacaauuugacaaauuguacauuugggggguucaccacccggguacggacaaggaccaaaucuuccuguaugcucaaucaucaggaagaaucacaguaucuaccaaaagaagccaacaagcuguaaucccaaauaucggaucuagacccagaauaagggauaucccuagcagaauaagcaucuauuggacaauaguaaaaccgggagacauacuuuugauuaacagcacagggaaucuaauugcuccuagggguuacuucaaaauacgaagugggaaaagcucaauaaugagaucagaugcacccauuggcaaaugcaagucugaaugcaucacuccaaauggaagcauucccaaugacaaaccauuccaaaauguaaacaggaucacauacggggccugucccagauauguuaagcauagcacucugaaauuggcaacaggaaugcgaaauguaccagagaaacaaacuagaggcauauuuggcgcaauagcggguuucauagaaaaugguugggagggaaugguggaugguugguacgguuucaggcaucaaaauucugagggaagaggacaagcagcagaucucaaaagcacucaagcagcaauugaucaaaucaaugggaagcugaaucgauugaucgggaaaaccaacgagaaauuccaucagauugaaaaagaauucucagaaguagaaggaagaauucaggaccuugagaaauauguugaggacacuaaaauagaucucuggucauacaacgcggagcuucuuguugcccuggagaaccaacauacaauugaucuaacugacucagaaaugaacaaacuguuugaaaaaacaaagaagcaacugagggaaaaugcugaggauaugggaaaugguuguuucaaaauauaccacaaaugugacaaugccugcauaggaucaauaagaaauggaacuuaugaccacaauguguacagggaugaagcauuaaacaaccgguuccagaucaagggaguugagcugaagucaggguacaaagauuggauccuauggauuuccuuugccauaucauguuuuuugcucuguguugcuuuguugggguucaucaugugggccugccaaaagggcaacauuaggugcaacauuugcauuuga

SEQ ID NO: 45472 - RNA, 1701 nt, Artificial Sequence
  derived and/or modified CDS sequence (wt) from hemagglutinin__InfluenzaA__ALE31961
augaagacuaucauugcuuugagcuacauucuaugucugguuuucgcucaaaaacuuccuggaaaugacaauagcacggcaacgcugugccuugggcaccaugcaguaccaaauggaacgauagugaaaacaaucacgaaugaccgaauugaaguuacuaaugcuacugagcugguucagaauuccucaauaggugaaauaugcgacaguccucaucagauccuugauggagaaaacugcacacuaauagaugcucuauugggagacccucauugugauggcuuucaaaauaagaaaugggaccuuuuuguugaacggagcaaagccuacagcaacuguuacccuuaugaugugccggauuaugccucccuuaggucacuaguugccucauccggcacacuggaguuuaacaaugaaagcuucaauugggcuggagucacucaaaacggaacaaguucugcuugcauaaggggaucuaauaguaguuucuuuaguagauuaaauugguugacccacuuaaacuucaaauacccagcauugaacgugacuaugccaaacaaugaacaauuugacaaauuguacauuuggggaguucaccacccggguacggacaaggaccaaaucuuccuguaugcucaaucgucaggaagaaucacaguaucuaccaaaagaagccaacaagcuguaaucccgaauaucggaucuagacccagaauaaggaauaucccuagcagaauaagcaucuauuggacaauaguaaaaccgggagacauacuuuugauuaacagcacaggaaaccuaauugcuccuagggguuacuucaaaauacgaagugggaaaagcucaauaaugagaucagaugcacccauuggcaaaugcaagucagaaugcaucacuccaaauggaagcauucccaaugacaaaccauuccaaaauguaaacaggaucacauacggggccugucccagauauguuaaacaaagcacucugaaauuggcaacaggaaugcgaaacguaccagagaaacaaacuagaggcauauuuggcgcaauagcggguuucauagaaaaugguugggagggaaugguggaugguugguacgguuucaggcaucaaaauucugagggaagaggacaagcagcagaucucaaaagcacucaagcagcaaucgaucaaaucaaugggaagcugaaucgauugaucgggaaaaccaacgagaaauuccaucagauugaaaaagaauucucagaaguagaagggagaauucaggaccuugagaaauauguugaggacacaaaaauagaucucuggucauacaacgcggagcuucuuguugcccuggagaaccaacauacaauugaucuaacugacucagaaaugaacaaacuguuugaaaaaacaaagaaacaacugagggaaaaugcugaggauaugggcaaugguuguuucaaaauauaccacaaaugugacaaugccugcauaggaucaaucagaaauggaacuuaugaccacgauguguacagggaugaagcauuaaacaaccgauuccagaucaagggaguugagcugaagucaggguacaaagauuggaucuuauggauuuccuuugccauaucauguuuuuugcuuuguguugcuuuguugggguucaucaugugggccugccaaaagggcaacauuaggugcaacauuugcauuuga

SEQ ID NO: 45473 - RNA, 1701 nt, Artificial Sequence
  derived and/or modified CDS sequence (wt) from hemagglutinin__InfluenzaA__ALE31962
augaagacuaucauugcuuugagcuacauucuaugucugguuuucgcucaaaaaauuccuggaaaugacaauagcacggcaacgcugugccuugggcaccaugcaguaccaaacggaacgauagugaaaacaaucacaaaugaccgaauugaaguuacuaaugcuacugagcugguucagaauuccucaauaggugaaauaugcgacaguccucaucagauccuugauggagaaaacugcacacuaauagaugcucuauugggagacccucagugugauggcuuucaaaauaagaaaugggaccuuuuuguugaacgaagcaaagccuacagcaacuguuacccuuaugaugugccggauuaugccucccuuaggucacuaguugccucauccggcacacuggaguuuaacaaugaaagcuucaauuggacuggagucacucaaaacggaacaaguucugcuugcauaaggagaucuaguaguaguuucuuuaguagauuaaauugguugacccacuuaaacuacacauacccagcauugaacgugacuaugccaaacaaugagcaauuugacaaauuguacauuugggggguucaccacccggguacggacaaggaccaaaucuuccuguaugcucaaucaucaggaagaauaacaguaucuaccaaaagaagccaacaagcuguaaucccaaauaucggaucuagacccagaauaagggauaucccuagcagaaugagcaucuauuggacaauaguaaaaccgggagacauacuuuugauuaacagcacagggaaucuaauugcuccuagggguuacuucaaaauacgaagugggaaaagcucaauaaugagaucagaugcacccauuggcaaaugcaagucugagugcaucacuccaaauggaagcauucccaaugacaaaccauuccaaaauguaaacaggaucacauacggggccugucccagauauguuaagcauagcacucugaaauuggcaacaggaaugcgaaauguaccagagaaacaaacuagaggcauauuuggcgcaauagcggguuucauagaaaaugguugggagggaaugguggaugguugguacgguuucaggcaucaaaauucugagggaagaggacaagcagcagaucucaaaagcacucaagcagcaaucgaucaaaucaaugggaagcugaaucgauugaucgggaaaaccaacgagaaauuccaucagauugaaaaagaauucucagaaguagaaggaagaauucaggaccuugagaaauauguugaggacacuaaaauagaucucuggucauacaacgcggagcuucuuguugcccuggagaaccaacauacaauugaucuaacugacucagaaaugaacaaacuauuugaaaaaacaaagaagcaacugagggaaaaugcugaggauaugggaaaugguuguuucaaaauauaccacaaaugugacaaugccugcauaggaucaauaagaaauggaacuuaugaccacaauguguacagggaugaagcauuaaacaaccgguuccagaucaagggaguugagcugaagucaggguacaaagauuggauccuauggauuuccuuugccauaucauguuuuuugcuuuguguugcuuuguugggguucaucaugugggccugccaaaagggcaacauuaggugcaacauuugcauuuga

SEQ ID NO: 45474 - RNA, 1701 nt, Artificial Sequence
  derived and/or modified CDS sequence (wt) from hemagglutinin__InfluenzaA__ALE31963
augaagacuaucauugccuugagcuacauucuaugucugguuuucgcucaaaaaauuccuggaaaugacaauagcacggcaacgcugugccuugggcaccaugcaguaccaaacggaacgauagugaaaacaaucacaaaugaccgaauugaaguuacuaaugcuacugagcugguucagaauuccucaauaggugaaauaugcgacaguccucaucagauccuugauggagaaaacugcacacuaauagaugcucuauugggagacccucagugugauggcuuucaaaauaagaaaugggaccuuuuuguugaacgaagcaaagccuacagcaacuguuacccuuaugaugugccggauuaugccucccuuaggucacuaguugccucauccggcacacuggaguuuaacaaugaaagcuucaauuggacuggagucacucaaaacggaacaaguucugcuugcauaaggagaucuaguaguaguuucuuuaguagauuaaauugguugacccacuuaaacuacacauauccagcauugaacgugacuaugccaaacaaugaacaauuugacaaauuguacauuugggggguucaccacccggguacggacaaggaccaaaccuuccuguaugcucaaucaucaggaagaaucacaguaucuaccaaaagaagccaacaagcuguaaucccaaauaucggaucuagacccagaauaagggauaucccuagcagaauaagcaucuauuggacaauaguaaaaccgggagacauacuuuugauuaacagcacagggaaucuaauugcuccuagggguuacuucaaaauacgaagugggaaaagcucaauaaugagaucagaugcacccauuggcaaaugcaagucugaaugcaucacuccaaauggaagcauucccaaugacaaaccauuccaaaauguaaacaggaucacauacggggccugucccagauauguuaagcauagcacucugaaauuggcaacaggaaugcgaaauguaccagagaaacaaacuagaggcauauuuggcgcaauagcggguuucauagaaaaugguugggagggaaugguggaugguugguacgguuucaggcaucaaaauucugagggaagaggacaagcagcagaucucaaaagcacucaagcagcaaucgaucaaaucaaugggaagcugaaucgauugaucgggaaaaccaacgagaaauuccaucagauugaaaaagaauucucagaaguagaaggaagaauucaggaccuugagaaauauguugaggacacuaaaauagaucucuggucauacaacgcggagcuucuuguugcccuggagaaccaacauacaauugaucuaacugacucagaaaugaacaaacuguuugaaaaaacaaagaagcaacugagggaaaaugcugaggauaugggaaaugguuguuucaaaauauaccacaaaugugacaaugccugcauaggaucaauaagaaauggaacuuauaaccacaauguguacagggaugaagcauuaaacaaccgguuccagaucaagggaguugagcugaagucaggguacaaagauuggauccuauggauuuccuuugccauaucauguuuuuugcuuuguguugcuuuguugggguucaucaugugggccugccaaaagggcaacauuagaugcaacauuugcauuuga

SEQ ID NO: 45475 - RNA, 1701 nt, Artificial Sequence
  derived and/or modified CDS sequence (wt) from hemagglutinin__InfluenzaA__ALE31964
augaagacuaucauugcuuugagcuacauucuaugucugguuuucgcucaaaaaauuccuggaaaugacaauagcacggcaacgcugugccuugggcaucaugcaguaccaaacggaacgauagugaaaacaaucacaaacgaccgaauugaaguuacuaaugcuacugaguugguucagaauuccucaauaggugaaauaugcgacaguccucaucagauccuugauggagaaaacugcacacuaauagaugcucuauugggagacccucagugugauggcuuucaaaauaagaaaugggaccuuuuuguugaacgaagcaaagccuacagcaacuguuacccuuauuaugugccggauuaugccucccuuaggucacuaguugccucauccggcacacuggaguuuaacaaugaaagcuucaauuggacuggagucacucaaaacggaacaaguucugcuugcauaaggagaucuaguaguaguuucuuuaguagauuaaauugguugacccacuuaaacuacacauacccagcauugaacgugacuaugccaaacaaugaacaauuugacaaauuguacauuugggggguucaccacccggguacggacaaggaccaaaucuuccuguaugcucaaucaucaggaagaaucacaguaucuaccaaaagaagccaacaagcuguaaucccaaauaucggaucuagacccagaauaagggauaucccuagcagaauaagcaucuauuggacaauaguaaaaccgggagacauacuuuugauuaacagcacagggaaucuaauugcuccuagggguuacuucaaaauacaaagugggaaaagcucaauaaugagaucagaugcacccauuggcaaaugcaagucugaaugcaucacuccaaauggaagcauucccaaugacaaaccauuccaaaauguaaacaggaucacauacggggccugucccagauauguuaagcauagcacucugaaauuggcaacaggaaugcgaaauguaccagagaaacaaacuagaggcauauuuggcgcaauagcggguuucauagaaaaugguugggagggaaugguggaugguugguacgguuucaggcaucaaaauucugagggaagaggacaagcagcagaucucaaaagcacucaagcagcaaucgaucaaaucaaugggaagcugaaucgguugaucgggaaaaccaacgagaaauuccaucagauugaaaaagaauucucagaaguagaaggaagaauucaggaccuugagaaauauguugaggacacuaaaauagaucucuggucauacaacgcggagcuucuuguugcccuggagaaccaacauacaauugaucuaacugacucagaaaugaacaaacuguuugaaaaaacaaagaagcaacugagggaaaaugcugaggauaugggaaaugguuguuucaaaauauaccacaaaugugacaaugccugcauaggaucaauaagaaauggaacuuaugaccacaauguguacagggaugaagcauuaaacaaccgguuccagaucaagggaguugagcugaagucaggguacaaagauuggauccuauggauuuccuuugccauaucauguuuuuugcuuuguguugcuuuguugggguucaucaugugggccugccaaaagggcaacauuaggugcaacauuugcauuuga

SEQ ID NO: 45476 - RNA, 1701 nt, Artificial Sequence
  derived and/or modified CDS sequence (wt) from hemagglutinin__InfluenzaA__ALE31965
augaagacuaucauugccuugagcuacauucuaugucugguuuucgcucaaaaaauuccuggaaaugacaauagcacggcaacgcugugccuugggcaccaugcaguaccaaacggaacgauagugaaaacaaucacaaaugaccgaauugaaguuacuaaugcuacugagcugguucagaauuccucaauaggugaaauaugcgacaguccucaucagauccuugauggagaaaacugcacacuaauagaugcucuauugggagacccucagugugauggcuuucaaaauaagaaaugggaccuuuuuguugaacgaaguaaagccuacagcaacuguuacccuuaugaugugccggauuaugccucccuuaggucacuaguugccucauccggcacacuggaguuuaacaaugaaagcuucaauuggacuggagucacucaaaacggaacaaguucugcuugcauaaggagaucuaguaguaguuucuuuaguagauuaaauugguugacccacuuaaacuacacauacccagcauugaacgugacuaugccaaacaaugaacaauuugacaaauuguacauuugggggguucaccacccggguacggacaaggaccaaaucuuccuguaugcucaaucaucaggaagaaucacaguaucuaccaaaagaagccaacaagcuguaaucccaaauaucggaucuagacccagaauaagggauaucccuagcagaauaagcaucuauuggacaauaguaaaaccgggagacauacuuuugauuaacagcacagggaaucuaauugcuccuagggguuacuucaaaauacgaagugggaaaagcucaauaaugagaucagaugcacccauuggcaaaugcaagucugaaugcaucacuccaaauggaagcauucccaaugacaaaccauuccaaaauguaaacaggaucacauacggggccugucccagauauguuaagcauagcacucugaaauuggcaacaggaaugcgaaauguaccagagaaacaaacuagaggcauauuuggcgcaauagcggguuucauagaaaaugguugggagggaaugguggaugguugguacgguuucaggcaucaaaauucugagggaagaggacaagcagcagaucucaaaagcacucaagcagcaaucgaucaaaucaaugggaagcugaaucgauugaucgggaaaaccaacgagaaauuccaucagauugaaaaagaauucucagaaguagaaggaagaauucaggaccuugagaaauauguugaggacacuaaaauagaucucuggucauacaacgcggagcuucuuguugcccuggagaaccaacauacaauugaucuaacugacucagaaaugaacaaacuguuugaaaaaacaaagaagcaacugagggaaaaugcugaggauaugggaaaugguuguuucaaaauauaccacaaaugugacaaugccugcauaggaucaauaagaaauggaacuuaugaccacaauguguacagggaugaagcauuaaacaaccgguuccagaucaagggaguugagcugaagucaggguacaaagauuggauccuauggauuuccuuugccauaucauguuuuuugcuuuguguugcuuuguugggguucaucaugugggccugccaaaagggcaacauuaggugcaacauuugcauuuga

SEQ ID NO: 45477 - RNA, 1701 nt, Artificial Sequence; identical to SEQ ID NO: 45305
  derived and/or modified CDS sequence (wt) from hemagglutinin__InfluenzaA__ALE31966

SEQ ID NO: 45478 - RNA, 1701 nt, Artificial Sequence
  derived and/or modified CDS sequence (wt) from hemagglutinin__InfluenzaA__ALE31967
augaagacuaucauugccuugagcuacauucuaugucugguuuucgcucaaaaaauuccuggaaaugacaauagcacggcaacgcugugccuugggcaccaugcaguaccaaacggaacgauagugaaaacaaucacaaaugaccgaauugaaguuacuaaugcuacugagcugguucagaauuccucaauaggugaaauaugcgacaguccucaucagauccuugauggagaaaacugcacacuaauagaugcucuauugggagacccucagugugauggcuuucaaaauaagaaaugggaccucuuuguugaacgaagcaaagccuacagcaacuguuacccuuaugaugugccggauuaugccucccuuaggucacuaguugccucauccggcacacuggaguuuaacaaugaaagcuucaauuggacuggagucacucaaaacggaacaaguucugcuugcauaaggagaucuaguaguaguuucuuuaguagauuaaauugguugacccacuuaaaauacacauacccagcauugaacgugacuaugccaaacaaugaacaauuugacaaauuguacauuugggggguucaccacccggguacggacaaggaccaaaucuuccuguaugcucaaucaucaggaagaaucacaguaucuaccaaaagaagccaacaagcuguaaucccaaauaucggaucuagacccagaauaagggauaucccuagcagaauaagcaucuauuggacaauaguaaaaccgggagacauacuuuugauuaacagcacagggaaucuaauugcuccuagggguuacuucaaaauacgaagugggaaaagcucaauaaugagaucagaugcacccauuggcaaaugcaagucugaaugcaucacuccaaauggaagcauucccaaugacaaaccauuccaaaauguaaacaggaucacauacggggccugucccagauauguuaagcauagcacucugaaauuggcaacaggaaugcgaaauguaccagagaaacaaacuagaggcauauuuggcgcaauagcggguuucauagaaaaugguugggagggaaugguggaugguugguacgguuucaggcaucaaaauucugagggaagaggacaagcagcagaucucaaaagcacucaagcagcaaucgaucaaaucaaugggaagcugaaucgauugaucgggaaaaccaacgagaaauuccaucagauugaaaaagaauucucagaaguagaaggaagaauucaggaccuugagaaauauguugaggacacuaaaauagaucucuggucauacaacgcggagcuucuuguugcccuggagaaccaacauacaauugaucuaacugacucagaaaugaacaaacuguuugaaaaaacaaagaagcaacugagggaaaaugcugaggauaugggaaaugguuguuucaaaauauaccacaaaugugacaaugccugcauaggaucaauaagaaauggaacuuaugaccacaauguguacagggaugaagcauuaaacaaccgguuccagaucaagggaguugagcugaagucaggguacaaagauuggauccuauggauuuccuuugccauaucauguuuuuugcuuuguguugcuuuguugggguucaucaugugggccugccaaaagggcaacauuaggugcaacauuugcauuuga

SEQ ID NO: 45479 - RNA, 1701 nt, Artificial Sequence; identical to SEQ ID NO: 45294
  derived and/or modified CDS sequence (wt) from hemagglutinin__InfluenzaA__ALE31968

SEQ ID NO: 45480 - RNA, 1701 nt, Artificial Sequence
  derived and/or modified CDS sequence (wt) from hemagglutinin__InfluenzaA__ALE31969
augaagacuaucauugcuuugagcuacauucuaugucugguuuucgcucaaaaaauuccuggaaaugacaauagcacggcaacgcugugccuugggcaccaugcaguaccaaacggaacgauagugaaaacaaucacaaaugaccggauugaaguuacuaaugcuacugagcugguucagaauuccucaauaggugaaauaugcgacaguccucaucagauccuugauggagaaaacugcacacuaauagaugcucuauugggagacccucagugugauggcuuucaaaauaagaaaugggaccuuuuuguugaacgaagcaaagccuacagcaacuguuacccuuaugaugugccggauuaugccucccuuaggucacuaguugccucauccggcacacuggaguuuaacaaugaaagcuucaauuggacuggagucacucaaaacggaacaaguucugcuugcauaaggagaucuaguaguaguuucuuuaguagauuaaauugguugacccacuuaaacuacaaauacccagcauugaacgugacuaugccaaacaaugaacaauuugacaaauuguacauuugggggguucaccacccggguacggacaaggaccaaaucuuccuguaugcucaaucaucaggaagaaucacaguaucuaccaaaagaagccaacaagcuguaaucccaaauaucggaucuagacccagaauaagggauaucccuagcagaauaagcaucuauuggacaauaguaaaaccgggggacauacuuuugauuaacagcacagggaaucuaauugcuccuagggguuacuucaaaauacgaagugggaaaagcucaauaaugagaucagaugcacccauuggcaaaugcaagucugaaugcaucacuccaaauggaagcauucccaaugacaaaccauuccaaaauguaaacaggaucacauacggggccugucccagauauguuaagcauagcacucugaaauuggcaacaggaaugcgaaauguaccagagaaacaaacuagaggcauauuuggcgcaauagcggguuucauagaaaaugguugggagggaaugguggaugguugguacgguuucaggcaucaaaauucugagggaagaggacaagcagcagaucucaaaagcacucaagcagcaaucgaucaaaucaaugggaagcugaaucgauugaucgggaaaaccaacgagaaauuccaucagauugaaaaagaauucucagaaguagaaggaagaauucaggaccuugagaaauauguugaggacacuaaaauagaucucuggucauacaacgcggaacuucuuguugcccuggagaaccaacauacaauugaucuaacugacucagaaaugaacaaacuguuugaaaaaacaaagaagcaacugagggaaaaugcugaggauaugggaaaugguuguuucaaaauauaccacaaaugugacaaugccugcauaggaucaauaagaaauggaacuuaugaccacaauguguacagggaugaagcauuaaacaaccgguuccagaucaaaggaguugagcugaagucaggguacaaagauuggauccuauggauuuccuuugccauaucauguuuuuugcuuuguguugcuuuguugggguucaucaugugggccugccaaaagggcaacauuaggugcaacauuugcauuuga

SEQ ID NO: 45481 - RNA, 1701 nt, Artificial Sequence; identical to SEQ ID NO: 45414
  derived and/or modified CDS sequence (wt) from hemagglutinin__InfluenzaA__ALE31970

SEQ ID NO: 45482 - RNA, 1701 nt, Artificial Sequence
  derived and/or modified CDS sequence (wt) from hemagglutinin__InfluenzaA__ALE31971
augaagacuaucauugccuugagcuacauucuaugucugguuuucgcucaaaaaauuccuggaaaugacaauagcacggcaacgcugugccuugggcaccaugcaguaccaaacggaacgauagugaaaacaaucacaaaugaccgaauugaaguuacuaaugcuacugagcugguucagaauuccucaauaggugaaauaugcgacaguccucaucagauccuugauggagaaaacugcacacuaauagaugcucuauugggagacccucagugugauggcuuucaaaauaagaaaugggaccuuuuuguugaacgaagcaaagccuacagcaacuguuacccuuaugaugugccggauuaugccucccuuaggucacuaguugccucauccggcacacuggaguuuaacaaugaaagcuucaauuggacuggagucacucaaaacggaacaaguucugcuugcauaaggagaucuaguaguaguuucuuuaguagauuaaauugguugacccacuuaaacuacgcauacccagcauugaacgugacuaugccaaacaaugaacaauuugacaaauuguacauuugggggguucaccacccggguacggacaaggaccaaaucuuccuguaugcucaaucaucaggaagaaucacaguaucuaccaaaggaagccaacaagcuguaaucccaaauaucggaucuagacccagaauaagggauaucccuagcagaauaagcaucuauuggacaauaguaaaaccgggagacauacuuuugauuaacagcacagggaaucuaauugcuccuagggguuacuucaaaauacgaagugggaaaagcucaauaaugagaucagaugcacccauuggcaaaugcaagucugaaugcaucacuccaaauggaagcauucccaaugacaaaccauuccaaaauguaaacaggaucacauacggggccugucccagauauguuaagcauagcacucugaaauuggcaacaggaaugcgaaauguaccagagaaacaaacuagaggcauauuuggcgcaauagcggguuucauagaaaaugguugggagggaaugguggaugguugguacgguuucaggcaucaaaauucugaaggaagaggacaagcagcagaucucaaaagcacucaagcagcaaucgaucaaaucaaugggaagcugaaucgauugaucgggaaaaccaacgagaaauuccaucagauugaaaaagaauucucagaaguagaaggaagaauucaggaccuugagaaauauguugaggacacuaaaauagaucucuggucauacaacgcggagcuucuuguugcccuggagaaccaacauacaauugaucuaacugacucagaaaugaacaaacuguuugaaaaaacaaagaagcaacugagggaaaaugcugaggauaugggaaaugguuguuucaaaauauaccacaaaugugacaaugccugcauaggaucaauaagaaauggaacuuaugaccacaauguguacagggaugaagcauuaaacaaccgguuccagaucaagggaguugagcugaagucaggguacaaagauuggauccuauggauuuccuuugccauaucauguuuuuugcuuuguguugcuuuguugggguucaucaugugggccugccaaaagggcaacauuaggugcaacauuugcauuuga

SEQ ID NO: 45483 - RNA, 1701 nt, Artificial Sequence; identical to SEQ ID NO: 45294
  derived and/or modified CDS sequence (wt) from hemagglutinin__InfluenzaA__ALE31972

SEQ ID NO: 45484 - RNA, 1701 nt, Artificial Sequence
  derived and/or modified CDS sequence (wt) from hemagglutinin__InfluenzaA__ALE31973
augaagacuaucauugccuugagcuacauucuaugucugguuuucgcucaaaaaauuccuggaaaugacaauagcacggcaacgcugugccuugggcaccaugcaguaccaaacggaacgauugugaaaacaaucacaaaugaccgaauugaaguuacuaaugcuacugagcugguucagaauuccucaauaggugaaauaugcgacaguccucaucagauccuugauggagaaaacugcacacuaauagaugcucuauugggagacccucagugugauggcuuucaaaauaagaaaugggaccuuuuuguugaacgaagcaaagccuacagcaacuguuacccuuaugaugugccggauuaugccucccuuaggucacuaguugccucauccggcacacuggaguuuaacaaugaaagcuucaauuggacuggagucacucaaaacggaacaaguucugcuugcauaaggagaucuaguaguaguuucuuuaguagauuaaauugguugacccacuuaaacuacacauacccagcauugaacgugacuaugccaaacaaugaacaauuugacaaauuguacauuugggggguucaccacccggguacggacaaggaccaaaucuuccuguaugcucaaucaucaggaagaaucacaguaucuaccaaaggaagccaacaagcuguaaucccaaauaucggaucuagacccagaauaagggauaucccuagcagaauaagcaucuauuggacaauaguaaaaccgggagacauacuuuugauuaacagcacagggaaucuaauugcuccuagggguuacuucaaaauacgaagugggaaaagcucaauaaugagaucagaugcacccauuggcaaaugcaagucugaaugcaucacuccaaauggaagcauucccaaugacaaaccauuccaaaauguaaacaggaucacauacggggccugucccagauauguuaagcauagcacucugaaauuggcaacaggaaugcgaaauguaccagagaaacaaacuagaggcauauuuggcgcaauagcggguuucauagaaaaugguugggagggaaugguggaugguugguacgguuucaggcaucaaaauucugaaggaagaggacaagcagcagaucucaaaagcacucaagcagcaaucgaucaaaucaaugggaagcugaaucgauugaucgggaaaaccaacgagaaauuccaucagauugaaaaagaauucucagaaguagaaggaagaauucaggaccuugagaaauauguugaggacacuaaaauagaucucuggucauacaacgcggagcuucuuguugcccuggagaaccaacauacaauugaucuaacugacucagaaaugaacaaacuguuugaaaaaacaaagaagcaacugagggaaaaugcugaggauaugggaaaugguuguuucaaaauauaccacaaaugugacaaugccugcauaggaucaauaagaaauggaacuuaugaccacaauguguacagggaugaagcauuaaacaaccgguuccagaucaagggaguugagcugaagucaggguacaaagauuggauccuauggauuuccuuugccauaucauguuuuuugcuuuguguugcuuuguugggguucaucaugugggccugccaaaagggcaacauuaggugcaacauuugcauuuga

SEQ ID NO: 45485 - RNA, 1701 nt, Artificial Sequence; identical to SEQ ID NO: 45472
  derived and/or modified CDS sequence (wt) from hemagglutinin__InfluenzaA__ALE31974

SEQ ID NO: 45486 - RNA, 1701 nt, Artificial Sequence; identical to SEQ ID NO: 45291
  derived and/or modified CDS sequence (wt) from hemagglutinin__InfluenzaA__ALE31975

SEQ ID NO: 45487 - RNA, 1701 nt, Artificial Sequence
  derived and/or modified CDS sequence (wt) from hemagglutinin__InfluenzaA__ALE31976
augaagacuaucauugccuugagcuacauucuaugucugguuuucgcucaaaaaauuccuggaaaugacaauagcacggcaacgcugugccuugggcaccaugcaguaccaaacggaacgauagugaaaacaaucacaaaugaccgaauugaaguuacuaaugcuacugagcugguucagaauuccucaauaggugaaauaugcgacaguccucaucagauccuugauggagaaaacugcacacuaauagaugcucuauugggagacccucagugugauggcuuucaaaauaagaaaugggaccuuuuuguugaacgaagcaaagccuacagcaacuguuacccuuaugaugugccggauuaugccucccuuaggucacuaguugccucauccggcacacuggaguuuaacaaugaaagcuucaauuggacuggagucacucaaaacggaacaaguucugcuugcauaaggagaucuaguaguaguuucuuuaguagauuaaauugguugacccacuuaaacuacacauacccagcauugaacgugacuaugccaaacaaugaacaauuugacaaauuguacauuugggggguucaccacccggguacggacaaggaccaaaucuuccuguaugcucaaucaucaggaagaaucacaguaucuaccaaaagaagccaacaagcuguaaucccaaauaucggaucuagacccagaauaagggauaucccuagcagaauaagcaucuauuggacaauaguaaaaccgggagacauacuuuugauuaacagcacagggaaucuaauugcuccuagggguuacuucaaaauacgaagugggaaaagcucaauaaugagaucagaugcacccauuggcaaaugcaagucugaaugcaucacuccaaauggaagcauucccaaugacaaaccauuccaaaauguaaacaggaucacauacggggccugucccagauauguuaagcauagcacucugaaauuggcaacaggaaugcgaaauguaccagagaaacaaacuagaggcauauuuggcgcaauagcggguuucauagaaaaugguugggagggaaugguggaugguugguacgguuucaggcaucaaaauucugagggaagaggacaagcagcagaucucaaaagcacucaagcagcaaucgaucaaaucaaugggaagcugaaucgauugaucgggaaaaccaacgagaaauuccaucagauugaaaaagaauucucagaaguagaaggaagaauucaggaccuugagaaauauguugaggacacuaaaauagaucucuggucauacaacgcggagcuucuuguugcccuggagaaccaacauacaauugaucuaacugacucagaaaugaacaaacuguuugaaaaaacaaagaagcaacugagggaaaaugcugaggauaugggaaaugguuguuucaaaauauaccacaaaugugacaaugccugcauaggaucaauaagaaauggaacuuaugaccacaauguguacagggaugaagcauuaaacaaccgguuccagaucaagggaguugagcugaagucaggguacaaagauuggauccuauggauuuccuuugccauaucauguuuuuugcuuuguguugcuuuguugggguucaucaugugggccugccaaaagggcaacauuaggugcaacauuugcauuuaa

SEQ ID NO: 45488 - RNA, 1701 nt, Artificial Sequence; identical to SEQ ID NO: 45006
  derived and/or modified CDS sequence (wt) from hemagglutinin__InfluenzaA__ALE31977

SEQ ID NO: 45489 - RNA, 1701 nt, Artificial Sequence
  derived and/or modified CDS sequence (wt) from hemagglutinin__InfluenzaA__ALE31978
augaagacuaucauugcuuugagcuacauucuaugucugguuuucgcucaaaaaauuccuggaaaugacaauagcacggcaacgcugugccuugggcaccaugcaguaccaaacggaacgauagugaaaacaaucacaaaugaccgaauugaaguuacuaaugcuacugagcugguucagaauuccucaauaggugaaauaugcgacaguccucaucagauccuugauggagaaaacugcacacuaauagaugcucuauugggagacccucagugugauggcuuucaaaauaagaaaugggaccuuuuuguugaacgaagcaaagccuacagcaacuguuacccuuaugaugugccggauuaugccucccuuaggucacuaguugccucauccggcacacuggaguuuaacaaugaaagcuucaauuggacuggagucacucaaaacggaacaaguucugcuugcauaaggaaaucuaguaguaguuucuuuaguagauuaaauugguugacccacuuaaacuacacauacccagcauugaacgugacuaugccaaacaaugaacaauuugacaaauuguacauuugggggguucaccacccggguacggacaaggaccaaaucuuccuguaugcucgaucaucaggaagaaucacaguaucuaccaaaagaagccaacaagcuguaaucccaaauaucggaucuagacccagaauaagggauaucccuagcagaauaagcaucuauuggacaauaguaaaaccgggagacauacuuuugauucacagcacagggaaucuaauugcuccuagggguuacuucaaaauacgaagugggaaaagcucaauaaugagaucagaugcacccauuggcaaaugcaagucugaaugcaucacuccaaauggaagcauucccaaugacaaaccauuccaaaauguaaacaggaucacauacggggccugucccagauauguuaagcauagcacucugaaauuggcaacaggaaugcgaaauguaccagagaaacaaacuagaggcauauuuggcgcaauagcggguuucauagaaaaugguugggagggaaugguggaugguugguacgguuucaggcaucaaaauucugaggggagaggacaagcagcagaucucaaaagcacucaagcagcaaucgaucaaaucaaugggaagcugaaucgauugaucgggaaaaccaacgagaaauuccaucagauugaaaaagaauucucagaaguagaaggaagaauucaggaccuugagaaauauguugaggacacuaaaauagaucucuggucauacaacgcggagcuucuuguugcccuggagaaucaacauacaauugaucuaacugacucagaaaugaacaaacuguuugaaaaaacaaagaagcaacugagggaaaaugcugaggauaugggaaaugguuguuucaaaauauaccacaaaugugacaaugccugcauaggaucaauaagaaauggaacuuaugaccacaauguguacagggaugaagcauuaaacaaccgguuccagaucaagggaguugagcugaagucaggguacaaagauuggauccuauggauuuccuuugccauaucauguuuuuugcuuuguguugcuuuguugggguucaucaugugggccugccaaaagggcaacauuaggugcaacauuugcauuuga

SEQ ID NO: 45490 - RNA, 1701 nt, Artificial Sequence; identical to SEQ ID NO: 45175
  derived and/or modified CDS sequence (wt) from hemagglutinin__InfluenzaA__ALE31979

SEQ ID NO: 45491 - RNA, 1701 nt, Artificial Sequence
  derived and/or modified CDS sequence (wt) from hemagglutinin__InfluenzaA__ALE31980
augaagacuaucauugcuuugagcuacauucuaugucugguuuucgcucaaaaaauuccuggaaaugacaauagcacggcaacgcugugccuugggcaccaugcaguaccaaacggaacgauagugaaaacaaucacaaaugaccgaauugaaguuacuaaugcuacugaguugguucagaauuccucaauaggugaaauaugcgacaguccucaucagauccuugauggagaaaacugcacacuaauagaugcucuauugggagacccucagugugauggcuuucaaaauaagaaaugggaccuuuuuguugaacgaagcaaagccuacagcaacuguuacccuuaugaugugccggauuaugccucccuuaggucacuaguugccucauccggcacacuggaguuuaacaaugaaagcuucaauuggacuggagucacucaaaacggaacaaguucugcuugcauaaggagaucuaguaguaguuucuuuaguagauuaaauugguugacccacuuaaacuacacauacccagcauugaacgugacuaugccaaacaaugaacaauuugacaaauuguacauuugggggguucaccacccggguacggacaaggaccaaaucuuccuguaugcucaaucaucaggaagaaucacaguaucuaccaaaagaagccaacaagcuguaaucccaaauaucggaucuagacccagaauaagggauaucccuagcagaauaagcaucuauuggacaauaguaaaaccgggagacauacuuuugauuaacagcacagggaaucuaauugcuccuagggguuacuucaaaauacgaagugggaaaagcucaauaaugagaucagaugcacccauuggcaaaugcaagucugaaugcaucacuccaaauggaagcauucccaaugacaaaccauuccaaaauguaaacaggaucacauacggggccugucccagauaugucaagcauagcacucugaaauuggcaacaggaaugcgaaauguaccagagaaacaaacuagaggcauauuuggcgcaauagcggguuucauagaaaaugguugggagggaaugguggaugguugguacgguuucaggcaucaaaauucugagggaagaggacaagcagcagaucucaaaagcacucaagcagcaaucgaucaaaucaaugggaagcugaaucgguugaucgggaaaaccaacgagaaauuccaucagauugaaaaagaauucucagaaguagaaggaagaauucaggaccuugagaaauauguugaggacacuaaaauagaucucuggucauauaacgcggagcuucuuguugcccuggagaaccaacauacaauugaucuaacugacucagaaaugaacaaacuguuugaaaaaacaaagaagcaacugagggaaaaugcugaggauaugggaaaugguuguuucaaaauauaccacaaaugugacaaugccugcauaggaucaauaagaaauggaacuuaugaccacaauguguacagggaugaagcauuaaacaaccgguuccagaucaaggggguugagcugaagucagaguacaaagauuggauccuauggauuuccuuugccauaucauguuuuuugcuuuguguugcuuuguugggguucaucaugugggccugccaaaagggcaacauuaggugcaacauuugcauuuga

SEQ ID NO: 45492 - RNA, 1701 nt, Artificial Sequence; identical to SEQ ID NO: 45115
  derived and/or modified CDS sequence (wt) from hemagglutinin__InfluenzaA__ALE31981

SEQ ID NO: 45493 - RNA, 1701 nt, Artificial Sequence
  derived and/or modified CDS sequence (wt) from hemagglutinin__InfluenzaA__ALE31995
augaagacuaucauugcuuugagcuacauucuaugucugguuuucgcucaaaaaauuccuggaaaugacaauagcacggcaacgcugugccuugggcaccaugcaguaccaaacggaacgauagugaaaacaaucacaaaugaccgaauugaaguuacuaaugcuacugagcugguucagaauuccucaauaggugaaauaugcgacaguccucaucagauccuugauggagaaaacugcacacuaauagaugcucuauugggagacccucagugugauggcuuucaaaauaagaaaugggaccuuuuuguugaacgaagcaaagccuacagcaacuguuacccuuaugaugugccggauuaugccucccuuaggucauuaguugccucauccggcacacuggaguucaacaaugaaagcuucaauuggacuggagucacucaaaacggaacaaguucugcuugcauaaggagaucuaguaguaguuucuuuaguagauuaaauugguugacccacuuaaacuacacauacccagcauugaacgugacuaugccaaacaaugaacaauuugacaaauuguacauuugggggguucaccacccggguacggacaaggaccaaaucuuccuguaugcucaaucaucaggaagaaucacaguaucuaccaaaagaagccaacaagcuguaaucccaaauaucggaucuagacccagaauaagggauaucccuagcagaauaagcaucuauuggacaauaguaaaaccgggagacauacuuuugauuaacagcacagggaaucuaauugcuccuagggguuacuucaaaauacgaagugggaaaagcucaauaaugagaucagaugcacccauuggcaaaugcaagucugaaugcaucacuccaaauggaagcauucccaaugacaaaccauuccaaaauguaaacagaaucacauacggggccugucccagauauguuaagcauagcacucugaaauuggcaacaggaaugcgaaauguaccagagaaacaaacuagaggcauauuuggcgcaauagcggguuucauagaaaaugguugggagggaaugguggaugguugguacgguuucaggcaucaaaauucugagggaagaggacaagcagcagaucucaaaagcacucaagcagcaaucgaucaaaucaaugggaagcugaaucgauugaucgggaaaaccaacgagaaauuccaucagauugaaaaagaauuuucagaaguagaaggaagaauucaggaccuugagaaauauguugaggacacuaaaauagaucucuggucauacaacgcggagcuucuuguugcccuggagaaccaacauacaauugaucuaacugacucagaaaugaacaaacuguuugaaaaaacaaagaagcaacugagggaaaaugcugaggauaugggaaaugguuguuucaaaauauaccacaaaugugacaaugccugcauaggaucaauaagaaacggaacuuaugaccacaauguguacagggaugaagcauuaaacaaccgguuccagaucaagggaauugagcugaagucaggguacaaagauuggauccuauggauuuccuuugccauaucauguuuuuugcuuuguguugcuuuguugggguucaucaugugggccugccaaaagggcaacauuaggugcaacauuugcauuuga

SEQ ID NO: 45494 - RNA, 1701 nt, Artificial Sequence
  derived and/or modified CDS sequence (wt) from hemagglutinin__InfluenzaA__ALE31996
augaagacuaucauugcuuugagcuacauucuaugucugguuuucgcucaaaaaauuccuggaaaugacaauagcacggcaacgcugugccuugggcaccaugcaguaccaaacggaacgauagugaaaacaaucacaaaugaccgaauugaaguuacuaaugcuacugagcugguucagaauuccucaauaggugaaauaugcgacaguccucaucagauccuugauggagaaaacugcacacuaauagaugcucuauugggagacccccagugugauggcuuucaaaauaagaaaugggaccuuuuuguugaacgaagcaaagccuacagcaacuguuacccuuaugaugugccggauuaugccucccuuaggucacuaguugccucauccggcacacuggaguuuaacaaugaaagcuucaauuggacuggagucacucaaaacggaacaaguucugcuugcauaaggagaucuaguaguaguuucuuuaguagauuaaauugguugacccacuuaaacuacacauacccagcauugaacgugacuaugccaaacaaugaacaauuugacaaauuguacauuugggggguucaccacccggguacggacaaggaccaaaucuuccuguaugcucaaucaucaggaagaaucacaguaucuaccaaaagaagccaacaagcuguaaucccaaauaucggaucuagacccagaauaagggauaucccuagcagaauaagcaucuauuggacaauaguaaaaccaggagacauacuuuugauuaacagcacagggaaucuaauugcuccuagggguuacuucaaaauacgaagugggaaaagcucaauaaugagaucagaugcacccauuggcaaaugcaagucugaaugcaucacuccaaauggaagcauucccaaugacaaaccauuccaaaauguaaacagggucacauacggggccugucccagauauguuaaacauagcacucugaaauuggcaacaggaaugcgaaauguaccagagaaacaaacuagaggcauauuuggcgcaauagcggguuucauagaaaaugguugggagggaaugguggaugguugguacgguuucaggcaucaaaauucugagggaagaggacaagcagcagaucucaaaagcacucaagcagcaaucgaucaaaucaaugggaagcugaaucgauugaucgggaaaaccaacgagaaauuccaucagauugaaaaagaauucucagaaguagaaggaagaauucaggaccuugagaaauauguugaggacacuaaaauagaucucuggucauacaacgcggagcuucuuguugcccuggagaaccaacauacaauugaucuaacugacucagaaaugaacaaacuguuugaaaaaacaaagaagcaacugagggaaaaugcugaggauaugggaaaugguuguuucaaaauauaccacaaaugugacaaugccugcauaggaucaauaagaaauggaacuuaugaccacaauguguacagggaugaagcauuaaacaaccgguuccagaucaagggaguugagcugaagucaggguacaaagauuggauccuauggauuuccuuugccauaucauguuuuuugcuuuguguugcuuuguugggguucaucaugugggccugccaaaagggcaacauuaggugcaacauuugcauuuga

SEQ ID NO: 45495 - RNA, 1701 nt, Artificial Sequence
  derived and/or modified CDS sequence (wt) from hemagglutinin__InfluenzaA__ALE31997
augaagacuaucauugccuugagcuacauucuaugucugguuuucgcucaaaaaauuccuggaaaugacaauagcacggcaacgcugugccuugggcaccaugcaguaccaaacggaacgauagugaaaacaaucacaaaugaccgaauugaaguuacuaaugcuacugagcugguucagaauuccucaauaggugaaauaugcgacaguccucaucagauccuugauggagaaaacugcacacuaauagaugcucuauugggagacccucagugugauggcuuucaaaauaagaaaugggaccuuuuuauugaacgaagcaaagccuacagcaacuguuacccuuaugaugugccggauuaugccucccuuaggucacuaguugccucauccggcacacuggaguuuaacaaugaaagcuucaauuggacuggagucacucaaaacggaacaaguucugcuugcauaaggagaucuaguaguaguuucuuuaguagauuaaauugguugacccacuuaaacuacacauacccagcauugaacgugacuaugccaaacaaugaacaauuugacaaauuguacauuugggggguucaccacccggguacggacaaggaccaaaucuuccuguaugcucaaucaucgggaagaaucacaguaucuaccaaaagaagccaacaagcuguaaucccaaauaucggaucuagacccagaauaagggauaucccuagcagaauaagcaucuauuggacaauaguaaaaccgggagacauacuuuugauuaacagcacagggaaucuaauugcuccuagggguuacuucaaaauacgaagugggaaaagcucaauaaugagaucagaugcacccauuggcaaaugcaagucugaaugcaucacuccaaauggaagcauucccaaugacaaaccauuccaaaauguaaacaggaucacauacggggccugucccagauauguuaagcauagcacucugaaauuggcaacaggaaugcgaaauguaccagagaaacaaacuagaggcauauuuggcgcaauagcggguuucauagaaaaugguugggagggaaugguggaugguugguacgguuucaggcaucaaaauucugagggaagaggacaagcagcagaucucaaaagcacucaagcagcaaucgaucaaaucaaugggaagcugaaucgauugaucgggaaaaccaacgagaaauuccaucagauugaaaaagaauucucagaaguagaaggaagaauucaggaccuugagaaauauguugaggacacuaaaauagaucucuggucauacaacgcggagcuucuuguugcccuggagaaccaacauacaauugaucuaacugacucagaaaugaacaaacuguuugaaaaaacaaagaagcaacugagggaaaaugcugaggauaugggaaaugguuguuucaaaauauaccacaaaugugacaaugccugcauaggaucaauaagaaauggaacuuaugaccacaauguguacagggaugaagcauuaaacaaccgguuccagaucaagggaguugagcugaagucaggguacaaagauuggauccuauggauuuccuuugccauaucauguuuuuugcuuuguguugcuuuguugggguucaucaugugggccugccaaaagggcaacauuaggugcaacauuugcauuuga

SEQ ID NO: 45496 - RNA, 1701 nt, Artificial Sequence
  derived and/or modified CDS sequence (wt) from hemagglutinin__InfluenzaA__ALE31998
augaagacuaucauugcuuugagcuacauucuaugucugguuuucgcucaaaaaauuccuggaaaugacaauagcacggcaacgcugugccuugggcaccaugcaguaccaaacggaacgauagugaaaacaaucacaaaugaccgaauugaaguuacuaaugcuacugaguugguucagaauuccucaauaggugaaauaugcgacaguccucaucagauccuugauggagaaaacugcacacuaauagaugcucuauugggagacccucagugugauggcuuucaaaauaagaaaugggaccuuuuuguugaacgaagcaaagccuacagcaacuguuacccuuaugaugugccggauuaugccucccuuagaucacuaguugccucauccggcacacuggaguuuaacaaugaaagcuucaauuggacuggagucacucaaaacggaacaaguucugcuugcauaaggagaucuaguaguaguuucuuuaguagauuaaauugguugacccacuuaaacuacacauacccagcauugaacgugacuaugccaaacaaugaacaauuugacaaauuguacauuugggggguucaccacccggguacggacaaggaccaaaucuuccuguaugcucaaucaucaggaagaaucacaguaucuaccaaaagaagccaacaagcuguaaucccaaauauuggaucuagacccagaauaagggauaucccuagcagaauaagcaucuauuggacaauaguaaaaccgggagacauacuuuugauuaacagcacagggaaucuaauugcuccuagggguuacuucaaaauacgaagugggaaaagcuccauaaugagaucagaugcacccauuggcaaaugcaagucugaaugcaucacuccaaauggaagcauucccaaugacaaaccauuccaaaauguaaacaggaucacauacggggccugucccagauauguuaagcauagcacucugaaauuggcaacaggaaugcgaaauguaccagagaaacaaacuagaggcauauuuggcgcaauagcggguuucauagaaaaugguugggagggaaugguggaugguugguacgguuucaggcaucaaaauucugagggaagaggacaagcagcagaucucaaaagcacucaagcagcaaucgaucaaaucaaugggaagcugaaucgguugaucgggaaaaccaacgagaaauuccaucagauugaaaaagaauucucagaaguagaaggaagaauucaggaccuugagaaauauguugaggacacuaaaauagaucucuggucauacaacgcggagcuucuuguugcccuggagaaccaacauacaauugaucuaacugacucagaaaugaacaaacuguuugaaaaaacaaagaagcaacugagggaaaaugcugaggauaugggaaaugguuguuucaaaauauaccacaaaugugacaaugccugcauaggaucaauaagaaauggaacuuaugaccacaauguguacagggaugaagcauuaaacaaccgguuucagaucaagggaguugagcugaagucaggguacaaagauuggauccuauggauuuccuuugccauaucauguuuuuugcuuuguguugcuuuguugggguucaucaugugggccugccaaaaaggcaacauuaggugcaacauuugcauuuga

SEQ ID NO: 45497 - RNA, 1701 nt, Artificial Sequence
  derived and/or modified CDS sequence (wt) from hemagglutinin__InfluenzaA__ALE31999
augaagacuaucauugcuuugagcuacauucuaugucugguuuucgcucaaaaaauuccuggaaaugacaauagcacggcaacgcugugccuugggcaccaugcaguaccaaacggaacgauagugaaaacaaucacaaaugaccgaauugaaguuacuaaugcuacugagcugguucagaauuccucaauaggugaaauaugcgacaguccucaucagauccuugauggagaaaacugcacacuaauagaugcucuauugggagacccucagugugauggcuuucaaaauaagaaaugggaccuuuuuguugaacgaagcaaagccuacagcaacuguuacccuuaugaugugccggauuaugccucccuuaggucacuaguugccucauccggcacacuggaguuuaacaaugaaagcuucaauuggacuggagucacucaaaauggaacaaguucugcuugcauaaggagaucuaguaguaguuucuuuagcagauuaaauugguugacccacuuacacuacacauacccagcauugaacgugacuaugccaaacaaugaacaauuugacaaauuguacauuugggggguucaccacccggguacggacaaggaccaaaucuuccuguaugcucaaucaucaggaagaaucacaguaucuaccaaaagaagccaacaagcuguaaucccaaauaucggaucuagacccagaauaagggauaucccuagcagaauaagcaucuauuggacaauaguaaaaccgggagacauacuuuugauuaacagcacagggaaucuaauugcuccuagggguuacuucaaaauacgaagugggaaaagcucaauaaugagaucagaugcacccauuggcaaaugcaagucugaaugcaucacuccaaauggaagcauucccaaugacaaaccauuccaaaauguaaacaggaucacauacggggccugucccagauauguuaagcauagcacucuaaaauuggcaacaggaaugcgaaauguaccagagaaacaaacuagaggcauauuuggcgcaauagcggguuucauagaaaaugguugggagggaaugguggaugguugguacgguuucaggcaucaaaauucugagggaagaggacaagcagcagaucucaaaagcacucaagcagcaauugaucaaaucaaugggaagcugaaucgguugaucgggaaaaccaacgagaaauuccaucagauugaaaaagaauucucagaaguagaaggaagaauucaggaccuugagaaauauguugaggacacuaaaauagaucucuggucauacaacgcggagcuucuuguugcccuggagaaccaacauacaauugaucuaacugacucagaaaugaacaaacuguuugaaaaaacaaagaagcaacugagggaaaaugcugaggauaugggaaaugguuguuucaaaauauaccacaaaugugacaaugccugcauaggaucaauaagaaauggaacuuaugaccacaauguguacagggaugaagcauuaaacaaccgauuccagaucaagggaguugagcugaagucaggguacaaagauuggauccuauggauuuccuuugccauaucauguuuuuugcuuuguguugcuuuguugggguucaucaugugggccugccaaaagggcaacauuaggugcaacauuugcauuuga

SEQ ID NO: 45498 - RNA, 1701 nt, Artificial Sequence
  derived and/or modified CDS sequence (wt) from hemagglutinin__InfluenzaA__ALE32000
augaagacuaucauugcuuugagccacauucuaugucugguuuucgcucaaaagcuuccugaaaaugacaauagcacggcaacgcugugccuugggcaccaugcaguaccaaacggaacgauagugaaaacaaucacgagugacagaauugaaguuacuaaugcuacugagcugguucagaauuccucaauaggugaaauaugcgacaguccucaucagauccuugauggaaaaaacugcacacuaauagaugcucuauugggagacccucagugugauggcuuucaaaauaagaaaugggaccuuuuuguugaacgaagcaaagccuacagcaacuguuacccuuaugaugugccggauuaugccucccuuaggucacuaguugccucauccgguacacuggaguuuaacgaugaaagcuucaauugggcuggagucacucaaaacggaacaaguucugcuugcauaaggggaucuaauaguaguuucuuuaguagauuaaauugguugacccacucaaacuucaaauacccagcauugaacgugacuaugccaaacaaugaacaauuugacaaauuguacauuugggggguucaccacccggguacggacaaggaccaaaucuuccuguaugcucaaucaucaggaagaaucacaguauccaccaaaagaagccaacaagcuguaaucccgaauaucggaucuagacccagaauaaggaauaucccuagcagaauaagcaucuauuggacaauaguaaaaccgggagacauacuuuugauuaacagcacagggaaucuaauugcuccuagggguuacuucaaaauacgaagugggaaaagcucaauaaugagaucagaugcacccauuggcaaaugcaagucugaaugcaucacuccaaauggaagcauucccaaugacaaaccauuccaaaauguaaacaggaucacauacggggccugucccagauauguuaagcaaagcacucugaaauuggcaacaggaaugcgaaauguaccagagaaacaaacuagaggcauauuuggcgcaauagcggguuucauagaaaaugguugggagggaaugaaggaugguugguacgguuucaggcaucaaaauucugagggaagaggacaagcagcagaucucaaaagcacucaagcugcaaucgaucaaaucaauggaaagcugaaucgauugaucgggaaaaccaacgagaaauuccaucagauugaaaaagaauucucagaaguagaagggagaauucaggaccuugagaaauauguugaggacacaaaaauagaucucuggucauacaacgcggagcuucuuguugcccuggagaaccaacauacaauugaucuaacugacucagaaaugaacaaacuguuugaaaaaacaaagaagcaacugagggaaaaugcugaggauaugggcaaugguuguuucaaaauauaccacaaaugugacaaugccugcauaggaucaaucagaaauggaacuuaugaccacgauguauacagggaugaagcuuuaaacaaccgguuccagaucaagggaguugagcugaagucaggguacaaagauuggauccuauggauuuccuuugccauaucauguuuuuugcuuuguguugcuuuguugggguucaucaugugggccugccaaaagggcaacauuaggugcaacauuugcauuuga

SEQ ID NO: 45499 - RNA, 1701 nt, Artificial Sequence
  derived and/or modified CDS sequence (wt) from hemagglutinin__InfluenzaA__ALE32001
augaagacuaucauugcuuugagcuacauucuaugucugguuuucgcucaaaaaauuccuggaaaugacaauagcacggcaacgcugugccuugggcaccaugcaguaccaaacggaacgauagugaaaacaaucacaaaugaccgaauugaaguuacuaaugcuacugaguugguucagaauuccucaauaggugaaauaugcgacaguccucaucagauccuugauggagaaaacugcacacuaauagaugcucuauugggagacccucagugugauggcuuucaaaacaagaaaugggaccuuuuuguugaacgaagcaaagccuacagcaacuguuacccuuaugaugugccggauuaugccucccuuaggucacuaguugccucauccggcacacuggaguuuaacaaugaaagcuucaauuggacuggagucacucaaaacggaacaaguucugcuugcauaaggagaucuaguaguaguuucuuuaguagauuaaauugguugacccacuuaaacuacacauacccagcauugaacgugacuaugccaaacaaugaacaauuugacaaauuguacauuugggggguucaccacccggguacggacaaggaccaaaucuuccuguaugcucaaucaucaggaagaaucacaguaucuaccaaaagaagccaacaagcuguaaucccaaauaucggaucuagacccagaauaagggauaucccuagcagaauaagcaucuauuggacaauaguaaaaccgggagacauacuuuugauuaacagcacagggaaucuaauugcuccuagggguuacuucaaaauacgaagugggaaaagcucaauaaugagaucagaugcacccauuggcaaaugcaagucugaaugcaucacuccaaauggaagcauucccaaugacaaaccauuccaaaauguaaacaggaucacauacggggccugucccagauauguuaagcauagcacucugaaauuggcaacaggaaugcgaaauguaccagagaaacaaacuagaggcauauuuggcgcaauagcggguuucauagaaaaugguugggagggaaugguggaugguugguacgguuucaggcaucaaaauucugagggaagaggacaagcagcagaucucaaaagcacucaagcagcaaucgaucaaaucaaugggaagcugaaucgguugaucgggaaaaccaacgagaaauuccaucagauugaaaaagaauucucagaaguagaaggaagaauucaggaccuugagaaauauguugaggacacuaaaauagaucucuggucauacaacgcggagcuucuuguugcccuggagaaccaacauacaauugaucuaacugacucagaaaugaacaaacuguuugaaaaaacaaagaagcaacugagggaaaaugcugaggauaugggaaaugguuguuucaaaauauaccacaaaugugacaaugccugcauaggaucaauaagaaauggaacuuaugaccacaauguguacagggaugaagcauuaaacaaccgguuucagaucaagggaguugagcugaagucaggguacaaagauuggauccuauggauuuccuuugccauaucauguuuuuugcuuuguguugcuuuguugggguucaucaugugggccugccaaaaaggcaacauuaggugcaacauuugcauuuga

SEQ ID NO: 45500 - RNA, 1701 nt, Artificial Sequence
  derived and/or modified CDS sequence (wt) from hemagglutinin__InfluenzaA__ALE32002
augaagacuaucauugcuuugagcuacauucuaugucugguuuucgcucaaaaaauuccuggaaaugacaauagcacggcaacgcugugccuugggcaccaugcaguaccaaacggaacgauagugaaaacaaucacaaaugaccgaauugaaguuacuaaugcuacugaguugguucagaauuccucaauaggugaaauaugcgacaguccucaucagauccuugauggagaaaacugcacacuaauagaugcucuauugggagacccucagugugauggcuuucaaaauaagaaaugggaccuuuuuguugaacgaagcaaagccuacagcaacuguuacccuuaugaugugccggauuaugccucccuuaggucacuaguugccucauccggcacacuggaguuuaacaaugaaagcuucaauuggacuggagucacucaaaacggaacaaguucugcuugcauaaggagaucuaguaguaguuucuuuaguagauuaaauugguugacccacuuaaacuacacauacccagcauugaacgugacuaugccaaacaaugaacaauuugacaaauuguacauuugggggguucaccacccggguacggacaaggaccaaaucuuccuguaugcucaaucaucaggaagaaucacaguaucuaccaaaagaagccaacaagcuguaaucccaaauaucggaucuagacccagaauaagggauaucccuagcagaauaagcaucuauuggacaauaguaaaaccgggagacauacuuuugauuaacagcacagggaaucuaauugcuccuagggguuacuucaaaauacgaagugggaaaagcucaauaaugagaucagaugcgcccauuggcaaaugcaagucugaaugcaucacuccaaauggaagcauucccaaugacaaaccauuccaaaauguaaacaggaucacauacggggccugucccagauauguuaagcauagcacucugaaauuggcaacaggaaugcgaaauguaccagagaaacaaacuagaggcauauuuggcgcaauagcggguuucauagaaaaugguugggagggaaugguggaugguugguacgguuucaggcaucaaaauucugagggaagaggacaagcagcagaucucaaaagcacucaagcagcaaucgaucaaaucaaugggaagcugaaucgguugaucgggaaaaccaacgagaaauuccaucagauugaaaaagaauucucagaaguagaaggaagaauucaggaccuugagaaauauguugaggacacuaaaauagaucucuggucauauaacgcggagcuucuuguugcccuggagaaccaacauacaauugaucuaacugacucagaaaugaacaaacuguuugaaaaaacaaagaagcaacugagggaaaaugcugaggauaugggaaaugguuguuucaaaauauaccacaaaugugacaaugccugcauaggaucaauaagaaauggaacuuaugaccacaauguguacagggaugaagcauuaaacaaccgguuccagaucaaggggguugagcugaagucaggguacaaagauuggauccuauggauuuccuuugccauaucauguuuuuugcuuuguguugcuuuguugggguucaucaugugggccugccaaaagggcaacauuaggugcaacauuugcauuuga

SEQ ID NO: 45501 - RNA, 1701 nt, Artificial Sequence; identical to SEQ ID NO: 45321
  derived and/or modified CDS sequence (wt) from hemagglutinin__InfluenzaA__ALE32003

SEQ ID NO: 45502 - RNA, 1701 nt, Artificial Sequence; identical to SEQ ID NO: 45043
  derived and/or modified CDS sequence (wt) from hemagglutinin__InfluenzaA__ALE32004

SEQ ID NO: 45503 - RNA, 1701 nt, Artificial Sequence; identical to SEQ ID NO: 45043
  derived and/or modified CDS sequence (wt) from hemagglutinin__InfluenzaA__ALE32005

SEQ ID NO: 45504 - RNA, 1701 nt, Artificial Sequence; identical to SEQ ID NO: 45137
  derived and/or modified CDS sequence (wt) from hemagglutinin__InfluenzaA__ALE32006

SEQ ID NO: 45505 - RNA, 1701 nt, Artificial Sequence
  derived and/or modified CDS sequence (wt) from hemagglutinin__InfluenzaA__ALE32007
augaagacuaucauugcuuugagcuacauucuaugucugguuuucgcucaaaaaauuccuggaaaugacaauagcacggcaacgcugugccuugggcaccaugcaguaccaaacggaacgauagugaaaacaaucacaaaugaccgaauugaaguuacuaaugcuacugaguugguucagaauuccucaauaggugaaauaugcgacaguccucaucagauccuugauggagaaaacugcacacuaauagaugcucuauugggagacccucagugugauggcuuucaaaauaagaaaugggaccuuuuuguugaacgaagcaaagccuacagcaacuguuacccuuaugaugugccggauuaugccucccuuaggucacuaguugccucauccggcacacuggaguuuaacaaugaaagcuucaauuggacuggagucacucaaaacggaacaaguucugcuugcauaaggagaucuaguaguaguuucuuuaguagauuaaauugguugacccacuuaaacuacacauacccagcauugaacgugacuaugccaaacaaugaacaauuugacaaauuguacauuugggggguucaccacccggguacggacaaggaccaaaucuuccuguaugcucaaucaucaggaagaaucacaguaucuaccaaaagaagccaacaagcuguaaucccaaauaucggaucuagacccagaauaagggauaucccuagcagaauaagcaucuauuggacaauaguaaaaccgggagacauacuuuugauuaacagcacagggaaucuaauugcuccuagggguuacuucaaaauacgaagugggaaaagcucaauaaugagaucagaugcacccauuggcaaaugcaagucugaaugcaucacuccaaauggaagcauucccaaugacaaaccauuccaaaauguaaacaggaucacauacggggccugucccagauauguuaagcauagcacucugaaacuggcaacaggaaugcgaaauguaccagagaaacaaacuagaggcauauuuggcgcaauagcggguuucauagaaaaugguugggagggaaugguggaugguugguacgguuucaggcaucaaaauucugagggaagaggacaagcagcagaucucaaaagcacucaagcagcaaucgaucaaaucaaugggaagcugaaucgguugaucgggaaaaccaacgagaaauuccaucagauugaaaaagaauucucagaaguagaaggaagaauucaggaccuugagaaauauguugaggacacuaaaauagaucucuggucauauaacgcggagcuucuuguugcccuggagaaccaacauacaauugaucuaacugacucagaaaugaacaaacuguuugaaaaaacaaagaagcaacugagggaaaaugcugaggauaugggaaaugguuguuucaaaauauaccacaaaugugacaaugccugcauaggaucaauaagaaauggaacuuaugaccacaauguguacagggaugaagcauuaaacaaccgguuccagaucaaggggguugagcugaagucaggguacaaagauuggauccuauggauuuccuuugccauaucauguuuuuugcuuuguguugcuuuguugggguucaucaugugggccugccaaaagggcaacauuaggugcaacauuugcauuuga

SEQ ID NO: 45506 - RNA, 1701 nt, Artificial Sequence; identical to SEQ ID NO: 45004
  derived and/or modified CDS sequence (wt) from hemagglutinin__InfluenzaA__ALE32008

SEQ ID NO: 45507 - RNA, 1701 nt, Artificial Sequence
  derived and/or modified CDS sequence (wt) from hemagglutinin__InfluenzaA__ALE32009
augaagacuaucauugcuuugagcuacauucuaugucugguuuucgcucaaaagcuuccugaaaaugacaauagcacggcaacgcugugccuugggcaccaugcaguaccaaacggaacgauagugaaaacaaucacgagugaccgaauugaaguuacuaaugcuacugagcugguucagaauuccucaauaggugaaauaugcgacaguccucaucagauccuugauggaaaaaacugcacacuaauagaugcucuauugggagacccucagugugauggcuuucaaaauaagaaaugggaccuuuuuguugaacgaagcaaagccuacagcaacuguuacccuuaugaugugccggauuaugccucccuuaggucacuaguugccucauccgguacacuggaguuuaacgaugaaagcuucaauugggcuggagucacucaaaacggaacaaguucugcuugcauaaggggaucuaauaguaguuucuuuaguagauuaaauugguugacccacucaaacuucaaauacccagcauugaacgugacuaugccaaacaaugaacaauuugacaaauuguacauuugggggguucaccacccggguacggacaaggaccaaaucuuccuguaugcucaaucaucaggaagaaucacaguauccaccaaaagaagccaacaagcuguaaucccgaauaucggaucuagacccagaauaaggaauaucccuagcagaauaagcaucuauuggacaauaguaaaaccgggagacauacuuuugauuaacagcacagggaaucuaauugcuccuagggguuacuucaaaauacgaagugggaaaagcucaauaaugagaucagaugcacccauuggcaaaugcaagucugaaugcaucacuccaaauggaagcauucccaaugacaaaccauuccaaaauguaaacaggaucacauacggggccugucccagauauguuaagcaaagcacucugaaauuggcaacaggaaugcgaaauguaccagagaaacaaacuagaggcauauuuggcgcaauagcggguuucauagaaaaugguugggagggaaugaaggaugguugguacgguuucaggcaucaaaauucugagggaagaggacaagcagcagaucucaaaagcacucaagcagcaaucgaucaaaucaaugggaagcugaaucgauugaucgggaaaaccaacgagaaauuccaucagauugaaaaagaauucucagaaguagaagggagaauucaggaccuugagaaauauguugaggacacaaaaauagaucucuggucauacaacgcggagcuucuuguugcccuggagaaccaacauacaauuguucuaacugacucagaaaugaacaaacuguuugaaaaaacaaagaagcaacugagggaaaaugcugaggauaugggcaaugguuguuucaaaauauaccacaaaugugacaaugccugcauaggaucaaucagaaauggaacuuaugaccacgauguauacagggaugaagcuuuaaacaaccgguuccagaucaagggaguugagcugaagucaggguacaaagauuggauccuauggauuuccuuugccauaucauguuuuuugcuuuguguugcuuuguugggguucaucaugugggccugccaagagggcaacauuaggugcaacauuugcauuuga

SEQ ID NO: 45508 - RNA, 1701 nt, Artificial Sequence
  derived and/or modified CDS sequence (wt) from hemagglutinin__InfluenzaA__ALE32010
augaagacuaucauugcuuugagcuacauucuaugucuggcuuucgcucaaaaaauuccuggaaaugacaauagcacggcaacgcugugccuugggcaccaugcaguaccaaacggaacgauagugaaaacaaucacaaaugaccgaauugaaguuacuaaugcuacugaguugguucagaauuccucaauaggugaaauaugcgacaguccucaucagauccuugauggagaaaacugcacacuaauagaugcucuauugggagacccucagugugauggcuuucaaaauaagaaaugggaccuuuuuguugaacgaagcaaagccuacagcaacuguuacccuuaugaugugccggauuaugccucccuuaggucacuaguugccucauccggcacacuggaguuuaacaaugaaagcuucaauuggacuggagucacucaaaacggaacaaguucugcuugcauaaggagaucuaguaguaguuucuuuaguagauuaaauugguugacccacuuacacuacacauacccagcauugaacgugacuaugccaaacaaugaacaauuugacaaauuguacauuugggggguucaccacccggguacggacaaggaccaaaucuuccuguaugcucaaucaucaggaagaaucacaguaucuaccaaaagaagccaacaagcuguaaucccaaauaucggaucuagacccagaauaagggauaucccuagcagaauaagcaucuauuggacaauaguaaaaccgggagacauacuuuugauuaacagcacagggaaucuaauugcuccuagggguuacuucaaaauacgaagugggaaaagcucaauaaugagaucagaugcacccauuggcaaaugcaagucugaaugcaucacuccaaauggaagcauucccaaugacaaaccauuucaaaauguaaacaggaucacauacggggccugucccagauauguuaagcauagcacucugaaauuggcaacaggaaugcgaaauguaccagagaaacaaacuagaggcauauuuggcgcaauagcggguuucauagaaaaugguugggagggaaugguggaugguugguacgguuucaggcaucaaaauucugagggaagaggacaagcagcagaucucaaaagcacucaagcagcaaucgaucaaaucaaugggaagcugaaucgguugaucgggaaaaccaacgagaaauuccaucagauugaaaaagaauucucagaaguagaaggaagaauucaggaccuugagaaauauguugaggacacuaaaauagaucucuggucauauaacgcggagcuucuuguugcccuggagaaccaacauacaauugaucuaacugacucugaaaugaacaaacuguuugaaaaaacaaagaagcaacugagggaaaaugcugaggauaugggaaaugguuguuucaaaauauaccacaaaugugacaaugccugcauaggaucaauaagaaauggaacuuaugaccacaauguguacagggaugaagcauuaaacaaccgguuccagaucaaggggguugagcugaagucaggguacaaagauuggauccuauggauuuccuuugccauaucauguuuuuugcuuuguguugcuuuguugggguucaucaugugggccugccaaaagggcaacauuaggugcaacauuugcauuuga

SEQ ID NO: 45509 - RNA, 1701 nt, Artificial Sequence
  derived and/or modified CDS sequence (wt) from hemagglutinin__InfluenzaA__ALE32011
augaagacuaucauugcuuugagcuacauucuaugucugguuuucgcucaaaaaauuccuggaaaugacaauagcacggcaacgcugugccuugggcaccaugcaguaccaaacggaacgauagugaaaacaaucacaaaugaccgaauugaaguuacuaaugcuacugaguugguucagaauuccucaauaggugaaauaugcaacaguccucaucagauccuugauggagaaaacugcacacuaauagaugcucuauugggagacccucagugugauggcuuucaaaauaagaaaugggaccuuuuuguugaacgaagcaaagccuacagcaacuguuacccuuaugaugugccggauuaugccucccuuaggucacuaguugccucauccggcacacuggaguuuaacaaugaaagcuucaauuggacuggagucacucaaaacggaacaaguucugcuugcauaaggagaucuaguaguaguuucuuuaguagauuaaauugguugacccacuuaaacuacacauacccagcauugaacgugacuaugccaaacaaugaacaauuugacaaauuguacauuugggggguucaccacccggguacggacaaggaccaaaucuuccuguaugcucaaucaucaggaagaaucacaguaucuaccaaaagaagccaacaagcuguaaucccaaauaucggaucuagacccagaauaagggauaucccuagcagaauaagcaucuauuggacaauaguaaaaccgggagacauacuuuugauuaacagcacagggaaucuaauugcuccuagggguuacuucaaaauacgaagugggaaaagcucaauaaugagaucagaugcacccauuggcaaaugcaagucugaaugcaucacuccaaauggaagcauucccaaugacaaaccauuccaaaauguaaacaggaucacauacggggccugucccagauauguuaagcauagcacucugaaauuggcaacaggaaugcgaaauguaccagagaaacaaacuagaggcauauuuggcgcaauagcggguuucauagaaaaugguugggagggaaugguggaugguugguacgguuucaggcaucagaauucugagggaagaggacaagcagcagaucucaaaagcacucaagcagcaaucgaucaaaucaaugggaagcugaaucgguugaucgggaaaaccaacgagaaauuccaucagauugaaaaagaauucucagaaguagaaggaagaauucaggaccuugagaaauauguugaggacacuaaaauagaucucuggucauauaacgcggagcuucuuguugcccuggagaaccaacauacaauugaucuaacugacucagaaaugaacaaacuguuugaaaaaacaaagaagcaacugagggaaaaugcugaggauaugggaaaugguuguuucaaaauauaccacaaaugugacaaugccugcauaggaucaauaagaaauggaacuuaugaccacaauguguacagggaugaagcauuaaacaaccgguuccagaucaaggggguugagcugaagucaggguacaaagauuggauccuauggauuuccuuugccauaucauguuuuuugcuuuguguugcuuuguugggguucaucaugugggccugccaaaagggcaacauuaggugcaacauuugcauuuga

SEQ ID NO: 45510 - RNA, 1701 nt, Artificial Sequence; identical to SEQ ID NO: 45018
  derived and/or modified CDS sequence (wt) from hemagglutinin__InfluenzaA__ALE32012

SEQ ID NO: 45511 - RNA, 1701 nt, Artificial Sequence; identical to SEQ ID NO: 45006
  derived and/or modified CDS sequence (wt) from hemagglutinin__InfluenzaA__ALE32013

SEQ ID NO: 45512 - RNA, 1701 nt, Artificial Sequence
  derived and/or modified CDS sequence (wt) from hemagglutinin__InfluenzaA__ALE32014
augaagacuaucauugcuuugagcuacauucuaugucugguuuucgcucaaaaaauuccuggaaaugacaauagcacggcaacgcugugccuugggcaccaugcaguaccaaacggaacgauagugaaaacaaucacaaaugaccgaauugaaguuacuaaugcuacugagcugguucagaauuccucaauaggugaaauaugcgacaguccucaucagauccuugauggagaaaacugcacacuaauagaugcucuauugggagacccucagugugauggcuuucaaaauaagaaaugggaccuuuuuguugaacgaagcaaagccuacagcaacuguuacccuuaugaugugccggauuacgccucccuuaggucacuaguugccucauccggcacacuggaguuuaacaaugaaagcuucaauuggacuggagucacucaaaacggaacaaguucugcuugcauaaggaaaucuaguaguaguuucuuuaguagauuaaauugguugacccaauuaaacuacacauacccagcauugaacgugacuaugccaaacaaugaacaauuugacaaauuguacauuugggggguucaccacccggguacggacaaggaccaaaucuuccuguaugcucaaucaucaggaagaaucacaguaucuaccaaaagaagccaacaagcuguaaucccaaauaucggaucuagacccagaauaagggauaucccuagcagaauaagcaucuauuggacaauaguaaaaccgggagacauacuuuugauuaacagcacagggaaucuaauugcuccuagggguuacuucaaaauacgaagugggaaaagcucaauaaugagaucagaugcacccauuggcaaaugcaagucugaaugcaucacuccaaauggaagcauucccaaugacaaaccauuccaaaauguaaacaggaucacauacggggccugucccagauauguuaagcauagcacucugaaauuggcaacaggaaugcgaaauguaccagagaaacaaacuagaggcauauuuggcgcaauagcggguuucauagaaaaugguugggagggaaugguggaugguugguacgguuucaggcaucaaaauucugagggaagaggacaagcagcagaucucaaaagcacucaagcagcaaucgaucaaaucaauggaaagcugaaucgauugaucgggaaaaccaacgagaaauuccaucagauugaaaaagaauucucagaaguagaaggaagaauucaggaccuugagaaauauguugaggacacuaaaauagaucucuggucauacaacgcggagcuucuuguugcccuggagaaccaacauacaauugaucugacugacucagaaaugaacaaacuguuugaaaaaacaaagaagcaacugagggaaaaugcugaggauaugggaaaugguuguuucaaaauauaccacaaaugugacaaugccugcauaggaucaauaagaaauggaacuuaugaccacaauguguacagggaugaagcauuaaacaaccgguuccagaucaagggaguugagcugaagucaggguacaaagauuggauccuauggauuuccuuugccauaucauguuuuuugcuuuguguugcuuuguugggguucaucaugugggccugccaaaagggcaacauuaggugcaacauuugcauuuga

SEQ ID NO: 45513 - RNA, 1701 nt, Artificial Sequence
  derived and/or modified CDS sequence (wt) from hemagglutinin__InfluenzaA__ALE32015
augaagacuaucauugccuugagcuacauucuaugucugguuuucgcucaaaaaauuccuggaaaugacaauagcacggcaacgcugugccuugggcaccaugcaguaccaaacggaacgauagugaaaacaaucacaaaugaccgaauugaaguuacuaaugcuacugagcugguucagaauuccucaauaggugaaauaugcgacaguccucaucagauccuugauggagaaaacugcacacuaauagaugcucuauugggagacccucagugugauggcuuucaaaauaagaaaugggaccuuuuuguugaacgaagcaaagccuacagcaacuguuacccuuaugauguaccggauuaugccucccuuaggucacuaguugccucauccggcacacuggaguuuaacaaugaaagcuucaauuggacuggagucacucaaaacggaacaaguucugcuugcauaaggagaucuaguaguaguuucuuuaguagauuaaauugguugacccacuuaaacuacacauacccagcauugaacgugacuaugccaaacaaugaacaauuugacaaauuguacauuugggggguucaccacccggguacggacaaggaccaaaucuuccuguaugcucaaucaucaggaagaaucacaguaucuaccaaaagaagccaacaagcuguaaucccaaauaucggaucuagacccagaauaagggauaucccuagcagaauaagcaucuauuggacaauaguaaaaccgggagacacacuuuugauuaacagcacagggaaucuaauugcuccuagggguuacuucaaaauacgaagugggaaaagcucaauaaugagaucagaugcacccauuggcaaaugcaagucugaaugcaucacuccaaauggaagcauucccaaugacaaaccauuccaaaauguaaacaggaucacauacggggccugucccagauauguuaagcauagcacucugaaauuggcaacaggaaugcgaaauguaccagagaaacaaacuagaggcauauuuggcgcaauagcggguuucauagaaaaugguugggagggaaugguggaugguugguacgguuucaggcaucaaaauucugagggaagaggacaagcagcagaucucaaaagcacucaagcagcaaucgaucaaaucaaugggaagcugaaucgauugaucgggaaaaccaacgagaaauuccaucagauugaaaaagaauucucagaaguagaaggaagaauucaggaccuugagaaauauguugaggacacuaaaauagaucucuggucauacaacgcggagcuucuuguugcccuggagaaccaacauacaauugaucuaacugacucagaaaugaacaaacuguuugaaaaaacaaagaagcaacugagggaaaaugcugaggauaugggaaaugguuguuucaaaauauaccacaaaugugacaaugccugcauaggaucaauaagaaauggaacuuaugaccacaauguguacagggaugaagcauuaaacaaccgguuccagaucaagggaguugagcugaagucaggguacaaagauuggauccuauggauuuccuuugccauaucauguuuuuugcuuuguguugcuuuguugggguucaucaugugggccugccaaaagggcaacauuaggugcaacauuugcauuuga

SEQ ID NO: 45514 - RNA, 1701 nt, Artificial Sequence
  derived and/or modified CDS sequence (wt) from hemagglutinin__InfluenzaA__ALE32016
augaagacuaucauugcuuugagcuacauucuaugucugguuuucgcucaaaaaauuccuggaaaugacaauagcacggcaacgcugugccuugggcaccaugcaguaccaaacggaacgauagugaaaacaaucacaaaugaccgaauugaaguuacuaaugcuacugaguugguucagaauuccucaauaggugaaauaugcgacaguccucaucagauccuugauggagaaaacugcacacuaauagaugcucuauugggagacccucagugugauggcuuucaaaauaagaaaugggaccuuuuuguugaacgaagcaaagccuacagcaacuguuacccuuaugaugugccggauuaugccucccuuaggucacuaguugccucauccggcacacuggaguuuaacaaugaaagcuucaauuggacuggagucacucaaaacggaacaaguucugcuugcauaaggagaucuaguaguaguuucuuuaguagauuaaauugguugacccacuuaaacuacacauacccagcauugaacgugacuaugccaaacaaugaacaauuugacaaauuguacauuugggggguucaccacccggguacggacaaggaccaaaucuuccuguaugcucaaucaucaggaagaaucacaguaucuaccaaaagaagccaacaagcuguaauuccaaauaucggaucuagacccagaauaagggauaucccuagcagaauaagcaucuauuggacaauaguaaaaccgggagacauacuuuugauuaacagcacagggaaucuaauugcuccuagggguuacuucaaaauacgaagugggaaaagcucaauaaugagaucagaugcacccauuggcaaaugcaagucugaaugcaucacuccaaauggaagcauucccaaugacaaaccauuccaaaauguaaacaggaucacauacggggccugucccagauauguuaagcauagcacucugaaauuggcaacaggaaugcggaauguaccagagaaacaaacuagaggcauauuuggcgcaauagcggguuucauagaaaaugguugggagggaaugguggaugguugguacgguuucaggcaucaaaauucugagggaagaggacaagcagcagaucucaaaagcacucaagcagcaaucgaucaaaucaaugggaagcugaaucgguugaucgggaaaaccaacgagaaauuccaucagauugaaaaagaauucucagaaguagaaggaagaauucaggaccuugagaaauauguugaggacacuaaaauagaucucuggucauauaacgcggagcuucuuguugcccuggagaaccaacauacaauugaucuaacugacucagaaaugaacaaacuguuugaaaaaacaaagaagcaacugagggaaaaugcugaggauaugggaaaugguuguuucaaaauauaccacaaaugugacaaugccugcauaggaucaauaagaaauggaacuuaugaccacaauguguacagggaugaagcauuaaacaaccgguuccagaucaaggggguugagcugaagucaggguacaaagauuggauccuauggauuuccuuugccauaucauguuuuuugcuuuguguugcuuuguugggguucaucaugugggccugccaaaagggcaacauuaggugcaacauuugcauuuga

SEQ ID NO: 45515 - RNA, 1701 nt, Artificial Sequence; identical to SEQ ID NO: 45514
  derived and/or modified CDS sequence (wt) from hemagglutinin__InfluenzaA__ALE32017

SEQ ID NO: 45516 - RNA, 1701 nt, Artificial Sequence; identical to SEQ ID NO: 45076
  derived and/or modified CDS sequence (wt) from hemagglutinin__InfluenzaA__ALE32018

SEQ ID NO: 45517 - RNA, 1701 nt, Artificial Sequence
  derived and/or modified CDS sequence (wt) from hemagglutinin__InfluenzaA__ALE32020
augaagacuaucauugccuugagcuacauucuaugucugguuuucgcucaaaaaauuccuggaaaugacaauagcacggcaacgcugugccuugggcaccaugcaguaccaaauggaacgauagugaaaacaaucacaaaugaccggauugaaguuacuaaugcuacugagcugguucagaauuccucaauaggugaaauaugcgacaguccucaucagauccuugauggagaaaacugcacacuaauagaugcucuauugggagauccucagugugauggcuuucaaaauaagaaaugggaccuuuuuguugaacgaagcaaagccuacagcaacuguuacccuuaugaugugccggauuaugccucccuuaggucacuaguugccucauccggcacacuggaguuuaacaaugaaagcuucaauuggacuggagucacucaaaacggaacaaguucugcuugcauaaggagaucuaguaguaguuucuuuaguagauuaaauugguugacccacuuaaacuacacauacccagcauugaacgugacuaugccaaacaaugaacaauuugacaaauuguacauuugggggguucaccacccggguacggacaaggaccaaaucuuccuguaugcucaaucaucaggaagaaucacaguaucuaccaaaggaagccaacaagcuguaaucccaaauaucggaucuagacccagaauaagggauaucccuagcagaauaagcaucuauuggacaauaguaaaaccgggagacauacuuuugauuaacagcacagggaaucuaauugcuccuagggguuacuucaaaauacgaagugggaaaagcucaauaaugagaucagaugcacccauuggcaaaugcaagucugaaugcaucacuccaaauggaagcauucccaaugacaaaccauuccaaaauguaaacaggaucacauacggggccugucccagauauguuaagcauagcacucugaaauuggcaacaggaaugcgaaauguaccagagaaacaaacuagaggcauauuuggcgcaauagcggguuucauagaaaaugguugggagggaaugguggaugguugguacgguuucaggcaucaaaauucugagggaagaggacaagcagcagaucucaaaagcacucaagcagcaaucgaucaaaucaaugggaagcugaaucgauugaucgggaaaaccaacgagaaauuccaucagauugaaaaagaauucucagaaguagaaggaagaauucaggaccuugagaaauauguugaggacacuaaaauagaucucuggucauacaacgcggagcuucuuguugcccuggagaaccaacauacaauugaucuaacugacucagaaaugaacaaacuguuugaaaaaacaaagaagcaacugagggaaaaugcugaggauaugggaaaugguuguuucaaaauauaccacaaaugugacaaugccugcauaggaucaauaagaaauggaacuuaugaccacaauguguacagggaugaagcauuaaacaaccgguuccagaucaagggaguugagcugaagucaggguacaaagauuggauccuauggauuuccuuugccauaucauguuuuuugcuuuguguugcuuuguugggguucaucaugugggccugccaaaagggcaacauuaggugcaacauuugcauuuga

SEQ ID NO: 45518 - RNA, 1701 nt, Artificial Sequence
  derived and/or modified CDS sequence (wt) from hemagglutinin__InfluenzaA__ALE32021
augaagacuaucauugccuugagcuacauucuaugucugguuuucgcucaaaaaauuccuggaaaugacaauagcacggcaacgcugugccuugggcaccaugcaguaccaaacggaacgauagugaaaacaaucacgaaugaccgaauugaaguuacuaaugcuacugagcugguucagaauuccucaauaggugaaauaugcgacaguccucaucagauccuugauggagaaaacugcacacuaauagaugcucuauugggagacccucagugugauggcuuucaaaauaagaaaugggaccuuuuuguugaacgaagcaaagccuacagcaacuguuacccuuaugaugugccggauuaugccucccuuaggucacuaguugccucauccggcacacuggaguuuaacaaugaaagcuucaauuggacuggagucacucaaaacggaacaaguucugcuugcauaaggagaucuaguaguaguuucuuuaguagauuaaauugguugacccacuuaaacuacaaauacccagcauugaacgugacuaugccaaacaaugaacaauuugacaaauuguacauuugggggguucaccacccggguacggacaaggaccaaaucuuccuguaugcucaaucaucaggaagaaucacaguaucuaccaaaagaagccaacaagcuguaaucccaaauaucggaucuaggcccagaauaagggauaucccuagcagaauaagcaucuauuggacaauaguaaaaccgggagacauacuuuugauuaacagcacagggaaucuaauugcuccuagggguuacuucaaaauacgaagugggaaaagcucaauaaugagaucagaugcacccauuggcaaaugcaagucugaaugcaucacuccaaauggaagcauucccaaugacaaaccauuccaaaauguaaacaggaucacauacggggccugucccagauauguuaagcauagcacucugaaauuggcaacaggaaugcgaaauguaccagagaaacaaacuagaggcauauuuggcgcaauagcggguuucauagaaaaugguugggagggaaugguggaugguugguacgguuucaggcaucaaaauucugagggaagaggacaagcagcagaucucaaaagcacucaagcagcaaucgaucaaaucaaugggaagcugaaucgauugaucgggaaaaccaacgagaaauuccaucagauugaaaaagaauucucagaaguagaaggaagaauucaggaccuugagaaauauguugaggacacuaaaauagaucucuggucauacaacgcggagcuucuuguugcccuggagaaccaacauacaauugaucuaacugacucagaaaugaacaaacuguuugaaaaaacaaagaagcaacugagggaaaaugcugaggauaugggaaaugguuguuucaaaauauaccacaaaugugacaaugccugcauaggaucaauaagaaauggaacuuaugaccacaauguguacagggaugaagcauuaaacaaccgguuccagaucaagggaguugagcugaagucaggguacaaagauuggauccuauggauuuccuuugccauaucauguuuuuugcuuuguguugcuuuguugggguucaucaugugggccugccaaaagggcaacauuaggugcaacauuugcauuuga

SEQ ID NO: 45519 - RNA, 1701 nt, Artificial Sequence
  derived and/or modified CDS sequence (wt) from hemagglutinin__InfluenzaA__ALE32022
augaagacuaucauugcuuugagcuacauucuaugucugguuuucgcucaaaaaauuccuggaaaugacaauagcacggcaacgcugugccuugggcaccaugcaguaccgaacggaacgauagugaaaacaaucacaaaugaccgaauugaaguuacuaaugcuacugagcugguucagaauuccucaauaggugaaauaugcgacaguccucaucagauccuugauggagaaaacugcacacuaauagaugcucuauugggagacccucagugugauggcuuucaaaauaagaaaugggaccuuuuuguugaacgaagcaaagccuacagcaacuguuacccuuaugaugugccggauuaugccucccuuaggucacuaguugccucauccggcacacuggaguuuaacaaugaaagcuucaauuggacuggagucacucaaaacggaacaaguucugcuugcauaaggagaucuaguaguaguuucuuuaguagauuaaauugguugacccacuuaaacuacacauacccagcauugaacgugacuaugccaaacaaugagcaauuugacaaauuguacauuugggggguucaccacccggguacggacaaggaccaaaucuuccuguaugcucaaucaucaggaagaauaacaguaucuaccaaaagaagccaacaagcuguaaucccaaauaucggaucuagacccagaauaagggauaucccuagcagaauaagcaucuauuggacaauaguaaaaccgggagacauacuuuugauuaacagcacagggaaucuaauugcuccuagggguuacuucaaaauacgaagugggaaaagcucaauaaugagaucagaugcacccauuggcaaaugcaagucugagugcaucacuccaaauggaagcauucccaauggcaaaccauuccaaaauguaaacaggaucacauacggggccugucccagauauguuaagcauagcacucugaaauuggcaacaggaaugcgaaauguaccagagaaacaaacuagaggcauauuuggcgcaauagcggguuucauagaaaaugguugggagggaaugguggaugguugguacgguuucaggcaucaaaauucugagggaagaggacaagcagcagaucucaaaagcacucaagcagcaaucgaucaaaucaaugggaagcugaaucgauugaucgggaaaaccaacgagaaauuccaucagauugaaaaagaauucucagaaguagaaggaagaauucaggaccuugagaaauauguugaggacacuaaaauagaucucuggucauacaacgcggagcuucuuguugcccuggagaaccaacauacaauugaucuaacugacucagaaaugaacaaacuauuugaaaaaacaaagaagcaacugagggaaaaugcugaggauaugggaaaugguuguuucaaaauauaccacaaaugugacaaugccugcauaggaucaauaagaaauggaacuuaugaccacaauguguacagggaugaagcauuaaacaaccgguuccagaucaagggaguugagcugaagucaggguacaaagauuggauccuauggauuuccuuugccauaucauguuuuuugcuuuguguugcuuuguugggguucaucaugugggccugccaaaagggcaacauuaggugcaacauuugcauuuga

SEQ ID NO: 45520 - RNA, 1701 nt, Artificial Sequence
  derived and/or modified CDS sequence (wt) from hemagglutinin__InfluenzaA__ALE32023
augaagacuaucauugccuugagcuacauucuaugucugguuuucgcucaaaaaauuccuggaaaugacaauagcacggcaacgcugugccuugggcaccaugcaguaccaaacggaacgauagugaaaacaaucacgaaugaccgaauugaaguuacuaaugcuacugagcugguucagaauuccucaauaggugaaauaugcgacaguccucaucagauccuugauggagaaaacugcacacuaauagaugcucuauugggagacccucagugugauggcuuucaaaauaagaaaugggaccuuuuuguugaacgaagcaaagccuacagcaacuguuacccuuaugaugugccggauuaugccucccuuaggucacuaguugccucauccggcacacuggaguuuaacaaugaaagcuucaauuggacuggagucacucaaaacggaacaaguucugcuugcauaaggagaucuaguaguaguuucuuuaguagauuaaauugguugacccacuuaaacuacacauacccagcauugaacgugacuaugccaaacaaugaacaauuugacaaauuguacauuugggggguucaccacccggguacggacaaggaccaaaucuuccuguaugcucaaucaucaggaagaaucacaguaucuaccaaaagaagccaacaagcuguaaucccaaauaucggaucuaggcccagaauaagggauaucccuagcagaauaagcaucuauuggacaauaguaaaaccgggagacauacuuuugauuaacagcacagggaaucuaauugcuccuagggguuacuucaaaauacgaagugggaaaagcucaauaaugagaucagaugcacccauuggcaaaugcaagucugaaugcaucacuccaaauggaagcauucccaaugacaaaccauuccaaaauguaaacaggaucacauacggggccugucccagauauguuaagcauagcacucugaaauuggcaacaggaaugcgaaauguaccagagaaacaaacuagaggcauauuuggcgcaauagcggguuucauagaaaaugguugggagggaaugguggaugguugguacgguuucaggcaucaaaauucugagggaagaggacaagcagcagaucucaaaagcacucaagcagcaaucgaucaaaucaaugggaagcugaaucgauugaucgggaaaaccaacgagaaauuccaucagauugaaaaagaauucucagaaguagaaggaagaauucaggaccuugagaaauauguugaggacacuaaaauagaucucuggucauacaacgcggagcuucuuguugcccuggagaaccaacauacaauugaucuaacugacucagaaaugaacaaacuguuugaaaaaacaaagaagcaacugagggaaaaugcugaggauaugggaaaugguuguuucaaaauauaccacaaaugugacaaugccugcauaggaucaauaagaaauggaacuuaugaccacaauguguacagggaugaagcauuaaacaaccgguuccagaucaagggaguugagcugaagucaggguacaaagauuggauccuauggauuuccuuugccauaucauguuuuuugcuuuguguugcuuuguugggguucaucaugugggccugccaaaagggcaacauuaggugcaacauuugcauuuga

SEQ ID NO: 45521 - RNA, 1701 nt, Artificial Sequence
  derived and/or modified CDS sequence (wt) from hemagglutinin__InfluenzaA__ALE32024
augaagacuaucauugcuuugagcuacauucuaugucugguuuucgcucaaaaacuuccuggaaaugacaauagcacggcaacgcugugccuugggcaccaugcaguaccaaacggaacgauagugaaaacaaucacgaaugaccgaauugaaguuacuaaugcuacugagcugguucagaauuccucaauaggugaaauaugcgacaguccucaucagauccuugauggaaaaaacugcacacuaauagaugcucuauugggagacccucagugugauggcuuucaaaauaagagaugggaccuuuuuguugaacggagcaaagccuacagcaacuguuacccuuaugaugugccggauuaugccucccuuaggucacuaguugccucauccggcacacuggaguuuaacgaugaaagcuucaauugggcuggagucacucaaaacggaaaaaguucugcuugcauaaggggaucuaauaguaguuucuuuaguagauuaaauugguugacccacucaaacuucaaauacccagcauugaacgugacuaugccaaacaaugaacaauuugacaaauuguacauuugggggguucaccacccggguacagacaaggaccaaaucuuccuguaugcucacucaucaggaagaaucacaguaucuaccaaaagaagccaacaagcuguaaucccgaauaucggaucuagacccaggauaaggaauaucccuagcagaauaagcaucuauuggacaauaguaaaaccgggagacauacuuuugauuaacagcacagggaaucuaauugcuccuagggguuacuucaaaauacaaagugggaaaagcucaauaaugagaucagaugcacccauuggcaaaugcaagucugaaugcaucacuccaaauggaagcauucccaaugacaaaccauuccaaaauguaaacaggaucacauacgggaccugucccagauauguuaagcaaagcacucugaaauuggcaacaggaaugcgaaauguaccagagaaacaaacuagaggcauauuuggcgcaauagcggguuucauagaaaaugguugggagggaaugaaggaugguugguacgguuucaggcaucaaaauucugagggaagaggacaagcagcagaucucaaaagcacucaagcagcaaucgaucaaaucaaugggaagcugaaucgauugaucgggaaaaccaacgagaaauuccaucagauugaaaaagaauucucagaaguagaagggagaauucaggaccuugagaaauauguugaggacacaaaaauagaucucuggucauacaacgcggagcuucuuguugcccuggagaaccaacauacaauugaucuaacugacucagaaaugaacaaacuguuugaaaaaacaaagaagcaacugagggaaaaugcugaggauaugggcaaugguuguuucaaaauauaccacaaaugugacaaugccugcauaggaucaaucagaaauggaacuuaugaccacuauguauacagggaugaagcuuuaaacaaccguuuccagaucaagggaguugagcugaagucaggguacaaagauuggauccuauggauuuccuuugccauaucauguuuuuugcuuuguguugcuuuguugggguucaucaugugggccugccaaaagggcaacauuaggugcaacauuugcauuuga

SEQ ID NO: 45522 - RNA, 1701 nt, Artificial Sequence
  derived and/or modified CDS sequence (wt) from hemagglutinin__InfluenzaA__ALE32025
augaagacuaucauugcuuugagcuacauucuaugucugguuuucgcucaaaaaauuccuggaaaugacaauagcacggcaacgcugugccuugggcaccaugcaguaccaaacggaacgauagugaaaacaaucacaaaugaccgaauugaaguuacuaaugcuacugagcugguucagaauuccucaauaggugaaauaugcgacaguccucaucagauccuugauggagaaaacugcacacuaauagaugcucuauugggagacccucagugugauggcuuucaaaauaagaaaugggaccuuuuuguugaacgaagcaaagccuacagcaacuguuacccuuaugaugugccggauuaugccucccuuaggucacuaguugccucauccggcacacuggaguuuaacaaugaaagcuucaauuggacuggagucacucaaaacggaacaaguucugcuugcauaaggaaaucuaguaguaguuucuuuaguagauuaaauugguugacccacuuaaacuacacauacccagcauugaacgugacuaugccaaacaaugaacaauuugacaaauuguacauuugggggguucaccacccggguacggacaaggaccaaaucuuccuguaugcucgaucaucaggaagaaucacaguaucuaccaaaagaagccaacaagcuguaaucccaaauaucggaucuagacccagaauaagggauaucccuagcagaauaagcaucuauuggacaauaguaaaaucgggagacauacuuuugauuaacagcacagggaaucuaauugcuccuagggguuacuucaaaauacgaagugggaaaagcucaauaaugagaucagaugcacccauuggcaaaugcaagucugaaugcaucacuccaaauggaagcauucccaaugacaaaccauuccaaaauguaaacaggaucacauacggggccugucccagauauguuaagcauagcacucugaaauuggcaacaggaaugcgaaauguaccagagaaacaaacuagaggcauauuuggcgcaauagcggguuucauagaaaaugguugggagggaaugguggaugguugguacgguuucaggcaucaaaauucugagggaagaggacaagcagcagaucucaaaagcacucaagcagcaaucgaucaaaucaaugggaagcugaaucgauugaucgggaaaaccaacgagaaauuccaucagauugaaaaagaauucucagaaguagaaggaagaauucaggaccuugagaaauauguugaggacacuaaaauagaucucuggucauacaacgcggagcuucuuguugcccuggagaaucaacauacaauugaucuaacugacucagaaaugagcaaacuguuugaaaaaacaaagaagcaacugagggaaaaugcugaggauaugggaaaugguuguuucaaaauauaccacaaaugugacaaugccugcauaggaucaauaagaaauggaacuuaugaccacaauguguacagggaugaagcauuaaacaaccgguuccagaucaagggaguugagcugaagucaggguacaaagauuggauccuauggauuuccuuugccauaucauguuuuuugcuuuguguugcuuuguugggguucaucaugugggccugccaaaagggcaacauuaggugcaacauuugcauuuga

SEQ ID NO: 45523 - RNA, 1701 nt, Artificial Sequence; identical to SEQ ID NO: 45115
  derived and/or modified CDS sequence (wt) from hemagglutinin__InfluenzaA__ALE32026

SEQ ID NO: 45524 - RNA, 1701 nt, Artificial Sequence; identical to SEQ ID NO: 44999
  derived and/or modified CDS sequence (wt) from hemagglutinin__InfluenzaA__ALE32027

SEQ ID NO: 45525 - RNA, 1701 nt, Artificial Sequence
  derived and/or modified CDS sequence (wt) from hemagglutinin__InfluenzaA__ALE32028
augaagacuaucauugcuuugagccacauucuaugucugguuuucgcucaaaaaauuccuggaaaugacaauagcacggcaacgcugugccuugggcaccaugcaguaccaaacggaacgauagugaaaacaaucacaaaugaccgaauugaaguuacuaaugcuacugagcugguucagaauuccucaauaggugaaauaugcgacaguccucaucagauccuugauggagaaaacugcacacuaauagaugcucuauugggagacccucagugugauggcuuucaaaauaagaaaugggaccuuuuuguugaacgaagcaaagccuacagcaacuguuacccuuaugaugugccggauuaugccucccuuaggucacuaguugccucauccggcacacuggaguuuaacaaugaaagcuucaauuggacuggagucacucaaaacggaacaaguucugcuugcauaaggagaucuaguaguaguuucuuuaguagauuaaauugguugacccacuuaaacuacacauacccagcauugaacgugacuaugccaaacaaugaacaauuugacaaauuguacauuugggggguucaccacccggguacggacaaggaccaaaucuuccuguaugcucaaucaucaggaagaaucacaguaucuaccaaaagaagccaacaagcuguaaucccaaauaucggaucuagacccagaauaagggauaucccuagcagaauaagcaucuauuggacaauaguaaaaccaggagacauacuuuugauuaacagcacagggaaucuaauugcuccuagggguuacuucaaaauacgaagugggaaaagcucaauaaugagaucagaugcacccauuggcaaaugcaagucugaaugcaucacuccaaauggaagcauucccaaugacaaaccauuccaaaauguaaacaggaucacauacggggccugucccagauauguuaagcauagcacucugaaauuggcaacaggaaugcgaaauguaccagagaaacaaacuagaggcauauuuggcgcaauagcggguuucauagaaaaugguugggagggaaugauggaugguugguacgguuucaggcaucaaaauucugagggaagaggacaagcagcagaucucaaaagcacucaagcagcaaucgaucaaaucaaugggaagcugaaucgauugaucgggaaaaccaacgagaaauuccaucagauugaaaaagaauucucagaaguagaaggaagaauucaggaccuugagaaauauguugaggacacuaaaauagaucucuggucauacaacgcggagcuucuuguugcccuggagaaccaacauacaauugaucuaacugacucagaaaugaacaaacuguuugaaaaaacaaagaagcaacugagggaaaaugcugaggauaugggaaaugguuguuucaaaauauaccacaaaugugacaaugccugcauaggaucaauaagaaauggaacuuaugaccacaauguguacagggaugaagcauuaaacaaccgguuccagaucaagggaguugagcugaagucaggguacaaagauuggauccuauggauuuccuuugccauaucauguuuuuugcuuuguguugcuuuguugggguucaucaugugggccugccaaaagggcaacauuaggugcaacauuugcauuuga

SEQ ID NO: 45526 - RNA, 1701 nt, Artificial Sequence
  derived and/or modified CDS sequence (wt) from hemagglutinin__InfluenzaA__ALE32029
augaagacuaucauugcuuugagcuacauucuaugucugguuuucgcccaaaaaauuccuggaaaugacaauagcacggcaacgcugugccuugggcaccacgcaguaccaaacggaacgauagugaaaacaaucacgaaugaccgaauugaaguuacuaaugcuacugagcugguucagaauuccucaauaggugaaauaugcgacaguccucaucagauccuugauggagaaaacugcacacuaauagaugcucuauugggagacccucagugugauggcuuucaaaauaagaaaugggaccuuuuuguugaacgaagcaaagccuacagcaacuguuacccuuaugaugugccggauuaugccucccuuaggucacuaguugccucauccggcacacuggaguuuaacaaugaaagcuucaauuggacuggagucacucaaaacggaacaaguucugcuugcauaaggagaucuaguaguaguuucuuuaguagauuaaauugguugacccacuuaaacuacaaauacccagcauugaacguaacuaugccaaacaaugaacaauuugacaaauuguacauuugggggguucaccacccggguacggacaaggaccaaaucuuccuguaugcucaaucaucaggaagaaucacaguaucuaccaaaagaagccaacaagcuguaaucccaaauaucggaucuagacccagaauaagggauaucccuagcagaauaagcaucuauuggacaauaguaaaaccgggagacauacuuuugauuaacagcacagggaaucuaauugcuccuagggguuacuucaaaauacgaagugggaaaagcucaauaaugagaucagaugcacccauuggcaaaugcaagucugaaugcaucacuccaaauggaagcauucccaaugacaaaccauuccaaaauguaaacaggaucacauacggggccugucccagauauguuaagcauagcacucugaaauuggcaacaggaaugcgaaauguaccagagaaacaaacuagaggcauauuuggcgcaauagcggguuucauagaaaaugguugggagggaaugguggaugguugguacgguuucaggcaucaaaauucugagggaagaggacaagcagcagaucucaaaagcacucaagcagcaaucgaucaaaucaaugggaagcugaaucgauugaucgggaaaaccaacgagaaauuccaucagauugaaaaagaauucucagaaguagaaggaagaauucaggaccuugagaaauauguugaggacacuaaaauagaucucuggucauacaacgcggagcuucuuguugcccuggagaaccaacauacaauugaucuaacugacucagaaaugaacaaacuguuugaaaaaacaaagaagcaacugagggaaaaugcugaggauaugggaaaugguuguuucaaaauauaccacaaaugugacaaugccugcauaggaucaauaaggaauggaacuuaugaccacaauguguacagggaugaagcauuaaacaaccgguuccaaaucaagggaguugagcugaagucaggguacaaagauuggauccuauggauuuccuuugccauaucauguuuuuugcuuuguguugcuuuguugggguucaucaugugggccugccaaaagggcaacauuaggugcaacauuugcauuuga

SEQ ID NO: 45527 - RNA, 1701 nt, Artificial Sequence
  derived and/or modified CDS sequence (wt) from hemagglutinin__InfluenzaA__ALE32030
augaagacuaucauugcuuugagccacauucuaugucugguuuucgcucaaaaaauuccuggaaaugacaauagcacggcaacgcugugccuugggcaccaugcaguaccaaacggaacgauagugaaaacaaucacaaaugaccgaauugaaguuacuaaugcuacugagcugguucagaauuccucaauaggugaaauaugcgacaguccucaucagauccuugauggagaaaacugcacacuaauagaugcucuauugggagacccucagugugauggcuuucaaaauaagaaaugggaccuuuuuguugaacgaagcaaagccuacagcaacuguuacccuuaugaugugccggauuaugccucccuuaggucacuaguugccucauccggcacacuggaguuuaacaaugaaagcuucaauuggacuggagucacucaaaacggaacaaguucugcuugcauaaggagaucuaguaguaguuucuuuaguagauuaaauugguugacccacuuaaacuacauauacccagcauugaacgugacuaugccaaacaaugaacaauuugacaaauuguacauuugggggguucaccacccggguacggacaaggaccaaaucuuccuguaugcucaaucaucaggaagaaucacaguaucuaccaaaagaagccaacaagcuguaaucccaaauaucggaucuagacccagaauaagggauaucccuagcagaauaagcaucuauuggacaauaguaaaaccaggagacauacuuuugauuaacagcacagggaaucuaauugcuccuagggguuacuucaaaauacgaagugggaaaagcucaauaaugagaucagaugcacccauuggcaaaugcaagucugaaugcaucacuccaaauggaagcauucccaaugacaaaccauuccaaaauguaaacaggaucacauacggggccugucccagauauguuaagcauagcacucugaaauuggcaacaggaaugcgaaauguaccagagaaacaaacuagaggcauauuuggcgcaauagcggguuucauagaaaaugguugggagggaaugauggaugguugguacgguuucaggcaucaaaauucugagggaagaggacaagcagcagaucucaaaagcacucaagcagcaaucgaucaaaucaaugggaagcugaaucgauugaucgggaaaaccaacgagaaauuccaucagauugaaaaagaauucucagaaguagaaggaagaauucaggaccuugagaaauauguugaggacacuaaaauagaucucuggucauacaacgcggagcuucuuguugcccuggagaaccaacauacaauugaucuaacugacucagaaaugaacaaacuguuugaaaaaacaaagaagcaacugagggaaaaugcugaggauaugggaaaugguuguuucaaaauauaccacaaaugugacaaugccugcauaggaucaauaagaaauggaacuuaugaccacaauguguacagggaugaagcauuaaacaaccgguuccagaucaaaggaguugagcugaagucaggguacaaagauuggauccuauggauuuccuuugccauaucauguuuuuugcuuuguguugcuuuguugggguucaucaugugggccugccaaaagggcaacauuaggugcaacauuugcauuuga

SEQ ID NO: 45528 - RNA, 1701 nt, Artificial Sequence
  derived and/or modified CDS sequence (wt) from hemagglutinin__InfluenzaA__ALE32031
augaagacuaucauugccuugagcuacauucuaugucugguuuucgcucaaaaaauuccuggaaaugacaauagcacggcaacgcugugccuugggcaccaugcaguaccaaacggaacgauagugaaaacaaucacaaaugaccgaauugaaguuacuaaugcuacugagcugguucagaauuccucaauaggugaaauaugcgacaguccucaucagauccuugauggagaaaacugcacacuaauagaugcucuauugggagacccucagugugauggcuuucaaaauaagaaaugggaccuuuuuguugaacgaagcaaagccuacagcaacuguuacccuuaugaugugccggauuaugccucccuuaggucacuaguugccucauccggcacacuggaguuuaacaaugaaagcuucaauuggacuggagucacucaaaacggaacaaguucugcuugcauaaggagaucuaguaguaguuucuuuaguagauuaaauugguugacccacuuaaacuacacauacccagcauugaacgugacuaugccaaacaaugaacaauuugacaaauuguacauuugggggguucaccacccggguacggacaaggaccaaaucuuccuguaugcucaaucaucaggaagaaucacuguaucuaccaaaagaagccaacaagcuguaaucccaaauaucggaucuagacccagaauaagggauaucccuagcagaauaagcaucuauuggacaauaguaaaaccgggagacauacuuuugauuaacagcacagggaaucuaauugcuccuagggguuacuucaaaauacgaagugggaaaagcucaauaaugagaucagaugcacccauuggcaaaugcaagucugaaugcaucacuccaaauggaagcauucccaaugacaaaccauuccaaaauguaaacaggaucacauacggggccugucccagauauguuaagcauaguacucugaaauuggcaacaggaaugcgaaauguaccagagaaacaaacuagaggcauauuuggcgcaauagcggguuucauagaaaaugguugggagggaaugauggaugguugguacgguuucaggcaucaaaauucugagggaagaggacaagcagcagaucucaaaagcacucaagcagcaaucgaucaaaucaaugggaagcugaaucgauugaucgggaaaaccaacgagaaauuccaucagauugaaaaagaauucucagaaguagaaggaagaauucaggaccuugagaaauauguugaggacacuaaaauagaucucuggucauacaacgcggagcuucuuguugcccuggagaaccaacauacaauugaucuaacugacucagaaaugaacaaacuguuugaaaaaacaaagaagcaacugagggaaaaugcugaggauaugggaaaugguuguuucaaaauauaccacaaaugugacaaugccugcauaggaucaauaagaaauggaacuuaugaccacaauguguacagggaugaagcauuaaacaaccgguuccagaucaagggaguugagcugaagucaggguacaaagauuggauccuauggauuuccuuugccauaucauguuuuuugcuuuguguugcuuuguugggguucaucaugugggccugccaaaagggcaacauuaggugcaacauuugcauuuga

SEQ ID NO: 45529 - RNA, 1701 nt, Artificial Sequence
  derived and/or modified CDS sequence (wt) from hemagglutinin__InfluenzaA__ALE32032
augaagacuaucauugccuugagcuacauucuaugucugguuuucgcucaaaaaauuccuggaaaugacaauagcacggcaacgcugugccuugggcaccaugcaguaccaaacggaacgauagugaaaacaaucacaaaugaccgaauugaaguuacuaaugcuacugagcugguucagaauuccucaauaggugaaauaugcgacaguccucaucagauccuugauggagaaaacugcacacuaauagaugcucuauugggagacccucagugugauggcuuucaaaauaagaaaugggaccuuuuuguugaacgaagcaaagccuacagcaacuguuacccuuaugaugugccggauuaugccucccuuaggucacuaguugccucauccggcacacuggaguuuaacaaugaaagcuucaauuggacuggagucacucaaaacggaacaaguucugcuugcauaaggagaucuaguaguaguuucuuuaguagauuaaauugguugacccacuuaaacuacacauacccagcauugaacgugacuaugccaaacaaugaacaauuugacaaauuguacauuugggggguucaccacccggguacggacaaggaccaaaucuuccuguaugcucaaucaucaggaagaaucgcuguaucuaccaaaagaagccaacaagcuguaaucccaaauaucggaucuagacccagaauaagggauaucccuagcagaauaagcaucuauuggacaauaguaaaaccgggagacauacuuuugauuaacagcacagggaaucuaauugcuccuagggguuacuucaaaauacgaagugggaaaagcucaauaaugagaucagaugcacccauuggcaaaugcaagucugaaugcaucacuccaaauggaagcauucccaaugacaaaccauuccaaaauguaaacaggaucacauacggggccugucccagauauguuaagcauagcacucugaaauuggcaacaggaaugcgaaauguaccagagaaacaaacuagaggcauauuuggcgcaauagcggguuucauagaaaaugguugggagggaaugauggaugguugguacgguuucaggcaucaaaauucugagggaagaggacaagcagcagaucucaaaagcacucaagcagcaaucgaucaaaucaaugggaagcugaaucgauugaucgggaaaaccaacgagaaauuccaucagauugaaaaagaauucucagaaguagaaggaagaauucaggaccuugagaaauauguugaggacacuaaaauagaucucuggucauacaacgcggagcuucuuguugcccuggagaaccaacauacaauugaucuaacugacucagaaaugaacaaacuguuugaaaaaacaaagaagcaacugagggaaaaugcugaggauaugggaaaugguuguuucaaaauauaccacaaaugugacaaugccugcauaggaucaauaagaaauggaacuuaugaccacaauguguacagggaugaagcauuaaacaaccgguuccagaucaagggaguugagcugaagucaggguacaaagauuggauccuauggauuuccuuugccauaucauguuuuuugcuuuguguugcuuuguugggguucaucaugugggccugccaaaagggcaacauuaggugcaacauuugcauuuga

SEQ ID NO: 45530 - RNA, 1701 nt, Artificial Sequence; identical to SEQ ID NO: 45424
  derived and/or modified CDS sequence (wt) from hemagglutinin__InfluenzaA__ALE32033

SEQ ID NO: 45531 - RNA, 1701 nt, Artificial Sequence
  derived and/or modified CDS sequence (wt) from hemagglutinin__InfluenzaA__ALE32034
augaagacuaucauugcuuugggcuacauucuaugucugguuuucgcucaaaaaauuccuggaaaugacaauagcacggcaacgcugugccuugggcaccaugcaguaccaaacggaacgauagugaaaacaaucacaaaugaccgaauugaaguuacuaaugcuacugaacugguucagaauuccucaauaggugaaauaugcgacaguccucauaagauccuugauggagaaaacugcacacuaauagaugcucuauugggagacccucagugugauggcuuucaaaauaagaaaugggaccuuuuuguugaacgaagcaaagccuacagcaacuguuacccuuaugaugugccggauuaugccucccuuaggucacuaguugccucauccggcacacuggaguuuaacaaugaaagcuucaauuggacuggagucacucaaaacggaacaaguucugcuugcauaaggagaucuaguaguaguuucuuuaguagauuaaauugguugacccacuuaaaauacacauacccagcauugaacgugacuaugccaaacaaugaacaauuugacaaauuguacauuugggggguucaccacccggguacggacaaggaccaaaucuuccuguaugcucaaucaucaggaagaaucacaguaucuaccaaaagaagccaacaagcuguaaucccaaauaucggaucuagacccagaauaagggauaucccuagcagaauaagcaucuauuggacaauaguaaaaccgggagacauacuuuugauuaacagcacagggaaucuaauugcuccuagggguuacuucaaaauacgaagugggaaaagcucaauaaugagaucagaugcacccauuggcaaaugcaagucugaaugcaucacuccaaauggaagcauucccaaugacaaaccauuccaaaauguaaacaggaucacauacggggccugucccagauauguuaagcauagcacucugaaauuggcaacaggaaugcgaaauguaccagagaaacaaacuagaggcauauuuggcgcaauagcggguuucauagaaaaugguugggagggaaugguggaugguugguacgguuucaggcaucaaaauucugagggaagaggacaagcagcagaucucaaaagcacucaagcagcaaucgaucaaaucaaugggaagcugaaucgauugaucgggaaaaccaacgagaaauuccaucagauugaaaaagaauucucagaaguagaaggaagaauucaggaccuugagaaauauguugaggacacuaaaauagaucucuggucauacaacgcggagcuucuuguugcccuggagaaccaacauacaauugaucuaacugacucagaaaugaacaaacuguuugaaaaaacaaagaagcaacugagggaaaaugcugaggauaugggaaaugguuguuucaaaauauaccacaaaugugacaaugccugcauaggaucaauaagaaauggaacuuaugaccacaauguguacagggaugaagcauuaaacaaccgguuccagaucaagggaguugagcugaagucaggguacaaagauuggauccuauggauuuccuuugccauaucauguuuuuugcuuuguguugcuuuguugggguucaucaugugggccugccaaaagggcaacauuaggugcaacauuugcauuuga

SEQ ID NO: 45532 - RNA, 1701 nt, Artificial Sequence
  derived and/or modified CDS sequence (wt) from hemagglutinin__InfluenzaA__ALE32035
augaagacuaucauugcuuugagcuacauucuaugucugguuuucgcucaaaaacuuccuggaaaugacaauagcacggcaacgcugugccuugggcaccaugcaguaccaaacggaacgauagugaaaacaaucacgaaugaccgaauugaaguuacuaaugcuacugagcugguucagaauuccucaauaggugaaauaugcgacaguccucaucagauccuugauggaaaaaacugcacacuaauagaugcucuauugggagacccucagugugauggcuuucaaaacaagaaaugggaccuuuuuguugaacgaagcaaagcccacagcaacuguuaccccuaugaugugccggauuaugccucccuuaggucacuaguugccucaucuggcacacuggaguuuaacaaugaaagcuucaauugggcuggagucacucaaaacggaacaaguucuucuugcauaaggggaucuaauaguaguuucuuuaguagauuaaauugguugacccacuuaaacuccaaauacccagcauuaaacgugacuaugccaaacaaugaacaauuugacaaauuguacauuugggggguucaccacccggguacggacaaggaccaaaucuuccuguaugcacaaccaucaggaagaaucacaguaucuaccaaaagaagccaacaagcuguaaucccgaauaucggaucuagacccagaauaagggauaucccuagcagaauaagcaucuauuggacaauaguaaaaccgggagacauacuuuugauuaacagcacagggaaucuaauugcuccuagggguuacuucaaaauacgaagugggaaaagcucaauaaugagaucagaugcaccuauuggcaaaugcaagucugaaugcaucacuccaaauggaagcauucccaaugacaaaccauuccaaaauguaaacaggaucacauacggggccugucccagauauguuaagcaaagcacucuaaaauuggcaacaggaaugcgaaauguaccagagagacaaacuagaggcauauuuggcgcaauagcggguuucauagaaaaugguugggagggaaugguggaugguugguacggcuucaggcaucaaaauucugagggaagaggacaagcggcagaucucaaaagcacucaagcagcaaucgaucaaaucaaugggaagcugaaucgauugaucgggaaaaccaacgagaaauuccaucagauugaaaaagaauucucagaaguagaagggagaauucaggaccuugagaaauauguugaggacacaaaaauagaucucuggucauacaacgcggagcuucuuguugcccuggagaaccaacauacaauugaucuaacugacucagaaaugaacaaacuguuugaaaaaacaaagaagcaacugagggaaaaugcugaggauaugggcaaugguuguuucaaaauauaccacaaaugugacaaugccugcauaggaucaaucagaaauggaacuuaugaccacgauguauacagggaugaagcauuaaacaaccgguuccagaucaagggaguugagcugaagucaggguacaaagauuggauccuauggauuuccuuugccauaucauguuuuuugcuuuguguugcuuuguugggguucaucaugugggccugccaaaagggcaacauuaggugcaacauuugcauuuga

SEQ ID NO: 45533 - RNA, 1701 nt, Artificial Sequence
  derived and/or modified CDS sequence (wt) from hemagglutinin__InfluenzaA__ALE32036
augaagacuaucauugcuuugggcuacauucuaugucugguuuucgcucaaaaaauuccuggaaaugacaauagcacggcaacgcugugccuugggcaccaugcaguaccaaacggaacgauagugaaaacaaucacaaaugaccgaauugaaguuacuaaugcuacugaacugguucagaauuccucaauaggugaaauaugcgacaguccucauaagauccuugauggagaaaacugcacacuaauagaugcucuauugggagacccucagugugauggcuuucaaaauaagaaaugggaccuuuuuguugaacgaagcaaagccuacagcaacuguuacccuuaugaugugccggauuaugccucccuuaggucacuaguugccucauccggcacacuggaguuuaacaaugaaagcuucaauuggacuggagucacucaaaacggaacaaguucugcuugcauaaggagaucuaguaguaguuucuuuaguagauuaaauugguugacccacuuacacuacacauacccagcauugaacgugacuaugccaaacaaugaacaauuugacaaauuguacauuugggggguucaccacccggguacggacaaggaccaaaucuuccuguaugcucaaucaucaggaagaaucacaguaucuaccaaaagaagccaacaagcuguaaucccaaauaucggaucuagacccagaauaagggauaucccuagcagaauaagcaucuauuggacaauaguaaaaccgggagacauacuuuugauuaacagcacagggaaucuaauugcuccuagggguuacuucaaaauacgaagugggaaaagcucaauaaugagaucagaugcacccauuggcaaaugcaagucugaaugcaucacuccaaauggaagcauucccaaugacaaaccauuccaaaauguaaacaggaucacauacggggccugucccagauauguuaagcauagcacucugaaauuggcaacaggaaugcgaaauguaccagagaaacaaacuagaggcauauuuggcgcaauagcggguuucauagaaaaugguugggagggaaugguggaugguugguacgguuucaggcaucaaaauucugagggaagaggacaagcagcagaucucaaaagcacucaagcagcaaucgaucaaaucaaugggaagcugaaucgauugaucgggaaaaccaacgagaaauuccaucagauugaaaaagaauucucagaaguagaaggaagaauucaggaccuugagaaauauguugaggacacuaaaauagaucucuggucauacaacgcggagcuucuuguugcccuggagaaccaacauacaauugaucuaacugacucagaaaugaacaaacuguuugaaaaaacaaagaagcaacugagggaaaaugcugaggauaugggaaaugguuguuucaaaauauaccacaaaugugacaaugccugcauaggaucaauaagaaauggaacuuaugaccacaauguguacagggaugaagcauuaaacaaccgguuccagaucaagggaguugagcugaagucaggguacaaagauuggauccuauggauuuccuuugccauaucauguuuuuugcuuuguguugcuuuguugggguucaucaugugggccugccaaaagggcaacauuaggugcaacauuugcauuuga

SEQ ID NO: 45534 - RNA, 1701 nt, Artificial Sequence
  derived and/or modified CDS sequence (wt) from hemagglutinin__InfluenzaA__ALE32037
augaagacuaucauugcuuugagcuacauucuaugucugguuuucgcucaaaaaauuccuggaaaugacaauagcacggcaacgcugugccuugggcaccaugcaguaccaaacggaacgauagugaaaacaaucacaaaugaccgaauugaaguuacuaaugcuacugaguugguucagaauuccucaauaggugaaauaugcgacaguccucaucagauccuugauggagaaaacugcacacuaauagaugcucuauugggagacccucagugugauggcuuucaaaauaagaaaugggaccuuuuuguugaacgaagcaaagccuacagcaacuguuacccuuaugaugugccggauuaugccucccuuaggucacuaguugccucauccggcacacuggaguuuaacaaugaaagcuucaauuggacuggagucacucaaaacggaacaaguucugcuugcauaaggagaucuaguaguaguuucuuuaguagauuaaauugguugacccacuuaaacuacaaauacccagcauugaacgugacuaugccaaacaaugaacaauuugacaaauuguacauuugggggguucaccacccggguacggacaaggaccaaaucuuccuguaugcucaaucaucaggaagaaucacaguaucuaccaaaagaagccaacaagcuguaaucccaaauaucggaucuagacccagaauaagggauaucccuagcagaauaagcaucuauuggacaauaguaaaaccgggagacauacuuuugauuaacagcacagggaaucuaauugcuccuagggguuacuucaaaauacuaagugggaaaagcucaauaaugagaucagaugcacccauuggcaaaugcaagucugaaugcaucacuccaaauggaagcauucccaaugacaaaccauuccaaaauguaaacaggaucacauacggggccugucccagauauguuaagcauagcacucugaaauuggcaacaggaaugcgaaauguaccagagaaacaaacuagaggcauauuuggcgcaauagcggguuucauagaaaaugguugggaaggaaugguggaugguugguacgguuucaggcaucaaaauucugagggaagaggacaagcagcagaucucaaaagcacucaagcagcaaucgaucaaaucaaugggaagcugaaucgguugaucgggaaaaccaacgagaaauuccaucagauugaaaaagaauucucagaaguagaaggaagaauucaggaccuugagaaauauguugaggacacuaaaauagaucucuggucauauaacgcggagcuucuuguugcccuggagaaccaacauacaauugaucuaacugacucagaaaugaacaaacuguuugaaaaaacaaagaagcaacugagggaaaaugcugaggauaugggaaaugguuguuucaaaauauaccacaaaugugacaaugccugcauaggaucaauaagaaauggaacuuaugaccacaauguguacagggaugaagcauuaaacaaccgguuccagaucaaggggguugagcugaagucaggguacaaagauuggauccuauggauuuccuuugccauaucauguuuuuugcuuuguguugcuuuguugggguucaucaugugggccugccaaaagggcaacauuaggugcaacauuugcauuuga

SEQ ID NO: 45535 - RNA, 1701 nt, Artificial Sequence
  derived and/or modified CDS sequence (wt) from hemagglutinin__InfluenzaA__ALE32038
augaagacaaucauugcuuugagcuacauucuaugucugguuuucgcucaaaaaauuccuggaaaugacaauagcacggcaacgcugugccuugggcaccaugcaguaccaaacggaacgauagugaaaacaaucacaaaugaccgaauugaaguuacuaaugcuacugagcugguucagaauuccucaauaggugaaauaugcgacaguccucaucagauccuugauggagaaaacugcacacuaauagaugcucuauugggagacccucagugugauggcuuucaaaauaagaaaugggaccuuuuuguugaacgaagcaaagccuacagcaacuguuacccuuaugaugugccggauuaugccucccuuaggucacuaguugccucauccggcacacuggaguuuaacaaugaaagcuucaauuggacuggagucacucaaaacggaacaaguucugcuugcauaaggagaucuaguaguaguuucuuuaguagauuaaauugguugacccacuuaaacuacacauacccagcauugaacgugacuaugccaaacaaugagcaauuugacaaauuguacauuugggggguucaccacccggguacggacaaggaccaaaucuuccuguaugcucaaucaucaggaagaauaacaguaucuaccaaaagaagccaacaagcuguaaucccaaauaucggaucuaggcccagaauaagggauaucccuagcagaauaagcaucuauuggacaauaguaaaaccgggagacauacuuuugauuaacagcaaagggaaucuaauugcuccuagggguuacuucaaaauacgaagugggaaaagcucaauaaugagaucagaugcacccauuggcaaaugcaagucugagugcaucacuccaaauggaagcauucccaaugacaaaccauuccaaaauguaaacaggaucacauacggggccugucccagauauguuaagcauagcacucugaaauuggcaacaggaaugcgaaauguaccagagaaacaaacuagaggcauauuuggcgcaauagcggguuucauagaaaaugguugggagggaaugguggaugguugguacgguuucaggcaucuaaauucugagggaagaggacaagcagcagaucucaaaagcacucaagcagcaaucgaucaaaucaaugggaagcugaaucgauugaucgggaaaaccaacgagaaauuccaucagauugaaaaagaauucucagaaguagaaggaagaauucaggaccuugagaaauauguugaggacacuaaaauagaucucuggucauacaacgcggagcuucuuguugcccuggagaaccaacauacaauugaucuaacugacucagaaaugaacaaacuguuugaaaaaacaaagaagcaacugagggaaaaugcugaggauaugggaaaugguuguuucaaaauauaccacaaaugugacaaugccugcauaggaucaauaagaaauggaacuuaugaccacaauguguacagggaugaagcauuaaacaaccgguuccagaucaagggaguugagcugaagucaggguacaaagauuggauccuauggauuuccuuugccauaucauguuuuuugcuuuguguugcuuuguugggguucaucaugugggccugccaaaagggcaacauuaggugcaacauuugcauuuga

SEQ ID NO: 45536 - RNA, 1701 nt, Artificial Sequence; identical to SEQ ID NO: 45140
  derived and/or modified CDS sequence (wt) from hemagglutinin__InfluenzaA__ALE32039

SEQ ID NO: 45537 - RNA, 1701 nt, Artificial Sequence
  derived and/or modified CDS sequence (wt) from hemagglutinin__InfluenzaA__ALE32040
augaagacuaucauugccuugagcuacauucuaugucugguuuucgcucaaaaaauuccuggaaaugacaauagcacggcaacgcugugccuugggcaccaugcaguaccaaacggaacgauagugaaaacaaucacaaaugaccgaauugaaguuacuaaugcuacugagcugguucagaauuccucaauaggugaaauaugcgacaguccucaucagauccuugauggagaaaacugcacacuaauagaugcucuauugggagacccucagugugauggcuuucaaaauaagaaaugggaccuuuuuguugaacgaagcaaagccuacagcaacuguuacccuuaugaugugccggauuaugccucccuuaggucacuaguugccucauccggcacacuggaguuuaacaaugaaagcuucaauuggacuggagucacucaaaacggaacaaguucugcuugcauaaggagaucuaguaguaguuucuuuaguagauuaaauugguugacccacuuaaacuacacauacccagcauugaacgugacuaugccaaacaaugaacaauuugacaaauuguacauuugggggguucaccacccugguacggacaaggaccaaaucuuccuguaugcucaaucaucaggaagaaucacaguaucuaccaaaagaagccaacaagcuguaaucccaaauaucggaucuagacccagaauaagggauaucccuagcagaauaagcaucuauuggacaauaguaaaaccgggagacauacuuuugauuaacagcacagggaaucuaauugcuccuagggguuacuucaaaauacgaagugggacaagcucaauaaugagaucagaugcacccauuggcaaaugcaagucugaaugcaucacuccaaauggaagcauucccaaugacaaaccauuccaaaauguaaacaggaucacauacggggccugucccagauauguuaagcauagcacucugaaauuggcaacaggaaugcgaaauguaccagagaaacaaacuagaggcauauuuggcgcaauagcggguuucauugaaaaugguugggagggaaugguggaugguugguacgguuucaggcaucaaaauucugagggaagaggacaagcagcagaucucaaaagcacucaagcagcaaucgaucaaaucaaugggaagcugaaucgauugaucgggaaaaccaacgagaaauuccaucagauugaaaaagaauucucagaaguagaaggaagaauucaggaccuugagaaauauguugaggacacuaaaauagaucucuggucauacaacgcggagcuucuuguugcccuggagaaccaacauacaauugaucuaacugacucagaaaugaacaaacuguuugaaaaaacaaagaagcaacugagggaaaaugcugaggauaugggaaaugguuguuucaaaauauaccacaaaugugacaaugccugcauaggaucaauaagaaauggaacuuaugaccacaauguguacagggaugaagcauuaaacaaccgguuccagaucaagggaguugagcugaagucaggguacaaagauuggauccuauggauuuccuuugccauaucauguuuuuugcuuuguguugcuuuguugggguucaucaugugggccugccaaaagggcaacauuaggugcaacauuugcauuuga

SEQ ID NO: 45538 - RNA, 1701 nt, Artificial Sequence
  derived and/or modified CDS sequence (wt) from hemagglutinin__InfluenzaA__ALE32041
augaagacuaucauugcuuugagcuacauucuaugucugguuuucgcucaaaaaauuccuggaaaugacaauagcacggcaacgcugugccuugggcaccaugcaguaccaaacggaacgauagugaaaacaaucacaaaugaccgaauugaaguuacuaaugcuacugagcugguucagaauuccucaauaggugaaauaugcgacaguccucaucagauccuugauggagaaaacugcacacuaauagaugcucuauugggagauccucagugugauggcuuucaaaauaagaaaugggaccuuuuuguugaacgaagcaaagccuacagcaacuguuacccuuaugaugugccggauuaugccucccuuaggucacuaguugccucauccggcacacuggaguuuaacaaugagagcuucaauuggacuggagucacucaaaacggaacaaguucugcuugcauaaggagaucuaguaguaguuucuuuaguagauuaaauugguugacccacuuaaacuacacauacccagcauugaacgugacuaugccaaacaaugaacaauuugacaaauuguacauuugggggguucaccacccggguacggacaaggaccaaaucuuccuguaugcucaaucaucaggaagaaucacaguaucuaccaaaagaagccaacaagcuguaaucccaaauaucggaucuagacccagaauaagggauaucccuagcagaauaagcaucuauuggacaauaguaaaaccgggagacauacuuuugauuaacagcacagggaaucuaauugcuccuagggguuacuucaaaauacgaagugggaaaagcucaauaaugagaucagaugcacccauuggcaaaugcaagucugaaugcaucacuccaaauggaagcauucccaaugacaaaccauuccaaaauguaaacaggaucacauacggggccugucccagauauguuaagcauagcacucugaaauuggcaacaggaaugcgaaauguaccagagaaacaaacuagaggcauauuuggcgcaauagcggguuucauagaaaaugguugggagggaaugguggaugguugguacgguuucaggcaucaaaauucugagggaagaggacaagcagcagaucucaaaagcacucaagcagcaaucgaucaaaucaaugggaagcugaaucgauugaucgggaaaaccaacgagaaauuccaucagauugaaaaagaauucucagaaguagaaggaagaauucaggaccuugagaaauauguugaggacacuaaaauagaucucuggucauacaacgcggagcuucuuguugcccuggagaaccaacauacaauugaucuaacugacucagaaaugaacaaacuguuugaaaaaacaaagaagcaacugagggaaaaugcugaggauaugggaaaugguuguuucaaaauauaccacaaaugugacaaugccugcauaggaucaauaagaaauggaacuuaugaccacaauguguacagggaugaagcauuaaacaaccgguuccagaucaagggaguugagcugaagucaggguacaaagauuggauccuauggauuuccuuugccauaucauguuuuuugcuuuguguugcuuuguugggguucaucaugugggccugccaaaagggcaacauuaggugcaacauuugcauuuga

SEQ ID NO: 45539 - RNA, 1701 nt, Artificial Sequence; identical to SEQ ID NO: 45006
  derived and/or modified CDS sequence (wt) from hemagglutinin__InfluenzaA__ALE32042

SEQ ID NO: 45540 - RNA, 1701 nt, Artificial Sequence
  derived and/or modified CDS sequence (wt) from hemagglutinin__InfluenzaA__ALE32043
augaagacuaucauugcuuugagcuacauucuaugucugguuuucgcucaaaaaauuccuggaaaugacaauagcacggcaacgcugugccuugggcaccaugcaguaccaaacggaacgauagugaaaacaaucacaaaugaccgaauugaaguuacuaaugcuacugagcugguucagaauuccucaauaggugaaauaugcgacaguccucaucagauccuugauggagaaaacugcacacuaauagaugcucuauugggagauccucagugugauggcuuucaaaauaagaaaugggaccuuuuuguugaacgaagcaaagccuacagcaacuguuacccuuaugaugugccggauuauaccucccuuaggucacuaguugccucauccggcacacuggaguuuaacaaugaaagcuucaauuggacuggagucacucaaaacggaacaaguucugcuugcauaaggagaucuaguaguaguuucuuuaguagauuaaauugguugacccacuuaaacuacacauacccagcauugaacgugacuaugccaaacaaugaacaauuugacaaauuguacauuugggggguucaccacccggguacggacaaggaccaaaucuuccuguaugcucaaucaucaggaagaaucacaguaucuaccaaaagaagccaacaagcuguaaucccaaauaucggaucuagacccagaauaagggauaucccuagcagaauaagcaucuauuggacaauaguaaaaccgggagacauacuuuugauuaacagcacagggaaucuaauugcuccuagggguuacuucaaaauacgaagugggaaaagcucaauaaugagaucagaugcacccauuggcaaaugcaagucugaaugcaucacuccaaauggaagcauucccaaugacaaaccauuccaaaauguaaacaggaucacauacggggccugucccagauauguuaagcauagcacucugaaauuggcaacaggaaugcgaaauguaccagagaaacaaacuagaggcauauuuggcgcaauagcggguuucauagaaaaugguugggagggaaugguggaugguugguacgguuucaggcaucaaaauucugagggaagaggacaagcagcagaucucaaaagcacucaagcagcaaucgaucaaaucaaugggaagcugaaucgauugaucgggaaaaccaacgagaaauuccaucagauugaaaaagaauucucagaaguagaaggaagaauucaggaccuugagaaauauguugaggacacuaaaauagaucucuggucauacaacgcggagcuucuuguugcccuagagaaccaacauacaauugaucuaacugacucagaaaugaacaaacuguuugaaaaaacaaagaagcaacugagggaaaaugcugaggauaugggaaaugguuguuucaaaauauaccacaaaugugacaaugccugcauaggaucaauaagaaauggaacuuaugaccacaauguguacagggaugaagcauuaaacaaccgguuccagaucaagggaguugagcugaagucaggguacaaagauuggauccuauggauuuccuuugccauaucauguuuuuugcuuuguguugcuuuguugggguucaucaugugggccugccaaaagggcaacauuaggugcaacauuugcauuuga

SEQ ID NO: 45541 - RNA, 1701 nt, Artificial Sequence
  derived and/or modified CDS sequence (wt) from hemagglutinin__InfluenzaA__ALE32044
augaagacuaucauugcuuugagcuacauucuaugucugguuuucgcucaaaaaauuccugggaaugacaauagcacggcaacgcugugccuugggcaccaugcaguaccaaacggaacgauagugaaaacaaucacaaaugaccgaauugaaguuacuaaugcuacugagcugguucagaauuccucaauaggugaaauaugcgacaguccucaucagauccuugauggagaaaacugcacacuaauagaugcucuauugggagacccucagugugauggcuuucaaaauaagaaaugggaccuuuuuguugaacgaagcaaagccuacagcaacuguuacccuuaugaugugccggauuaugccucccuuaggucacuaguugccucauccggcacacuggaguuuaacaaugaaagcuucaauuggacuggagucacucaaaacggaacaaguucugcuugcauaaggagaucuaguaguaguuucuuuaguagauuaaauugguugacccacuuaaacuacacauacccagcauugaacgugacuaugccaaacaaugaacaauuugacaaauuguacauuugggggguucaccacccggguacggacaaggaccaaaucuuccuguaugcucaaucaucaggaagaaucacaguaucuaccaaaagaagccaacaagcuguaaucccaaauaucggaucuagacccagaauaagggauaucccuagcagaauaagcaucuauuggacaauaguaaaaccgggagacauacuuuugauuaacagcacagggaaucuaauugcuccuagggguuacuucaaaauacgaagugggaaaagcucaauaaugagaucagaugcacccauuggcaaaugcaagucugaaugcaucacuccaaauggaagcauucccaaugacaaaccauuccaaaauguaaacaggaucacauacggggccugucccagauauguuaagcauagcacucugaaauuggcaacaggaaugcgaaauguaccagagaaacaaacuagaggcauauuuggcgcaauagcggguuucauagaaaaugguugggagggaaugguggaugguugguacgguuucaggcaucaaaauucugagggaagaggacaagcagcagaucucaaaagcacucaagcagcaaucgaucaaaucaauggaaagcugaaucgauugaucgggaaaaccaacgagaaauuccaucagauugaaaaagaauucucagaaguagaaggaagaauucaggaccuugagaaauauguugaggacacuaaaauagaucucuggucauacaacgcggagcuucuuguugcccuggagaaccaacauacaauugaucuaacugacucagaaaugaacaaacuguuugaaaaaacaaagaagcaacugagggaaaaugcugaggauaugggaaaugguuguuucaaaauauaccacaaaugugauaaugccugcauaggaucaauaagaaauggaacuuaugaccacaauguguacagggaugaagcauuaaacaaccgguuccagaucaagggaguugagcugaagucaggguacaaagauuggauccuauggauuuccuuugccauaucauguuuuuugcuuuguguugcuuuguugggguucaucaugugggccugccaaaagggcaacauuaggugcaacauuugcauuuga

SEQ ID NO: 45542 - RNA, 1701 nt, Artificial Sequence
  derived and/or modified CDS sequence (wt) from hemagglutinin__InfluenzaA__ALE32045
augaagacuaucauugcuuugagcuacauucuaugucugguuuucgcucaaaaaauuccuggaaaugacaauagcacggcaacgcugugccuugggcaccaugcaguaccaaacggaacgauagugaaaacaaucacaaacgaccgaauugaaguuacuaaugcuacugaguugguucagaauuccucaauaggugaaauaugcgacaguccucaucagauccuugauggagaaaacugcacacuaauagaugcucuauugggagacccucagugugauggcuuucaaaauaagaaaugggaccuuuuuguugaacgaagcaaagccuacagcaacuguuacccuuaugaugugccggauuaugccucccuuaggucacuaguugccucauccggcacacuggaguuuaacaaugaaagcuucaauuggacuggagucacucaaaacggaacaaguucugcuugcauaaggagaucuaguaguaguuucuuuaguagauuaaauugguugacccacuuaaacuacacauacccagcauugaacgugacuaugccaaacaaugaacaauuugacaaauuguacauuugggggguucaccacccggguacggacaaggaccaaaucuuccuguaugcucaaucaucaggaagaaucacaguaucuaccaaaagaagccaacaagcuguaaucccaaauaucggaucuagacccagaauaagggauaucccuagcagaauaagcaucuauuggacaauaguaaaaccgggagacauacuuuugauuaacagcacagggaaucuaauugcuccuagggguuacuucaaaauacgaagugggaaaagcucaauaaugagaucagaugcacccauuggcaaaugcaagucugaaugcaucacuccaaauggaagcauucccaaugacaaaccauuccaaaauguaaacaggaucacauacggggccugucccagauauguuaagcauagcacucugaaauuggcaacaggaaugcgaaauguaccagagaaacaaacuagaggcauauuuggcgcaauagcggguuucauagaaaaugguugggagggaaugguggaugguugguacgguuucaggcaucaaaacucugagggaagaggacaagcagcagaucucaaaagcacucaagcagcaaucgaucaaaucaaugggaagcugaaucgauugaucgggaaaaccaacgagaaauuccaucagauugaaaaagaauucucagaaguagaaggaagaauucaggaccuugagaaauauguugaggacacuaaaauagaucucuggucauacaacgcggagcuucuuguugcccuggagaaccaacauacaauugaucuaacugacucagaaaugaacaaacuguuugaaaaaacaaagaagcaacugagggaaaaugcugaggauaugggaaaugguuguuucaaaauauaccacaaaugugacaaugccugcauaggaucaauaagaaauggaacuuaugaccacaauguguacagggaugaagcauuaaacaaccgguuccagaucaagggaguugagcugaagucaggguacaaagauuggauccuauggauuuccuuugccauaucauguuuuuugcuuuguguugcuuuguugggguucaucaugugggccugccaaaagggcaacauuaggugcaacauuugcauuuga

SEQ ID NO: 45543 - RNA, 1701 nt, Artificial Sequence; identical to SEQ ID NO: 45541
  derived and/or modified CDS sequence (wt) from hemagglutinin__InfluenzaA__ALE32046

SEQ ID NO: 45544 - RNA, 1701 nt, Artificial Sequence
  derived and/or modified CDS sequence (wt) from hemagglutinin__InfluenzaA__ALE32047
augaagacuaucauugcuuugagcuacauucuaugucugguuuucgcucaaaaaauuccuggaaaugacaauagcacggcaacgcugugccuugggcaccaugcaguaccaaacggaacgauagugaaaacaaucacaaaugaccgaauugaaguuacuaaugcuacugagcugguucagaauuccucaauaggugaaauaugcgacaguccucaucagguccuugauggagaaaacugcacacuaauagaugcucuauugggagacccucagugugauggcuuucaaaauaagaaaugggaccuuuuuguugaacgaagcaaagccuacagcaacuguuacccuuaugaugugccggauuaugccucccuuaggucacuaguugccucauccggcacacuggaguuuaacaaugaaagcuucaauuggacuggagucacucaaaacggaacaaguucugcuugcauaaggagaucuaguaguaguuucuuuaguagauuaaauugguugacccacuuaaacuacacauacccagcauugaacgugacuaugccaaacaaugaacaauuugacaaauuguacauuugggggguucaccacccggguacggacaaggaccaaaucuuccuguaugcucaaucaucaggaagaaucacaguaucuaccaaaagaagccaacaagcuguaaucccaaauaucggaucuagacccagaauaagggauaucccuagcagaauaagcaucuauuggacaauaguaaaaccgggagacauacuuuugauuaacagcacagggaaucuaauugcuccuagggguuacuucaaaauacgaagugggaaaagcucaauaaugauaucagaugcacccauuggcaaaugcaagucugaaugcaucacuccaaauggaagcauucccagugacaaaccauuccaaaauguaaacaggaucacauacggggccugucccagauauguuaagcauagcacucugaaauuggcaacaggaaugcgaaauguaccagagaaacaaacuagaggcauauuuggcgcaauagcggguuucauagaaaaugguugggagggaaugguggaugguugguacgguuucaggcaucaaaauucugagggaagaggacaagcagcagaucucaaaagcacucaagcagcaaucgaucaaaucaaugggaagcugaaucgauugaucgggaaaaccaacgagaaauuccaucagauugaaaaagaauucucagaaguagaaggaagaauucaggaccuugagaaauauguugaggacacuaaaauagaucucuggucauacaacgcggagcuucuuguugcccuggagaaccaacauacaauugaucuaacugacucagaaaugaacaaacuguuugaaaaaacaaagaagcaacugagggaaaaugcugaggauaugggaaaugguuguuucaaaauauaccacaaaugugacaaugccugcauaggaucaauaagaaauggaacuuaugaccacaauguguacagggaugaagcauuaaacaaccgguuccagaucaagggaguugagcugaagucaggguacaaagauuggauccuauggauuuccuuugccauaucauguuuuuugcuuuguguugcuuuguugggguucaucaugugggccugccaaaagggcaacauuaggugcaacauuugcauuuga

SEQ ID NO: 45545 - RNA, 1701 nt, Artificial Sequence; identical to SEQ ID NO: 45542
  derived and/or modified CDS sequence (wt) from hemagglutinin__InfluenzaA__ALE32048

SEQ ID NO: 45546 - RNA, 1701 nt, Artificial Sequence
  derived and/or modified CDS sequence (wt) from hemagglutinin__InfluenzaA__ALE32049
augaagacuaucauugcuuuaagcuacauucuaugucugguuuucgcucaaaaaauuccuggaaaugacaauagcacggcaacacugugccuugggcaccaugcaguaccaaacggaacgauagugaaaacaaucacaaaugaccgaauugaaguuacuaaugcuacugagcugguucagaauuccucaauaggugaaauaugcgacaguccucaucagauccuugauggagaaaacugcacacuaauagaugcucuauugggagacccucagugugauggcuuucaaaauaagaaaugggaccuuuuuguugaacgaagcaaagccuacagcaacuguuacccuuaugaugugccggauuaugccucccuuaggucacuaguugccucauccggcacacuggaguuuaacaaugaaagcuucaauuggacuggagucacucaaaacggaacaaguucugcuugcauaaggaaaucuaguaguaguuucuuuaguagauuaaauugguugacccacuuaaacuacacauacccagcauugaacgugacuaugccaaacaaugaacaauuugacaaauuguacauuugggggguucaccacccggguacggacaaggaccaaaucuuccuguaugcucgaucaucaggaagaaucacaguaucuaccaaaagaagccaacaagcuguaaucccaaauaucggaucuagacccagaauaagggauaucccuagcagaauaagcaucuauuggacaauaguaaaaccgggagacauacuuuugauuaacagcacagggaaucuaauugcuccuagggguuacuucaaaauacgaagugggaaaagcucaauaaugagaucagaugcacccauuggcaaaugcaagucugaaugcaucacuccaaauggaagcauucccaaugacaaaccauuccaaaauguaaacaggaucacauacggggccugucccagauauguuaagcauagcacucugaaauuggcaacaggaaugcgaaauguaccagagaaacaaacuagaggcauauuuggcgcaauagcggguuucauagaaaaugguugggagggaaugguggaugguugguacgguuucaggcaucaaaauucugaggggagaggacaagcagcagaucucaaaagcacucaagcagcaaucgaucaaaucaaugggaagcugaaucgauugaucgggaaaaccaacgaaaaauuccaucagauugaaaaagaauucucagaaguagaaggaagaauucaggaccuugagaaauauguugaggacacuaaaauagaucucuggucauacaacgcggagcuucuuguugcccuggagaaucaacauacaauugaucuaacugacucagaaaugaacaaacuauuugaaaaaacaaagaagcaacugagggaaaaugcugaggauaugggaaaugguuguuucaaaauauaccacaaaugugacaaugccugcauaggaucaauaagaaauggaacuuaugaccacaauguguacagggaugaagcauuaaacaaccgguuccagaucaagggaguugagcugaagucaggguacaaagauuggauccuauggauuuccuuugccauaucauguuuuuugcuuuguguugcuuuguugggguucaucaugugggccugccaaaagggcaacauuaggugcaacauuugcauuuga

SEQ ID NO: 45547 - RNA, 1701 nt, Artificial Sequence
  derived and/or modified CDS sequence (wt) from hemagglutinin__InfluenzaA__ALE32050
augaagacuaucauugcuuugagcuacauucuaugucugguuuucgcucaaaaaauuccuggaaaugacaauagcacggcaacgcugugccuugggcaccaugcaguaccaaacggaacgauagugaaaacaaucacaaaugaccgaauugaaguuacuaaugcuacugagcugguucagaauuccucaauaggugaaauaugcgacaguccucaucagauccuugauggagaaaacugcacacuaauagaugcucuauugggagacccucagugugauggcuuucaaaauaagaaaugggaccuuuuuguugaacgaagcaaagccuacagcaacuguuacccuuaugaugugccggauuaugccucccuuaggucacuaguugccucauccggcacacuggaguuuaacaaugaaagcuucaauuggacuggagucacucaagacggaacaaguucugcuugcauaaggagaucuaguaguaguuucuuuaguagauuaaauugguugacccacuuaaacuacacauacccagcauugaacgugacuaugccaaacaaugagcaauuugacaaauuguacauuugggggguucaccacccggguacggacaaggaccaaaucuuccuguaugcucaaucaucaggaagaauaacaguaucuaccaaaagaagccaacaagcuguaaucccaaauaucggaucuagacccagaauaagggauaucccuagcagaauaagcaucuauuggacaauaguaaaaccgggagacauacuuuugauuaacagcacagggaaucuaauugcuccuagggguuacuucaaaauacgaagugggaaaagcucaauaaugagaucagaugcacccauuggcaaaugcaagucugagugcaucacuccaaauggaagcauucccaaugacaaaccauuccaaaauguaaacaggaucacauacggggccugucccagauauguuaagcauagcacucugaaauuggcaacaggaaugcgaaauguaccagagaaacaaacuagaggcauauuuggcgcaauagcggguuucauagaaaaugguugggagggaaugguggaugguugguacgguuucaggcaucaaaauucugagggaagaggacaagcagcagaucucaaaagcacucaagcagcaaucgaucaaaucaaugggaagcugaaucgauugaucgggaaaaccaacgagaaauuccaucagauugaaaaagaauucucagaaguagaaggaagaauucaggaccuugagaaauauguugaggacacuaaaauagaucucuggucauacaacgcggagcuucuuguugcccuggagaaccaacauacaauugaucuaacugacucagaaaugaacaaacuguuugaaaaaacaaagaagcaacugagggaaaaugcugaggauaugggaaaugguuguuucaaaauauaccacaaaugugacaaugccugcauaggaucaauaagaaauggaacuuaugaccacaauguguacagggaugaagcauuaaacaaccgguuccagaucaagggaguugagcugaagucaggguacaaagauuggauccuauggauuuccuuugccauaucauguuuuuugcuuuguguugcuuuguugggguucaucaugugggccugccaaaagggcaacauuaggugcaacauuugcauuuga

SEQ ID NO: 45548 - RNA, 1701 nt, Artificial Sequence
  derived and/or modified CDS sequence (wt) from hemagglutinin__InfluenzaA__ALE32051
augaagacuaucauugcuuugagcuacauucuaugucugguuuucgcucaaaaaauuccuggaaaugacaauagcacggcaacgcugugccuugggcaccaugcaguaccaaacggaacgauagugaaaacaaucacaaaugaccgaauugaaguuacuaaugcuacugaguugguucagaauuccucaauaggugaaauaugcgacaguccucaucagauccuugauggagaaaacugcacacuaauagaugcucuauugggagacccucagugugauggcuuucaaaauaagaaaugggaccuuuuuguugaacgaagcaaagccuacagcaacuguuacccuuaugaugugccggauuaugccucccuuaggucacuaguugccucauccggcacacuggaguuuaacaaugaaagcuucaauuggacuggagucacucaaaacggaacaaguucugcuugcauaaggagaucuaguaguaguuucuuuaguagauuaaauugguugacccacuuaaacuacacauacccagcauugaacgugacuaugccaaacaaugaacaauuugacaaauuguacauuugggggguucaccacccggguacggacaaggaccaaaucuuccuguaugcucaaucaucaggaagaaucacaguaucuaccaaaagaagccaacaagcuguaaucccaaauaucggaucuagacccagaauaagggauaucccuagcagaauaagcaucuauuggacaauaguaaaaccgggagacauacuuuugauuaacagcacagggaaucuaauugcuccuagggguuacuucaaaauacgaagugggaaaagcucaauaaugagaucagaugcacccauuggcaaaugcaagucugaaugcaucacuccaaauggaagcauucccaaugacaaaccauuccaaaauguaaacagggucacauacggggccugucccagauauguuaagcauagcacucugaaauuggcaacaggaaugcgaaauguaccagagaaacaaacuagaggcauauuuggcgcaauagcggguuucauagaaaaugguugggagggaaugguggaugguugguacgguuucaggcaucaaaauucugagggaagaggacaagcagcagaucucaaaagcacucaagcagcaaucgaucaaaucaaugggaagcugaaucgguugaucgggaaaaccaacgagaaauuccaucagauugaaaaagaauucucagaaguagaaggaagaauucaggaccuugagaaauauguugaggacacuaaaauagaucucuggucauauaacgcggagcuucuuguugcccuggagaaccaacauacaauugaucuaacugacucagaaaugaacaaacuguuugaaaaaacaaagaagcaacugagggaaaaugcugaggauaugggaaaugguuguuucaaaauauaccacaaaugugacaaugccugcauaggaucaauaagaaauggaacuuaugaccacaauguguacagggaugaagcauuaauuaaccgguuccagaucaaggggguugagcugaagucaggguacaaagauuggauccuauggauuuccuuugccauaucauguuuuuugcuuuguguugcuuuguugggguucaucaugugggccugccaaaagggcaacauuaggugcaacauuugcauuuga

SEQ ID NO: 45549 - RNA, 1701 nt, Artificial Sequence
  derived and/or modified CDS sequence (wt) from hemagglutinin__InfluenzaA__ALE32052
augaagacuaucauugcuuugagcuacauucuaugucugguuuucgcucaaaaaauuccuggaaaugacaauagcacggcaacgcugugccuugggcaccaugcaguaccaaacggaacgauagugaaaacaaucacaaaugaccgaauugaaguuacuaaugcuacugaguugguucagaauuccucaauaggugaaauaugcgacaguccucaucagauccuugauggggaaaacugcacacuaauagaugcucuauugggagacccucagugugauggcuuucaaaauaagaaaugggaccuuuuuguugaacgaagcaaagccuacagcaacuguuacccuuaugaugugccggauuaugccucccuuaggucacuaguugccucauccggcacacuggaguuuaacaaugaaagcuucaauuggacuggagucacucaaaacggaacaaguucugcuugcauaaggagaucuaguaguaguuucuuuaguagauuaaauugguugacccacuuaaacuacacauacccagcauugaacguuacuaugccaaacaaugaacaauuugacaaauuguacauuugggggguucaccacccggguacggacaaggaccaaaucuuccuguaugcucaaucaucaggaagaaucacaguaucuaccaaaagaagccaacaagcuguaaucccaaauaucggaucuagacccagaauaagggauaucccuagcagaauaagcaucuauuggacaauaguaaaaccgggagacauacuuuugauuaacagcacagggaaucuaauugcuccuagggguuacuucaaaauacgaagugggaaaagcucaauaaugagaucagaugcacccauuggcaaaugcaagucugaaugcaucacuccaaauggaagcauucccaaugacaaaccauuccaaaauguaaacaggaucacauacggggccugucccagauauguuaagcauagcacucugaaauuggcaacaggaaugcgaaauguaccagagaaacaaacuagaggcauauuuggcgcaauagcggguuucauagaaaaugguugggagggaaugguggaugguugguacgguuucaggcaucaaaauucugagggaagaggacaagcagcagaucucaaaagcacucaagcagcaaucgaucaaaucaaugggaagcugaaucgguugaucgggaaaaccaacgagaaauuccaucagauugaaaaagaauucucagaaguagaaggaagaauucaggaccuugagaaauauguugaggacacuaaaauagaucucuggucauauaacgcggagcuucuuguugcccuggagaaccaacauacaauugaucuaacugacucagaaaugaacaaacuguuugaaaaaacaaagaagcaacugagggaaaaugcugaggauaugggaaaugguuguuucaaaauauaccacaaaugugacaaugccugcauaggaucaauaagaaauggaacuuaugaccacaauguguacagggaugaagcauuaaacaaccgguuccagaucaaggggguugagcugaagucaggguacaaagauuggauccuauggauuuccuuugccauaucauguuuuuugcuuuguguugcuuuguugggguucaucaugugggccugccaaaagggcaacauuagaugcaacauuugcauuuga

SEQ ID NO: 45550 - RNA, 1701 nt, Artificial Sequence
  derived and/or modified CDS sequence (wt) from hemagglutinin__InfluenzaA__ALE32053
augaagacuaucauugcuuugagcuacauucuaugucugguuuucgcucaaaaaauuccuggaaaugacaauagcacggcaacgcugugccuugggcaccaugcaguaccaaacggaacuauagugaaaacaaucacaaaugaccgaauugaaguuacuaaugcuacugagcugguucagaauuccucaauaggugaaauaugcgacaguccucaucagauccuugauggagaaaacugcacacuaauagaugcucuauugggagacccucagugugauggcuuucaaaauaagaaaugggaccuuuuuguugaacgaagcaaagccuacagcaacuguuacccuuaugaugugccggauuaugccucccuuaggucacuaguugccucauccggcacacuggaguuuaacaaugaaagcuucaauuggacuggagucacucaaaacggaacaaguucugcuugcauaaggagaucuaguaguaguuucuuuaguagauuaaauugguugacccacuuaaacuacacauacccagcauugaacgugacuaugccaaacaaugaacaauuugacaaauuguacauuugggggguucaccacccggguacggacaaggaccaaaucuuccuguaugcucaaucaucaggaagaaucacaguaucuaccaaaagaagccaacaagcuguaaucccaaauaucggaucuagacccagaauaagggauaucccuagcagaauaagcaucuauuggacaauaguaaaaccgggagacauacuuuugauuaacagcacagggaaucuaauugcuccuagggguuacuucaaaauacgaagugggaagagcucaauaaugagaucagaugcacccauuggcaaaugcaagucugaaugcaucacuccaaauggaagcauucccaaugacaaaccauuccaaaauguaaacaggaucacauacggggccugucccagauauguuaagcauagcacucugaaauuggcaacaggaaugcgaaauguaccagagaaacaaacuagaggcauauuuggcgcaauagcggguuucauagaaaaugguugggagggaaugguggaugguugguacgguuucaggcaucaaaauucugagggaagaggacaagcagcagaucucaaaagcacucaagcagcaaucgaucaaaucaaugggaagcugaaucgauugaucgggaaaaccaacgagaaauuccaucagauugaaaaagaauucucagaaguagaaggaagaauucaggaccuugagaaauauguugaggacacuaaaauagaucucuggucauacaacgcggagcuucuuguugcccuggagaaccaacauacaauugaucuaacugacucagaaaugaacaaacuguuugaaaaaacaaagaagcaacugagggaaaaugcugaggauaugggaaaugguuguuucaaaauauaccacaaaugugacaaugccugcauaggaucaauaagaaauggaacuuaugaccacaauguguacagggaugaagcauuaaacaaccgguuccagaucaagggaguugagcugaagucaggguacaaagauuggauccuauggauuuccuuugccauaucauguuuuuugcuuuguguugcuuuguugggguucaucaugugggccugccaaaagggcaacauuaggugcaacauuugcauuuga

SEQ ID NO: 45551 - RNA, 1701 nt, Artificial Sequence
  derived and/or modified CDS sequence (wt) from hemagglutinin__InfluenzaA__ALE32054
augaagacuaucauugccuugagcuacauucuaugucugguuuucgcucaaaaaauuccuggaaaugacaauagcacggcaacgcugugccuugggcaccaugcaguaccaaacggaacgauagugaaaacaaucacaaaugaccgaauugaaguuacuaaugcuacugagcugguucagaauuccucaauaggugaaauaugcgaaaguccucaucagauccuugauggagaaaacugcacacuaauagaugcucuauugggagacccucagugugauggcuuucaaaauaagaaaugggaccuuuuuguugaacgaagcaaagccuacagcaacuguuacccuuaugaugugccggauuaugccucccuuaggucacuaguugccucauccggcacacuggaguuuaacaaugaaagcuucaauuggacuggagucacucaaaacggaacaaguucugcuugcauaaggagaucuaguaguaguuucuuuaguagauuaaauugguugacccacuuaaacuacacauacccagcauugaacgugacuaugccaaacaaugaacaauuugacaaauuguacauuugggggguucaccacccggguacggacaaggaccaaaucuuccuguaugcucaaucaucaggaagaaucacaguaucuaccaaaggaagccaacaagcuguaaucccaaauaucggaucuagacccagaauaagggauaucccuagcagaauaagcaucuauuggacaauaguaaaaccgggagacauacuuuugauuaacagcacagggaaucuaauugcuccuagggguuacuucaaaauacgaagugggaaaagcucaauaaugagaucagaugcacccauuggcaaaugcaagucugaaugcaucacuccaaauggaagcauucccaaugacaaaccauuccaaaauguaaacaggaucacauacggggccugucccagauauguuaagcauagcacucugaaauuggcaacaggaaugcgaaauguaccagagaaacaaacuagaggcauauuuggcgcaauagcggguuucauagaaaaugguugggagggaaugguggaugguugguacgguuucaggcaucaaaauucugagggaagaggacaagcagcagaucucaaaagcacucaagcagcaaucgaucaaaucaaugggaagcugaaucgauugaucgggaaaaccaacgagaaauuccaucagauugaaaaagaauucucagaaguagaaggaagaauucaggaccuugagaaauauguugaggacacuaaaauagaucucuggucauacaacgcggagcuucuuguugcccuggagaaccaacauacaauugaucuaacugacucagaaaugaacaaacuguuugaaaaaacaaagaagcaacugagggaaaaugcugaggauaugggaaaugguuguuucaaaauauaccacaaaugugacaaugccugcauaggaucaauaagaaauggaacuuaugaccacaauguguacagggaugaagcauuaaacaaccgguuccagaucaagggaguugagcugaagucaggguacaaagauuggauccuauggauuuccuuugccauaucauguuuuuugcuuuguguugcuuuguugggguucaucaugugggccugccaaaagggcaacauuaggugcaaccauugcauuuga

SEQ ID NO: 45552 - RNA, 1701 nt, Artificial Sequence
  derived and/or modified CDS sequence (wt) from hemagglutinin__InfluenzaA__ALE32055
augaagacuaucauugcuuugagcuacauucuaugucugguuuucgcucaaaaaauuccuggaaaugacaauagcacggcaacgcugugccuugggcaccaugcaguaccaaacggaacgauagugaaaacaaucacaaaugaccgaauugaaguuacuaaugcuacugagcugguucagaauuccucaauaggugaaauaugcgacaguccucaucagauccuugauggagaaaacugcacacuaauagaugcucuauugggagacccucagugugauggcuuucaaaauaagaaaugggaccuuuuuguugaacgaagcaaagccuacagcaacuguuacccuuaugaugugccggauuaugccucccuuaggucacuaguugccucauccggcacacuggaguuuaacaaugaaagcuucaauuggacuggagucacucaaaacggaacaaguucugcuugcauaaggagaucuaguaguaguuucuuuaguagauuaaauugguugacccacuuaaacuacaaauacccagcauugaacgugacuaugccaaacaaugaacaauuugacaaauuguacauuugggggguucaccacccggguacggacaaggaccaaaucuuccuguaugcucaaucaucaggaagaaucacaguaucuaccaaaagaagccaacaagcuguaaucccaaauaucggaucuagacccagaauaagggauaucccuagcagaauaagcaucuauuggacaauaguaaaaccgggagacauacuuuugauuaacagcacagggaaucuaauugcuccuagggguuacuucaaaauacgaagugggaaaagcucaauaaugagaucagaugcacccauuggcaaaugcaagucugaaugcaucacuccaaauggaagcauucccaaugacaaaccauuccaaaauguaaacaggaucacauacggggccugucccagauauguuaagcauagcacucugaaauuggcaacaggaaugcgaaauguaccagagaaacaaacuagaggcauauuuggcgcaauagcggguuucauagaaaaugguugggagggaaugguggaugguugguacgguuucaggcaucaaaauucugagggaagaggacaagcagcagaucucaaaagcacucaagcagcaaucgaucaaaucaauggaaagcugaaucgauugaucgggaaaaccaacgagaaauuccaucagauugaaaaagaauucucagaaguagaaggaagaauucaggaccuugagaaauauguugaggacacuaaaauagaucucuggucauacaacgcggagcuucuuguugcccuggagaaccaacauacaauugaucuaacugacucagaaaugaacaaacuguuugaaaaaacaaagaagcaacugagggaaaaugcugaggauaugggaaaugguuguuucaaaauauaccacaaaugugacaaugccugcauaggaucaauaagaaauggaacuuaugaccacaauguguacagggaugaagcauuaaacaaccgguuccagaucaagggaguugagcugaagucaggguacaaagauuggauccuauggauuuccuuugccauaucauguuuuuugcuuuguguugcauuguugggguucaucaugugggccugccaaaauggcaacauuaggugcaacauuugcauuuga

SEQ ID NO: 45553 - RNA, 1701 nt, Artificial Sequence
  derived and/or modified CDS sequence (wt) from hemagglutinin__InfluenzaA__ALE32056
augaagacuaucauugcuuugagcuacauucuaugucugguuuucgcucaaaaaauuccuggaaaugacaauagcacggcaacgcugugccuugggcaccaugcaguaccaaacggaacgauagugaaaacaaucacaaaugaccgaauugaaguuacuaaugcuacugagcugguucagaauuccucaauaggugaaauaugcgacaguccucaucagauccuugauggagaaaacugcacacuaauagaugcccuauugggagacccucagugugauggcuuucaaaauaagaaaugggaccuuuuuguugaacgaagcaaagccuacagcaacuguuacccuuaugaugugccggauuaugccucccuuaggucacuaguugccucauccggcacacuggaguuuaacaaugaaagcuucaauuggacuggagucacucaaaacggaacaaguucugcuugcauaaggagaucuaguaguaguuucuuuaguagauuaaauugguugacccacuuaaacuacaaauacccagcauugaacgugacuaugccaaacaaugaacaauuugacaaauuguacauuugggggguucaccacccggguacggacaaggaccaaaucuuccuguaugcucaaucaucaggaagaaucacaguaucuaccaaaagaagccaacaagcuguaaucccaaauaucggaucuagacccagaauaagggauaucccuagcagaauaagcaucuauuggacaauaguaaaaccgggagacauacuuuugauuaacagcacagggaaucuaauugcuccuagggguuacuucaaaauacgaagugggaaaagcucaauaaugagaucagaugcacccauuggcaaaugcaagucugaaugcaucacuccaaauggaagcauucccaaugacaaaccauuccaaaauguaaacaggaucacauacggggccugucccagauauguuaagcauagcacucugaaauuggcaacaggaaugcgaaauguaccagagaaacaaacuagaggcauauuuggcgcaauagcggguuucauagaaaaugguugggagggaaugguggaugguugguacggcuucaggcaucaaaauucugagggaagaggacaagcagcagaucucaaaagcacucaagcagcaaucgaucaaaucaauggaaagcugaaucgauugaucgggaaaaccaacgagaaauuccaucagauugaaaaagaauucucagaaguagaaggaagaauucaggaccuugagaaauauguugaggacacuaaaauagaucucuggucauacaacgcggagcuucuuguugcccuggagaaccaacauacaauugaucuaacugacucagaaaugaacaaacuguuugaaaaaacaaagaagcaacugagggaaaaugcugaggauaugggaaaugguuguuucaaaauauaccacaaaugugacaaugccugcauaggaucaauaagaaauggaacuuaugaccacaauguguacagggaugaagcauuaaacaaccgguuccagaucaagggaguugagcugaagucaggguacaaagauuggauccuauggauuuccuuugccauaucauguuuuuugcuuuguguugcuuuguugggguucaucaugugggccugccaaaagggcaacauuaggugcaacauuugcauuuga

SEQ ID NO: 45554 - RNA, 1701 nt, Artificial Sequence
  derived and/or modified CDS sequence (wt) from hemagglutinin__InfluenzaA__ALE32057
augaagacuaucauugcuuugagcuacguucuaugucugguuuucgcucaaaaaauuccuggaaaugacaauagcacggcaacgcugugccuugggcaccaugcaguaccaaacggaacgauagugaaaacaaucacaaaugaccgaauugaaguuacuaaugcuacugagcugguucagaauuccucaauaggugaaauaugcgacaguccucaucagauccuugauggagaaaacugcacacuaauagaugcucuauugggagacccucagugugauggcuuucaaaauaagaaaugggaccuuuuuguugaacgaagcaaagccuacagcaacuguuacccuuaugaugugccggauuaugccucccuuaggucacuaguugccucauccggcacacuggaguuuaacaaugaaagcuucaauuggacuggagucacucaaaacggaacaaguucugcuugcauaaggagaucuaguaguaguuucuuuaguagauuaaauugguugacccacuuaaacuacacauacccagcauugaacgugacuaugccaaacaaugaacaauuugacaaauuguacauuugggggguucaccacccggguacggacaaggaccaaaucuuccuguaugcucaaucaucaggaagaaucacaguaucuaccaaaagaagccaacaagcuguaaucccaaauaucggaucuagacccagaauaagggauaucccuagcagaauaagcaucuauuggacaauaguaaaaccgggagacauacuuuugauuaacagcacagggaaucuaauugcuccuagggguuacuucaaaauacgaagugggaaaagcucaauaaugagaucagaugcacccauuggcaaaugcaagucugaaugcaucacuccaaauggaagcauucccaaugacaaaccauuccaaaauguaaacaggaucacauacggggccugucccagauauguuaagcauagcacucugaaauuggcaacaggaaugcgaaauguaccagagaaacaaacuagaggcauauuuggcgcaauagcggguuucauagaaaaugguugggagggaaugguggaugguugguacgguuucaggcaucaaaauucugagggaagaggacaagcagcagaucucaaaagcacucaagcagcaaucgaucaaaucaauggaaagcugaaucgauugaucgggaaaaccaacgagaaauuccaucagauugaaaaagaauucucagaaguagaaggaagaauucaggaccuugagaaauauguugaggacacuaaaauagaucucuggucauacaacgcggagcuucuuguugcccuggagaaccaacauacaauugaucuaacugacucagaaaugaacaaacuguuugaaaaaacaaagaagcaacugagggaaaaugcugaggauaugggaaaugguuguuucaaaauauaccacaaaugugacaaugccugcauaggaucaauaagaaauggaacuuaugaccacaauguguacagggaugaagcauuaaacaaccgguuccagaucaagggaguugagcugaagucaggguacaaagauuggauccuauggauuuccuuugccauaucauguuuuuugcuuuguguugcuuuguugggguucaucaugugggccugccaaaagggcaacauuaggugcaacauuugcauuuga

SEQ ID NO: 45555 - RNA, 1701 nt, Artificial Sequence; identical to SEQ ID NO: 45028
  derived and/or modified CDS sequence (wt) from hemagglutinin__InfluenzaA__ALE32058

SEQ ID NO: 45556 - RNA, 1701 nt, Artificial Sequence; identical to SEQ ID NO: 45028
  derived and/or modified CDS sequence (wt) from hemagglutinin__InfluenzaA__ALE32059

SEQ ID NO: 45557 - RNA, 1701 nt, Artificial Sequence
  derived and/or modified CDS sequence (wt) from hemagglutinin__InfluenzaA__ALE32060
augaagacuaucauugcuuugagcuacauucuaugucugguuuucgcucaaaaaauuccuggaaaugacaauagcacggcaacgcugugccuugggcaccaugcaguaccaaacggaacgauagugaaaacaaucacaaaugaccgaauugaaguuacuaaugcuacugagcugguucagaauuccucaauaggugaaauaugcgacaguccucaucagauccuugauggagaaaacugcacacuaauagaugcucuauugggagacccucagugugauggcuuucaaaauaagaaaugggaccuuuuuguugaacgaagcaaagccuacagcaacuguuacccuuaugaugugccggauuaugccucccuuaggucacuaguugccucauccggcacacuggaguuuaacaaugaaagcuucaauuggacuggagucacucaaaacggaacaaguucugcuugcauaaggagaucuaguaguaguuucuuuaguagauuaaauugguugacccacuuaaacuacacauacccagcauugaacgugacuaugccaaacaaugaacaauuugacaaauuguacauuugggggguucaccacccggguacggacaaggaccaagucuuccuguaugcucaaucaucaggaagaaucacaguaucuaccaaaagaagccaacaagcuguaaucccaaauaucggaucuagacccagaauaagggauaucccuagcagaauaagcaucuauuggacaauaguaaaaccgggagacauacuuuugauucacagcacagggaaucuaauugcuccuagggguuacuucaaaauacgaagugggaaaagcucaauaaugagaucagaugcacccauuggcaaaugcaagucugaaugcaucacuccaaauggaagcauucccaaugacaaaccauuccaaaauguaaauaggaucacauacggggccugucccagauauguuaagcauagcacucugaaauuggcaacaggaaugcgaaauguaccagagaaacaaacuagaggcauauuuggcgcaauagcggguuucauagaaaaugguugggagggaaugguggaugguugguacgguuucaggcaucaaaauucugagggaagaggacaagcagcagaucucaaaagcacucaagcagcaaucgaucaaaucaauggaaagcugaaucgauugaucgggaaaaccaacgagaaauuccaucagauugaaaaagaauucucagaaguagaaggaagaauucaggaccuugagaaauauguugaggacacuaaaauagaucucuggucauacaacgcggagcuucuuguugcccuggagaaccaacauacaauugaucuaacugacucagaaaugaacaaacuguuugaaaaaacaaagaagcaacugagggaaaaugcugaggauaugggaaaugguuguuucaaaauauaccacaaaugugacaaugccugcauaggaucaauaagaaauggaacuuaugaccacaauguguacagggaugaagcauuaaacaaccgguuccagaucaagggaguugagcugaagucaggguacaaagauuggauccuauggauuuccuuugccauaucauguuuuuugcuuuguguugcuuuguugggguucaucaugugggccugccaaaagggcaacauuaggugcaacauuugcauuuga

SEQ ID NO: 45558 - RNA, 1701 nt, Artificial Sequence
  derived and/or modified CDS sequence (wt) from hemagglutinin__InfluenzaA__ALE32061
augaagaccaucauugcccugagcuacauucuaugucugguuuucgcucaaaaaauuccuggaaaugacaauagcacggcaacgcugugccuugggcaccaugcaguaccaaacggaacgauagugaaaacaaucacaaaugaccgaauugaaguuacuaaugcuacugagcugguucagaauuccucaauaggugaaauaugcgacaguccucaucagauccuugauggagaaaacugcacacuaauagaugcucuauugggagacccucagugugauggcuuucaaaauaagaaaugggaccuuuuuguugaacgaagcaaagccuacagcaacuguuacccuuaugaugugccggauuaugccucccuuaggucacuaguugccucauccggcacacuggaguuuaacaaugaaagcuucaauuggacuggagucacucaaaacggaacaaguucugcuugcauaaggagaucuaguaguaguuucuuuaguagauuaaauugguugacccacuuaaaauacacauacccagcauugaacgugacuaugccaaacaaugaacaauuugacaaauuguacauuugggggguucaccacccggguacggacaaugaccaaaucuuccuguaugcucgaucaucaggaagaaucacaguaucuaccaaaggaagccaacaagcuguaaucccaaauaucggaucuagacccagaauaagggauaucccuagcagaauaagcaucuauuggacaauaguaaaaccgggagacauacuuuugauuaacagcacagggaaucuaauugcuccuagggguuacuucaaaauacgaagugggaaaagcucaauaaugagaucagaugcacccauuggcaaaugcaagucugaaugcaucacuccaaauggaagcauucccaaugacaaaccauuccaaaauguaaacaggaucacauacggggccugucccagauauguuaagcauagcacucugaaauuggcaacgggaaugcgaaauguaccagagaaacaaacuagaggcauauuuggcgcaauagcggguuucauagaaaaugguugggagggaaugguggaugguugguacgguuucaggcaucaaaauucugagggaagaggacaagcagcagaucucaaaagcacucaagcagcaaucgaucaaaucaaugggaagcugaaucgauugaucgggaaaaccaacgagaaauuccaucagauugaaaaagaauucucagaaguagaaggaagaauucaggaccuugagaaauauguugaggacacuaaaauagaucucuggucauacaacgcggagcuucuuguugcccuggagaaccaacauacaauugaucuaacugacucagaaaugaacaaacuguuugaaaaaacaaagaagcaacugagggaaaaugcugaggauaugggaaaugguuguuucaaaauauaccacaaaugugacaaugccugcauaggaucaauaagaaauggaacuuaugaccacaauguguacagggaugaagcauuaaacaaccgguuccagaucaagggaguugagcugaagucaggguacaaagauuggauccuauggauuuccuuugccauaucauguuuuuugcuuuguguugcuuuguugggguucaucaugugggccugccaaaagggcaacauuaggugcaacauuugcauuuga

SEQ ID NO: 45559 - RNA, 1701 nt, Artificial Sequence
  derived and/or modified CDS sequence (wt) from hemagglutinin__InfluenzaA__ALE32062
augaagacuaucauugcuuugagcuacauucuaugucugguuuucgcucaaaaaauuccuggaaaugacaauagcacggcaacgcugugccuugggcaccaugcaguaccaaacggaacgauagugaaaacaaucacaaaugaccgaauugaaguuacuaaugcuacugaguugguucagaauuccucaauaggugaaauaugcgacaguccucaucagauccuugauggagaaaacugcacacuaauagaugcucuauugggagacccucagugugauggcuuucaaaauaagaaaugggaccuuuuuguugaacgaagcaaagccuacagcaacuguuacccuuaugaugugccggauuaugccucccuuaggucacuaguugccucauccggcacacuggaguuuaacaaugaaagcuucaauuggacuggagucacucaaaacggaacaaguucugcuugcauaaggagaucuaguaguaguuucuuuaguagauuaaauugguugacccacuuaaacuacacauacccagcauugaacgugacuaugccaaacaaugaacaauuugacaaauuguacauuugggggguucaccacccggguacggacaaggaccaaaucuuccuguaugcucaaucaucaggaagaaucacaguaucuaccaaaagaagccaacaagcuguaaucccaaauaucggaucuagacccagaauaagggauaucccuagcagaauaagcaucuauuggacaauaguaaaaccgggagacauacucuugauuuacagcacagggaaucuaauugcuccuagggguuacuucaaaauacgaagugggaaaagcucaauaaugagaucagaugcacccauuggcaaaugcaagucugaaugcaucacuccaaauggaagcauucccaaugacaaaccauuccaaaauguaaacaggaucacauacggggccugucccagauauguuaagcauagcacucugaaauuggcaacaggaaugcgaaauguaccagagaaacaaacuagaggcauauuuggcgcaauagcggguuucauagaaaaugguugggagggaaugguggaugguugguacgguuucaggcaucaaaauucugaggggagaggacaagcagcagaucucaaaagcacucaagcagcaaucgaucaaaucaaugggaagcugaaucgguugaucgggaaaaccaacgagaaauuccaucagauugaaaaagaauucucagaaguagaaggaagaauucaggaccuugagaaauauguugaggacacuaaaauagaucucuggucauauaacgcggagcuucuuguugcccuggaaaaccaacauacaauugaucuaacugacucagaaaugaacaaacuguuugaaaaaacaaagaagcaacugagggaaaaugcugaggauaugggaaaugguuguuucaaaauauaccacaaaugugacaaugccugcauaggaucaauaagaaauggaacuuaugaccacaauguguacagggaugaagcauuaaacaaccgguuccagaucaaggggguugagcugaagucaggguacaaagauuggauccuauggauuuccuuugccauaucauguuuuuugcuuuguguugcuuuguugggguucaucaugugggccugccaaaagggcaacauuaggugcaacauuugcauuuga

SEQ ID NO: 45560 - RNA, 1701 nt, Artificial Sequence; identical to SEQ ID NO: 45043
  derived and/or modified CDS sequence (wt) from hemagglutinin__InfluenzaA__ALE32063

SEQ ID NO: 45561 - RNA, 1701 nt, Artificial Sequence
  derived and/or modified CDS sequence (wt) from hemagglutinin__InfluenzaA__ALE32064
augaagacuaucauugccuugagcuacauucuaugucugguuuucgcucaaaaaauuccuggaaaugacaauagcacggcaacgcugugccuugggcaccaugcaguaccaaacggaacgauagugaaaacaaucacaaaugaccgaauugaaguuacuaaugcuacugagcugguucagaauuccucaauaggugaaauaugcgacaguccucaucagauccuugauggagaaaacugcacacuaauagaugcucuauugggagacccucagugugauggcuuucaaaauaagaaaugggaccuuuuuguugaacgaagcaaagccuacagcaacuguuacccuuaugaugugccggauuaugccucccuuaggucacuaguugccucauccggcacacuggaguuuaacaaugaaagcuucaauuggacuggagucacucaaaacggaacaaguucugcuugcauaaggagaucuaguaauaguuucuuuaguagauuaaauugguugacccacuuaaacuacacauacccagcauugaacgugacuaugccaaacaaugaacaauuugacaaauuguacauuugggggguucaccacccggguacggacaaggaccaaaucuuccuguaugcucaaucaucaggaagaaucacaguaucuaccaaaagaagccaacaagcuguaaucccaaauaucggaucuagacccagaauaagggauaucccuagcagaauaagcaucuauuggacaauaguaaaaccgggagacauacuuuugauuaacagcacagggaaucuaauugcuccuagggguuacuucaaaauacgaagugggaaaagcucaauaaugagaucagaugcacccauuggcaaaugcaagucugaaugcaucacuccaaauggaagcauucccaaugacaaaccauuccaaaauguaaacaggaucacauacggggccugucccagauauguuaagcauagcacucugaaauuggcaacaggaaugcgaaauguaccagagaaacaaacuagaggcauauuuggcgcaauagcggguuucauagaaaaugguugggagggaaugguggaugguugguacgguuucaggcaucaaaauucugagggaagaggacaagcagcagaucucaaaagcacucaagcagcaaucgaucaaaucaaugggaagcugaaucgauugaucgggaaaaccaacgagaaauuccaucagauugaaaaagaauucucagaaguagaaggaagaauucaggaccuugagaaauauguugaggacacuaaaauagaucucuggucauacaacgcggagcuucuuguugcccuggagaaccaacauacaauugaucuaacugacucagaaaugaacaaacuguuugaaaaaacaaagaagcaacugagggaaaaugcugaggauauaggaaaugguuguuucaaaauauaccacaaaugugacaaugccugcauaggaucaauaagaaauggaacuuaugaccacaauguguacagggaugaagcauuaaacaaccgguuccagaucaagggaguugagcugaagucaggguacaaagauuggauccuauggauuuccuuugccauaucauguuuuuugcuuuguguugcuuuguugggguucaucaugugggccugccaaaagggcaacauuaggugcaacauuugcauuuga

SEQ ID NO: 45562 - RNA, 1701 nt, Artificial Sequence; identical to SEQ ID NO: 45033
  derived and/or modified CDS sequence (wt) from hemagglutinin__InfluenzaA__ALE32065

SEQ ID NO: 45563 - RNA, 1701 nt, Artificial Sequence
  derived and/or modified CDS sequence (wt) from hemagglutinin__InfluenzaA__ALE32066
augaagacuaucauugcuuugagcuacauucuaugucugguuuucgcucaaaaaauuccuggaaaugacaauagcacggcaacgcugugccuugggcaccaugcaguaccaaacggaacgauagugaaaacaaucacaaaugaccgaauugaaguuacuaaugcuacugaguugguucagaauuccucaauaggugaaauaugcgacaguccucaucagauccuugauggagaaaacugcacacuaauagaugcucuauugggagacccucagugugauggcuuucaaaauaagaaaugggaccuuuuuguugaacgaagcaaagccuacagcaacuguuacccuuaugaugugccggauuaugccucccuuaggucacuaguugccucauccggcacacuggaguuuaacaaugaaagcuucaauuggacuggagucacucaaaacggaacaaguucugcuugcauaaggagaucuaguaguaguuucuuuaguagauuaaauugguugacccacuuaaacuacacauacccagcauugaacgugucuaugccaaacaaugaacaauuugacaaauuguacauuugggggguucaccacccggguacggacaaggaccaaaucuuccuguaugcucaaucaucaggaagaaucacaguaucuaccaaaagaagccaacaagcuguaaucccaaauaucggaucuagacccagaauaagggauaucccuagcagaauaagcaucuauuggacaauaguaaaaccgggagacauacuuuugauuaacagcacagggaaucuaauugcuccuagggguuacuucaaaauacgaagugggaaaagcucaauaaugagaucagaugcacccauuggcaaaugcaagucugaaugcaucacuccaaauggaagcauucccaaugacaaaccauuccaaaauguaaacaggaucacauacggggccugucccagauauguuaagcauagcacucugaaauuggcaacaggaaugcgaaauguaccagagaaacaaacuagaggcauauuuggcgcaauagcggguuucauagaaaaugguugggagggaaugguggaugguugguacgguuucaggcaucaaaauucugagggaagaggacaagcagcagaucucaaaagcacucaagcagcaaucgaucaaaucaaugggaagcugaaucgguugaucgggaaaaccaacgagaaauuccaucagauugaaaaagaauucucagaaguagaaggaagaauucaggaccuugagaaauauguugaggacacuaaaauagaucucuggucauauaacgcggagcuucuuguugcccuggagaaccaacauacaauugaucuaacugacucagaaaugaacaaacuguuugaaaaaacaaagaagcaacugagggaaaaugcugaggauaugggaaaugguuguuucaaaauauaccacaaaugugacaaugccugcauaggaucaauaagaaauggaacuuaugaccacaauguguacagggaugaagcauuaaacaaccgguuccagaucaaggggguugagcugaagucaggguacaaagauuggauccuauggauuuccuuugccauaucauguuuuuugcuuuguguugcuuuguugggguucaucaugugggccugccaaaagggcaacauuaggugcaacauuugcauuuga

SEQ ID NO: 45564 - RNA, 1701 nt, Artificial Sequence; identical to SEQ ID NO: 45235
  derived and/or modified CDS sequence (wt) from hemagglutinin__InfluenzaA__ALE32067

SEQ ID NO: 45565 - RNA, 1701 nt, Artificial Sequence
  derived and/or modified CDS sequence (wt) from hemagglutinin__InfluenzaA__ALE32068
augaagacuaucauugcuuugagcuacauucuaugucugguuuucgcucaaaaaauuccuggaaaugacaauagcacggcaacgcugugccuugggcaccaugcaguaccaaacggaacgauagugaaaacaaucacaaaugaccgaauugaaguuacuaaugcuacugagcugguucagaauuccucaauaggugaaauaugcgacaguccucaucagauccuugauggagaaaacugcacacuaauagaugcucuauugggagacccucagugugauggcuuucaaaauaagaaaugggaccuuuuuguugaacgaagcaaagccuacagcaacuguuacccuuaugaugugccggauuaugccucccuuaggucacuaguugccucauccggcacacuggaguuuaacaaugaaagcuucaauuggacuggagucacucaaaacggaacaaguucugcuugcauaaggagaucuaguaguaguuucuuuaguagauuaaauugguugacccacuuaaacuacacauacccagcauugaacgugacuaugccaaacaaugaacaauuugacaaauuguacauuugggggguucaccacccggguacggacaaggaccaaaucuuccuguaugcucaaucaucaggaagaaucacaguaucuaccaaaagaagccaacaagcuguaaucccaaauaucggaucuagacccagaauaagggauaucccuagcagaauaagcaucuauuggacaauaguaaaaccaggagacauacuuuugauuaacagcacagggaaucuaauugcuccuagggguuacuucaaaauacgaagugggaaaagcucaauaaugagaucagaugcacccauuggcaaaugcaagucugaaugcaucacuccaaauggaagcauucccaaugacaaaccauuccaaaauguaaacaggaucacauacggggccugucccagauauguuaaacauagcacucugaaauuggcaacaggaaugcgaaauguaccagagaaacaaacuagaggcauauuuggcgcaauagcggguuucauagaaaaugguugggagggaaugguggaugguugguacgguuucaggcaucaaaauucugagggaagaggacaagcagcagaucucaaaagcacucaagcagcaaucgaucaaaucaaugggaagcugaaucgauugaucgggaaaaccaacgagaaauuccaucagauugaaaaagaauucucagaaguagaaggaagaauucaggaccuugagaaauauguugaggacacuaaaauagaucucuggucauacaacgcggagcuucucguugcccuggagaaccaacauacaauugaucuaacugacucagaaaugaacaaacuguuugaaaaaacaaagaagcaacugagggaaaaugcugaggauaugggaaaugguuguuucaaaauauaccacaaaugugacaaugccugcauaggaucaauaagaaauggaacuuaugaccacaauguguacagggaugaagcauuaaacaaccgguuccagaucaagggaguugagcugaagucaggguacaaagauuggauccuauggauuuccuuugccauaucauguuuuuugcuuuguguugcuuuguugggguucaucaugugggccugccaaaagggcaacauuaggugcaacauuugcauuuga

SEQ ID NO: 45566 - RNA, 1701 nt, Artificial Sequence
  derived and/or modified CDS sequence (wt) from hemagglutinin__InfluenzaA__ALE32069
augaagacuaucauugcuuugagcuacauucuaugucugguuuucgcucaaaaaauuccuggaaaugacaauagcacggcaacgcugugccuugggcaccaugcaguaccaaacggaacgauagugaaaacaaucacaaaugaccgaauugaaguuacuaaugcuacugagcugguucagaauuccucaauaggugaaauaugcgacaguccucaucagauccuugauggagaaaacugcacacuaauagaugcucuauugggagacccucagugugauggcuuucaaaauaagaaaugggaccuuuuuguugaacgaagcaaagccuacagcaacuguuacccuuaugaugugccggauuaugccucccuuaggucacuaguugccucauccggcacacuggaguuuaacaaugaaagcuucaauuggacuggagucacucaaaacggaacaaguucugcuugcauaaggagaucuaguaguaguuucuuuaguagauuaaauugguugacccacuuaaacuacacauacccagcauugaacgugacuaugccaaacaaugaacaauuugacaaauuguacauuugggggguucaccacccggguacggacaaggaccaaaucuuccuguaugcucaaucaucaggaagaaucacaguaucuaccaaaagaagccaacaagcuguaaucccaaauaucggaucuagacccagaauaagggauaucccuagcagaauaagcaucuauuggacaauaguaaaaccgggagacauacuuuugauuaacagcacagggaaucuaauugcuccuagggguuacuucaaaauacgaagugggaaaagcucaauaaugagaucagaugcacccauuggcaaaugcaaaucugaaugcaucacuccaaauggaagcauucccaaugacaaaccauuccaaaauguaaacaggaucacauacggggccugucccagauauguuaagcauagcacucugaaauuggcaacaggaaugcgaaauguaccagagaaacaaacuagaggcauauuuggcgcaauagcggguuucauagaaaaugguugggagggaaugguggaugguugguacgguuucaggcaucaaaauucugagggaagaggacaagcagcagaucucaaaagcacucaagcagcaaucgaucaaaucaaugggaagcugaaucgauugaucgggaaaaccaacgagaaauuccaucagauugaaaaagaauucucagaaguagaaggaagaauucaggaccuugagaaauauguugaggacacuaaaauagaucucuggucauacaacgcggagcuucuuguugcccuggagaaccaacauacaauugaucuaacugacucagaaaugaacaaacuguuugaaaaaacaaagaagcaacugagggaaaaugcugaggauaugggaaaugguuguuucaaaauauaccacaaaugugacaaugccugcauaggaucaauaagaaauggaacuuaugaccacaauguguacagggaugaagcauuaaacaaccgguuccagaucaagggaguugagcugaagucaggguacaaagauuggauccuauggauuuccuuugccauaucauguuuuuugcuuuguguugcuuuguugggguucaucaugugggccugccaaaagggcaacauuaggugcaacauuugcauuuga

SEQ ID NO: 45567 - RNA, 1701 nt, Artificial Sequence
  derived and/or modified CDS sequence (wt) from hemagglutinin__InfluenzaA__ALE32070
augaagacuaucauugcuuugagcuacauucuaugucugguuuucgcucaaaaaauuccuggaaaugacaauagcacggcaacgcugugccuugggcaccaugcaguaccaaacggaacgauagugaaaacaaucacaaaugaccgaauugaaguuacuaaugcuacugaguugguucagaauuccucaauaggugaaauaugcgacaguccucaucagauccuugauggagaaaacugcacacuaauagaugcucuauugggagacccucagugugauggcuuucaaaauaagaaaugggaccuuuuuguugaacgaagcaaagccuacagcaacuguuacccuuaugaugugccggauuaugccucccuuaggucacuaguugccucauccggcacacuggaguuuaacaaugaaagcuucaauuggacuggagucacucaaaacggaacaaguucugcuugcauaaggagaucuaguaguaguuucuuuaguagauuaaauugguugacccacuuaaacuacacauacccagcauugaacgugacuaugccaaacaaugaacaauuugacaaauuguacauuugggggguucaccacccggguacggacaaggaccaaaucuuccuguaugcucaaucaucaggaagaaucacaguaucuaccaaaagaagccaacaagcuguaaucccaaauaucggaucuagacccagaauaagggauaucccuagcagaauaagcaucuauuggacaauaguaaaaccgggagacauacuuuugauuaacagcacagggaaucuaauugcuccuagggguuacuucaaaauacgaagugggaaaagcucaauaaugagaucagaugcacccauuggcaaaugcaagucugaaugcaucacuccaaauggaagcauucccaaugacaaaccauuccaaaauguaaacaggaucacauacggggucugucccagauauguuaagcauagcacucugaaauuggcaacaggaaugcgaaauguaccagagaaacaaacuagaggcauauuuggcgcaauagcggguuucauagaaaaugguugggagggaaugguggaugguugguacgguuucaggcaucaaaauucugagggaagaggacaagcagcagaucucaaaagcacucaagcagcaaucgaucaaaucaaugggaagcugaaucgguugaucgggaaaaccaacgagaaauuccaucagauugaaaaagaauucucagaaguagaaggaagaauucaggaccuugagaaauauguugaggacacuaaaauagaucucuggucauauaacgcggagcuucuuguugcccuggagaaccaacauacaauugaucuaacugacucagaaaugaacaaacuguuugaaaaaacaaagaagcaacugagggaaaaugcugaggauaugggaaaugguuguuucaaaauauaccacaaaugugacaaugccugcauaggaucaauaagaaauggaacuuaugaccacaauguguacagggaugaagcauuaaauaaccgguuccagaucaaggggguugagcugaagucaggguacaaagauuggauccuauggauuuccuuugccauaucauguuuuuugcuuuguguugcuuuguugggguucaucaugugggccugccaaaagggcaacauuaggugcaacauuugcauuuga

SEQ ID NO: 45568 - RNA, 1701 nt, Artificial Sequence
  derived and/or modified CDS sequence (wt) from hemagglutinin__InfluenzaA__ALE32071
augaagacuaucauugcuuugagcuacauucuaugucugguuuucgcucaaaaaauuccuggaaaugacaauagcacggcaacgcugugccuugggcaccaugcaguaccaaacggaacgauagugaaaacaaucacaaaugaccgaauugaaguuacuaaugcuacugagcugguucagaauuccucaauaggugaaauaugcgacaguccucaucagauccuugauggagaaaacugcacacuaauagaugcucuauugggagacccucagugugauggcuuucaaaauaagaaaugggaccuuuuuguugaacgaagcaaagccuacagcaacuguuacccuuaugaugugccggauuaugccucccuuaggucacuaguugccucauccggcacacuggaguuuaacaaugaaagcuucaauuggacuggagucacucaaaacggaacaaguucugcuugcauaaggagaucuaguaguaguuucuuuaguagauuaaauugguugacccacuuaaacuacacauacccagcauugaacgugacuaugccaaacaaugaacaauuugacaaauuguacauuugggggguucaccacccggguacggacaaggaccaaaucuuccuguaugcucaaucaucaggaagaaucacaguaucuaccaaaagaagccaacaagcuguaaucccaaauaucggaucuagacccagaauaagggauaucccuagcagaauaagcaucuauuggacaauaguaaaaccgggagacauacuuuugauuaacagcacagggaaucuaauugcuccuagggguuacuucaaaauacgaagugggaaaagcucaauaaugagaucagaugcacccauuggcaaaugcaagucugaaugcaucacuccaaauggaagcauucccaaugacaaaccauuccaaaauguaaacaggaucacauacggggccugucccagauauguuaagcauagcacucugaaauuggcaacaggaaugcgaaauguaccagagaaacaaacuagaggcauauuuggcgcaauagcggguuucauagaaaaugguugggagggaaugguggaugguugguacgguuucagacaucaaaauucugagggaagaggacaagcagcagaucucaaaagcacucaagcagcaaucgaucaaaucaauggaaagcugaaucgauugaucgggaaaaccaacgagaaauuccaucagauugaaaaagaauucucagaaguagaaggaagaauucaggaccuugagaaauauguugaggacacuaaaauagaucucuggucauacaacgcggagcuucuuguugcccuggagaaccaacauacaauugaucuaacugacucagaaaugaacaaacuguuugaaaaaacaaagaagcaacugagggaaaaugcugaggauaugggaaaugguuguuucaaaauauaccacaaaugugacaaugccugcauaggaucaauaagaaauggaacuuaugaccacaauguguacagggaugaagcauuaaacaaccgguuccagaucaagggaguugagcugaagucaggguacaaagauuggauccuauggauuuccuuugccauaucauguuuuuugcuuuguguugcuuuguugggguucaucaugugggccugccaaaagggcaacauuaggugcaacauuugcauuuga

SEQ ID NO: 45569 - RNA, 1701 nt, Artificial Sequence; identical to SEQ ID NO: 45450
  derived and/or modified CDS sequence (wt) from hemagglutinin__InfluenzaA__ALE32072

SEQ ID NO: 45570 - RNA, 1701 nt, Artificial Sequence
  derived and/or modified CDS sequence (wt) from hemagglutinin__InfluenzaA__ALE32073
augaagacuaucauugcuuugagcuacauucuaugucugguuuucgcucaaaaaauuccuggaaaugacaauagcacggcaacgcugugccuugggcaccaugcaguaccaaacggaacgauagugaaaacaaucacaaaugaccgaauugaaguuacuaaugcuacugaguugguucagaauuccucaauaggugaaauaugcgacaguccucaucagauccuugauggagaaaacugcacacuaauagaugcucuauugggagacccucagugugauggcuuucaaaauaagaaaugggaccuuuuuguugaacgaagcaaagccuacagcaacuguuacccuuaugaugugccggauuaugccucccuuaggucacuaguugccucauccggcacacuggaguuuaacaaugaaagcuucaauuggacuggagucacucaaaacggaacaaguucugcuugcauaaggaaaucuaguaguaguuucuuuaguagauuaaauugguugacccacuuaaacuacacauacccagcauugaacgugacuaugccaaacaaugaacaauuugacaaauuguacauuugggggguucaccacccggguacggacaaggaccaaaucuuccuguaugcucaaucaucaggaagaaucacaguaucuaccaaaagaagccaacaagcuguaaucccaaauaucggaucuagacccagaauaagggauaucccuagcagaauaagcaucuauuggacaauaguaaaaccgggagacauacuuuugauuaacagcacagggaaucuaauugcuccuagggguuacuucaaaauacuaagugggaaaagcucaauaaugagaucagaugcacccauuggcaaaugcaagucugaaugcaucacuccaaauggaagcauucccaaugacaaaccauuccaaaauguaaacaggaucacauacggggccugucccagauauguuaagcauagcacucugaaauuggcaacaggaaugcgaaauguaccagagaaacaaacuagaggcauauuuggcgcaauagcggguuucauagaaaaugguugggaaggaaugguggaugguugguacgguuucaggcaucaaaauucugagggaagaggacaagcagcagaucucaaaagcacucaagcagcaaucgaucaaaucaaugggaagcugaaucgguugaucgggaaaaccaacgagaaauuccaucagauugaaaaagaauucucagaaguagaaggaagaauucaggaccuugagaaauauguugaggacacuaaaauagaucucuggucauauaacgcggagcuucuuguugcccuggagaaccaacauacaauugaucuaacugacucagaaaugaacaaacuguuugaaaaaacaaagaagcaacugagggaaaaugcugaggauaugggaaaugguuguuucaaaauauaccacaaaugugacaaugccugcauaggaucaauaagaaauggaacuuaugaccacaauguguacagggaugaagcauuaaacaaccgguuccagaucaaggggguugagcugaagucaggguacaaagauuggauccuauggauuuccuuugccauaucauguuuuuugcuuuguguugcuuuguugggguucaucaugugggccugccaaaagggcaacauuaggugcaacauuugcauuuga

SEQ ID NO: 45571 - RNA, 1701 nt, Artificial Sequence
  derived and/or modified CDS sequence (wt) from hemagglutinin__InfluenzaA__ALE32074
augaagacuaucauugcuuugagcuacauucuaugucugguuuucgcucaaaaaauuccuggaaaugacaauagcacggcaacgcugugccuugggcaccaugcaguaccaaacggaacgauagugaaaacaaucacaaaugaccgaauugaaguuacuaaugcuacugaguugguucagaauuccucaauaggugaaauaugcgacaguccucaucagauccuugauggagaaaacugcacacuaauagaugcucuauugggagacccucagugugauggcuuucaaaauaagaaaugggaccuuuuuguugaacgaagcaaagccuacagcaacuguuacccuuaugaugugccggauuaugccucccuuaggucacuaguugccucauccggcacacuggaguuuaacaaugaaagcuucaauuggacuggagucacucaaaacggaacaaguucuucuugcauaaggagaucuaguaguaguuucuuuaguagauuaaauugguugacccacuuaaacuacacauacccagcauugaacgugacuaugccaaacaaugaacaauuugacaaauuguacauuugggggguucaccacccggguacggacaaggaccaaaucuuccuguaugcucaaucaucaggaagaaucacaguaucuaccaaaagaagccaacaagcuguaaucccaaauaucggaucuagacccagaauaagggauaucccuagcagaauaagcaucuauuggacaauaguaaaaccgggagacauacuuuugauuaacagcacagggaaucuaauugcuccuagggguuacuucaaaauacuaagugggaaaagcucaauaaugagaucagaugcacccauuggcaaaugcaagucugaaugcaucacuccaaauggaagcauucccaaugacaaaccauuccaaaauguaaacaggaucacauacggggccugucccagauauguuaagcauagcacucugaaauuggcaacaggaaugcgaaauguaccagagaaacaaacuagaggcauauuuggcgcaauagcggguuucauagaaaaugguugggaaggaaugguggaugguugguacgguuucaggcaucaaaauucugagggaagaggacaagcagcagaucucaaaagcacucaagcagcaaucgaucaaaucaaugggaagcugaaucgguugaucgggaaaaccaacgagaaauuccaucagauugaaaaagaauucucagaaguagaaggaagaauucaggaccuugagaaauauguugaggacacuaaaauagaucucuggucauauaacgcggagcuucuuguugcccuggagaaccaacauacaauugaucuaacugacucagaaaugaacaaacuguuugaaaaaacaaagaagcaacugagggaaaaugcugaggauaugggaaaugguuguuucaaaauauaccacaaaugugacaaugccugcauaggaucaauaagaaauggaacuuaugaccacaauguguacagggaugaagcauuaaacaaccgguuccagaucaaggggguugagcugaagucaggguacaaagauuggauccuauggauuuccuuugccauaucauguuuuuugcuuuguguugcuuuguugggguucaucaugugggccugccaaaagggcaacauuaggugcaacauuugcauuuga

SEQ ID NO: 45572 - RNA, 1701 nt, Artificial Sequence
  derived and/or modified CDS sequence (wt) from hemagglutinin__InfluenzaA__ALE32075
augaagacuaucauugcuuugagcuacauucuaugucugguuuucgcucaaaagcuuccugaaaaugacaauagcacggcaacgcugugccuugggcaccaugcaguaccaaacggaacgauagugaaaacaaucacgagugaccgaauugaaguuacuaaugcuacugagcugguucagaauuccucaauaggugaaauaugcgacaguccucaucagauccuugauggaaaaaacugcacacuaauagaugcucuauugggagacccucagugugauggcuuucaaaauaagaaaugggaccuuuuuguugaacgaagcaaagccuacagcaacuguuacccuuaugaugugccggauuaugccucccuuaggucacuaguugccucauccgguacacuggaguuuaacgaugaaagcuucaauugggcuggagucacucaaaacggaacaaguucuucuugcauaaggggaucuaauaguaguuucuuuaguagauuaaauugguugacccacucaaacuucaaauacccagcauugaacgugacuaugccaaacaaugaacaauuugacaaauuguacauuugggggguucaccacccggguacggacaaggaccaaaucuuccuguaugcucaaucaucaggaagaaucacaguauccaccaaaagaagccaacaagcuguaaucccgaauaucggaucuagacccagaauaaggaauaucccuagcagaauaagcaucuauuggacaauaguaaaaccgggagacauacuuuugauuaacagcacagggaaucuaauugcuccuagggguuacuucaaaauacgaagugggaaaagcucaauaaugagaucagaugcacccauuggcaaaugcaagucugaaugcaucacuccaaauggaagcauucccaaugacaaaccauuccaaaauguaaacaggaucacauacggggccugucccagauauguuaagcaaagcacucugaaauuggcaacaggaaugcgaaauguaccagagaaacaaacuagaggcauauuuggcgcaauagcggguuucauagaaaaugguugggagggaaugaaggaugguugguacgguuucaggcaucaaaauucugagggaagaggacaagcagcagaucucaaaagcacucaagcagcaaucgaucaaaucaaugggaagcugaaucgauugaucgggaaaaccaacgagaaauuccaucagauugaaaaagaauucucagaaguagaagggagaauucaggaccuugagaaauauguugaggacacaaaaauagaucucuggucauacaacgcggagcuucuuguugcccuggagaaccaacauacaauugaucugacugacucagaaaugaacaaacuguuugaaaaaacaaagaagcaacugagggaaaaugcugaggauaugggcaaugguuguuucaaaauauaccacaaaugugacaaugccugcauaggaucaaucagaaauggaacuuaugaccacgauguauacagggaugaagcuuuaaacaaccgguuccagaucaagggaguugagcugaagucaggguacaaagauuggauccuauggauuuccuuugccauaucauguuuuuugcuuuguguugcuuuguugggguucaucaugugggccugccaaaagggcaacauuaggugcaacauuugcauuuga

SEQ ID NO: 45573 - RNA, 1701 nt, Artificial Sequence; identical to SEQ ID NO: 45035
  derived and/or modified CDS sequence (wt) from hemagglutinin__InfluenzaA__ALE32076

SEQ ID NO: 45574 - RNA, 1701 nt, Artificial Sequence
  derived and/or modified CDS sequence (wt) from hemagglutinin__InfluenzaA__ALE32077
augaagacuaucauugccuugagcuacauucuaugucugguuuucgcucaaaaaauuccuggaaaugacaauagcacggcaacgcugugccuugggcaccaugcaguaccaaacggaacgauagugaaaacaaucacaaaugaccgaauugaaguuacuaaugcuacugagcugguucagaauuccucaauaggugaaauaugcgacaguccucaucagauccuugauggagaaaacugcacacuaauagaugcucuauugggagacccucagugugauggcuuucaaaauaagaaaugggaccuuuuuguugaacgaagcaaagcccacagcaacuguuacccuuaugaugugccggauuaugccucccuuaggucacuaguugccucauccggcacacuggaguuuaacaaugaaagcuucaauuggacuggagucacucaaaacggaacaaguucugcuugcauaaggagaucuaguaguaguuucuuuaguagauuaaauugguugacccacuuaaacuacacauacccagcauugaacgugacuaugccaaacaaugaacaauuugacaaauuguacauuugggggguucaccauccggguacggacaaggaccaaaucuuccuguaugcucgaucaucaggaagaaucacaguaucuaccaaaggaagccaacaagcuguaaucccaaauaucggaucuagacccagaauaagggauaucccuagcagaauaagcaucuauuggacaauaguaaaaccgggagacauacuuuugauuaacagcacagggaaucuaauugcuccuagggguuacuucaaaauacgaagugggaaaagcucaauaaugagaucagaugcacccauuggcaaaugcaagucugaaugcaucacuccaaauggaagcauucccaaugacaaaccauuccaaaauguaaacaggaucacauacggggccugucccagauauguuaagcauagcacucugaaauuggcaacaggaaugcgaaauguaccagagaaacaaacuagaggcauauuuggcgcaauagcggguuucauagaaaaugguugggagggaaugguggaugguugguacgguuucaggcaucaaaauucugagggaagaggacaagcagcagaucucaaaagcacucaagcagcaaucgaucaaaucaaugggaagcugaaucgauugaucgggaaaaccaacgagaaauuccaucagauugaaaaagaauucucagaaguagaaggaagaauucaggaccuugagaaauauguugaggacacuaaaauagaucucuggucauacaacgcggagcuucuuguugcccuggagaaccaacauacaauugaucuaacugacucagaaaugaacaaacuguuugaaaaaacaaagaagcaacugagggaaaaugcugaggauaugggaaaugguuguuucaaaauauaccacaaaugugacaaugccugcauaggaucaauaagaaauggaacuuaugaccacaauguguacagggaugaagcauuaaacaaccgguuccagaucaagggaguugagcugaagucaggguacaaagauuggauccuauggauuuccuuugccauaucauguuuuuugcuuuguguugcuuuguugggguucaucaugugggccugccaaaagggcaacauuaggugcaacauuugcauuuga

SEQ ID NO: 45575 - RNA, 1701 nt, Artificial Sequence
  derived and/or modified CDS sequence (wt) from hemagglutinin__InfluenzaA__ALE32078
augaagacuaucauugcuuugagcuacauucuaugucugguuuucgcucaaaaaauuccuggaaaugacaauagcacggcaacgcugugccuugggcaccaugcaguaccaaacggaacgauagugaaaacaaucacaaaugaccgaauugaaguuacuaaugcuacugagcugguucagaauuccucaauaggugaaauaugcgacaguccucaucagauccuugauggagaaaacugcacacuaauagaugcucuauugggagacccucagugugauggcuuucaaaauaagaaaugggaccuuuuuguugaacgaagcaaagccuacagcaacuguuacccuuaugaugugccggauuaugccucccuuaggucacuaguugccucauccggcacacuggaguuuaacaaugaaagcuucaauuggacuggagucacucaaaacggaacaaguucugcuugcauaaggaaaucuaguaguaguuucuuuaguagauuaaauugguugacccacuuaaacuacacauacccagcauugaacgugacuaugccaaacaaugaacaauuugacaaauuguacauuugggggguucaucacccggguacggacaaggaccaaaucuuccuguaugcucgaucaucaggaagaaucacaguaucuaccaaaagaagccaacaagcuguaaucccaaauaucggaucuagacccagaauaagggauaucccuagcagaauaagcaucuauuggacaauaguaaaaccgggagacauacuuuugauuaacagcacagggaaucuaauugcuccuagggguuacuucaaaauacgaagugggaaaagcucaauaaugagaucagaugcacccauuggcaaaugcaagucugaaugcaucacuccaaauggaagcauucccaaugacaaaccauuccaaaauguaaacaggaucacauacggggccugucccagauauguuaagcauagcacucugaaauuggcaacaggaaugcgaaauguaccagagaaacaaacuagaggcauauuuggcgcaauagcggguuucauagaaaaugguugggagggaaugguggaugguugguacgguuucaggcaucaaaauucugaggggagaggacaagcagcagaucucaaaagcacucaagcagcaaucgaucaaaucaaugggaagcugaaucgauugaucgggaaaaccaacgagaaauuccaucagauugaaaaagaauucucagaaguagaaggaagaauucaggaccuugagaaauauguugaggacacuaaaauagaucucuggucauacaacgcggagcuucuuguugcccuggagaaucaacauacaauugaucuaacugacucagaaaugaacaaacuguuugaaaaaacaaagaagcaacugagggaaaaugcugaggauaugggaaaugguuguuucaaaauauaccacaaaugugacaaugccugcauaggaucaauaagaaauggaacuuaugaccacaauguguacagggaugaagcauuaaacaaccgguuccagaucaagggaguugagcugaagucaggguacaaagauuggauccuauggauuuccuuugccauaucauguuuuuugcuuuguguugcuuuguugggguucaucaugugggccugccaaaagggcaacauuaggugcaacauuugcauuuga

SEQ ID NO: 45576 - RNA, 1701 nt, Artificial Sequence
  derived and/or modified CDS sequence (wt) from hemagglutinin__InfluenzaA__ALE32079
augaagacuaucauugccuugagcuacauucuaugucugguuuucgcucaaaaaauuccuggaaaugacaauagcacggcaacgcugugccuugggcaccaugcaguaccaaacggaacgauagugaaaacaaucacaaaugaccgaauugaaguuacuaaugcuacugagcugguucagaauuccucaauaggugaaauaugcgacaguccucaucagauccuugauggagaaaacugcacacuaauagaugcucuauugggagacccucagugugauggcuuucaaaauaagaaaugggaccuuuuuguugaacgaagcaaagccuacagcaacuguuacccuuaugaugugccggauuaugccucccuuaggucacuaguugccucauccggcacacuggaguuuaacaaugaaagcuucaauuggacuggagucacucaaaacggaacaaguucugcuugcauaaggagaucuaguaguaguuucuuuaguagauuaaauugguugacccacuuaaacuacacauacccagcauugaacgugacuaugccaaacaaugaacaauuugacaaauuguacauuugggggguucaccacccggguacggacaaggaccaaaucuuccuguaugcucaaucaucaggaagaaucacaguaucuaccaaaggaagccaacaagcuguaaucccaaauaucggaucuagacccagaauaagggauaucccuagcagaauaagcaucuauuggacaauaguaaaaccgggagacauacuuuugauuaacagcacagggaaucuaauugcuccuagggguuacuucaaaauacgaaguggaaaaagcucaauaaugagaucagaugcacccauuggcaaaugcaagucugaaugcaucacuccaaauggaagcauucccaaugacaaaccauuccaaaauguaaacaggaucacauacggggccugucccagauauguuaagcauagcacucugaaauuggcaacaggaaugcgaaauguaccagagaaacaaacuagaggcauauuuggcgcaauagcggguuucauagaaaaugguugggagggaaugguggaugguugguacgguuucaggcaucaaaauucugagggaagaggacaagcagcagaucucaaaagcacucaagcagcaaucgaucaaaucaaugggaagcugaaucgauugaucgggaaaaccaacgagaaauuccaucagauugaaaaagaauucucagaaguagaaggaagaauucaggaccuugagaaauauguugaggacacuaaaauagaucucuggucauacaacgcggagcuucuuguugcccuggagaaccaacauacaauugaucuaacugacucagaaaugaacaaacuguuugaaaaaacaaagaagcaacugagagaaaaugcugaggauaugggaaaugguuguuucaaaauauaccacaaaugugacaaugccugcauaggaucaauaagaaauggaacuuaugaccacaauguguacagggaugaagcauuaaacaaccgguuccagaucaagggaguugagcugaagucaggguacaaagauuggauccuauggauuuccuuugccauaucauguuuuuugcuuuguguugcuuuguugggguucaucaugugggccugccaaaagggcaacauuaggugcaacauuugcauuuga

SEQ ID NO: 45577 - RNA, 1701 nt, Artificial Sequence
  derived and/or modified CDS sequence (wt) from hemagglutinin__InfluenzaA__ALE32080
augaagacuaucauugcuuugagcuacauucuaugucugguuuucgcucaaaaaauuccuggaaaugacaauagcacggcaacgcugugccuuggacaccaugcaguaccaaacggaacgauagugaaaacaaucacaaaugaccgaauugaaguuacuaaugcuacugagcugguucagaauuccucaauaggugaaauaugcgacaguccucaucagauccuugauggagaaaacugcacacuaauagaugcucuauugggagacccucagugugauggcuuucaaaauaagaaaugggaccuuuuuguugaacgaagcaaagccuacagcaacuguuacccuuaugaugugccggauuaugcuucccuuaggucacugguugccucauccggcacacuggaguuuaacaaugaaagcuucaauuggacuggagucacucaaaacggaacaaguucuucuugcauaaggagaucuaguaguaguuucuuuaguagauuaaauugguugacccacuuaaacuacacauacccagcauugaacgugacuaugccaaacaaugaacaauuugacaaauuguacauuugggggguucaccacccggguacggacaaggaccaaaucuuccuguaugcucaaucaucaggaagaaucacaguaucuaccaaaagaagccaacaagcuguaaucccaaauaucggaucuagacccagaauaagggauaucccuagcagaauaagcaucuauuggacaauaguaaaaccgggagacauacuuuugauuaacagcacagggaaucuaauugcuccuagggguuacuucaaaauacgaagugggaaaagcucaauaaugagaucagaugcacccauuggcaaaugcaagucugaaugcaucacuccaaauggaagcauucccaaugacaaaccauuccaaaauguaaacaggaucacauacggggccugucccagauauguuaagcauagcacucugaaauuggcaacaggaaugcgaaauguaccagagaaacaaacuagaggcauauuuggcgcaauagcggguuucauagaaaaugguugggagggaaugguggaugguugguacgguuucaggcaucaaaauucugagggaagaggacaagcagcagaucucaaaagcacucaagcagcaaucgaucaaaucaauggaaagcugaaucgauugaucgggaaaaccaacgagaaauuccaucagauugaaaaagaauucucagaaguagaaggaagaauucaggaccuugagaaauauguugaggacacuaaaauagaucucuggucauacaacgcggagcuucuuguugcccuggagaaccaacauacaauugaucuaacugacucagaaaugaacaaacuguuugaaaaaacaaagaagcaacugagggaaaaugcugaggauaugggaaaugguuguuucaaaauauaccacaaaugugacaaugccugcauaggaucaauaagaaauggaacuuaugaccacaauguguacagggaugaagcauuaaacaaccgguuccagaucaagggaguugagcugaagucaggguacaaagauuggauccuauggauuuccuuugccauaucauguuuuuugcuuuguguugcuuuguugggguucaucaugugggccugccaaaagggcaacauuaggugcaacauuugcauuuga

SEQ ID NO: 45578 - RNA, 1701 nt, Artificial Sequence
  derived and/or modified CDS sequence (wt) from hemagglutinin__InfluenzaA__ALE32081
augaagacuaucauugcuuugagcuacauucuaugucugguuuucgcucaaaaaauuccuggaaaugacaauagcacggcaacgcugugccuugggcaccaugcaguaccaaacggaacgauagugaaaacaaucacaaaugaccgaauugaaguuacuaaugcuacugagcugguucagaauuccucaauaggugaaauaugcgacaguccucaucagauccuugauggagaaaacugcacacuaauagaugcucuauugggagacccucagugugauggcuuucaaaauaagaaaugggaccuuuuuguugaacgaagcaaagccuacagcaacuguuacccuuaugaugugccggauuaugccucccuuaggucacuaguugccucauccggcacacuggaguuuaacaaugaaaguuucaauuggacuggagucacucaaaacggaacaaguucugcuugcauaaggaaaucuaguaguaguuucuuuaguagauuaaauugguugacccacuuaaacuacacauacccagcauugaacgugacuaugccaaacaaugaacaauuugacaaauuguacauuugggggguucaccacccggguacggacaaggaccaaaucuuccuguaugcucgaucaucaggaagaaucacaguaucuaccaaaagaagccaacaagcuguaaucccaaauaucggaucuagacccagaauaagggauaucccuagcagaauaagcaucuauuggacaauaguaaaaccgggagacauacuuuugauuaacagcacagggaaucuaauugcuccuagggguuacuucaaaauacgaagugggaaaagcucaauaaugagaucagaugcacccauuggcaaaugcaagucugaaugcaucacuccaaauggaagcauucccaaugacaaaccauuccaaaauguaaacaggaucacauacggggccugucccagauauguuaagcauagcacucugaaauuggcaacaggaaugcgaaauguaccagagaaacaaacuagaggcauauuuggcgcaauagcggguuucauagaaaaugguugggagggaaugguggaugguugguacgguuucaggcaucaaaauucugaggggagaggacaagcagcagaucucaaaagcacucaagcagcaaucgaucaaaucaaugggaagcugaaucgauugaucgggaaaaccaacgagaaauuccaucagauugaaaaagaauucucagaaguagaaggaagaauucaggaccuugagaaauauguugaggacacuaaaauagaucucuggucauacaacgcggagcuucuuguugcccuggagaaucaacauacaauugaucuaacugacucagaaaugaacaaacuguuugaaaaaacaaagaagcaacugagggaaaaugcugaggauaugggaaaugguuguuucaaaauauaccacaaaugugacaaugccugcauaggaucaauaagaaauggaacuuaugaccacaauguguacagggaugaagcauuaaacaaccgguuccagaucaagggaguugagcugaagucaggguacaaagauuggauccuauggauuuccuuugccauaucauguuuuuugcuuuguguugcuuuguugggguucaucaugugggccugccaaaagggcaacauuaggugcaacauuugcauuuga

SEQ ID NO: 45579 - RNA, 1701 nt, Artificial Sequence; identical to SEQ ID NO: 45140
  derived and/or modified CDS sequence (wt) from hemagglutinin__InfluenzaA__ALE32082

SEQ ID NO: 45580 - RNA, 1701 nt, Artificial Sequence
  derived and/or modified CDS sequence (wt) from hemagglutinin__InfluenzaA__ALE32083
augaagacuaucauugccuugagcuacauucuaugucugguuuucgcucaaaaaauuccuggaaaugacaauagcacggcaacgcugugccuugggcaccaugcaguaccaaacggaacgauagugaaaacaaucacaaaugaccgaauugaaguuacuaaugcuacugagcugguucagaauuccucaauaggugaaauaugcgacaguccucaucagauccuugauggagaaaacugcacacuaauagaugcucuauugggagacccucagugugauggcuuucaaaauaagaaaugggaccuuuuuguugaacgaagcaaagccuacagcaacuguuacccuuaugaugugccggauuaugccucccuuaggucacuaguugccucauccggcacacuggaguuuaacaaugaaagcuucaauuggacuggagucacucaaaacggaacaaguucugcuugcauaaggagaucuaguaguaguuucuuuaguagauuaaauugguugacccacuuaaacuacaaauacccagcauugaacgugacuaugccaaacaaugaacaauuugacaaauuguacauuugggggguucaccacccggguacggacaaggaccaaaucuuccuguaugcucgaucaucaggaagaaucacaguaucuaccaaaggaagccaacaagcuguaaucccaaauaucggaucuagacccagaauaagggauaucccuagcagaauaagcaucuauuggacaauaguaaaaccgggagacauacuuuugauuaacagcacagggaaucuaauugcuccuagggguuacuucaaaauacgaagugggaaaagcucaauaaugagaucagaugcacccauuggcaaaugcaagucugaaugcaucacuccaaauggaagcauucccaaugacaaaccauuccaaaauguaaacaggaucacauacggggccugucccagauauguuaagcauagcacucugaaauuggcaacaggaaugcgaaauguaccagagaaacaaacuagaggcauauuuggcgcaauagcggguuucauagaaaaugguugggagggaaugguggaugguugguacgguuucaggcaucaaaauucugagggaagaggacaagcagcagaucucaaaagcacucaagcagcaaucgaucaaaucaaugggaagcugaaucgauugaucgggaaaaccaacgagaaauuccaucagauugaaaaagaauucucagaaguagaaggaagaauucaggaccuugagaaauauguugaggacacuaaaauagaucucuggucauacaacgcggagcuucuuguugcccuggagaaccaacauacaauugaucuaacugacucagaaaugaacaaacuguuugaaagaacaaagaagcaacugagggaaaaugcugaggauaugggaaaugguuguuucaaaauauaccacaaaugugacaaugccugcauaggaucaauaagaaauggaacuuaugaccacaauguguacagggaugaagcauuaaacaaccgguuccagaucaagggaguugagcugaagucaggguacaaagauuggauccuauggauuuccuuugccauaucauguuuuuugcuuuguguugcuuuguugggguucaucaugugggccugccaaaagggcaacauuaggugcaacauuugcauuuga

SEQ ID NO: 45581 - RNA, 1701 nt, Artificial Sequence
  derived and/or modified CDS sequence (wt) from hemagglutinin__InfluenzaA__ALE32084
augaagaccaucauugcccugagcuacauucuaugucugguuuucgcucaaaaaauuccuggaaaugacaauagcacggcaacgcugugccuugggcaccaugcaguaccaaacggaacgauagugaaaacaaucacaaaugaccgaauugaaguuacuaaugcuacugagcugguucagaauuccucaauaggugaaauaugcgacaguccucaucagauccuugauggagaaaacugcacacuaauagaugcucuauugggagacccucagugugauggcuuucaaaauaagaaaugggaccuuuuuguugaacgaagcaaagccuacagcaacuguuacccuuaugaugugccggauuaugccucccuuaggucacuaguugccucauccggcacacuggaguuuaacaaugaaagcuucaauuggacuggagucacucaaaacggaacaaguucugcuugcauaaggagaucuaguaguaguuucuuuaguagauuaaauugguugacccacuuaaacuacacauacccagcauugaacgugacuaugccaaacaaugaacaauuugacaaauuguacauuugggggguucaccacccggguacggacaaggaccaaaucuuccuguaugcucgaucaucaggaagaaucacaguaucuaccaaaggaagccaacaagcuguaaucccaaauaucggaucuagacccagaauaagggauaucccuagcagaauaagcaucuauuggacaauaguaaaaccgggagacauacuuuugauuaacagcacagggaaucuaauugcuccuagggguuacuucaaaauacgaagugggaaaagcucaauaaugagaucagaugcacccauuggcaaaugcaagucugaaugcaucacuccaaauggaagcauucccaaugacaaaccauuccaaaauguaaacaggaucacauacggggccugucccagauauguuaagcauagcacucugaaauuggcaacgggaaugcgaaauguaccagagaaacaaacuagaggcauauuuggcgcaauagcggguuucauagaaaaugguugggagggaaugguggaugguugguacgguuucaggcaucaaaauucugagggaagaggacaagcagcagaucucaaaagcacucaagcagcaaucgaucaaaucaaugggaagcugaaucgauugaucgggaaaaccaacgagaaauuccaucagauugaaaaagaauucucagaaguagaaggaagaauucaggaccuugagaaauauguugaggacacuaaaauagaucucuggucauacaacgcggagcuucuuguugccuuggagaaccaacauacaauugaucuaacugacucagaaaugaacaaacuguuugaaaaaacaaagaagcaacugagggaaaaugcugaggauaugggaaaugguuguuucaaaauauaccacaaaugugacaaugccugcauaggaucaauaagaaauggaacuuaugaccacaauguguacagggaugaagcauuaaacaaccgguuccagaucaagggaguugagcugaaaucaggguacaaagauuggauccuauggauuuccuuugccauaucauguuuuuugcuuuguguugcuuuguugggguucaucaugugggccugccaaaagggcaacauuaggugcaacauuugcauuuga

SEQ ID NO: 45582 - RNA, 1701 nt, Artificial Sequence
  derived and/or modified CDS sequence (wt) from hemagglutinin__InfluenzaA__ALE32085
augaagacuaucauugcuuugagcuacauucuaugucugguuuucgcucaaaaaauuccuggaaaugacaauagcacggcaacgcugugccuugggcaccaugcaguaccaaacggaacgauagugaaaacaaucacaaaugaccgaauugaaguuacuaaugcuacugagcugguucagaauuccucaauaggugaaauaugcgacaguccucaucagauccuugauggagaaaacugcacacuaauagaugcucuauugggagacccucagugugauggcuuucaaaauaagaaaugggaccuuuuuguugaacgaagcaaagccuacagcaacuguuacccuuaugaugugccggauuaugccucccuuaggucacuaguugccucauccggcacacuggaguuuaacaaugaaagcuucaauuggacuggagucacucaaaacggaacaaguucugcuugcauaaggaaaucuaguaguaguuucuuuaguagauuaaauugguugacccacuuaaacuacacauacccagcauugaacgugacuaugccaaacaacgaacaauuugacaaauuguacauuugggggguucaccacccggguacggacaaggaccaaaucuuccuguaugcucgaucaucaggaagaaucacaguaucuaccaaaagaagccaacaagcuguaaucccaaauaucggaucuagacccagaauaagggauaucccuagcagaauaagcaucuauuggacaauaguaaaaccgggagacauacuuuugauuaacagcacagggaaucuaauugcuccuagggguuacuucaaaauacgaagugggaaaagcucaauaaugagaucagaugcacccauuggcaaaugcaagucugaaugcaucacuccaaauggaagcauucccaaugacaaaccauuccaaaauguaaacaggaucacauacggggccugucccagauauguuaagcauagcacucugaaauuggcaacaggaaugcgaaauguaccagagaaacaaacuagaggcauauuuggcgcaauagcggguuucauagaaaaugguugggagggaaugguggaugguugguacgguuucaggcaucaaaauucugagggaagaggacaagcagcagaucucaaaagcacucaagcagcaaucgaucaaaucaaugggaagcugaaucgauugaucgggaaaaccaacgagaaauuccaucagauugaaaaagaauucucagaaguagaaggaagaauucaggaccuugagaaauauguugaggacacuaaaauagaucucuggucauacaacgcggagcuucuuguugcccuggagaaucaacauacaauugaucuaacugacucagaaaugaacaaacuguuugaaaaaacaaagaagcaacugagggaaaaugcugaggauaugggaaaugguuguuucaaaauauaccacaaaugugacaaugccugcauaggaucaauaagaaauggaacuuaugaccacaauguguacagggaugaagcauuaaacaaccgguuccagaucaagggaguugagcugaagucaggguacaaagauuggauccuauggauuuccuuugccauaucauguuuuuugcuuuguguugcuuuguugggguucaucaugugggccugccaaaagggcaacauuaggugcaacauuugcauuuga

SEQ ID NO: 45583 - RNA, 1701 nt, Artificial Sequence
  derived and/or modified CDS sequence (wt) from hemagglutinin__InfluenzaA__ALE32086
augaagacuaucauugcuuugagcuacauucuaugucugguuuucgcucaaaaaauuccuggaaaugacaauagcacggcaacgcugugccuugggcaccaugcaguaccaaacggaacgauagugaaaacaaucacaaaugaccgaauugaaguuacuaaugcuacugagcugguucagaauuccucaauaggugaaauaugcgacaguccucaucagauccuugauggagaaaacugcacacuaauagaugcucuauugggagacccucagugugauggcuuucaaaauaagaaaugggaccuuuuuguugaacgaagcaaagccuacagcaacuguuacccuuaugaugugccggauuaugccucccuuaggucacuaguugccucauccggcacacuggaguuuaacaaugaaagcuucaauuggacuggagucacucaaaacggaacaaguucugcuugcauaaggaaaucuaguaguaguuucuuuaguagauuaaauugguugacccacuuaaacuacacauacccagcauugaacgugacuaugccaaacaaugaacaauuugacaaauuguacauuugggggguucaccacccggguacggacaaggaccaaaucuuccuguaugcucgaucaucaggaagaaucacaguaucuaccaaaagaagccaacaagcuguaaucccaaauaucggaucuagacccagaauaagggauaucccuagcagaauaagcaucuauuggacaauaguaaaaccgggagacauacuuuugauuaacagcacagggaaucuaauugcuccuagggguuacuucaaaauacgaagugggaaaagcucaauaaugagaucagaugcacccauuagcaaaugcaagucugaaugcaucacuccaaauggaagcauucccaaugacaaaccauuccaaaauguaaacaggaucacauacggggccugucccagauauguuaagcauagcacucugaaauuggcaacaggaaugcgaaauguaccagagaaacaaacuagaggcauauuuggcgcaauagcggguuucauagaaaaugguugggagggaaugguggaugguugguacgguuucaggcaucaaaauucugagggaagaggacaagcagcagaucucaaaagcacucaagcagcaaucgaucaaaucaaugggaagcugaaucgauugaucgggaaaaccaacgagaaauuccaucagauugaaaaagaauucucagaaguagaaggaagaauucaggaccuugagaaauauguugaggacacuaaaauagaucucuggucauacaacgcggagcuucuuguugcccuggagaaucaacauacaauugaucuaacugacucagaaaugaacaaacuguuugaaaaaacaaagaagcaacugagggaaaaugcugaggauaugggaaaugguuguuucaaaauauaccacaaaugugacaaugccugcauaggaucaauaagaaauggaacuuaugaccacaauguguacagggaugaagcauuaaacaaccgguuccagaucaagggaguugagcugaagucaggguacaaagauuggauccuauggauuuccuuugccauaucauguuuuuugcuuuguguugcuuuguugggguucaucaugugggccugccaaaagggcaacauuaggugcaacauuugcauuuga

SEQ ID NO: 45584 - RNA, 1701 nt, Artificial Sequence
  derived and/or modified CDS sequence (wt) from hemagglutinin__InfluenzaA__ALE32087
augaagacuaucauugcuuugagcuacauucuaugucugguuuucgcucaaaaaauuccuggaaaugacaauagcacggcaacgcugugccuugggcaccaugcaguaccaaacggaacgauagugaaaacaaucacaaaugaccgaauugaaguuacuaaugcuacugagcugguucagaauuccucaauaggugaaauaugcgacaguccucaucagauccuugacggagaaaacugcacacuaauagaugcucuauugggagacccucagugugauggcuuucaaaauaagaaaugggaccuuuuuguugaacgaagcaaagccuacagcaacuguuacccuuaugaugugccggauuaugccucccuuaggucacuaguugccucauccggcacacuggaguuuaacaaugaaagcuucaauuggacuggagucacucaaaacggaacaaguucugcuugcauaaggaaaucuaguaguaguuucuuuaguagauuaaauugguugacccacuuagacuacacauacccagcauugaacgugacuaugccaaacaaugaacaauuugacaaauuguacauuugggggguucaccacccggguacggacaaggaccaaaucuuccuguaugcucgaucaucaggaagaaucacaguaucuaccaaaagaagccaacaagcuguaaucccaaauaucggaucuagacccagaauaagggauaucccuagcagaauaagcaucuauuggacaauaguaaaaccgggagacauacuuuugauuaacagcacagggaauuuaauugcuccuagggguuacuucaaaauacgaagugggaaaagcucaauaaugagaucagaugcacccauuggcaaaugcaagucugaaugcaucacuccaaauggaagcauucccaaugacaaaccauuccaaaauguaaacaggaucacauacggggccugucccagauauguuaagcauagcacucugaaauuggcaacaggaaugcgaaauguaccagagaaacaaacuagaggcauauuuggcgcaauagcggguuucauagaaaaugguugggagggaaugguggaugguugguacgguuucaggcaucaaaauucugagggaagaggacaagcagcagaucucaaaagcacucaagcagcaaucgaucaaaucaaugggaaucugaaucgauugaucgggaaaaccaacgagaaauuccaucagauugaaaaagaauucucagaaguagaaggaagaauucaggaccuugagaaauauguugaggacacuaaaauagaucucuggucauacaacgcggagcuucuuguugcccuggagaaucaacauacaauugaucuaacugacucagaaaugaacaaacuguuugaaaaaacaaagaagcaacugagggaaaaugcugaggauaugggaaaugguuguuucaaaauauaccacaaaugugacaaugccugcauaggaucaauaagaaauggaacuuaugaccacaauguguacagggaugaagcauuaaacaaccgguuccagaucaagggaguugagcugaagucaggguacaaagauuggauccuauggauuuccuuugccauaucauguuuuuugcuuuguguugcuuuguugggguucaucaugugggccugccaaaagggcaacauuaggugcaacauuugcauuuga

SEQ ID NO: 45585 - RNA, 1701 nt, Artificial Sequence
  derived and/or modified CDS sequence (wt) from hemagglutinin__InfluenzaA__ALE32088
augaagacuaucauugcuuugagcuacauucuaugucugguuuucgcucaaaaaauuccuggaaaugacaauagcacggcaacgcugugccuugggcaccaugcaguaccaaacggaacgauagugaaaacaaucacaaaugaccgaauugaaguuacuaaugcuacugagcugguucagaauuccucaauaggugaaauaugcgacaguccucaucagauccuugauggagaaaacugcacacuaauagaugcucuauugggagacccucagugugauggcuuucaaaauaagaaaugggaccuuuuuguugaacgaagcaaagccuacagcaacuguuacccuuaugaugugccggauuaugccucccuuaggucacuaguugccucauccggcacacuggaguuuaacaaugaaagcuucaauuggacuggagucacucaaaacggaacaaguucugcuugcauaaggaaaucuaguaguaguuucuuuaguagauuaaauugguugacccacuuaaacuacacauacccagcauugaacgugacuaugccaaacaaugaacaauuugacaaauuguacauuugggggguucuccacccggguacggacaaggaccaaaucuuccuguaugcucgaucaucaggaagaaucacaguaucuaccaaaagaagccaacaagcuguaaucccaaauaucggaucuagacccagaauaagggauaucccuagcagaauaagcaucuauuggacaauaguaaaaccgggagacauacuuuugauuaacagcacagggaaucuaauugcuccuagggguuacuucaaaauacgaagugggaaaagcucaauaaugagaucagaugcacccauuggcaaaugcaagucugaaugcaucacuccaaauggaagcauucccaaugacaaaccauuccaaaauguaaacaggaucacauacggggccugucccagauauguuaagcauagcacucugaaauuggcaacaggaaugcgaaauguaccagagaaacaaacuagaggcauauuuggcgcaauagcggguuucauagaaaaugguugggagggaaugguggaugguugguacgguuucaggcaucaaaauucugaggggagaggacaagcagcagaucucaaaagcacucaagcagcaaucgaucaaaucaaugggaagcugaaucgauugaucgggaaaaccaacgagaaauuccaucagauugaaaaagaauucucagaaguagaaggaagaauucaggaccuugagaaauauguugaggacacuaaaauagaucucuggucauacaacgcggagcuucuuguugcccuggagaaucaacauacaguugaucuaacugacucagaaaugaacaaacuguuugaaaaaacaaagaagcaacugagggaaaaugcugaggauaugggaaaugguuguuucaaaauauaccacaaaugugacaaugccugcauaggaucaauaagaaauggaacuuaugaccacaauguguacagggaugaagcauuaaacaaccgguuccagaucaagggaguugagcugaagucaggguacaaagauuggauccuauggauuuccuuugccauaucauguuuuuugcuuuguguugcuuuguugggguucaucaugugggccugccaaaagggcaacauuaggugcaacauuugcauuuga

SEQ ID NO: 45586 - RNA, 1701 nt, Artificial Sequence; identical to SEQ ID NO: 45076
  derived and/or modified CDS sequence (wt) from hemagglutinin__InfluenzaA__ALE32089

SEQ ID NO: 45587 - RNA, 1701 nt, Artificial Sequence; identical to SEQ ID NO: 45006
  derived and/or modified CDS sequence (wt) from hemagglutinin__InfluenzaA__ALE32090

SEQ ID NO: 45588 - RNA, 1701 nt, Artificial Sequence
  derived and/or modified CDS sequence (wt) from hemagglutinin__InfluenzaA__ALE32091
augaagacuaucauugcuuugagcuacauucuaugucugguuuucgcucaaaaaauuccuggaaaugacaauagcacggcaacgcugugccuugggcaccaugcaguaccaaacggaacgauagugaaaacaaucacaaaugaccgaauugaaguuacuaaugcuacugaguugguucagaauuccucaauaggugaaauaugcgacaguccucaucagauccuugauggagaaaacugcacacuaauagaugcucuauugggagacccucagugugauggcuuucaaaauaagaaaugggaccuuuuuguugaacgaagcaaagccuacagcaacuguuacccuuaugaugugccggauuaugccucccuuaggucacuaguugccucauccggcacacuggaguuuaacaaugaaagcuucaauuggacuggagucacucaaaacggaacaaguucugcuugcauaaggagaucuaguaguaguuucuuuaguagauuaaauugguugacccacuuaaacuacacauacccagcauugaacgugacuaugccaaacaaugaacaauuugacaaauuguacauuugggggguucaccacccggguacggacaaggaccaaaucuuccuguaugcucaaucaucaggaaggaucacaguaucuaccaaaagaagccaacaagcuguaaucccaaauaucggaucuagacccagaauaagggauaucccuagcagaauaagcaucuauuggacaauaguaaaaccgggagacauacuuuugauuaacagcacagggaaucuaauugcuccuagggguuacuucaaaauacgaagugggaaaagcucaauaaugagaucagaugcacccauuggcaaaugcaagucugaaugcaucacuccaaauggaagcauucccaaugacaaaccauuccaaaauguaaacaggaucacauacggggccugucccagauauguuaagcauagcacucugaaauuggcaacaggaaugcgaaauguaccagagaaacaaacuagaggcauauuuggcgcaauagcggguuucauagaaaaugguugggagggaaugguggaugguugguacgguuucaggcaucaaaauucugagggaagaggacaagcagcagaucucaaaagcacucaagcagcaaucgaucaaaucaaugggaagcugaaucgguugaucgggaaaaccaacgagaaauuccaucagauugaaaaagaauucucagaaguagaaggaagaauucaggaccuugagaaauauguugaggacacuaaaauagaucucuggucauauaacgcggagcuucuuguugcccuggagaaccaacauacaauugaucuaacugacucagaaaugaacaaacuguuugaaaaaacaaagaagcaacugagggaaaaugcugaggauaugggaaaugguuguuucaaaauauaccacaaaugugacaaugccugcauaggaucaauaagaaauggaacuuaugaccacaauguguacagggaugaagcauuaaacaaccgguuccagaucaaggggguugagcugaagucaggguacaaagauuggauccuauggauuuccuuugccauaucauguuuuuugcuuuguguugcuuuguugggguucaucaugugggccugccaaaagggcaacauuaggugcaacauuugcauuuga

SEQ ID NO: 45589 - RNA, 1701 nt, Artificial Sequence
  derived and/or modified CDS sequence (wt) from hemagglutinin__InfluenzaA__ALE32092
augaagacuaucauugcuuugagcuacauucuaugucugguuuucgcucaaaaaauuccuggaaaugacaauagcacggcaacgcugugccuugggcaccaugcaguaccaaacggaacgauagugaaaacaaucacaaaugaccgaauugaaguuacuaaugcuacugagcugguucagaauuccucaauaggugaaauaugcgacaguccucaucaaauccuugauggagaaaacugcacacuaauagaugcucuauugggagacccucagugugauggcuuucaaaauaagaaaugggaccuuuuuguugaacgaagcaaagccuacagcaacuguuacccuuaugaugugccggauuaugccucccuuaggucacuaguugccucauccggcacacuggaguuuaacaaugaaagcuucaauuggacuggagucacucaaaacggaacaaguucugcuugcauaaggagaucuaguaguaguuucuuuaguagauuaaauugguugacccacuuaaacuacacauacccagcauugaacgugacuaugccaaacaaugaacaauuugacaaauuguacauuugggggguucaccacccggguacggacaaggaccaaaucuuccuguaugcucaaucaucaggaagaaucacaguaucuaccaaaagaagccaacaagcuguaaucccaaauaucggaucuagacccagaauaagggauaucccuagcagaauaagcaucuauuggacaauaguaaaaccgggagacauacuuuugauuaacagcacagggaaucuaauugcuccuagggguuacuucaaaauacgaagugggaaaagcucaauaaugagaucagaugcacccauuggcaaaugcaggucugaaugcaucacuccaaauggaagcauucccaaugacaaaccauuccaaaauguaaacaggaucacauacggggccugucccagauauguuaagcauagcacucugaaauuggcaacaggaaugcgaaauguaccagagaaacaaacuagaggcauauuuggcgcaauagcggguuucauagaaaaugguugggagggaaugguggaugguugguacgguuucaggcaucaaaauucugagggaagaggacaagcagcagaucucaaaagcacucaagcagcaaucgaucaaaucaaugggaagcugaaucgauugaucgggaaaaccaacgagaaauuccaucagauugaaaaagaauucucagaaguagaaggaagaauucaggaccuugagaaauauguugaggacacuaaaauagaucucuggucauacaacgcggagcuucuuguugcccuggagaaccaacauacaauugaucuaacugacucagaaaugaacaaacuguuugaaaaaacaaagaagcaacugagggaaaaugcugaggauaugggaaaugguuguuucaaaauauaccacaaaugugacaaugccugcauaggaucaauaagaaauggaacuuaugaacacaauguguacagggaugaagcauuaaacaaccgguuccagaucaagggaguugagcugaagucaggguacaaagauuggauccuauggauuuccuuugccauaucauguuuuuugcuuuguguugcuuuguugggguucaucaugugggccugccaaaagggcaacauuaggugcaacauuugcauuuga

SEQ ID NO: 45590 - RNA, 1701 nt, Artificial Sequence; identical to SEQ ID NO: 45059
  derived and/or modified CDS sequence (wt) from hemagglutinin__InfluenzaA__ALE32093

SEQ ID NO: 45591 - RNA, 1701 nt, Artificial Sequence
  derived and/or modified CDS sequence (wt) from hemagglutinin__InfluenzaA__ALE32094
augaagacuaucauugcuuugagcuacauucuaugucugguuuucgcucaaaaaauuccuggaaaugacaauagcacggcaacgcugugccuugggcaccaugcaguaccaaacggaacgauagugaaaacaaucacaaaugaccgaauugaaguuacuaaugcuacugagcugguucagaauuccucaauaggugaaauaugcgacaguccucaucagauccuugauggagaaaacugcacacuaauagaugcucuauugggagacccucagugugauggcuuucaaaauaagaaaugggaccuuuuuguugaacgaagcaaagccuacagcaacuguuacccuuaugaugugccggauuaugccucccuuaggucacuaguugccucauccggcacacuggaguuuaacaaugaaagcuucaauuggacuggagucacucaaaacggaacaaguucugcuugcauaaggagaucuaguaguaguuucuuuaguagauuaaauugguugacccacuuaaacuacacauacccagcauugaacgugacuaugccaaacaaugaacaauuugacaaauuguacauuugggggguucaccacccggguacggacaaggaccaaaucuuccuguaugcucaaucaucaggaagaaucacaguaucuaccaaaagaagccaacaagcuguaaucccaaauaucggaucuagacccagaauaagggauaucccuagcagaauaagcaucuauuggacaauaguaaaaccgggagacauacuuuugauuaccagcacagggaaucuaauugcuccuagggguuacuucaaaauacgaagugggaaaagcucaauaaugagaucagaugcacccauuggcaaaugcaagucugaaugcaucacuccaaauggaagcauucccaaugacaaaccauuccaaaauguaaacaggaucacauacggggccugucccagauauguuaagcauagcacucugaaauuggcaacaggaaugcgaaauguaccagagaaacaaacuagaggcauauuuggcgcaauagcggguuucauagaaaaugguugggagggaaugguggaugguugguacgguuucaggcaucaaaauucugagggaagaggacaagcagcagaucucaaaagcacucaagcagcaaucgaucaaaucaaugggaagcugaaucgauugaucgggaaaaccaacgagaaauuccaucagauugaaaaagaauucucagaaguagaaggaagaauucaggaccuugagaaauauguugaggacacuaaaauagaucucuggucauacaacgcggagcuucuuguugcccuggagaaccaacauacaauugaucuaacugacucagaaaugaacaaacuguuugaaaaaacaaagaagcaacugagggaaaaugcugaggauaugggaaaugguuguuucaaaauauaccacaaaugugacaaugccugcauaggaucaauaagaaauggaacuuaugaccacaauguguacagggaugaagcauuaaacaaccgguuccagaucaagggaguugagcugaagucaggguacaaagauuggauccuauggauuuccuuugccauaucauguuuuuugcuuuguguugcuuuguugggguucaucaugugggccugccaaaagggcaacauuaggugcaacauuugcauuuga

SEQ ID NO: 45592 - RNA, 1701 nt, Artificial Sequence; identical to SEQ ID NO: 45115
  derived and/or modified CDS sequence (wt) from hemagglutinin__InfluenzaA__ALE32095

SEQ ID NO: 45593 - RNA, 1701 nt, Artificial Sequence
  derived and/or modified CDS sequence (wt) from hemagglutinin__InfluenzaA__ALE32096
augaagacuaucauugcuuugagcuacauucuaugucugguuuucgcucaaaaaauuccuggaaaugacaauagcacggcaacgcugugccuugggcaccaugcaguaccaaacggaacgauagugaaaacaaucacaaaugaccgaauugaaguuacuaaugcuacugagcugguucagaauuccucaauaggugaaauaugcgacaguccucaucagauccuugauggagaaaacugcacacuaauagaugcucuauugggagacccucagugugauggcuuucaaaauaagaaaugggaccuuuuuguugaacgaagcaaagccuacagcaacuguuacccuuaugaugugccggauuaugccucccuuaggucacuaguugccucauccggcacacuggaguuuaacaaugaaagcuucaauuggacuggagucacucaaaacggaacaaguucugcuugcauaaggagaucuaguaguaguuucuuuaguagauuaaauugguugacccacuuaagcuacacauacccagcauugaacgugacuaugccaaacaaugaacaauuugacaaauuguacauuugggggguucaccacccggguacggacaaggaccaaaucuuccuguaugcucaaucaucaggaagaaucacaguaucuaccaaaagaagccaacaagcuguaaucccaaauaucggaucuagacccagaauaagggauaucccuagcagaauaagcaucuauuggacaauaguaaaaccgggagacauacuuuugauuaacagcacagggaaucuaauugcuccuagggguuacuucaaaauacgaagugggaaaagcucaauaaugagaucagaugcacccauuggcaaaugcaagucugaaugcaucacuccaaauggaagcauucccaaugacaaaccauuccaaaauguaaacaggaucacauacggggccugucccagauauguuaagcauagcacucugaaauuggcaacaggaaugcgaaauguaccagagaaacaaacuagaggcauauuuggcgcaauagcggguuucauagaaaaugguugggagggaaugguggaugguugguacgguuucaggcaucaaaauucugagggaagaggacaagcagcagaucucaaaagcacucaagcagcaaucgaucaaaucaaugggaagcugaaucgauugaucgggaaaaccaacgagaaauuccaucagauugaaaaagaauucucagaaguagaaggaagaauucaggaccuugagaaauauguugaggacacuaaaauagaucucuggucauacaacgcggagcuucuuguugcccuggagaaccaacauacaauugaucuaacugacucagaaaugaacaaacuguuugaaaaaacaaagaagcaacugagggaaaaugcugaggauaugggaaaugguuguuucaaaauauaccacaaaugugacaaugccugcauaggaucaauaagaaauggaacuuaugaccacaauguguacagggaugaagcauuaaacaaccgguuccagaucaagggaguugagcugaagucaggguacaaagauuggauccuauggauuuccuuugccauaucauguuuuuugcuuuguguugcuuuguugggguucaucaugugggccugccaaaagggcaacauuaggugcaacauuugcauuuga

SEQ ID NO: 45594 - RNA, 1701 nt, Artificial Sequence; identical to SEQ ID NO: 45115
  derived and/or modified CDS sequence (wt) from hemagglutinin__InfluenzaA__ALE32097

SEQ ID NO: 45595 - RNA, 1701 nt, Artificial Sequence; identical to SEQ ID NO: 45059
  derived and/or modified CDS sequence (wt) from hemagglutinin__InfluenzaA__ALE32099

SEQ ID NO: 45596 - RNA, 1701 nt, Artificial Sequence
  derived and/or modified CDS sequence (wt) from hemagglutinin__InfluenzaA__ALE32100
augaagacuaucauugcuuugagcuacauucuaugucugguuuucgcucaaaaaauuccuggaaaugacaauagcacggcaacgcugugccuugggcaccaugcaguaccaaacggaacgauagugaaaacaaucacaaaugaccgaauugaaguuacuaaugcuacugaguugguucagaauuccucaauaggugaaauaugcgacaguccucaucagauccuugauggagaaaacugcacacuaauagaugcucuauugggagacccucagugugauggcuuucaaaauaagaaaugggaccuuuuuguugaacgaagcaaagccuacagcaacuguuacccuuaugaugugccggauuaugccucccuuaggucacuaguugccucauccggcacacuggaguuuaacaaugaaagcuucaauuggacuggagucacucaaaacggaacaaguucugcuugcauaaggagaucuaguaguaguuucuuuaguagauuaaauugguugacccacuuaaacuacacauacccagcauugaacgugacuaugccaaacaaugaacaauuugacaaauuguacauuugggggguucaccacccggguacggacaaggaccaaaucuuccuguaugcucaaucaucaggaagaaucacaguaucuaccaaaagaagccaacaagcuguaaucccaaauaucggaucuagacccagaauaagggauaucccuagcagaauaagcaucuauuggacaauaguaaaaccgggagacauacuuuugauuaacagcacagggaaucuaauugcuccuagggguuacuucaaaauacgaagugggaaaagcucaauaaugagaucagaugcacccauuggcaaaugcaagucugaaugcaucacuccaaauggaagcauucccaaugacaaaccauuccaaaauguaaacaggaucacauacggggccugucccagauauguuaagcauagcacucugaaauuggcaacaggaaugcgaaauguaccagagaaacaaacuagaggcauauuuggcgcaauagcggguuucauagaaaaugguugggagggaaugguggaugguugguacgguuucaggcaucaaaauucugagggaagaggacaagcagcagaucucaaaagcacucaagcagcaaucgaucaaaucaaugggaagcugaaucgguugaucgggaaaaccaacgagaaauuccaucagauugaaaaagaauucucagaaguagaaggaagaauucaggaccuugagaaauauguugaggacacuaaaauagaucucuggucauacaacgcggaucuucuuguugcccuggagaaccaacauacaauugaucuaacugacucagaaaugaacaaacuguuugaaaaaacaaagaagcaacugagggaaaaugcugaggauaugggaaaugguuguuucaaaauauaccacaaaugugacaaugccugcauaggaucaauaagaaauggaacuuaugaccacaauguguacagggaugaagcauuaaacaaccgguuucagaucaagggaguugagcugaagucaggguacaaagauuggauccuauggauuuccuuugccauaucauguuuuuugcuuuguguugcuuuguugggguucaucaugugggccugccaaaaaggcaacauuaggugcaacauuugcauuuga

SEQ ID NO: 45597 - RNA, 1701 nt, Artificial Sequence
  derived and/or modified CDS sequence (wt) from hemagglutinin__InfluenzaA__ALE32101
augaagacuaucauugcuuugagcuacauucuaugucugguuuucgcucaaaaaauuccuggaaaugacaauagcacggcaacgcugugccuugggcaccaugcaguaccaaacggaacgauagugaaaacaaucacaaaugaccgaauugaaguuacuaaugcuacugagcugguucagaauuccucaauaggugaaauaugcgacaguccucaucagauccuugauggagaaaacugcacacuaauagaugcucuauugggagacccucagugugauggcuuucaaaauaagaaaugggaccuuuuuguugaacgaagcaaagccuacagccaauguuacccuuaugaugugccggauuaugccucccuuaggucacuaguugccucauccggcacacuggaguuuaacaaugaaagcuucaauuggacuggagucacucaaaacggaacaaguucugcuugcauaaggaaaucuagugguaguuucuuuaguagauuaaauugguugacccacuuaaaauacacauacccagcauugaacgugacuaugccaaacaaugaacaauuugacaaauuguacauuugggggguucaccacccggguacggacaaggaccaaaucuuccuguaugcucgaucaucaggaagaaucacaguaucuaccaaaagaagccaacaagcuguaaucccaaauaucggaucuagacccagaauaagggauaucccuagcagaauaagcaucuauuggacaauaguaaaaccgggagacauacuuuugauuaacagcacagggaaucuaauugcuccuagggguuacuucaaaauacgaagugggaaaagcucaauaaugagaucagaugcacccauuggcaaaugcaagucugaaugcaucacuccaaauggaagcauucccaaugacaaaccauuccaaaauguaaacaggaucacauacggggccugucccagauauguuaagcauagcacucugaaauuggcaacaggaaugcgaaauguaccagagaaacaaacuagaggcauauuuggcgcaauagcggguuucauagaaaaugguugggagggaaugguggaugguugguacgguuucaggcaucaaaauucugaggggagaggacaagcagcagaucucaaaagcacucaagcagcaaucgaucaaaucaaugggaagcugaaucgauugaucgggaaaaccaacgagaaauuccaucagauugaaaaagaauucucagaaguagaaggaagaauucaggaccuugagaaauauguugaggacacuaaaauagaucucuggucauacaacgcggagcuucuuguugcccuggagaaucaacauacaauugaucuaacugacucagaaaugaacaaacuguuugaaaaaacaaagaagcaacugagggaaaaugcugaggauaugggaaaugguuguuucaaaauauaccacaaaugugacaaugccugcauaggaucaauaagaaauggaacuuaugaccacaauguguacagggaugaagcauuaaacaaccgguuccagaucaagggaguugagcugaagucaggguacaaagauuggauccuauggauuuccuuugccauaucauguuuuuugcuuuguguugcuuuguugggguucaucaugugggccugccaaaagggcaacauuaggugcaacauuugcauuuga

SEQ ID NO: 45598 - RNA, 1701 nt, Artificial Sequence
  derived and/or modified CDS sequence (wt) from hemagglutinin__InfluenzaA__ALE32102
augaagacuaucauugcuuugagcuacauucuaugucugguuuucgcucaaaaaauuccuggaaaugacaauagcacggcaacgcugugccuugggcaccaugcaguaccaaacggaacgauagugaaaacaaucacaaaugaccgaauugaaguuacuaaugcuacugagcugguucagaauuccucaauaggugaaauaugcgacaguccucaucagauccuugauggagaaaacugcacacuaauagaugcucuauugggagacccucagugugauggcuuucaaaauaagaaaugggaccuuuuuguugaacgaagcaaagccuacagcaacuguuacccuuaugaugugccggauuaugccucccuuaggucacuaguugccucauccggcacacuggaguuuaacaaugaaagcuucaauuggacuggagucacucaaaacggaacaaguucugcuugcauaaggaaaucuaguaguaguuucuuuaguagauuaaauugguugacccacuuaaaauacacauacccagcauugaacgugacuaugccaaacaaugaacaauuugacaaauuguacauuugggggguucaccacccggguacggacaaggaccaaaucuuccuguaugcucgaucaucaggaagaaucacaguaucuaccaaaagaagccaacaagcuguaaucccaaauaucggaucuagacccagaauaagggauaucccuagcagaauaagcaucuauuggacaauaguaaaaccgggagacauacuuuugauuaacagcacagggaaucuaauugcuccuagggguuacuucaaaauacgaagugggaaaagcucaauaaugagaucagaugcacccauuggcaaaugcaagucugaaugcaucacuccaaauggaagcauucccaaugacaaaccauuccaaaauguaaacaggaucacauacggggccugucccagauauguuaagcauagcacucugaaauuggcaacaggaaugcgaaauguaccagagaaacaaacuagaggcauauuuggcgcaauagcggguuucauagaaaaugguugggagggaaugguggaugguugguacgguuucaggcaucaaaauucugaggggagaggacaagcagcagaucucaaaagcacucaagcagcaaucgaucaaaucaaugggaagcugaaucgauugaucgggaaaaccaacgagaaauuccaucagauugaaaaagaauucucagaaguagaaggaagaauucaggaccuugagaaauauguugaggacacuaaaauagaucucuggucauacaacgcggagcuucuuguugcccuggagaaucaacauacaauugaucuaacugacucagaaaugaacaaacuguuugaaaaaacaaagaagcaacugagggaaaaugcugaggauaugggaaaugguuguuucaaaauauaccacaaaugugacaaugccugcauaggaucaauaagaaauggaacuuaugaccacaauguguacagggaugaagcauuaagcaaccgguuccagaucaagggaguugagcugaagucaggguacaaagauuggauccuauggauuuccuuugccauaucauguuuuuugcuuuguguugcuuuguugggguucaucaugugggccugccaaaagggcaacauuaggugcaacauuugcauuuga

SEQ ID NO: 45599 - RNA, 1701 nt, Artificial Sequence; identical to SEQ ID NO: 45166
  derived and/or modified CDS sequence (wt) from hemagglutinin__InfluenzaA__ALE32103

SEQ ID NO: 45600 - RNA, 1701 nt, Artificial Sequence
  derived and/or modified CDS sequence (wt) from hemagglutinin__InfluenzaA__ALE32104
augaagacuaucauugcuuugagcuacauucuaugucugguuuucgcucaaaaaauuccuggaaaugacaauagcacggcaacgcugugccuugggcaccaugcaguaccaaacggaacgauagugaaaacaaucacaaaugaccaaauugaaguuacuaaugcuacugagcugguucagaauuccucaauaggugaaauaugcgacaguccucaucagauccuugauggagaaaacugcacacuaauagaugcucuauugggagacccucagugugauggcuuucaaaauaagaaaugggaccuuuuuguugaacgaagcaaagccuacagcaacuguuacccuuaugaugugccggauuaugccucccuuaggucacuaguugccucauccggcacacuggaguuuaacaaugaaagcuucaauuggacuggagucacucaaaacggaacaaguucugcuugcauaaggagaucuaguaguaguuucuuuaguagauuaaauugguugacccacuuaaacuacacauacccagcauugaacgugacuaugccaaacaaugaacaauuugacaaauuguacauuugggggguucaccacccggguacggacaaggaccaaaucuuccuguaugcucaaucaucaggaagaaucacaguaucuaccaaaagaagccaacaagcuguaaucccaaauaucggaucuagacccagaauaagggauaucccuagcagaauaagcaucuauuggacaauaguaaaaccgggagacauacuuuugauuaacagcacagggaaucuaauugcuccuagggguuacuucaaaauacgaagugggaaaagcucaauaaugagaucagaugcacccauuggcaaaugcaagucugaaugcaucacuccaaauggaagcauucccaaugacaaaccauuccaaaauguaaacaggaucacauacggggccugucccagauauguuaagcauagcacucugaaauuggcaacaggaaugcgaaauguaccagagaaacaaacuagaggcauauuuggcgcaauagcggguuucauagaaaaugguugggagggaaugguggaugguugguacgguuucaggcaucaaaauucugagggaagaggacaagcagcagaucucaaaagcacucaagcagcaaucgaucaaaucaauggaaagcugaaucgauugaucgggaaaaccaacgagaaauuccaucagauugaaaaagaauucucagaaguagaaggaagaauucaggaccuugagaaauauguugaggacacuaaaauagaucucuggucauacaacgcggagcuucuuguugcccuggagaaccaacauacaauugaucuaacugacucagaaaugaacaaacuguuugaaaaaacaaagaagcaacugagggaaaaugcugaggauaugggaaaugguuguuucaaaauauaccacaaaugugacaaugccugcauaggaucaauaagaaauggaacuuaugaccacaauguguacagggaugaagcauuaaacaaccgguuccagaucaagggaguugagcugaagucaggguacaaagauuggauccuauggauuuccuuugccauaucauguuuuuugcuuuguguugcuuuguugggguucaucaugugggccugccaaaagggcaacauuaggugcaacauuugcauuuga

SEQ ID NO: 45601 - RNA, 1701 nt, Artificial Sequence; identical to SEQ ID NO: 45140
  derived and/or modified CDS sequence (wt) from hemagglutinin__InfluenzaA__ALE32105

SEQ ID NO: 45602 - RNA, 1701 nt, Artificial Sequence; identical to SEQ ID NO: 45145
  derived and/or modified CDS sequence (wt) from hemagglutinin__InfluenzaA__ALE32106

SEQ ID NO: 45603 - RNA, 1701 nt, Artificial Sequence; identical to SEQ ID NO: 45166
  derived and/or modified CDS sequence (wt) from hemagglutinin__InfluenzaA__ALE32107

SEQ ID NO: 45604 - RNA, 1701 nt, Artificial Sequence; identical to SEQ ID NO: 45396
  derived and/or modified CDS sequence (wt) from hemagglutinin__InfluenzaA__ALE32108

SEQ ID NO: 45605 - RNA, 1701 nt, Artificial Sequence; identical to SEQ ID NO: 45018
  derived and/or modified CDS sequence (wt) from hemagglutinin__InfluenzaA__ALE32109

SEQ ID NO: 45606 - RNA, 1701 nt, Artificial Sequence
  derived and/or modified CDS sequence (wt) from hemagglutinin__InfluenzaA__ALE32110
augaagacuaucauugccuugagcuacauucuaugucugguuuucgcucaaaaaauuccuggaaaugacaauagcacggcaacgcugugccuugggcaccaugcaguaccaaacggaacgauagugaaaacaaucacaaaugaccgaauugaaguuacuaaugcuacugagcugguucagaauuccucaauaggugaaauaugcgacaguccucaucagauccuugauggagaaaacugcacacuaauagaugcucuauugggagacccucagugugauggcuuucaaaauaagaaaugggaccuuuuuguugaacgaagcaaagccuacagcaacuguuacccuuaugaugugccggauuaugccucccuuaggucacuaguugccucauccggcacacuggaguuuaacaaugaaagcuucaauuggacuggagucacucaaaacggaacaaguucugcuugcauaaggagaucuaguaguaguuucuuuaguagauuaaauugguugacccacuuaaacuacacauacccagcauugaacgugacuaugccaaacaaugaacaauuugacaaauuguacauuugggggguucaccacccggguacggacaaggaccaaaucuuccuguaugcucaaucaucaggaagaaucacaguaucuaccaaaggaagccaacaagcuguaaucccaaauaucggaucuagacccagaauaagggauaucccuagcagaauaagcaucuauuggacaauaguaaaaccgggagacauacuuuugauuaacagcacagggaaucuaauugcuccuagggguuacuucaaaauacgaagugggaaaagcucaauaaugagaucagaugcacccauuggcaaaugcaagucugaaugcaucacuccaaauggaagcauucccaaugacaaaccauuccaaaauguaaacaggaucacauacggggccugucccagauauguuaagcauagcacucugaaauuggcaacaggaaugcgaaauguaccagagaaacaaacuagaggcauauuuggcgcaauagcggguuucauagaaaaugguugggagggaaugguggaugguugguacgguuucaggcaucaaaauucugaaggaagaggacaagcagcagaucucaaaagcacucaagcagcaaucgaucaaaucaaugggaagcugaaucgauugaucgggaaaaccaaugagaaauuccaucagauugaaaaagaauucucagaaguagaaggaagaauucaggaccuugagaaauauguugaggacacuaaaauagaucucuggucauacaacgcggagcuucuuguugcccuggagaaccaacauacaauugaucuaacugacucagaaaugaacaaacuguuugaaaaaacaaagaagcaacugagggaaaaugcugaggauaugggaaaugguuguuucaaaauauaccacaaaugugacaaugccugcauaggaucaauaagaaauggaacuuaugaccacaauguguacagggaugaagcauuaaacaaccgguuccagaucaagggaguugagcugaagucaggguacaaagauuggauccuauggauuuccuuugccauaucauguuuuuugcuuuguguugcuuuguugggguucaucaugugggccugccaaaagggcaacauuaggugcaacauuugcauuuga

SEQ ID NO: 45607 - RNA, 1701 nt, Artificial Sequence
  derived and/or modified CDS sequence (wt) from hemagglutinin__InfluenzaA__ALE32111
augaagacuaucauugccuugagcuacauucuaugucugguuuucgcucaaaaaauuccuggaaaugacaauagcacggcaacgcugugccuugggcaccaugcaguaccaaacggaacgauagugaaaacaaucacaaaugaccgaauugaaguuacuaaugcuacugagcugguucagaauuccucaauaggugaaauaugcgacaguccucaucagauccuugauggagaaaacugcacacuaauagaugcucuauugggagacccucagugugauggcuuucaaaauaagaaaugggaccuuuuuguugaacgaagcaaagccuacagcaacuguuacccuuaugaugugccggauuaugccucccuuaggucacuaguugccucauccggcacacuggaguuuaacaaugaaagcuucaauuggacuggagucacucaaaacggaacaaguucugcuugcauaaggagaucuaguaguaguuucuuuaguagauuaaauugguugacccacuuaaacuacacauacccagcauugaacgugacuaugccaaacaaugaacaauuugacaaauuguacauuugggggguucaccacccggguacggacaaggaccaaaucuuccuguaugcucaaucaucaggaagaaucacaguaucuaccaaaagaagccaacaagcuguaaucccaaauaucggaucuagacccagaauaagggauaucccuagcagaauaagcaucuauuggacaauaguaaaaccgggagacauacuuuugauuaacagcacagggaaucuaauugcuccuagggguuacuucaaaauacgaagugggaaaagcucaauaaugagaucagaugcacccauuggcaaaugcaagucugaaugcaucacuccaaauggaagcauucccaaugacaaaccauuccaaaauguaaacaggaucacauacggggccugucccagauauguuaagcauaguacucugaaauuggcaacaggaaugcgaaauguaccagagaaacaaacuagaggcauauuuggcgcaauagcggguuucauagaaaaugguugggagggaaugguggaugguugguacgguuucaggcaucaaaauucugagggaagaggacaagcagcagaucucaaaagcacucaagcagcaaucgaucaaaucaaugggaagcugaaucgauugaucgggaaaaccaacgagaaauuccaucagauugaaaaagaauucucagaaguagaaggaagaauucaggaccuugagaaauauguugaggacacuaaaauagaucucuggucauacaacgcggagcuucuuguugcccuggagaaccaacauacaauugaucuaacugacucagaaaugaacaaacuguuugaaaaaacaaagaagcaacugagggaaaaugcugaggauaugggaaaugguuguuucaaaauauaccacaaaugugacaaugccugcauaggaucaauaagaaauggaacuuaugaccacaauguguacagggaugaagcauuaaacaaccgguuccagaucaagggaguugagcugaagucaggguacaaagauuggauccuauggauuuccuuugccauaucauguuuuuugcuuuguguugcuuuguugggguucaucaugugggccugccaaaagggcaacauuaggugcaacauuugcauuuga

SEQ ID NO: 45608 - RNA, 1701 nt, Artificial Sequence
  derived and/or modified CDS sequence (wt) from hemagglutinin__InfluenzaA__ALE32112
augaagacuaucauugcuuugagcuacauucuaugucugguuuucgcucaaaaaauuccugggaaugacaauagcacggcaacgcugugccuugggcaccaugcaguaccaaacggaacgauagugaaaacaaucacaaaugaccgaauugaaguuacuaaugcuacugagcugguucagaauuccucaauaggugaaauaugcgacaguccucaucagauccuugauggagaaaacugcacacuaauagaugcucuauugggagacccucagugugauggcuuucaaaauaagaaaugggaccuuuuuguugaacgaagcaaagccuacagcaacuguuacccuuaugaugugccggauuaugccucccuuaggucacuaguugccucauccggcacacuggaguuuaacaaugaaagcuucaauuggacuggagucacucaaaacggaacaaguucugcuugcauaaggagaucuaguaguaguuucuuuaguagauuaaauugguugacccacuuaaacuacgcguacccagcauugaacgugacuaugccaaacaaugaacaauuugacaaauuguacauuugggggguucaccacccggguacggacaaggaccaaaucuuccuguaugcucaaucaucaggaagaaucacaguaucuaccaaaagaagccaacaagcuguaaucccaaauaucggaucuagacccagaauaagggauaucccuagcagaauaagcaucuauuggacaauaguaaaaccgggagacauacuuuugauuaacagcacagggaaucuaauugcuccuagggguuacuucaaaauacgaagugggaaaagcucaauaaugagaucagaugcacccauuggcaaaugcaagucugaaugcaucacuccaaauggaagcauucccaaugacaaaccauuccaaaauguaaacaggaucacauacggggccugucccagauauguuaagcauagcacucugaaauuggcaacaggaaugcgaaauguaccagagaaacaaacuagaggcauauuuggcgcaauagcggguuucauagaaaaugguugggagggaaugguggaugguugguacgguuucaggcaucaaaauucugagggaagaggacaagcagcagaucucaaaagcacucaagcagcaaucgaucaaaucaauggaaagcugaaucgauugaucgggaaaaccaacgagaaauuccaucagauugaaaaagaauucucagaaguagaaggaagaauucaggaccuugagaaauauguugaggacacuaaaauagaucucuggucauacaacgcggagcuucuuguugcccuggagaaccaacauacaauugaucuaacugacucagaaaugaacaaacuguuugaaaaaacaaagaagcaacugagggaaaaugcugaggauaugggaaaugguuguuucaaaauauaccacaaaugugacaaugccugcauaggaucaauaagaaauggaacuuaugaccacaauguguacagggaugaagcauuaaacaaccgguuccagaucaagggaguugagcugaagucaggguacaaagauuggauccuauggauuuccuuugccauaucauguuuuuugcuuuguguugcuuuguugggguucaucaugugggccugccaaaagggcaacauuaggugcaacauuugcauuuga

SEQ ID NO: 45609 - RNA, 1701 nt, Artificial Sequence
  derived and/or modified CDS sequence (wt) from hemagglutinin__InfluenzaA__ALE32113
augaagacuaucauugcuuugagcuacauucuaugucugguuuucgcucaaaaaauuccuggaaaugacaauagcacggcaacgcugugccuugggcaccaugcaguaccaaacggaacgguagugaaaacaaucacaaaugaccgaauugaaguuacuaaugcuacugagcugguucagaauuccucaauaggugaaauaugcgacaguccucaucagauccuugauggagaaaacugcacacuaauagaugcucuauugggagacccucagugugauggcuuucaaaauaaaaaaugggaccuuuuuguugaacgaagcaaagccuacagcaacuguuacccuuaugaugugccggauuaugccucccuuaggucacuaguugccucauccggcacacuggaguuuaacaaugaaagcuucaauuggacuggagucacucaaaacggaacaaguucugcuugcauaaggggaucuaguaguaguuucuuuaguagauuaaauugguugacccacuuaaacuacacauacccagcauugaacgugacuaugccaaacaaugaacaauuugacaaauuguacauuugggggguucaccacccggguacggacaaggaccaaaucuuccuguaugcucaaucaucaggaagaaucacaguaucuaccaaaagaagccaacaagcuguaaucccaaauaucggaucuagacccagaauaagggauaucccuagcagaauaagcaucuauuggacaauaguaaaaccgggagacauacuuuugauuaacagcacagggaaucuaauugcuccuagggguuacuucaaaaugcgaagugggaaaagcucaauaaugagaucagaugcacccauuggcaaaugcaagucugaaugcaucacuccaaauggaagcauucccaaugacaaaccauuccaaaauguaaacaggaucacauacggggccugucccagauauguuaagcauagcacucugaaauuggcaacaggaaugcgaaauguaccagagaaacaaacuagaggcauauuuggcgcaauagcggguuucauagaaaaugguugggagggaaugguggaugguugguacgguuucaggcaucaaaauucugagggaagaggacaagcagcagaucucaaaagcacucaagcagcaaucgaucaaaucaauggaaagcugaaucgauugaucgggaaaaccaacgagaaauuccaucagauugaaaaagaauucucagaaguagaaggaagaauucaggaccuugagaaauauguugaggacacuaaaauagaucucuggucauacaacgcggagcuucuuguugcccuggagaaccaacauacaauugaucuaacugacucagaaaugaacaaacuguuugaaaaaacaaagaagcaacugagggaaaaugcugaggauaugggaaaugguuguuucaaaauauaccacaaaugugacaaugccugcauaggaucaauaagaaauggaacuuaugaccacaauguguacagggaugaagcauuaaacaaccgguuccagaucaagggaguugagcugaagucaggguacaaagauuggauccuauggauuuccuuugccauaucauguuuuuugcuuuguguugcuuuguugggguucaucaugugggccugccaaaagggcaacauuaggugcaacauuugcauuuga

SEQ ID NO: 45610 - RNA, 1701 nt, Artificial Sequence; identical to SEQ ID NO: 45294
  derived and/or modified CDS sequence (wt) from hemagglutinin__InfluenzaA__ALE32114

SEQ ID NO: 45611 - RNA, 1701 nt, Artificial Sequence; identical to SEQ ID NO: 45291
  derived and/or modified CDS sequence (wt) from hemagglutinin__InfluenzaA__ALE32115

SEQ ID NO: 45612 - RNA, 1701 nt, Artificial Sequence
  derived and/or modified CDS sequence (wt) from hemagglutinin__InfluenzaA__ALE32116
augaagacuaucauugcuuugagcuacauucuaugucugguuuucgcucaaaaaauuccuggaaaugacaauagcacggcaacgcugugccuugggcaucaugcaguaccaaacggaacgauagugaaaacaaucacaaaugaccgaauugaaguuacuaaugcuacugagcugguucagaauuccucaauaggugaaauaugcgacaguccucaucagauccuugauggagaaaacugcacacuaauagaugcucuauugggagacccucagugugauggcuuucaaaauaagaaaugggaccuuuuuguugaacgaagcaaagccuacagcaacuguuacccuuaugaugugccggauuaugccucccuuaggucacuaguugccucauccggcacacuggaguuuaacaaugaaagcuucaauuggacuggagucacucaaaacggaacaaguucugcuugcauaaggagaucuaguaguaguuucuuuaguagauuaaauugguugacccacuuaaacuacacauacccagcauugaacgugacuaugccaaacaaugaacaauuugacaaauuguacauuugggggguucaccacccggguacggacaaggaccaaaucuuccuguaugcucaaucaucaggaagaaucacaguaucuaccaaaagaagccaacaagcuguaaucccaaauaucggaucuagacccagaauaagggauaucccuagcagaauaagcaucuauuggacaauaguaaaaccgggagacauacuuuugauuaacagcacagggaaucuaauugcuccuagggguuacuucaaaauacgaagugggaaaagcucaauaaugagaucagaugcacccauuggcaaaugcaagucugaaugcaucacuccaaauggaagcauucccaaugacaaaccauuccaaaauguaaacaggaucacauacggggccugucccagauauguuaagcauagcacucugaaauuggcaacaggaaugcgaaauguaccagagaaacaaacuagaggcauauuuggcgcaauagcggguuucauagaaaaugguugggagggaaugguggaugguugguacgguuucaggcaucaaaauucugagggaagaggacaagcagcagaucucaaaagcacucaagcagcaaucgaucaaaucaaugggaagcugaaucgauugaucgggaaaaccaacgagaaauuccaucagauugaaaaagaauucucagaaguagaaggaagaauucaggaccuugagaaauauguugaggacacuaaaauagaucucuggucauacaacgcggagcuucuuguugcccuggagaaccaacauacaauugaucuaacugacucagaaaugaacaaacuguuugaaaaaacaaagaagcaacugagggaaaaugcugaggauaugggaaaugguuguuucaaaauauaccacaaaugugacaaugccugcauaggaucaauaagaaauggaacuuaugaccacaauguguacagggaugaagcauuaaacaaccgguuccagaucaagggaguugagcugaagucaggguacaaagauuggauccuauggauuuccuuugccauaucauguuuuuugcuuuguguugcuuuguugggguucaucaugugggccugccaaaagggcaacguuaggugcaacauuugcauuuga

SEQ ID NO: 45613 - RNA, 1701 nt, Artificial Sequence
  derived and/or modified CDS sequence (wt) from hemagglutinin__InfluenzaA__ALE32117
augaagacuaucauugcuuugagcuacauucuaugucugguuuucgcucaaaaaauuccuggaaaugacaauagcacggcaacgcugugccuugggcaccaugcaguaccaaacggaacgauagugaaaacaaucacaaaugaccgaauugaaguuacuaaugcuacugaguugguucagaauuccucaauaggugaaauaugcgacaguccucaucagauccuugauggagaaaacugcacacuaauagaugcucuauugggagacccucagugugauggcuuucaaaauaagaaaugggaccuuuuuguugaacgaagcaaagccuacagcaacuguuacccuuaugaugugccggauuaugccucccuuaggucacuaguugccucauccggcacacuggaguuuaacaaugaaagcuucaauuggacuggagucacucaaaacggaacaaguucugcuugcauaaggagaucuaguaguaguuucuuuaguagauuaaauugguugacccacuuaaacuacacauacccagcauugaacgugacuaugccaaacaaugaacaauuugacaaauuguacauuugggggguucaccacccggguacggacaaggaccaaaucuuccuguaugcucaaucaucaggaagaaucacaguaucuaccaaaagaagccaacaagcuguaaucccaaauaucggaucuagacccagaauaagggauaucccuagcagaauaagcaucuauuggacaauaguaaaaccgggagacauacuuuugauuaacagcacagggaaucuaauugcuccuagggguuacuucaaaauacgaagugggaaaagcucaauaaugagaucagaugcacccauuggcaaaugcaagucugaaugcaucacuccaaauggaagcauucccaaugacaaaccauuccaaaauguaaacaggaucacauacggggccugucccagauaugucaagcauagcacucugaaauuggcaacaggaaugcgaaauguaccagagaaacaaacuagaggcauauuuggcgcaauagcggguuucauagaaaaugguugggagggaaugguggaugguugguacgguuucaggcaucaaaauucugagggaagaggacaagcagcagauuucaaaagcacucaagcagcaaucgaucaaaucaaugggaagcugaaucgguugaucgggaaaaccaacgagaaauuccaucagauugaaaaagaauucucagaaguagaaggaagaauucaggaccuugagaaauauguugaggacacuaaaauagaucucuggucauauaacgcggagcuucuuguugcccuggagaaccaacauacaauugaucuaacugacucagaaaugaacaaacuguuugaaaaaacaaagaagcaacugagggaaaaugcugaggauaugggaaaugguuguuucaaaauauaccacaaaugugacaaugccugcauaggaucaauaagaaauggaacuuaugaccacaauguguacagggaugaagcauuaaacaaccgguuccagaucaaggggguugagcugaagucagaguacaaagauuggauccuauggauuuccuuugccauaucauguuuuuugcuuuguguugcuuuguugggguucaucaugugggccugccaaaagggcaacauuaggugcaacauuugcauuuga

SEQ ID NO: 45614 - RNA, 1701 nt, Artificial Sequence; identical to SEQ ID NO: 45059
  derived and/or modified CDS sequence (wt) from hemagglutinin__InfluenzaA__ALE32118

SEQ ID NO: 45615 - RNA, 1701 nt, Artificial Sequence; identical to SEQ ID NO: 36001
  derived and/or modified CDS sequence (wt) from hemagglutinin__InfluenzaA__ALM06086

SEQ ID NO: 45616 - RNA, 1701 nt, Artificial Sequence
  derived and/or modified CDS sequence (wt) from hemagglutinin__InfluenzaA__ALM06087
augaaggcaauacuaguaguucugcuauacacauuugcaaccgcaaaugcagacacauuauguauagguuaucaugcgaacaauucaacagacacuguagacacaguacuagaaaagaauguaacaguaacacacucuguuaaccuucuagaagacaagcauaacgggaaacuaugcaaacuaagagggguagccccauugcauuuggguaaauguaacauugcuggcuggauccugggaaauccagagugugaaucacucuccacagcaaguucaugguccuacauuguggaaacauccaguucagacaauggaacguguuacccaggagauuucaucaauuaugaggagcuaagggagcaauugagcucagugucaucauuugagagauuugagauauuccccaagacaaguucauggcccaaucaugacucgaacaaagguguaacggcagcauguccucacgcuggggcaaaaagcuucuacaaaaauuuaauauggcuaguuaaaaaaggaaauucauacccaaagcucagccaauccuacauuaaugauaaagggaaagaaguccucgugcuguggggcauucaccauccaucuacuacugcugaccaacaaagucucuaucagaaugcagaugcauauguuuuuguggggacaucaagauacagcaagaaguucaagccggaaauagcaauaagacccaaagugagggaucaagaagggagaaugaacuauuacuggacacuaguagagccgggagacaaaauaacauucgaagcaacuggaaaucuagugguaccgagauaugcauucacaauggaaagaaaugcuggaucugguauuaucauuucagauacaccaguccacgauugcaauacaacuugucagacacccgagggugcuauaaacaccagccucccauuucagaauauacauccgaucacaauugggaaauguccaaaguauguaaaaagcacaaaauugagacuggccacaggauugaggaaugucccaucuauucaaucuagaggccuauucggggcgauugccggcuucauugaagggggguggacagggaugguagauggaugguacgguuaucaccaucaaaaugagcaggggucaggauaugcagccgaccugaagagcacacaaaaugccauugacaaaauuacuaacaaaguaaauucuguuauugaaaagaugaauacacaguucacagcaguggguaaagaguucaaccacuuggagaaaagaauagagaauuuaaauaaaaaaguugaugaugguuuccuggacauuuggacuuacaaugccgaacugcugguucuauuggaaaaugaaagaacuuuggacuaccacgauucaaaugugaagaacuuguaugaaaagguaagaaaccaauuaaaaaacaaugccaaggaaauuggaaacggcugcuuugaauuuuaccacaaaugcgauaacacgugcauggaaagugucaaaaaugggacuuaugacuacccaaaauacucagaggaagcaaaauuaaacagagaaaaaauagaugggguaaagcuggaaucaacaaggauuuaccagauuuuggcgaucuauucaacugucgccaguucauugguacugguagucucccugggggcaaucagcuucuggaugugcucuaaugggucucuacaguguagaauauguauuuaa

SEQ ID NO: 45617 - RNA, 1701 nt, Artificial Sequence
  derived and/or modified CDS sequence (wt) from hemagglutinin__InfluenzaA__ALM06088
augaaggcaauacuaguaguucugcuauacacauuugcaaccgcaaaugcagacacauuauguauagguuaucaugcgaacaauucaacagacacuguagacacaguacuagaaaagaauguaacaguaacacacucuguuaaccuucuagaagacaagcauaacgggaaacuaugcaaacuaagagggguagccccauugcauuuggguaaauguaacauugcuggcuggauccugggaaauccagagugugaaucacucuccacagcaaguucaugguccuacauuguggaaacaucuaguucagacaauggaacguguuacccaggagauuucaucaauuaugaggagcuaagggagcaauugagcucagugucaucauuugagagauuugagauauuccccaagacaaguucauggcccaaucaugacucgaacaaagguguaacggcagcauguccucacgcuggggcaaaaagcuucuacaaaaauuuaauauggcuaguuaaaaaaggaaauucauacccaaagcucagccaauccuacauuaaugauaaagggaaagaaguccucgugcuguggggcauucaccauccaucuacuacugcugaccaacaaagucucuaucagaaugcagaugcauauguuuuuguggggacaucaagauacagcaagaaguucaagccggaaauagcaauaagacccaaagugaggggucaagaagggagaaugaacuauuacuggacacuaguagagccgggagacaaaauaacauucgaagcaacuggaaaucuagugguaccgagauaugcauucacaauggaaagaaaugcuggaucugguauuaucauuucagauacaccaguccacgauugcaauacaacuugucagacacccgagggugcuauaaacaccagccucccauuucagaauauacauccgaucacaauugggaaauguccaaaguauguaaaaagcacaaaauugagacuggccacaggauugaggaaugucccaucuauucaaucuagaggccuauucggggcgauugccggcuucauugaagggggguggacagggaugguagauggaugguacgguuaucaccaucaaaaugagcaggggucaggauaugcagccgaccugaagagcacacaaaaugccauugacaaaauuacuaacaaaguaaauucuguuauugaaaagaugaauacacaguucacagcaguggguaaagaguucaaccacuuggagaaaagaauagagaauuuaaauaaaaaaguugaugaugguuuccuggacauuuggacuuacaaugccgaacugcugguucuauuggaaaaugaaagaacuuuggacuaccacgauucaaaugugaagaacuuguaugaaaagguaagaaaccaguuaaaaaacaaugccaaggaaauuggaaacggcugcuuugaauuuuaccacaaaugcgauaacacgugcauggaaagugucaaaaaugggacuuaugacuacccaaaauacucagaggaagcaaaauuaaacagagaaaaaauagaugggguaaagcuggaaucaacaaggauuuaccagauuuuggcgaucuauucaacugucgccaguucauugguacugguagucucccugggggcaaucagcuucuggaugugcucuaaugggucucuacaguguagaauauguauuuaa

SEQ ID NO: 45618 - RNA, 1701 nt, Artificial Sequence
  derived and/or modified CDS sequence (wt) from hemagglutinin__InfluenzaA__ALM06089
augaaggcaauacuaguaguucugcuauacacauuugcaaccgcaaaugcagacacauuauguauagguuaucaugcgaacaauucaacagacacuguagacacaguacuagaaaagaauguaacaguaacacacucuguuaaccuucuagaagacaagcauaacgggaaacuaugcaaacuaagagggguugccccauugcauuuggguaaauguaacauugcuggcuggauccugggaaauccagagugugaaucacucuccacagcaaguucaugguccuacauuguggaaacaucuaguucagacaauggaacguguuacccaggagauuucaucaauuaugaggagcuaagggagcaauugagcucagugucaucauuugagagauuugagauauuccccaagacaaguucauggcccaaucaugacucgaacaaagguguaacggcagcauguccucacgcuggggcaaaaagcuucuacaaaaauuuaauauggcuaguuaaaaaaggaaauucauacccaaagcucagccaauccuacauuaaugauaaagggaaagaaguccucgugcuguggggcauucaccauccaucuacuacugcugaccaacaaagucucuaucagaaugcagaugcauauguuuuuguggggacaucaagauacagcaagaaguucaagccggaaauagcaauaagacccaaagugagggaucaagaagggagaaugaacuauuacuggacacuaguagagccgggagacaaaauaacauucgaagcaacuggaaaucuagugguaccgagauaugcauucacaauggaaagaaaugcuggaucugguauuaucauuucagauacaccaguccacgauugcaauacaacuugucagacacccgagggugcuauaaacaccagccucccauuucagaauauacauccgaucacaauugggaaauguccaaaguauguaaaaagcacaaaauugagacuggccacaggauugaggaaugucccaucuauucaaucuagaggccuauucggggcgauugccggcuucauugaagggggguggacagggaugguagauggaugguacgguuaucaccaucaaaaugagcaggggucaggauaugcagccgaccugaagagcacacaaaaugccauugacaaaauuacuaacaaaguaaauucuguuauugaaaagaugaauacacaguucacagcaguggguaaagaguucaaccacuuggagaaaagaauagagaauuuaaauaaaaaaguugaugaugguuuccuggacauuuggacuuacaaugccgaacugcugguucuauuggaaaaugaaagaacuuuggacuaccacgauucaaaugugaagaacuuguaugaaaagguaagaaaccaguuaaaaaacaaugccaaggaaauuggaaacggcugcuuugaauuuuaccacaaaugcgauaacacgugcauggaaagugucaaaaaugggacuuaugacuacccaaaauacucagaggaagcaaaauuaaacagagaaaaaauagaugggguaaagcuggaaucaacaaggauuuaccagauuuuggcgaucuauucaacugucgccaguucauugguacugguagucucccugggggcaaucagcuucuggaugugcucuaaugggucucuacaguguagaauauguauuuaa

SEQ ID NO: 45619 - RNA, 1701 nt, Artificial Sequence
  derived and/or modified CDS sequence (wt) from hemagglutinin__InfluenzaA__ALN39661
augaagacuaucauugcuuugagcuacauucuaugucugguuuucgcucaaaaaauuccuggaaaugacaauagcacggcaacgcugugccuugggcaccaugcaguaccaaacggaacgauagugaaaacaaucacaaaugaccgaauugaaguuacuaaugcuacugagcugguucagaauuccucaauaggugaaauaugcgacaguccccaucagauccuugauggagaaaacugcacacuaauagaugcucuauugggagacccucagugugauggcuuucaaaauaagaaaugggaccuuuuuguugaacgaagcaaagccuacagcaacuguuacccuuaugaugugccggauuaugccucccuuaggucacuaguugccucauccggcacacuggaguuuaacaaugaaagcuucaauuggacuggagucacucaaaacggaacaaguucugcuugcauaaggagaucuaguaguaguuucuuuaguagauuaaauugguugacccacuuaaacuacacauacccagcauugaacgugacuaugccaaacaaugaacaauuugacaaauuguacauuugggggguucaccauccggguacggacaaggaccaaaucuuccuguaugcucaaucaucaggaagaaucacaguaucuaccaaaagaagccaacaagcuguaaucccaaauaucggaucuagacccagaauaagggauaucccuagcagaauaagcaucuauuggacaauaguaaaaccgggagacauacuuuugauuaacagcacagggaaucuaauugcuccuagggguuacuucaaaauacgaagugggaaaagcucaauaaugagaucagaugcacccauaggcaaaugcaagucugaaugcaucacuccaaauggaagcauucccaaugacaaaccauuccaaaauguaaacaggaucacauacggggccugucccagauauguuaagcauagcacucugaaauuggcaacaggaaugcgaaauguaccagagaaacaaacuagaggcauauuuggcgcaauagcggguuucauagaaaaugguugggagggaaugguggaugguugguacgguuucaggcaucaaaauucugagggaagaggacaagcagcagaucucaaaagcacucaagcagcaaucgaucaaaucaaugggaagcugaaucgauugaucgggaaaaccaacgagaaauuccaucagauugaaaaagaauucucagaaguagaaggaagaauucaggaccuugagaaauauguugaggacacuaaaauagaucucuggucauacaacgcggagcuucuuguugcccuggagaaccaacauacaauugaucuaacugacucagaaaugaacaaacuguuugaaaaaacaaagaagcaacugagggaaaaugcugaggauaugggaaaugguuguuucaaaauauaccacaaaugugacaaugccugcauaggaucaauaagaaauggaacuuaugaccacaauguguacagggaugaagcauuaaacaaccgguuccagaucaagggaguugagcugaagucaggguacaaagauuggauccuauggauuuccuuugccauaucauguuuuuugcuuuguauugcuuuguugggguucaucaugugggccugccaaaagggcaacauuaggugcaacauuugcauuuga

SEQ ID NO: 45620 - RNA, 1701 nt, Artificial Sequence
  derived and/or modified CDS sequence (wt) from hemagglutinin__InfluenzaA__ALN39662
augaagacuaucauugcuuugagcuacauucuaugucugguuuucgcucaaaaacuuccuggaaaugacaauagcacggcaacgcugugccuugggcaccaugcaguaccaaacggaacgauagugaaaacaaucacgaaugaccgaauugaaguuacuaaugcuacugagcugguucagaauuccucaauaggugaaauaugcgacaguccucaucagauccuugauggaaaaaacugcacucuaauagaugcucuauugggagacccucagugugauggcuuucaaaauaagagaugggaccuuuuuguugaacgaagcaaagccuacagcaacuguuacccuuaugaugugccggauuaugccucccuuaggucacuaguugccucauccggcacacuggaguuuaacgaugaaagcuucaauugggcuggagucacucaaaacggaacaaguucugcuugcauaaggggaucuaauaguaguuucuuuaguagguuaaauugguugacccacucaaacuucaaauacccagcauugaacgugacuaugccaaacaaugaacaauuugacaaauuguacauuugggggguucaccacccggguacagacaaggaccaaaucuuccuguacgcucaaucaucaggaagaaucacaguaucuaccaaaagaagccaacaagcuguaaucccgaauaucggaucuagacccagaauaaggaauaucccuagcagaauaagcaucuauuggacaauaguaaaaccgggagacauacuuuugauuaacagcacagggaaucuaauugcuccuagggguuacuucaaaauacaaagugggaaaagcucaauaaugagaucagaugcacccauuggcaaaugcaagucugaaugcaucacuccaaauggaagcauucccaaugacaaaccauuccaaaauguaaacaggaucacauacggggccugucccagauauguuaagcaaagcacucugaaauuggcaacaggaaugcgaaauguaccagagaaacaaacuagaggcauauuuggcgcaauagcggguuucauagaaaaugguugggagggaaugaaggaugguugguacgguuucaggcaucaaaauucugagggaagaggacaagcagcagaucucaaaagcacucaagcagcaaucgaucaaaucaaugggaagcugaaucgauugaucgggaaaaccaacgagaaauuccaucagauugaaaaagaauucucagaaguagaagggagaauucaggaccuugagaaauauguugaggacacaaaaauagaucucuggucauacaacgcggagcuucuuguugcccuggagaaccaacauacaauugaucuaacugacucagaaaugaacaaacuguuugaaaaaacaaagaagcaacugagggaaaaugcugaggauaugggcaaugguuguuucaaaauauaccauaaaugugacaaugccugcauaggaucaaucagaaauggaacuuaugaccacgauguauacagggaugaagcuuuaaacaaccgguuccagaucaagggaguugagcugaagucaggguacaaagauuggauccuauggauuuccuuugccauaucauguuuuuugcuuuguguugcuuuguugggguucaucaugugggccugccaaaagggcaacauuaggugcaacauuugcauuuga

SEQ ID NO: 45621 - RNA, 1701 nt, Artificial Sequence
  derived and/or modified CDS sequence (wt) from hemagglutinin__InfluenzaA__ALN39663
augaagacuaucauugccuugagcuacauucuaugucugguuuucgcucaaaaaauuccuggaaaugacaauagcacggcaacgcugugccuugggcaccaugcaguaccaaacggaacgauagugaaaacaaucacaaaugaccgaauugaaguuaccaaugcuacugagcugguucagaauuccucaauaggugaaauaugcgacaguccucaucagauccuugauggagaaaacugcacacuaauagaugcucuauugggagacccucagugugauggcuuucaaaauaagaaaugggaccuuuuuguugaacgaagcaaagccuacagcaacuguuacccuuaugaugugccggauuaugccucccuuaggucacuaguugccucauccggcacacuggaguuuaacaaugaaagcuucaauuggacuggagucacucaaaacggaacaaguucugcuugcauaaggagaucuaguaguaguuucuuuaguagauuaaauugguugacccacuuaaacuacacauacccagcauugaacgugacuaugccaaacaaugaacaauuugacaaauuguacauuugggggguucaccacccggguacggacaaggaccaaaucuuccuguaugcucaaucaucaggaagaaucacaguaucuaccaaaagaagccaacaagcuguaaucccaaauaucggaucuagacccagaauaagggauaucccuagcagaauaagcaucuauuggacaauaguaaaaccgggagacauacuuuugauuaacagcacagggaaucuaauugcuccuagggguuacuucaaaauacgaagugggaaaagcucaauaaugagaucagaugcacccauuggcaaaugcaagucugaaugcaucacuccaaauggaagcauucccaaugacaaaccauuccaaaauguaaacaggaucacauacggggccugucccagauauguuaagcauagcacucugaaauuggcaacaggaaugcgaaauguaccagagaaacaaacuagaggcauauuuggcgcaauagcggguuucauagaaaaugguugggagggaaugguggaugguugguacgguuucaggcaucaaaauucugagggaagaggacaagcagcagaucucaaaagcacucaagcagcaaucgaucaaaucaacgggaagcugaaucgguugaucgggaaaaccaacgagaaauuccaucagauugaaaaagaauucucagaaguagaaggaagaauucaggaccuugagaaauauguugaggacacuaaaauagaucucuggucauacaacgcggagcuucuuguugcccuggagaaccaacauacaauugaucuaacugacucagaaaugaacaaacuguuugaaaaaacaaagaagcaacugagggaaaaugcugaggauaugggaaaugguuguuucaaaauauaccacaaaugugacaaugccugcauaggaucaauaagaaauggaacuuaugaccacaauguguacagggaugaagcauuaaacaaccgguuccagaucaagggaguugagcugaagucaggguacaaagauuggauccuauggauuuccuuugccauaucauguuuuuugcuuuguguugcuuuguugggguucaucaugugggccugccaaaagggcaacauuaggugcaacauuugcauuuga

SEQ ID NO: 45622 - RNA, 1701 nt, Artificial Sequence
  derived and/or modified CDS sequence (wt) from hemagglutinin__InfluenzaA__ALN39664
augaagacuaucauugcuuugagcuacauucuaugucugguuuucgcucaaaaacuuccuggaaaugacaauagcacggcaacgcugugccuugggcaccaugcaguaccaaacggaacgauagugaaaacaaucacgaaugaccgaauugaaguuacuaaugcuacugagcugguucagaauuccucaauaggugaaauaugcgacaguccucaucagauccuugauggagaaaacugcacacuaauagaugcucuauugggagacccucagugugauggcuuucaaaauaagaaaugggaccuuuuuguugaacgaagcaaagccuacagcaacuguuacccuuaugaugugccggauuaugccucccuuaggucacuaguugccucauccggcacacuggaguuuaacaaugaaagcuucaauugggcuggagucacucaaaacggaacaaguucuucuugcauaaggggaucuaauaguaguuucuuuaguagauuaaauugguugacccacuuaaacuccaaauacccagcauuaaacgugacuaugccaaacaaugaacaauuugacaaauuguauauuugggggguucaccacccggguacggacaaggaccaaaucuuccuguaugcacaaccaucaggaagagucacaguaucuaccaaaagaagccaacaagcuguaaucccgaauaucggaucuagacccagaauaagggauaucccuagcagaauaagcaucuauuggacaauaguaaaaccgggagacauacuuuugauuaacagcacagggaaucuaauugcuccuagggguuacuucaaaauacgaagugggaaaagcucaauaaugagaucagaugcacccauuggcaaaugcaagucugaaugcaucacuccaaauggaagcauucccaaugacaaaccauuccaaaauguaaacaggaucacauacggggccugucccagauauguuaagcaaagcacucugaaauuggcaacaggaaugcgaaauguaccagagagacaaacuagaggcauauuuggcgcaauagcggguuucauagaaaaugguugggagggaaugguggaugguugguacggcuucaggcaucaaaauucugagggaagaggacaagcagcagaucucaaaagcacucaagcagcaaucgaucaaaucaaugggaagcugaaucgauugaucgggaaaaccaacgagaaauuccaucagauugaaaaagaauucucagaaguagaagggagaauucaggaccuugagaaauauguugaggacacaaaaauagaucucuggucauacaacgcggagcuucuuguugcccuggagaaccaacauacaauugaucuaacugacucagaaaugaacaaacuguuugaaaaaacaaagaagcaacugagggaaaaugcugaggauaugggcaaugguuguuucaaaauauaccacaaaugugacaaugccugcauaggaucaaucagaaauggaacuuaugaccacgauguauacagggaugaagcauuaaacaaccgguuccagaucaagggaguugagcugaagucaggguacaaagauuggauccuauggauuuccuuugccauaucauguuuuuugcuuuguguugcuuuguugggguucaucaugugggccugccaaaagggcaacauuaggugcaacauuugcauuuga

SEQ ID NO: 45623 - RNA, 1701 nt, Artificial Sequence; identical to SEQ ID NO: 45025
  derived and/or modified CDS sequence (wt) from hemagglutinin__InfluenzaA__ALN39665

SEQ ID NO: 45624 - RNA, 1701 nt, Artificial Sequence
  derived and/or modified CDS sequence (wt) from hemagglutinin__InfluenzaA__ALN39666
augaagacuaucauugcuuugagcuacauucuaugucugguuuucgcucaaaaaauuccuggaaaugacaauagcacggcaacgcugugccuugggcaccaugcaguaccaaacggaacgauagugaaaacaaucacaaaugaccgaauugaaguuacuaaugcuacugaguugguucagaauuccucaauaggugaaauaugcgacaguccucaucagauccuugauggagaaaacugcacacuaauagaugcucuauugggagacccucagugugauggcuuucaaaauaagaaaugggaccuuuuuguugaacgaaguaaagccuacagcaacuguuacccuuaugaugugccggauuaugccucccuuaggucacuaguugccucauccggcacacuggaguuuaacaaugaaagcuucaauuggacuggagucacucaaaacggaacaaguucugcuugcauaaggagaucuaguaguaguuucuuuaguagauuaaauugguugacccacuuaaacuacacauacccagcauugaacgugacuaugccaaacaaugaacaauuugacaaauuguacauuugggggguucaccacccggguacggacaaggaccaaaucuuccuguaugcucaaucaucaggaagaaucacaguaucuaccaaaagaagccaacaagcuguaaucccaaauaucggaucuagacccagaauaagggauaucccuagcagaauaagcaucuauuggacaauaguaaaaccgggagacauacuuuugauuaacagcacagggaaucuaauugcuccuagggguuacuucaaaauacuaagugggaaaagcucaauaaugagaucagaugcacccauuggcaaaugcaagucugaaugcaucacuccaaauggaagcauucccaaugacaaaccauuccaaaauguaaacaggaucacauacggggccugucccagauauguuaagcauagcacucugaaauuggcaacagggaugcgaaauguaccagagaaacaaacuagaggcauauuuggcgcaauagcggguuucauagaaaaugguugggaaggaaugguggaugguugguacgguuucaggcaucaaaauucugagggaagaggacaagcagcagaucucaaaagcacucaagcagcaaucgaucaaaucaaugggaagcugaaucgguugaucgggaaaaccaacgagaaauuccaucagauugaaaaagaauucucagaaguagaaggaagaauucaggaccuugagaaauauguugaggacacuaaaauagaucucuggucauauaacgcggagcuucuuguugcccuggagaaccaacauacaauugaucuaacugacucagaaaugaacaaacuguuugaaaaaacaaagaagcaacugagggaaaaugcugaggauaugggaaaugguuguuucaaaauauaccacaaaugugacaaugccugcauaggaucaauaagaaauggaacuuaugaccacaauguguacagggaugaagcauuaaacaaccgguuccagaucaaggggguugagcugaagucaggguacaaagauuggauccuauggauuuccuuugccauaucauguuuuuugcuuuguguugcuuuguugggguucaucaugugggccugccaaaagggcaacauuaggugcaacauuugcauuuga

SEQ ID NO: 45625 - RNA, 1701 nt, Artificial Sequence
  derived and/or modified CDS sequence (wt) from hemagglutinin__InfluenzaA__ALN39667
augaagacuaucauugcuuugagcuacauucuaugucugguuuucgcucaaaaacuuccuggaaaugacaauagcacggcaacgcugugccuugggcaccaugcaguaccaaacggaacgauagugaaaacaaucacgaaugaccgaauugaaguuacuaaugcuacugagcugguucagaauuccucaauaggugaaauaugcaacagcccucaucagauccuugauggagaaaacugcacacuaauagaugcucuauugggagacccucagugugauggcuuucaaaauaagaaaugggaccuuuuuguugaacgaagcaaagccuacagcaacuguuacccuuaugaugugccggauuaugccucccuuaggucacuaguugccucauccggcacacuggaguuuaacaaugaaagcuucaauugggcuggagucacucaaaacggaacaaguucugcuugcauaaggggaucuaauaguaguuucuuuaguagauuaaauugguugacccacucaaacuucaaauacccagcauugaacgugacuaugccaaacaaugaacaauuugacaaauuguacauuugggggguucaccacccggguacggacaaggaccaaaucuuccuguaugcucaaucaucaggaagaaucacaguaucuaccaaaagaagccaacaagcuguaaccccgaauaucggaucuagacccagaauaaggaauaucccuagcagaauaagcaucuauuggacaauaguaaaaccgggagacauacuuuugauuaacagcacagggaaucuaauugcuccuagggguuacuucaaaauacgaagugggaaaagcucaauaaugagaucagaugcacccauuggcaaaugcaagucugaaugcaucacuccaaauggaagcauucccaaugacaagccauuccaaaauguaaacaggaucacauacggggccugucccagauauguuaagcaaagcacucugaaauuggcaacaggaaugcgaaauguaccagagaaacaaacuagaggcauauuuggcgcaauagcggguuucauagaaaaugguugggagggaaugaaggaugguugguacgguuucaggcaucaaaauucugagggaagaggacaagcagcagaucucaaaagcacucaagcagcaaucgaucaaaucaacgggaagcugaaucgauugaucgggaaaaccaacgagaaauuccaucagauugaaaaagaauucucagaaguagaaggaagaauucaggaccuugagaaauauguugaggacacaaaaauagaucucuggucauacaacgcggagcuucuuguugcccuggagaaccaacauacaauugaucuaacugacucagaaaugaacaaacuguuugaaaaaacaaagaagcaacugagggaaaaugcugaggauaugggcaaugguuguuucaaaauauaccacaaaugugacaaugccugcauaggaucaaucagaaauggaacguaugaccacgauguauacaggaaugaagcauuaaacaaccgguuccagaucaagggaguugagcugaagucaggguacaaagauuggauccuauggauuuccuuugccauaucauguuuuuugcuuuguguugcuuuguugggguucaucaugugggccugccaaaagggcaacauuaggugcaacauuugcauuuga

SEQ ID NO: 45626 - RNA, 1701 nt, Artificial Sequence
  derived and/or modified CDS sequence (wt) from hemagglutinin__InfluenzaA__ALN39668
augaagacuaucauugccuugagcuacauucuaugucugguuuucgcucaaaaaauuccuggaaaugacaauagcacggcaacgcugugccuugggcaccaugcaguaccaaacggaacgauagugaaaacaaucacaaaugaccgaauugaaguuacuaaugcuacugagcugguucagaauuccucaauaggugaaauaugcgacaguccucaucagauccuugauggagaaaacugcacacuaauagaugcucuauugggagacccucagugugauggcuuucaaaauaagaaaugggaccuuuuuguugaacgaagcaaagccuacagcaacuguuacccuuaugaugugccggauuaugccucccuuaggucacuaguugccucauccggcacacuggaguuuaacaaugaaagcuucaauuggacuggagucacucaaaacggaacaaguucugcuugcauaaggagaucuaguaguaguuucuuuaguagauuaaauugguugacccacuuaaacuacacauacccagcauugaacgugacuaugccaaacaaugaacaauuugacaaauuguacauuugggggguucaccacccggguacggacaaggaccaaaucuuccuguaugcucaaucaucaggaagaaucacaguaucuaccaaaagaagccaacaagcuguaaucccaaauaucggaucuagacccagaauaagggauaucccuagcagaauaagcaucuauuggacaauaguaaaaccgggagacauacuuuugauuaacagcacagggaaucuaauugcuccuagggguuacuucaaaauacgaagugggaaaagcucaauaaugagaucagaugcacccauuggcaaaugcaagucugaaugcaucacuccaaauggaagcauucccaaugacaaaccauuccaaaauguaaacaggaucacauacggggccugucccagauauguuaagcauagcacucugaaauuggcaacaggaaugcgaaauguaccagagaaacaaacuagaggcauauuuggcgcaauagcggguuucauagaaaaugguugggagggaaugauggaugguugguacgguuucaggcaucaaaauucugagggaagaggacaagcagcagaucucaaaagcacucaagcagcaaucgaucaaaucaaugggaagcugaaucgauugaucgggaaaaccaacgagaaauuccaucagauugaaaaagaauucucagaaguagaaggaagaauucaggaccuugagaaauauguugaggacacuaaaauagaucucuggucauacaacgcggagcuucuuguugcccuggagaaccaacauacaauugaucuaacugacucagaaaugaacaaacuguuugaaaaaacaaagaagcaacugagggaaaaugcugaggauaugggaaaugguuguuucaaaauauaccacaaaugugacaaugccugcauaggaucaauaagaaauggaacuuaugaccacaauguguacagggaugaagcauuaaacaaccgguuccagaucaagggaguugagcugaagucaggguacaaagauuggauccuauggauuuccuuugccauaucauguuuuuugcuuuguguugcuuuguugggguucaucaugugggccugccaaaagggcaacauuaggugcaacauuugcauuuga

SEQ ID NO: 45627 - RNA, 1701 nt, Artificial Sequence
  derived and/or modified CDS sequence (wt) from hemagglutinin__InfluenzaA__ALN39669
augaagacuaucauugcuuugagcuacauucuaugucugguuuucgcucaaaaaauuccuggaaaugacaauagcacggcaacgcugugccuugggcaccaugcaguaccaaacggaacgauagugaaaacaaucacaaaugaccgaauugaaguuacuaaugcuacugaguugguucagaauuccucaauaggugaaauaugcgacaguccucaucagauccuugauggagaaaacugcacacuaauagaugcucuauugggagacccucagugugauggcuuucaaaauaagaaaugggaccuuuuuguugaacgaagcaaagccuacagcaacuguuacccuuaugaugugccggauuaugccucccuuaggucacuaguugccucauccggcacacuggaguuuaacaaugaaagcuucaauuggacuggagucacucaaaacggaacaaguucugcuugcauaaggagaucuaguaguaguuucuuuaguagauuaaauugguugacccacuuaaacuacacauacccagcauugaacgugacuaugccaaacaaugaacaauuugacaaauuguacauuugggggguucaccacccggguacggacaaggaccaaaucuuccuguaugcucaauuaucaggaagaaucacaguaucuaccaaaagaagccaacaagcuguaaucccaaauaucggaucuagacccagaauaagggauaucccuagcagaauaagcaucuauuggacaauaguaaaaccgggagacauacuuuugauuaacagcacagggaaucuaauugcuccuagggguuacuucaaaauacgaagugggaaaagcucaauaaugagaucagaugcacccauuggcaaaugcaagucugaaugcaucacuccaaauggaagcauucccaaugacaaaccauuccaaaauguaaacaggaucacauacggggccugucccagauauguuaagcauagcacucugaaauuggcaacaggaaugcgaaauguaccagagaaacaaacuagaggcauauuuggcgcaauagcggguuucauagaaaaugguugggagggaaugguggaugguugguacgguuucaggcaucaaaauucugagggaagaggacaagcagcagaucucaaaagcacucaagcagcaaucgaucaaaucaaugggaagcugaaucgguugaucgggaaaaccaacgagaaauuccaucagauugaaaaagaauucucagaaguagaaggaagaauucaggaccuugagaaauauguugaggacacuaaaauagaucucuggucauauaacgcggagcuucuuguugcccuggagaaccaacauacaauugaucuaacugacucagaaaugaacaaacuguuugaaaaaacaaagaagcaacugagggaaaaugcugaggauaugggaaaugguuguuucaaaauauaccacaaaugugacaaugccugcauaggaucaauaagaaauggaacuuaugaccacaauguguacagggaugaagcauuaaacaaccgguuccagaucaaggggguugagcugaagucaggguacaaagauuggauccuauggauuuccuuugccauaucauguuuuuugcuuuguguugcuuuguugggguucaucaugugggccugccaaaagggcaacauuaggugcaacauuugcauuuga

SEQ ID NO: 45628 - RNA, 1701 nt, Artificial Sequence
  derived and/or modified CDS sequence (wt) from hemagglutinin__InfluenzaA__ALN39670
augaagacuaucauugcuuugagcuacauucuaugucugguuuucgcucaaaaaauuccuggaaaugacaauagcacggcaacgcugugccuugggcaccaugcaguaccaaacggaacgauagugaaaacaaucacaaaugaccgaauugaaguuacuaaugcuacugaguugguucagaauuccucaauaggugaaauaugcgacaguccucaucagauccuugauggagaaaacugcacacuaauagaugcucuauugggagacccucagugugauggcuuucaaaauaagaaaugggaccuuuuuguugaacgaagcaaagccuacagcaacuguuacccuuaugaugugccggauuaugccucccuuaggucacuaguugccucauccggcacacuggaguuuaacaaugaaagcuucaauuggacuggagucacucaaaauggaacaaguucugcuugcauaaggagaucuaguaguaguuucuuuaguagauuaaauugguugacccacuuaaacuacacauacccagcauugaacgugacuaugccaaacaaugaacaauuugacaaauuguacauuugggggguucaccacccggguacggacaaggaccaaaucuuccuguaugcucaaucaucaggaagaaucacaguaucuaccaaaagaagccaacaagcuguaaucccaaauaucggaucuagacccagaauaagggauaucccuagcagaauaagcaucuauuggacaauaguaaaaccgggagacauacuuuugauuaacagcacagggaaucuaauugcuccuagggguuacuucaaaauacgaagugggaaaagcucaauaaugagaucagaugcacccauuggcaaaugcaagucugaaugcaucacuccaaauggaagcauucccaaugacaaaccauuccaaaauguaaacaggaucacauacggggccugucccagauauguuaagcauagcacucugaaauuggcaacaggaaugcgaaauguaccagagaaacaaacuagaggcauauuuggcgcaauagcggguuucauagaaaaugguugggagggaaugguggaugguugguacgguuucaggcaucaaaauucugagggaagaggacaagcagcagaucucaaaagcacucaagcagcaaucgaucaaaucaaugggaagcugaaucgguugaucgggaaaaccaacgagaaauuccaucagauugaaaaagaauucucagaaguagaaggaagaauucaggaccuugagaaauauguugaggacacuaaaauagaucucuggucauauaacgcggagcuucuuguugcccuggagaaccaacauacaauugaucuaacugacucagaaaugaacaaacuguuugaaaaaacaaagaagcaacugagggaaaaugcugaggauaugggaaaugguuguuucaaaauauaccacaaaugugacaaugccugcauaggaucaauaagaaauggaacuuaugaccacaauguguacagggaugaagcauuaaacaaccgguuccagaucaaggggguugagcugaagucaggguacaaagauuggauccuauggauuuccuuugccauaucauguuuuuugcuuuguguugcuuuguugggguucaucaugugggccugccaaaagggcaacauuaggugcaacauuugcauuuga

SEQ ID NO: 45629 - RNA, 1701 nt, Artificial Sequence
  derived and/or modified CDS sequence (wt) from hemagglutinin__InfluenzaA__ALN39671
augaagacuaucauugccuugagcuacauucuaugucugguuuucgcucaaaaaauuccuggaaaugacaauagcacggcaacgcugugccuugggcaccaugcaguaccaaacggaacgauagugaaaacaaucacaaaugaccgaauugaaguuacuaaugcuacugagcugguucagaauuccucaauaggugaaauaugcgacaguccucaucagauccuugauggagaaaacugcacacuaauagaugcucuauugggagacccucagugugauggcuuucaaaauaagaaaugggaccuuuuuguugaacgaagcaaagccuacagcaacuguuacccuuaugaugugccggauuaugccucccuuaggucacuaguugccucauccggcacacuggaguuuaacaaugaaagcuucaauuggacuggagucacucaaaacggaacaaguucugcuugcauaaggagaucuaguaguaguuucuuuaguagauuaaauugguugacccacuuaaacuacacauacccagcauugaacgugacuaugccaaacaaugaacaauuugacaaauuguacauuugggggguucaccacccggguacggacaaggaccaaaucuuccuguaugcucaaucaucaggaagaaucacaguaucuaccaaaagaagccaacaagcuguaaucccaaauaucggaucuagacccagaauaagggauaucccuagcagaauaagcaucuauuggacaauaguaaaaccgggagacauacuuuugauuaacagcacagggaaucuaauugcuccuagggguuacuucaaaauacgaagugggaaaagcucaauaaugagaucagaugcacccauuggcaaaugcaagucugaaugcaucacuccaaauggaagcauucccaaugacaaaccauuccaaaauguaaacaggaucacauacggggccugucccagauauguuaagcauagcacucugaaauuggcaacaggaaugcgaaauguaccagagaaacaaacuagaggcauauuuggcgcaauagcggguuucauagaaaaugguugggagggaaugguggaugguugguacgguuucaggcaucaaaauucugagggaagaggacaagcagcagaucucaaaagcacucaagcagcaaucgaucaaaucaaugggaagcugaaucgauugaucgggaaaaccaacgagaaauuccaucagauugaaaaagaauucucagaaguagaaggaagaauucaggaccuugagaaauauguugaggacacuaaaauagaucucuggucauacaacgcggagcuucuuguugcccuggagaaccaacauacaauugaucuaacugacucagaaaugaacaaacuguuugaaaaaacaaggaagcaacugagggaaaaugcugaggauaugggaaaugguuguuucaaaauauaccacaaaugugacaaugccugcauaggaucaauaagaaauggaacuuaugaccacaauguguacagggaugaagcauuaaacaaccgguuccagaucaagggaguugagcugaagucaggguacaaagauuggauccuauggauuuccuuugccauaucauguuuuuugcuuuguguugcuuuguugggguucaucaugugggccugccaaaagggcaacauuaggugcaacauuugcauuuga

SEQ ID NO: 45630 - RNA, 1701 nt, Artificial Sequence; identical to SEQ ID NO: 45076
  derived and/or modified CDS sequence (wt) from hemagglutinin__InfluenzaA__ALN39672

SEQ ID NO: 45631 - RNA, 1701 nt, Artificial Sequence
  derived and/or modified CDS sequence (wt) from hemagglutinin__InfluenzaA__ALN39673
augaagacuaucauugccuugagcuacauucuaugucugguuuucgcucaaaaaauuccuggaaaugacaauagcacggcaacgcugugccuugggcaccaugcaguaccaaacggaacgauagugaaaacaaucacaaaugaccgaauugaaguuacuaaugcuacugagcugguucagaauuccucaauaggugaaauaugcgacaguccucaucagauccuugauggagaaaacugcacacuaauagaugcucuauugggagacccucagugugauggcuuucaaaauaagaaaugggaccuuuuuguugaacgaagcaaagccuacagcaacuguuacccuuaugaugugccggauuaugccucccuuaggucacuaguugccucauccggcacacuggaguuuaacaaugaaagcuucaauuggacuggagucacucaaaacggaacaaguucugcuugcauaaggagaucuaguaguaguuucuuuaguagauuaaauugguugacccacuuaaacuacacauacccagcauugaacgugacuaugccaaacaaugaacaauuugacaaauuguacauuugggggguucaccacccggguacggacaaggaccaaaucuuccuguaugcucaaucaucaggaagaaucacaguaucuaccaaaagaagccaacaagcuguaaucccagauaucggaucuagacccagaauaagggauaucccuagcagaauaagcaucuauuggacaauaguaaaaccgggagacauacuuuugauuaacagcacagggaauuuaauugcuccuagggguuacuucaaaauacgaagugggaaaagcucaauaaugagaucagaugcacccauuggcaaaugcaagucugaaugcaucacuccaaauggaagcauucccaaugacaaaccauuccaaaauguaaacaggaucacauacggggccugucccagauauguuaagcauagcacucugaaauuggcaacaggaaugcgaaauguaccagagaaacaaacuagaggcauauuuggcgcaauagcggguuucauagaaaaugguugggagggaaugguggaugguugguacgguuucaggcaucaaaauucugagggaagaggacaagcagcagaucucaaaagcacucaagcagcaaucgaucaaaucaaugggaagcugaaucgauugaucgggaaaaccaacgagaaauuccaucagauugaaaaagaauucucagaaguagaaggaagaauucaggaccuugagaaauauguugaggacacuaaaauagaucucuggucauacaacgcggagcuucuuguugcccuggagaaccaacauacaauugaucuaacugacucagaaaugaacaaacuguuugaaaaaacaaagaagcaacugagggaaaaugcugaggauaugggaaaugguuguuucaaaauauaccacaaaugugacaaugccugcauaggaucaauaagaaauggaacuuaugaccacaauguguacagggaugaagcauuaaacaaccgguuccagaucaagggaguugagcugaagucaggguacaaagauuggauccuauggauuuccuuugccauaucauguuuuuugcuuuguguugcuuuguugggguucaucaugugggccugccaaaagggcaacauuaggugcaacauuugcauuuga

SEQ ID NO: 45632 - RNA, 1701 nt, Artificial Sequence
  derived and/or modified CDS sequence (wt) from hemagglutinin__InfluenzaA__ALN39674
augaagacuaucauugcuuugagcuacauucuaugucugguuuucgcucaaaaaauuccuggaaaugacaauagcacggcaacgcugugccuugggcaccaugcaguaccaaacggaacgauagugaaaacaaucacaaaugaccgaauugaaguuacuaaugcuacugagcugguucagaauuccucaauaggugaaauaugcgacaguccucaucagauccuugauggagaaaacugcacacuaauagaugcucuauugggagacccucagugugauggcuuucaaaauaagaaaugggaccuuuuuguugaacgaagcaaagccuacagcaacuguuacccuuaugaugugccggauuaugccucccuuaggucgcuaguugccucauccggcacacuggaguucaacaaugaaagcuucaauuggacuggagucacucaaaacggaacaaguucugcuugcauaaggagaucuaguaguaguuucuuuaguagauuaaauugguugacccacuuaaacuacacauacccagcauugaacgugacuaugccaaacaaugaacaauuugacaaauuguacauuugggggguucaccacccggguacggacaaggaccaaaucuuccuguaugcucaaucaucaggaagaaucacaguaucuaccaaaagaagccaacaagcuguaaucccaaauaucggaucuagacccagaauaagggauaucccuagcagaauaagcaucuauuggacaauaguaaaaccgggagacauacuuuugauuaacagcacagggaaucuaauugcuccuagggguuacuucaaaauacgaagugggaaaagcucaauaaugagaucagaugcacccauuggcaaaugcaagucugaaugcaucacuccaaauggaagcauucccaaugacaaaccauuccaaaauguaaacaggaucacauacggggccugucccagauauguuaagcauagcacucugaaauuggcaacaggaaugcgaaauguaccagagaaacaaacuagaggcauauuuggcgcaauagcggguuucauagaaaaugguugggagggaaugguggaugguugguacgguuucaggcaucaaaauucugagggaagaggacaagcagcagaucucaaaagcacucaagcagcaaucgaucaaaucaaugggaagcugaaucgauugaucgggaaaaccaacgagaaauuccaucagauugaaaaagaauucucagaaguagaaggaagaauucaggaccuugagaaauauguugaggacacuaaaauagaucucuggucauacaacgcggagcuucuuguugcccuggagaaccaacauacaauugaucuaacugacucagaaaugaacaaacuguuugaaaaaacaaagaagcaacugagggaaaaugcugaggauaugggaaaugguuguuucaaaauauaccacaaaugugacaaugccugcauaggaucaauaagaaacggaacuuaugaccacaauguguacagggaugaagcauuaaacaaccgguuccagaucaagggaauugagcugaagucaggguacaaagauuggauccuauggauuuccuuugccauaucauguuuuuugcuuuguguugcuuuguugggguucaucaugugggccugccaaaagggcaacauuaggugcaacauuugcauuuga

SEQ ID NO: 45633 - RNA, 1701 nt, Artificial Sequence; identical to SEQ ID NO: 45006
  derived and/or modified CDS sequence (wt) from hemagglutinin__InfluenzaA__ALN39675

SEQ ID NO: 45634 - RNA, 1701 nt, Artificial Sequence
  derived and/or modified CDS sequence (wt) from hemagglutinin__InfluenzaA__ALN39676
augaagacuaucauugcuuugagcugcauucuaugucugguuuucgcucaaaaacuuccuggaaaugacaauagcacggcaacgcugugccuugggcaccaugcaguaccaaacggaacgauagugaaaacaaucacgaaugaccgaauugaaguuacuaaugcuacugagcugguucagaauuccucaauaggugaaauaugcgacaguccucaucagauccuugauggagaaaacugcacacuaauagaugcucuauugggagacccucagugugauggcuuucaaaauaagaaaugggaccuuuuuguugaacgaagcaaagccuacagcaacuguuacccuuaugaugugccggauuaugccucccuuaggucacuaguugccucauccggcacacuggaguuuaacaaugaaaacuucaauugggcuggagucacucaaaacggaacaaguucuucuugcauaaggggaucuaauaguaguuucuuuaguagauuaaauugguugacccacuuaaacuccaaauacccagcauuaaacgugacuaugccaaacaaugaacaauuugacaaauuguacauuugggggguucaccacccggguacggacaaggaccaaaucuuccuguaugcacaaucaucaggaagaaucacaguaucuaccaaaagaagccaacaagcuguaaucccgaauaucggaucuagacccagaauaagggauaucccuagcagaauaagcaucuauuggacaauaguaaaaccgggagacauacuuuugauuaacagcacagggaaucuaauugcuccuagggguuacuucagaauacgaagugggaaaagcucaauaaugagaucagaugcacccauuggcaaaugcaagucugaaugcaucacuccaaauggaagcauucccaaugacaaaccauuccaaaauguaaacaggaucacauacggggccugucccagauauguuaagcaaaacacucugaaauuggcaacaggaaugcgaaauguaccagagagacaaacuagaggcauauuuggcgcaauagcggguuucauagaaaaugguugggagggaaugguggaugguugguacggcuucaggcaucaaaauucugagggaagaggacaagcagcagaucucaaaagcacucaaucagcaaucgaucaaaucaaugggaagcugaaucgauugaucgggaaaaccaacgagaaauuccaucagauugaaaaagaauucucagaaguagaagggagaauucaggaccuugagaaauauguugaggacacaaaaauagaucucuggucauacaacgcggagcuucuuguugcccuggagaaccaacauacaauugaucuaacugacucagaaaugaacaaacuguuugaaaaaacaaagaagcaacugagggaaaaugcugaggauaugggcaaugguuguuucaaaauauaccacaaaugugacaaugccugcauaggaucaaucagaaauggaacuuaugaccacgauguauacagggaugaagcauuaaacaaccgguuccagaucaagggaguugagcugaagucaggguacaaagauuggauccuauggauuuccuuugccauaucauguuuuuugcuuuguguugcuuuguugggguucaucaugugggccugccaaaagggcaacauuaggugcaacauuugcauuuga

SEQ ID NO: 45635 - RNA, 1701 nt, Artificial Sequence
  derived and/or modified CDS sequence (wt) from hemagglutinin__InfluenzaA__ALN39677
augaagacuaucauugcuuugggcuacauucuaugucugguuuucgcucaaaaaauuccuggaaaugacaauagcacggcaacgcugugccuugggcaccaugcaguaccaaacggaacgauagugaaaacaaucacaaaugaccgaauugaaguuacuaaugcuacugagcugguucagaauuccucaauaggugaaauaugcgacaguccucauaagauccuugauggagaaaacugcacacuaauagaugcucuauugggagacccucagugugauggcuuucaaaauaagaaaugggaccuuuuuguugaacgaagcaaagccuacagcaacuguuacccuuaugaugugccggauuaugccucccuuaggucacuaguugccucauccggcacacuggaguuuaacaaugaaagcuucaauuggacuggagucacucaaaacggaacaaguucugcuugcauaaggagaucuaguaguaguuucuuuaguagauuaaauugguugacccacuuaaacuacgcauacccagcauugaacgugacuaugccaaacaaugaacaauuugacaaauuguacauuugggggguucaccacccggguacggacaaggaccaaaucuuccuguaugcucaaucaucaggaagaaucacaguaucuaccaaaagaagccaacaagcuguaaucccaaauaucggaucuagacccagaauaagggauaucccuagcagaauaagcaucuauuggacaauaguaaaaccgggagacauacuuuugauuaacagcacagggaaucuaauugcuccuagggguuacuucaaaauacgaagugggaaaagcucaauaaugagaucagaugcacccauuggcaaaugcaagucugaaugcaucacuccaaauggaagcauucccaaugacaaaccauuccaaaauguaaacaggaucacauacggggccugucccagauauguuaagcauagcacucugaaauuggcaacaggaaugcgaaauguaccagagaaacaaacuagaggcauauuuggcgcaauagcggguuucauagaaaaugguugggagggaaugguggaugguugguacgguuucaggcaucaaaauucugagggaagaggacaagcagcagaucucaaaagcacucaagcagcaaucgaucaaaucaaugggaagcugaaucgauugaucgggaaaaccaacgagaaauuccaucagauugaaaaagaauucucagaaguagaaggaagaauucaggaccuugagaaauauguugaggacacuaaaauagaucucuggucauacaacgcggagcuucuuguugcccuggagaaccaacauacaauugaucuaacugacucagaaaugaacaaacuguuugaaaaaacaaagaagcaacugagggaaaaugcugaggauaugggaaaugguuguuucaaaauauaccacaaaugugacaaugccugcauaggaucaauaagaaauggaacuuaugaccacaauguguacagggaugaagcauuaaacaaccgguuccagaucaagggaguugagcugaagucaggguacaaagauuggauccuauggauuuccuuugccauaucauguuuuuugcuuuguguugcuuuguugggguucaucaugugggccugccaaaagggcaacauuaggugcaacauuugcauuuga

SEQ ID NO: 45636 - RNA, 1701 nt, Artificial Sequence
  derived and/or modified CDS sequence (wt) from hemagglutinin__InfluenzaA__ALN39678
augaagacuaucauugcuuugggcuacauucuaugucugguuuucgcucaaaaaauuccuggaaaugacaauagcacggcaacgcugugccuugggcaccaugcaguaccaaacggaacgauagugaaaacaaucacaaaugaccgaauugaaguuacuaaugcuacugaacugguucagaauuccucaauaggugaaauaugcgacaguccucauaagauccuugauggagaaaacugcacacuaauagaugcucuauugggagacccucagugugauggcuuucaaaauaagaaaugggaccuuuuuguugaacgaagcaaagccuacagcaacuguuacccuuaugaugugccggauuaugccucccuuaggucacuaguugccucauccggcacacuggaguuuaacaaugaaagcuucaauuggacuggagucacucaaaacggaacaaguucugcuugcauaaggagaucuaguaguaguuucuuuaguagauuaaauugguugacccacuuaaacuacacauacccagcauugaacgugacuaugccaaacaaugaacaauuugacaaauuguacauuugggggguucaccacccggguacggacaaggaccaaaucuuccuguaugcucaaucaucaggaagaaucacaguaucuaccaaaagaagccaacaagcuguaaucccaaauaucggaucuagacccagaauaagggauaucccuagcagaauaagcaucuauuggacaauaguaaaaccgggagacauacuuuugauuaacagcacagggaaucuaauugcuccuagggguuacuucaaaauacgaagugggaaaagcucaauaaugagaucagaugcacccauuggcaaaugcaagucugaaugcaucacuccaaauggaagcauucccaaugacaaaccauuccaaaauguaaacaggaucacauacggggccugucccagauauguuaagcauagcacucugaaauuggcaacaggaaugcgaaauguaccagagaaacaaacuagaggcauauuuggcgcaauagcggguuucauagaaaaugguugggagggaaugguggaugguugguacgguuucaggcaucaaaauucugagggaagaggacaagcagcagaucucaaaagcacucaagcagcaaucgaucaaaucaaugggaagcugaaucgauugaucgggaaaaccaacgagaaauuccaucagauugaaaaagaauucucagaaguagaaggaagaauucaggaccuugagaaauauguugaggacacuaaaauagaucucuggucauacaacgcggagcuucuuguugcccuggagaaccaacauacaauugaucuaacugacucagaaaugaacaaacuguuugaaaaaacaaagaagcaacugagggaaaaugcugaggauaugggaaaugguuguuucaaaauauaccacaaaugugacaaugccugcauaggaucaauaagaaauggaacuuaugaccacaauguguacagggaugaagcauuaaacaaccgguuccagaucaagggaguugagcugaagucaggguacaaagauuggauccuauggauuuccuuugccauaucauguuuuuugcuuuguguugcuuuguugggguucaucaugugggccugccaaaagggcaacauuaggugcaacauuugcauuuga

SEQ ID NO: 45637 - RNA, 1701 nt, Artificial Sequence
  derived and/or modified CDS sequence (wt) from hemagglutinin__InfluenzaA__ALN39679
augaagacuaucauugcuuugggcuacauucuaugucugguuuucgcucaaaaaauuccuggaaaugacaauagcacggcaacgcugugccuugggcaccaugcaguaccaaacggaacgguagugaaaacaaucacaaaugaccgaauugaaguuacuaaugcuacugagcugguucagaauuccucaauaggugaaauaugcgacaguccucauaagauccuugauggagaaaacugcacacuaauagaugcucuauugggagacccucagugugauggcuuucaaaauaagaaaugggaccuuuuuguugaacgaagcaaagccuacagcaacuguuacccuuaugaugugccggauuaugccucccuuaggucacuaguugccucauccggcacacuggaguuuaacaaugaaagcuucaauuggacuggagucacucaaaacggaacaaguucugcuugcauaaggagaucgaguaguaguuucuuuaguagauuaaauugguugacccacuuaaacuacacauacccagcauugaacgugacuaugccaaacaaugaacaauuugacaaauuguacauuugggggguucaccacccggguacggacaaggaccaaaucuuccuguaugcucaaucaucaggaagaaucacaguaucuaccaaaagaagccaacaagcuguaaucccaaauaucggaucuagacccagaauaagggauaucccuagcagaauaagcaucuauuggacaauaguaaaaccgggagacauacuuuugauuaacagcacagggaaucuaauugcuccuagggguuacuucaaaauacgaagugggaaaagcucaauaaugagaucagaugcacccauuggcaaaugcaagucugaaugcaucacuccaaauggaagcauucccaaugacaaaccauuccaaaauguaaacaggaucacauacggggccugucccagauauguuaagcauagcacucugaaauuggcaacaggaaugcgaaauguaccagagaaacaaacuagaggcauauuuggcgcaauagcggguuucauagaaaaugguugggagggaaugguggaugguugguacgguuucaggcaucaaaauucugagggaagaggacaagcagcagaucucaaaagcacucaagcagcaaucgaucaaaucaaugggaagcugaaucgauugaucgggaaaaccaacgagaaauuccaucagauugaaaaagaauucucagaaguagaaggaagaauucaggaccuugagaaauauguugaggacacuaaaauagaucucuggucauacaacgcggagcuucuuguugcccuggagaaccaacauacaauugaucuaacugacucagaaaugaacaaacuguuugaaaaaacaaagaagcaacugagggaaaaugcugaggauaugggaaaugguuguuucaaaauauaccacaaaugugacaaugccugcauaggaucaauaagaaauggaacuuaugaccacaauguguacagggaugaagcauuaaacaaccgguuccagaucaagggaguugagcugaagucaggguacaaagauuggauccuauggauuuccuuugccauaucauguuuuuugcuuuguguugcuuuguugggguucaucaugugggccugccaaaagggcaacauuaggugcaacauuugcauuuga

SEQ ID NO: 45638 - RNA, 1701 nt, Artificial Sequence; identical to SEQ ID NO: 45636
  derived and/or modified CDS sequence (wt) from hemagglutinin__InfluenzaA__ALN39680

SEQ ID NO: 45639 - RNA, 1701 nt, Artificial Sequence; identical to SEQ ID NO: 45636
  derived and/or modified CDS sequence (wt) from hemagglutinin__InfluenzaA__ALN39681

SEQ ID NO: 45640 - RNA, 1701 nt, Artificial Sequence; identical to SEQ ID NO: 45636
  derived and/or modified CDS sequence (wt) from hemagglutinin__InfluenzaA__ALN39682

SEQ ID NO: 45641 - RNA, 1701 nt, Artificial Sequence; identical to SEQ ID NO: 45636
  derived and/or modified CDS sequence (wt) from hemagglutinin__InfluenzaA__ALN39683

SEQ ID NO: 45642 - RNA, 1701 nt, Artificial Sequence; identical to SEQ ID NO: 45636
  derived and/or modified CDS sequence (wt) from hemagglutinin__InfluenzaA__ALN39684

SEQ ID NO: 45643 - RNA, 1701 nt, Artificial Sequence; identical to SEQ ID NO: 45636
  derived and/or modified CDS sequence (wt) from hemagglutinin__InfluenzaA__ALN39685

SEQ ID NO: 45644 - RNA, 1701 nt, Artificial Sequence
  derived and/or modified CDS sequence (wt) from hemagglutinin__InfluenzaA__ALN39686
augaagacuaucauugcuuugggcuacauucuaugucuggcuuucgcucaaaaaauuccuggaaaugacaauagcacggcaacgcugugccuugggcaccaugcaguaccaaacggaacgauagugaaaacaaucacaaaugaccgaauugaaguuacuaaugcuacugagcugguucagaauuccucaauaggugaaauaugcgacaguccucauaagauccuugauggagaaaacugcacacuaauagaugcucuauugggagacccucagugugauggcuuucaaaauaagaaaugggaccuuuuuguugaacgaagcaaagccuacagcaacuguuacccuuaugaugugccggauuauaccucccuuaggucacuaguugccucauccggcacacuggaguuuaacaaugaaagcuucaauuggacuggagucacucaaaacggaacaaguucugcuugcauaaggagaucuaguaguaguuucuuuaguagauuaaauugguugacccacuuaaacuacacauacccagcauugaacgugacuaugccaaacaaugaacaauuugacaaauuguacauuugggggguucaccacccggguacggacaaggaccaaaucuuccuguaugcucaaucaucaggaagaaucacaguaucuaccaaaagaagccaacaagcuguaaucccaaauaucggaucuagacccagaauaagggauaucccuagcagaauaagcaucuauuggacaauaguaaaaccgggagacauacuuuugauuaacagcacagggaaucuaauugcuccuagggguuacuucaaaauacgaagugggaaaagcucaauaaugagaucagaugcacccauuggcaaaugcaagucugaaugcaucacuccaaauggaagcauucccaaugacaaaccauuccaaaauguaaacaggaucacauacggggccugucccagauauguuaagcauagcacucugaaauuggcaacaggaaugcgaaauguaccagagaaacaaacuagaggcauauuuggcgcaauagcggguuucauagaaaaugguugggagggaaugguggaugguugguacgguuucaggcaucaaaauucugagggaagaggacaagcagcagaucucaaaagcacucaagcagcaaucgaucaaaucaaugggaagcugaaucgauugaucgggaaaaccaacgagaaauuccaucagauugaaaaagaauucucagaaguagaaggaagaauucaggaccuugagaaauauguugaggacacuaaaauagaucucuggucauacaacgcggagcuucuuguugcccuggagaaccaacauacaauugaucuaacugacucagaaaugaacaaacuguuugaaaaaacaaagaagcaacugagggaaaaugcugaggauaugggaaaugguuguuucaaaauauaccacaaaugugacaaugccugcauaggaucaauaagaaauggaacuuaugaccacaauguguacagggaugaagcauuaaacaaccgguuccagaucaagggaguugagcugaagucaggguacaaagauuggauccuauggauuuccuuugccauaucauguuuuuugcuuuguguugcuuuguugggguucaucaugugggccugccaaaagggcaacauuaggugcaacauuugcauuuga

SEQ ID NO: 45645 - RNA, 1701 nt, Artificial Sequence; identical to SEQ ID NO: 45636
  derived and/or modified CDS sequence (wt) from hemagglutinin__InfluenzaA__ALN39687

SEQ ID NO: 45646 - RNA, 1701 nt, Artificial Sequence
  derived and/or modified CDS sequence (wt) from hemagglutinin__InfluenzaA__ALN39688
augaagacuaucauugcuuugggcuacauucuaugucugguuuucgcucaaaaaauuccuggaaaugacaauagcacggcaacgcugugccuugggcaccaugcaguaccaaacggaacgauagugaaaacaaucacaaaugaccgaauugaaguuacuaaugcuacugagcugguucagaauuccucaauaggugaaauaugcgacaguccucauaagauccuugauggagaaaacugcacacuaauagaugcucuauugggagacccucagugugauggcuuucaaaauaagaaaugggaccuuuuuguugaacgaagcaaagccuacagcaacuguuacccuuaugaugugccggauuaugccucccuuaggucacuaguugccucauccggcacacuggaguuuaacaaugaaagcuucaauuggacuggggucacucaaaacggaacaaguucugcuugcauaaggagaucuaguaguaguuucuuuaguagauuaaauugguugacccacuuaaacuacauauacccagcauugaacgugacuaugccaaacaaugaacaauuugacaaauuguacauuugggggguucaccacccggguacggacaaggaccaaaucuuccuguaugcucaaucaucaggaagaaucacaguaucuaccaaaagaagccaacaagcuguaaucccaaauaucggaucuagacccagaauaagggauaucccuagcagaauaagcaucuauuggacaauaguaaaaccgggagacauacuuuugauuaacagcacagggaaucuaauugcuccuagggguuacuucaaaauacgaagugggaaaagcucaauaaugagaucagaugcacccauuggcaaaugcaagucugaaugcaucacuccaaauggaagcauucccaaugacaaaccauuccaaaauguaaacaggaucacauacggggccugucccagauauguuaagcauagcacucugaaauuggcaacaggaaugcgaaauguaccagagaaacaaacuagaggcauauuuggcgcaauagcggguuucauagaaaaugguugggagggaaugguggaugguugguacgguuucaggcaucaaaauucugagggaagaggacaagcagcagaucucaaaagcacucaagcagcaaucgaucaaaucaaugggaagcugaaucgauugaucgggaaaaccaacgagaaauuccaucagauugaaaaagaauucucagaaguagaaggaagaauucaggaccuugagaaauauguugaggacacuaaaauagaucucuggucauacaacgcggagcuucuuguugcccuggagaaccaacauacaauugaucuaacugacucagaaaugaacaaacuguuugaaaaaacaaagaagcaacugagggaaaaugcugaggauaugggaaaugguuguuucaaaauauaccacaaaugugacaaugccugcauaggaucaaucagaaauggaacuuaugaccacaauguguacagggaugaagcauuaaacaaccgguuccagaucaagggaguugagcugaagucaggguacaaagauuggauccuauggauuuccuuugccauaucauguuuuuugcuuuguguugcuuuguugggguucaucaugugggccugccaaaagggcaacauuaggugcaacauuugcauuuga

SEQ ID NO: 45647 - RNA, 1701 nt, Artificial Sequence
  derived and/or modified CDS sequence (wt) from hemagglutinin__InfluenzaA__ALN39689
augaagacuaucauugcuuugggcuacauucuaugucugguuuucgcucaaaaaauuccuggaaaugacaauagcacggcaacgcugugccuugggcaccaugcaguaccaaacggaacgauagugaaaacaaucacaaaugaccgaauugaaguuacuaaugcuacugaacugguucagaauuccucaauaggugaaauaugcgacaguccucauaagauccuugauggagaaaacugcacacuaauagaugcucuauugggagacccucagugugauggcuuucaaaauaagaaaugggaccuuuuuguugaacgaagcaaagccuacagcaacuguuacccuuaugaugugccggauuaugccucccuuaggucacuaguugccucauccggcacacuggaguuuaacaaugaaagcuucaauuggacuggagucacucaaaacggaacaaguucugcuugcauaaggagaucuaguaguaguuucuuuaguagauuaaauugguugacccacuuaaacuacacauacccagcauugaacgugacuaugccaaacaaugaacaauuugacaaauuguacauuugggggguucaccacccggguacggacaaggaccaaaucuuccuguaugcucaaucaucaggaagaaucacaguaucuaccaaaagaagccaacaagcuguaaucccaaauaucggaucuagacccagaauaagggauaucccuagcagaauaagcaucuauuggacaauaguaaaaccgggagacauacuuuugauucacagcacagggaaucuaauugcuccuagggguuacuucaaaauacgaagugggaaaagcucaauaaugagaucagaugcacccauuggcaaaugcaagucugaaugcaucacuccaaauggaagcauucccaaugacaaaccauuccaaaauguaaacaggaucacauacggggccugucccagauauguuaagcauagcacucugaaauuggcaacaggaaugcgaaauguaccagagaaacaaacuagaggcauauuuggcgcaauagcggguuucauagaaaaugguugggagggaaugguggaugguugguacgguuucaggcaucaaaauucugagggaagaggacaagcagcagaucucaaaagcacucaagcagcaaucgaucaaaucaaugggaagcugaaucgauugaucgggaaaaccaacgagaaauuccaucagauugaaaaagaauucucagaaguagaaggaagaauucaggaccuugagaaauauguugaggacacuaaaauagaucucuggucauacaacgcggagcuucuuguugcccuggagaaccaacauacaauugaucuaacugacucagaaaugaacaaacuguuugaaaaaacaaagaagcaacugagggaaaaugcugaggauaugggaaaugguuguuucaaaauauaccacaaaugugacaaugccugcauaggaucaauaagaaauggaacuuaugaccacaauguguacagggaugaagcauuaaacaaccgguuccagaucaagggaguugagcugaagucaggguacaaagauuggauccuauggauuuccuuugccauaucauguuuuuugcuuuguguugcuuuguugggguucaucaugugggccugccaaaagggcaacauuaggugcaacauuugcauuuga

SEQ ID NO: 45648 - RNA, 1701 nt, Artificial Sequence
  derived and/or modified CDS sequence (wt) from hemagglutinin__InfluenzaA__ALN39690
augaagacuaucauugcuuugagcuacauucuaugucugguuuucgcucaaaaacuuccuggaaaugacaauagcacggcaacgcugugccuugggcaccaugcaguaccaaacggaacgauagugaaaacaaucacgaaugaccgaauugaaguuacuaaugcuacugagcugguucagaauuccucaauaggugaaauaugcgacaguccucaucagauccuugauggaaaaaacugcacacuaauagaugcucuauugggagacccucagugugauggcuuucaaaacaagaaaugggaccuuuuuguugaacgaagcaaagcccacagcaacuguuaccccuaugaugugccggauuaugccucccuuaggucacuaguugccucauccggcacacuggaguuuaacaaugaaagcuucaauugggcuggagucacucaaaacggaacaaguucuucuugcauaaggggaucuaauaguaguuucuuuaguagauuaaauugguugacccacuuaaacuccauauacccagcauuaaacgugacuaugccaaacaaugaacaauuugacaaauuguacauuugggggguucaccacccggguacggacaaggaccaaaucuuccuguaugcucaaucaucaggaagaaucacaguaucuaccaaaagaagccaacaagcuguaaucccgaauaucggaucuagacccagaauaagggauaucccuagcagaauaagcaucuauuggacaauaguaaaaccgggagacauacuuuugauuaacagcacagggaaucuaauugcuccuagggguuacuucaaaauacgaagugggaaaagcucaauaaugagaucagaugcaccuauuggcaaaugcaagucugaaugcaucacuccaaauggaagcauucccaaugacaaaccauuccaaaauguaaacaggaucacauacggggccugucccagauauguuaagcaaagcacucuaaaauuggcaacaggaaugcgaaauguaccagagagacaaacuagaggcauauuuggcgcaauagcggguuucauagaaaaugguugggagggaaugguggaugguugguacgguuucaggcaucaaaauucugagggaagaggacaagcggcagaucucaaaagcacucaagcagcaaucgaucaaaucaaugggaagcugaaucgauugaucgggaaaaccaacgagaaauuccaucagauugaaaaagaauucucagaaguagaaggaagaauucaggaccuugagaaauauguugaggacacuaaaauagaucucuggucauacaacgcggagcuucuuguugcccuggagaaccaacauacaauugaucuaacugacucagaaaugaacaaacuguuugaaaaaacaaagaagcaacugagggaaaaugcugaggauaugggaaaugguuguuucaaaauauaccacaaaugugacaaugccugcauaggaucaaucagaaauggaacuuaugaccacaauguguacagggaugaagcauuaaacaaccgguuccagaucaagggaguugagcugaagucaggguacaaagauuggauccuauggauuuccuuugccauaucauguuuuuugcuuuguguugcuuuguugggguucaucaugugggccugccaaaagggcaacauuaggugcaacauuugcauuuga

SEQ ID NO: 45649 - RNA, 1701 nt, Artificial Sequence
  derived and/or modified CDS sequence (wt) from hemagglutinin__InfluenzaA__ALN39691
augaagacuaucauugcuuugagcuacauucuaugucugguuuucgcucaaaaacuuccuggaaaugacaauagcacggcaacgcugugccuugggcaccaugcaguaccaaacggaacgauagugaaaacaaucacgaaugaccgaauugaaguuacuaaugcuacugagcugguucagaauuccucaauaggugaaauaugcgacaguccucaucagauccuugauggaaaaaacugcacacuaauagaugcucuauugggagacccucagugugauggcuuucaaaacaagaaaugggaccuuuuuguugaacgaagcaaagcccacagcaacuguuaccccuaugaugugccggauuaugccucccuuaggucacuaguugccucauccggcacacuggaguuuaacaaugaaagcuucaauugggcuggagucacucaaaacggaacaaguucuucuugcauaaggggaucuaauaguaguuucuuuaguagauuaaauugguugacccacuuaaacuccaaauacccagcauuaaacgugacuaugccaaacaaugaacaauuugacaaauuguacauuugggggguucaccacccggguacggacaaggaccaaaucuuccuguaugcacaaccaucaggaagaaucacaguaucuaccaaaagaagccaacaagcuguaaucccgaauaucggaucuagacccagaauaagggauaucccuagcagaauaagcaucuauuggacaauaguaaaaccgggagacauacuuuugauuaacagcacagggaaucuaauugcuccuagggguuacuucaaaauacgaagugggaaaagcucaauaaugagaucagaugcaccuauuggcaaaugcaagucugaaugcaucacuccaaauggaagcauucccaaugacaaaccauuccaaaauguaaacaggaucacauacggggccugucccagauauguuaagcaaagcacucuaaaauuggcaacaggaaugcgaaauguaccagagaaacaaacuagaggcauauuuggcgcaauagcggguuucauagaaaaugguugggagggaaugaaggaugguugguacggcuucaggcaucaaaauucugagggaagaggacaagcggcagaucucaaaagcacucaagcagcaaucgaucaaaucaaugggaagcugaaucgauugaucgggaaaaccaacgagaaauuccaucagauugaaaaagaauucucagaaguagaagggagaauucaggaccuugagaaauauguugaggacacaaaaauagaucucuggucauacaacgcggagcuucuuguugcccuggagaaccaacauacaauugaucuaacugacucagaaaugaacaaacuguuugaaaaaacaaagaagcaacugagggaaaaugcugaggauaugggcaaugguuguuucaaaauauaccacaaaugugacaaugccugcauaggaucaaucagaaauggaacuuaugaccacgauguauacagggaugaagcuuuaaacaaccgguuccagaucaagggaguugagcugaagucaggguacaaagauuggauccuauggauuuccuuugccauaucauguuuuuugcuuuguguugcuuuguugggguucaucaugugggccugccaaaagggcaacauuaggugcaacauuugcauuuga

SEQ ID NO: 45650 - RNA, 1701 nt, Artificial Sequence
  derived and/or modified CDS sequence (wt) from hemagglutinin__InfluenzaA__ALN39692
augaagacuaucauugcuuugggcuacauucuaugucugguuuucgcucaaaaaauuccuggaaaugacaauagcacggcaacgcugugccuugggcaccaugcaguaccaaacggaacgauagugaaaacaaucacaaaugaccgaauugaaguuacuaaugcuacugaacugguucagaauuccucaauaggugaaauaugcgacaguccucauaagauccuugauggagaaaacugcacacuaauagaugcucuauugggagacccucagugugauggcuuucaaaauaagaaaugggaccuuuuuguugaacgaagcaaagccuacagcaacuguuacccuuaugaugugccggauuaugccucccuuaggucacuaguugccucauccggcacacuggaguuuaacaaugaaagcuucaauuggacuggagucacucaaaacggaacaaguucugcuugcauaaggagaucuaguaguaguuucuuuaguagauuaaauugguugacccacuuaaacuacacauacccagcauugaacgugacuaugccaaacaaugaacaauuugacaaauuguacauuugggggguucaccacccggguacggacaaggaccaaaucuuccuguaugcucaaucaucaggaagaaucacaguaucuaccaaaagaagccaacaagcuguaaucccaaauaucggaucuagacccagaauaagggauaucccuagcagaauaagcaucuauuggacaauaguaaaaccgggagacauacuuuugauuaacagcacagggaaucuaauugcuccuagggguuacuucaaaauacgaagugggaaaagcucaauaaugagaucagaugcacccauuggcaaaugcaagucugaaugcaucacuccaaauggaagcauucccaaugacaaaccauuccaaaauguaaacaggaucacauacggggccugucccagauauguuaagcauagcacucugaaauuggcaacaggaaugcgaaauguaccagagaaacaaacuagaggcauauuuggcgcaauagcggguuucauagaaaaugguugggagggaaugguggaugguugguacgguuucagacaucaaaauucugagggaagaggacaagcagcagaucucaaaagcacucaagcagcaaucgaucaaaucaaugggaagcugaaucgauugaucgggaaaaccaacgagaaauuccaucagauugaaaaagaauucucagaaguagaaggaagaauucaggaccuugagaaauauguugaggacacuaaaauagaucucuggucauacaacgcggagcuucuuguugcccuggagaaccaacauacaauugaucuaacugacucagaaaugaacaaacuguuugaaaaaacaaagaagcaacugagggaaaaugcugaggauaugggaaaugguuguuucaaaauauaccacaaaugugacaaugccugcauaggaucaauaagaaauggaacuuaugaccacaauguguacagggaugaagcauuaaacaaccgguuccagaucaagggaguugagcugaagucaggguacaaagauuggauccuauggauuuccuuugccauaucauguuuuuugcuuuguguugcuuuguugggguucaucaugugggccugccaaaagggcaacauuaggugcaacauuugcauuuga

SEQ ID NO: 45651 - RNA, 1701 nt, Artificial Sequence; identical to SEQ ID NO: 45636
  derived and/or modified CDS sequence (wt) from hemagglutinin__InfluenzaA__ALN39693

SEQ ID NO: 45652 - RNA, 1701 nt, Artificial Sequence; identical to SEQ ID NO: 45636
  derived and/or modified CDS sequence (wt) from hemagglutinin__InfluenzaA__ALN39694

SEQ ID NO: 45653 - RNA, 1701 nt, Artificial Sequence; identical to SEQ ID NO: 45636
  derived and/or modified CDS sequence (wt) from hemagglutinin__InfluenzaA__ALN39695

SEQ ID NO: 45654 - RNA, 1701 nt, Artificial Sequence; identical to SEQ ID NO: 45636
  derived and/or modified CDS sequence (wt) from hemagglutinin__InfluenzaA__ALN39696

SEQ ID NO: 45655 - RNA, 1701 nt, Artificial Sequence
  derived and/or modified CDS sequence (wt) from hemagglutinin__InfluenzaA__ALN39697
augaagacuaucauugcuuugagcuacauucuaugucugguuuucgcucaaaagcuuccugaaaaugacaauagcacggcaacgcugugccuugggcaccaugcaguaccaaacggaacgauagugaaaacaaucacgagugaccgaauugaaguuacuaaugcuacugagcugguucagaauuccucaauaggugaaauaugcgacaguccucaucagauccuugauggaaaaaacugcacacuaauagaugcucuauugggagacccucagugugauggcuuucaaaauaagaaaugggaccuuuuuguugaacgaagcaaagccuacagcaacuguuacccuuaugaugugccggauuaugccucccuuaggucacuaguugccucauccgguacacuggaguuuaacgaugaaagcuucaauugggcuggagucacucaaaacggaacaaguucugcuugcauaaggggaucuaauaguaguuucuuuaguagauuaaauugguugacccacucaaacuucaaauacccagcacugaacgugacuaugccaaacaaugaacaauuugacaaauuguacauuugggggguucaccacccggguacggacaaggaccaaaucuuccuguaugcucaaucaucaggaagaaucacaguauccaccaaaagaagccaacaagcuguaaucccgaauaucggaucuagacccagaauaaggaauaucccuagcagaauaagcaucuauuggacaauaguaaaaccgggagacauacuuuugauuaacagcacagggaaucuaauugcuccuagggguuacuucaaaauacgaagugggaaaagcucaauaaugagaucagaugcacccauuggcaaaugcaagucugaaugcaucacuccaaauggaagcauucccaaugacaaaccauuccaaaauguaaacaggaucacauacggggccugucccagauauguuaagcaaagcacucugaaauuggcaacaggaaugcgaaauguaccagagaaacaaacuagaggcauauuuggcgcaauagcggguuucauagaaaaugguugggagggaaugaaggaugguugguacgguuucaggcaucaaaauucugagggaagaggacaagcagcagaucucaaaagcacucaagcagcaaucgaucaaaucaaugggaagcugaaucgauugaucgggaaaaccaacgagaaauuccaucagauugaaaaagaauucucagaaguagaagggagaauucaggaccuugagaaauauguugaggacacaaaaauagaucucuggucauacaacgcggagcuucuuguugcccuggagaaccaacauacaauugaucuaacugacucagaaaugaacaaacuguuugaaaaaacaaagaagcaacugagggaaaaugcugaggauaugggcaaugguuguuucaaaauauaccacaaaugugacaaugccugcauaggaucaaucagaaauggaacuuaugaccacgauguauacagggaugaagcuuuaaacaaccgguuccagaucaagggaguugagcugaagucaggguacaaagauuggauccuauggauuuccuuugccauaucauguuuuuugcuuuguguugcuuuguugggguucaucaugugggccugccaaaagggcaacauuaggugcaacauuugcauuuga

SEQ ID NO: 45656 - RNA, 1701 nt, Artificial Sequence
  derived and/or modified CDS sequence (wt) from hemagglutinin__InfluenzaA__ALN39698
augaagacuaucauugcuuugagccacauucuaugucugguuuucgcucaaaaaauuccuggaaaugacaauagcacggcaacgcugugccuugggcaccaugcaguaccaaacggaacgauagugaaaacaaucacaaaugaccgaauugaaguuacuaaugcuacugagcugguucagaauuccucaauaggugaaauaugcgacaguccucaucagauccuugauggagaaaacugcacacuaauagaugcucuauugggagacccucagugugauggcuuucaaaauaagaaaugggaccuuuuuguugaacgaagcaaagccuacagcaacuguuacccuuaugaugugccggauuaugccucccuuaggucacuaguugccucauccggcacacuggaguuuaacaaugaaagcuucaauuggacuggagucacucaaaacggaacaaguucugcuugcauaaggagaucuaguaguaguuucuuuaguagauuaaauugguugacccacuuaaacuacacauacccagcauugaacgugacuaugccaaacaaugaacaauuugacaaauuguacauuugggggguucaccacccggguacggacaaggaccaaaucuuccuguaugcucaaucaucaggaagaaucacaguaucuaccaaaagaagccaacaagcuguaaucccaaauaucggaucuagacccagaauaagggauaucccuagcagaauaagcaucuauuggacaauaguaaaaccaggagacauacuuuugauuaacagcacagggaaucuaauugcuccuagggguuacuucaaaauacgaagugggaaaagcucaauaaugagaucagaugcacccauuggcaaaugcaagucugaaugcaucacuccaaauggaagcauucccaaugacaaaccauuccaaaauguaaacaggaucacauacggggccugucccagauauguuaagcauagcacucugaaauuggcaacaggaaugcgaaauguaccagagaaacaaacuagaggcauauuuggcgcaauagcggguuucauagaaaaugguugggagggaaugauggaugguugguacgguuucaggcaucaaaauucugagggaagaggacaagcagcagaucucaaaagcacucaagcagcaaucgaucaaaucaaugggaagcugaaucgauugaucgggaaaaccaacgagaaauuccaucagauugaaaaagaauucucagaaguagaaggaagaauucaggaccuugagaaauauguugaggacacuaaaauagaucucuggucauacaacgcggagcuucuuguugcccuggagaaccaacauacaauugaucuaacugacucagaaaugaacaaacuguuugaaaaaacaaagaagcaacugagggaaaaugcugaggauaugggaaaugguuguuucaaaauauaccacaaaugugacaaugccugcaugggaucaauaagaaauggaacuuaugaccacaauguguacaggaaugaagcauuaaacaaccgguuccagaucaagggaguugagcugaagucaggguacaaagauuggauccuauggauuuccuuugccauaucauguuuuuugcuuuguguugcuuuguugggguucaucaugugggccugccaaaagggcaacauuaggugcaacauuugcauuuga

SEQ ID NO: 45657 - RNA, 1701 nt, Artificial Sequence
  derived and/or modified CDS sequence (wt) from hemagglutinin__InfluenzaA__ALN39700
augaagacuaucauugccuugagcuacauucuaugucugguuuucgcucaaaaaauuccuggaaaugacaauagcacggcaacgcugugccuugggcaccaugcaguaccaaacggaacgauagugaaaacaaucacaaaugaccgaauugaaguuacuaaugcuacugagcugguucagaauuccucaauaggugaaauaugcgacaguccucaucagauccuugauggagaaaacugcacacuaauagaugcucuauugggagacccucagugugauggcuuucaaaauaagaaaugggaccuuuuuguugaacgaagcaaagccuacagcaacuguuacccuuaugaugugccggauuaugccucccuuaggucacuaguugccucauccggcacacuggaguuuaacaaugaaagcuucaauuggacuggagucacucaaaacggaacaaguucugcuugcauaaggagaucuaguaguaguuucuuuaguagauuaaauugguugacccacuuaaacuacacauauccagcauugaacgugacuaugccaaacaaugaacaauuugacaaauuguacauuugggggguucaccacccggguacggacaaggaccaaaucuuccuguaugcucaaucaucaggaagaaucacaguaucuaccaaaagaagccaacaagcuguaaucccaaauaucggaucuagacccagaauaagggauaucccuagcagaauaagcaucuauuggacaauaguaaaaccgggagacauacuuuugauuaacagcacagggaaucuaauugcuccuagggguuacuucaaaauacgaagugggaaaagcucaauaaugagaucagaugcacccauuggcaaaugcaagucugaaugcaucacuccaaauggaagcauucccaaugacaaaccauuccaaaauguaaacaggaucacauacggggccugucccagauauguuaagcauagcacucugaaauuggcaacaggaaugcgaaauguaccagagaaacaaacuagaggcauauuuggcgcaauagcggguuucauagaaaaugguugggagggaaugguggaugguugguacgguuucaggcaucaaaauucugagggaagaggacaagcagcagaucucaaaagcacucaagcagcaaucgaucaaaucaaugggaagcugaaucgauugaucgggaaaaccaacgagaaauuccaucagauugaaaaagaauucucagaaguagaaggaagaauucaggaccuugagaaauauguugaggacacuaaaauagaucucuggucauacaacgcggagcuucuuguugcccuggagaaccaacauacaauugaucuaacugacucagaaaugaacaaacuguuugaaaaaacaaagaagcaacugagggaaaaugcugaggauaugggaaaugguuguuucaaaauauaccacaaaugugacaaugccugcauaggaucaauaagaaauggaacuuaugaccacaauguguacagggaugaagcauuaaacaaccgguuccagaucaagggaguugagcugaagucaggguacaaagauuggauccuauggauuuccuuugccauaucauguuuuuugcuuuguguugcuuuguugggguucaucaugugggccugccaaaagggcaacauuaagugcaacauuugcauuuga

SEQ ID NO: 45658 - RNA, 1701 nt, Artificial Sequence
  derived and/or modified CDS sequence (wt) from hemagglutinin__InfluenzaA__ALN39701
augaagacuaucauugcuuugagcuacauucuaugucugguuuucgcucaaaaaauuccuggaaaugacaauagcacggcaacgcugugccuugggcaccaugcaguaccaaacggaacgauagugaaaacaaucacaaaugaccgaauugaaguuacuaaugcuacugaguugguucagaauuccucaauaggugaaauaugcgacaguccucaucagauccuugauggagaaaacugcacacuaauagaugcucuauugggagacccucagugugauggcuuucaaaauaagaaaugggaccuuuuuguugaacgaagcaaagccuacagcaacuguuacccuuaugaugugccggauuaugccucccuuaggucacuaguugccucauccggcacacuggaguuuaacaaugaaagcuucaauuggacuggagucacucaaaacggaacaaguucugcuugcauaaggagaucuaguaguaguuucuuuaguagauuaaauugguugacccacuuaaacuacacauacccagcauugaacgugacuaugccaaacaaugaacaauuugacaaauuguacauuugggggguucaccacccggguacggacaaggaccaaaucuuccuguaugcucaaucaucaggaagaaucacaguaucuaccaaaagaagccaacaagcuguaaucccaaauaucggaucuagacccagaauaagggauaucccuagcagaauaagcaucuauuggacaauaguaaaaccgggagacauacuuuugauuaacagcacagggaaucuaauugcuccuagggguuacuuuaaaauacuaagugggaaaagcucaauaaugagaucagaugcacccauuggcaaaugcaagucugaaugcaucacuccaaauggaagcauucccaaugacaaaccauuccaaaauguaaacaggaucacauacggggccugucccagauauguuaagcauagcacucugaaauuggcaacaggaaugcgaaauguaccagagaaacaaacuagaggcauauuuggcgcaauagcggguuucauagaaaaugguugggaaggaaugguggaugguugguacgguuucaggcaucaaaauucugagggaagaggacaagcagcagaucucaaaagcacucaagcagcaaucgaucaaaucaaugggaagcugaaucgguugaucgggaaaaccaacgagaaauuccaucagauugaaaaagaauucucagaaguagaaggaagaauucaggaccuugagaaauauguugaggacacuaaaauagaucucuggucauauaacgcggagcuucuuguugcccuggagaaccaacauacaauugaucuaacugacucagaaaugaacaaacuguuugaaaaaacaaagaagcaacugagggaaaaugcugaggauaugggaaaugguuguuucaaaauauaccacaaaugugacaaugccugcauaggaucaauaagaaauggaacuuaugaccacaauguguacagggaugaagcauuaaacaaccgguuccagaucaaggggguugagcugaagucaggguacaaagauuggauccuauggauuuccuuugccauaucauguuuuuugcuuuguguugcuuuguugggguucaucaugugggccugccaaaagggcaacauuaggugcaacauuugcauuuga

SEQ ID NO: 45659 - RNA, 1701 nt, Artificial Sequence
  derived and/or modified CDS sequence (wt) from hemagglutinin__InfluenzaA__ALN39702
augaagacuaucauugcuuugagcuacauucuaugucugguuuucgcucaaaaaauuccuggaaaugacaauagcacggcaacgcugugccuugggcaccaugcaguaccaaacggaacgauagugaaaacaaucacaaaugaccgaauugaaguuacuaaugcuacugagcugguucagaauuccucaauaggugaaauaugcgacaguccucaucagauccuugauggagaaaacugcacacuaauagaugcucuauugggagacccucagugugauggcuuucaaaauaagaaaugggaccuuuuuguugaacgaagcaaagccuacagcaacuguuacccuuaugaugugccggauuaugccucccuuaggucacuaguugccucauccggcacacuggaguuuaacaaugaaagcuucaauuggacuggagucacucaaaacggaacaaguucugcuugcauaaggaaaucuaguaguaguuucuuuaguagauuaaauugguugacccacuuaaacuacacauacccagcauugaacgugacuaugccaaacaaugaacaauuugacaaauuguacauuugggggguucaccacccggguacggacaaggaccaaaucuuccuguaugcucgaucaucaggaagaaucacaguaucuaccaaaagaagccaacaagcuguaaucccaaauaucggaucuagacccagaauaagggauaucccuagcagaauaagcaucuauuggacaauaguaaaaccgggagacauacuuuugauuaacagcacagggaaucuaauugcuccuagggguuacuucaaaauacgaagugggaaaagcucaauaaugagaucagaugcacccauuggcaaaugcaagucugaaugcaucacuccaaauggaagcauucccaaugacaaaccauuccaaaauguaaacaggaucacauacggggccugucccagauauguuaagcauagcacucugaaauuggcaacaggaaugcgaaauguaccagagaaacaaacuagaggcauauuuggcgcaauagcggguuucauagaaaaugguugggagggaaugguggaugguugguacgguuucaggcaucaaaauucugaggggagaggacaagcagcagaucucaaaagcacucaagcagcaaucgaucaaaucaaugggaagcugaaucgauugaucgggaaaaccaacgagaaauuccaucagauugaaaaagaauucucagaaguagaaggaagaauucaggaccuugagaaauauguugaggacacuaaaauagaucucuggucauacaacgcggagcuucuuguugcccuggagaaucaacauacaauugaucuaacugacucagaaaugaacaaacuauuugaaaaaacaaagaagcaacugagggaaaaugcugaggauaugggaaaugguuguuucaaaauauaccacaaaugugacaaugccugcauaggaucaauaagaaauggaacuuaugaccacaauguguacagggaugaagcauuaaacaaccgguuccagaucaagggaguugagcugaagucaggguacaaagauuggauccuauggauuuccuuugccauaucauguuuuuugcuuuguguugcuuuguugggguucaucaugugggccugccaaaagggcaacauuaggugcagcauuugcauuuga

SEQ ID NO: 45660 - RNA, 1701 nt, Artificial Sequence
  derived and/or modified CDS sequence (wt) from hemagglutinin__InfluenzaA__ALN39703
augaagacuaucauugccuugagcuacauucuaugucugguuuucgcucaaaaaauuccuggaaaugacgauagcacggcaacgcugugccuugggcaccaugcaguaccaaacggaacgauagugaaaacaaucacaaaugaccgaauugaaguuacuaaugcuacugagcugguucagaauuccucaauaggugaaauaugcgacaguccucaucagauccuugauggagaaaacugcacacuaauagaugcucuauugggagacccucagugugauggcuuucaaaauaagaaaugggaccuuuuuguugaacgaagcaaagccuacagcaacuguuacccuuaugaugugccggauuaugccucccuuaggucacuaguugccucauccggcacacuggaguuuaacaaugaaagcuucaauuggacuggagucacucaaaacggaacaaguucugcuugcauaaggagaucuaguaguaguuucuuuaguagauuaaauugguugacccacuuaaacuacacauacccagcauugaacgugacuaugccaaacaaugaacaauuugacaaauuguacauuugggggguucaccacccggguacggacaaggaccaaaucuuccuguaugcucaaucaucaggaagaaucacaguaucuaccaaaagaagccaacaagcuguaaucccaaauaucggaucuagacccagaauaagggauaucccuagcagaauaagcaucuauuggacaauaguaaaaccgggagacauacuuuugauuaacagcacagggaaucuaauugcuccuagggguuacuucaaaauacgaagugggaaaagcucaauaaugagaucagaugcacccauuggcaaaugcaagucugaaugcaucacuccaaauggaagcauucccaaugacaaaccauuccaaaauguaaacaggaucacauacggggccugucccagauauguuaagcauagcacucugaaauuggcaacaggaaugcgaaauguaccagagaaacaaacuagaggcauauuuggcgcaauagcggguuucauagaaaaugguugggagggaaugguggaugguugguacgguuucaggcaucaaaauucugagggaagaggacaagcagcagaucucaaaagcacucaagcagcaaucgaucaaaucaaugggaagcugaaucgauugaucgggaaaaccaacgagaaauuccaucagauugaaaaagaauucucagaaguagaaggaagaauucaggaccuugagaaauauguugaggacacuaaaauagaucucuggucauacaacgcggagcuucuuguugcccuggagaaccaacauacaauugaucuaacugacucagaaaugaacaaacuguuugaaaaaacaaagaagcaacugagggaaaaugcugaggauaugggaaaugguuguuucaaaauauaccacaaaugugacaaugccugcauaggaucaauaagaaauggaacuuaugaccacaauguguacagggaugaagcauuaaacaaccgguuccagaucaagggaguugagcugaagucaggguacaaagauuggauccuauggauuuccuuugccauaucauguuuuuugcuuuguguugcuuuguugggguucaucaugugggccugccaaaagggcaacauuaggugcaacauuugcauuuga

SEQ ID NO: 45661 - RNA, 1701 nt, Artificial Sequence
  derived and/or modified CDS sequence (wt) from hemagglutinin__InfluenzaA__ALN39704
augaagacuaucauugcuuugagcuacauucuaugucugguuuucgcucaaaaaauuccuggaaaugacaauagcacggcaacgcugugccuugggcaccaugcaguaccaaacggaacgauagugaaaacaaucacaaaugaccgaauugaaguuacuaaugcuacugaguugguucagaauuccucaauaggugaaauaugcgacaguccucaucagauccuugauggagaaaacugcacacuaauagaugcucuauugggagacccucagugugauggcuuucaaaauaagaaaugggaccuuuuuguugaacgaagcaaagccuacagcaacuguuacccuuaugaugugccagauuaugccucccuuaggucacuaguugccucauccggcacacuggaguuuaacaaugaaagcuucaauuggacuggagucacucaaaacggaacaaguucugcuugcauaaggagaucuaguaguaguuucuuuaguagauuaaauugguugacccacuuaaacuacacauacccagcauugaacgugacuaugccaaacaaugaacaauuugacaaauuguacauuugggggguucaccacccggguacggacaaggaccaaaucuuccuguaugcucaaucaucaggaagaaucacaguaucuaccaaaagaagccaacaagcuguaaucccaaauaucggaucuagacccagaauaagggauaucccuagcagaauaagcaucuauuggacaauaguaaagccgggagacauacuuuugauuaacagcacagggaaucuaauugcuccuagggguuacuucaaaauacuaagugggaaaagcucaauaaugagaucagaugcacccauuggcaaaugcaagucugaaugcaucacuccaaauggaagcauucccaaugacaaaccauuccaaaauguaaacaggaucacauacggggccugucccagauauguuaagcauagcacucugaaauuggcaacaggaaugcgaaauguaccagagaaacaaacuagaggcauauuuggcgcaauagcggguuucauagaaaaugguugggaaggaaugguggaugguugguacgguuucaggcaucaaaauucugagggaagaggacaagcagcagaucucaaaagcacucaagcagcaaucgaucaaaucaaugggaagcugaaucgguugaucgggaaaaccaacgagaaauuccaucagauugaaaaagaauucucagaaguagaaggaagaauucaggaccuugagaaauauguugaggacacuaaaauagaucucuggucauauaacgcggagcuucuuguugcccuggagaaccaacauacaauugaucuaacugacucagaaaugaacaaacuguuugaaaaaacaaagaagcaacugagggaaaaugcugaggauaugggaaaugguuguuucaaaauauaccacaaaugugacaaugccugcauaggaucaauaagaaauggaacuuaugaccacaauguguacagggaugaagcauuaaacaaccgguuccagaucaaggggguugagcugaagucaggguacaaagauuggauccuauggauuuccuuugccauaucauguuuuuugcuuuguguugcuuuguugggguucaucaugugggccugccaaaagggcaacauuaggugcaacauuugcauuuga

SEQ ID NO: 45662 - RNA, 1701 nt, Artificial Sequence
  derived and/or modified CDS sequence (wt) from hemagglutinin__InfluenzaA__ALN39705
augaagacuaucauugcauugagcuacauucuaugucugguuuucgcucaaaaaauuccuggaaaugacaauagcacggcaacgcugugccuugggcaccaugcaguaccaaacggaacgauagugaaaacaaucacaaaugaccgaauugaaguuacuaaugcuacugagcugguucagaauuccucaauaggugaaauaugcgacaguccucaucagauccuugauggagaaaacugcacacuaauagaugcucuauugggagacccucagugugauggcuuucaaaauaagaaaugggaccuuuuuguugaacgaagcaaagccuacagcaacuguuacccuuaugaugugccggauuaugccucccuuaggucacuaguugccucauccggcacacuggaguuuaacaaugaaagcuucaauuggacuggagucacucaaaacggaacaaguucugcuugcauaaggagaucuaguaguaguuucuuuaguagauuaaauugguugacccacuuaaacuacacauacccagcauugaacgugacuaugccaaacaaugaacaauuugacaaauuguacauuugggggguucaccacccggguacggacaaggaccaaaucuuccuguaugcucaaucaucaggaagaaucacaguaucuaccaaaagaagccaacaagcuguaaucccaaauaucggaucuagacccagaauaagggauaucccuagcagaauaagcaucuauuggacaauaguaaaaccgggagacauacuuuugauuaacagcacagggaaucuaauugcuccuagggguuacuucaaaauacgaagugggaaaagcucaauaaugagaucagaugcacccauuggcaaaugcaagucugaaugcaucacuccaaauggaagcauucccaaugacaaaccauuccaaaauguaaacaggaucacauacggggccugucccagauauguuaagcauagcacucugaaauuggcaacaggaaugcgaaauguaccagagaaacaaacuagaggcauauuuggcgcaauagcggguuucauagaaaaugguugggagggaaugguggaugguugguacgguuucaggcaucaaaauucugagggaagaggacaagcagcagaucucaaaagcacucaagcagcaaucgaucaaaucaaugggaagcugaaucgauugaucgggaaaaccaacgagaaauuccaucagauugaaaaagaauucucagaaguagaaggaagaauucaggaccuugagaaauauguugaggacacuaaaauagaucucuggucauacaacgcggagcuucuuguugcccuggagaaccaacauacaauugaucuaacugacucagaaaugaacaaacuguuugaaaaaacaaagaagcaacugagggaaaaugcugaggauaugggaaaugguuguuucaaaauauaccacaaaugugacaaugccugcauaggaucaauaagaaauggaacuuaugaccacaauguguacagggaugaagcauuaaacaaccgguuccagaucaagggaguugagcugaagucaggguacaaagauuggauccuauggauuuccuuugccauaucauguuuuuugcuuuguguugcuuuguugggguucaucaugugggccugccaaaagggcaacauuaggugcaacauuugcauuuga

SEQ ID NO: 45663 - RNA, 1701 nt, Artificial Sequence
  derived and/or modified CDS sequence (wt) from hemagglutinin__InfluenzaA__ALN39706
augaagacuaucauugcuuugagcuacauucuaugucugguuuucgcucaaaaacuuccuggaaaugacaauagcacggcaacgcugugccuugggcaccaugcaguaccaaacggaaugauagugaaaacaaucacgaaugaccgaauugaaguuacuaaugcuacugagcugguucagaauuccucaauaggugaaauaugcgacaguccucaucagauccuugauggaaaaaacugcacucuaauagaugcucuauugggagacccucagugugaugacuuucaaaauaagagaugggaccuuuuuguugaacgaagcaaagccuacagcaacuguuacccuuaugaugugccggauuaugccucccuuaggucacuaguugccucauccggcacacuggaguuuaacgaugaaagcuucaauugggcuggagucacucaaaacggaacaaguucugcuugcauaaggggaucuaauaguaguuucuuuaguagauuaaauugguugacccacucaaacuucaaauacccagcauugaacgugacuaugccaaacaaugaacaauuugacaaauuguacauuugggggguucaccacccggguacagacaaggaccaaaucuuccuguacgcucaaucaucaggaagaaucacaguaucuaccaaaagaagccaacaagcuguaaucccgaauaucggaucuagacccagaauaaggaauaucccuagcagaauaagcaucuauuggacaauaguaaaaccgggagacauacuuuugauuaacagcacagggaaucuaauugcuccuagggguuacuucaaaauacaaagugggaaaagcucaauaaugagaucagaugcacccauuggcaaaugcaagucugaaugcaucacuccaaauggaagcauucccaaugacaaaccauuccaaaauguaaacaggaucacauacggggccugucccagauauguuaagcaaagcacucugaaauuggcaacaggaaugcgaaauguaccagagaaacaaacuagaggcauauuuggcgcaauagcggguuucauagaaaaugguugggagggaaugaaggaugguugguacgguuucaggcaucaaaauucugagggaagaggacaagcagcagaucucaaaagcacucaagcagcaaucgaucaaaucaaugggaagcugaaucgauugaucgggaaaaccaacgagaaauuccaucagauugaaaaagaauucucagaaguagaagggagaauucaggaccuugagaaauauguugaggacacaaaaauagaucucuggucauacaacgcggagcuucuuguugcccuggagaaccaacauacaauugaucuaacugacucagaaaugaacaaacuguuugaaaaaacaaagaagcaacugagggaaaaugcugaggauaugggcaaugguuguuucaaaauauaccacaaaugugacaaugccugcauaggaucaaucagaaauggaacuuaugaccacgauguauacagggaugaagcuuuaaacaaccgguuccagaucaagggaguugagcugaagucaggguacaaagauuggauccuauggauuuccuuugccauaucauguuuuuugcuuuguguugcuuuguugggguucaucaugugggccugccaaaagggcaacauuaggugcaacauuugcauuuga

SEQ ID NO: 45664 - RNA, 1701 nt, Artificial Sequence
  derived and/or modified CDS sequence (wt) from hemagglutinin__InfluenzaA__ALN39707
augaagacuaucauugcuuugagcuacauucuaugucugguuuucgcucaaaaaauuccuggaaaugacaauagcacggcaacgcugugccuugggcaccaugcaguaccaaacggaacgauagugaaaacaaucacaaaugaccgaauugaaguuacuaaugcuacugaguugguucagaauuccucaauaggugaaauaugcgacaguccucaucagauccuugauggagaaaacugcacacuaauagaugcucuauugggagacccucagugugauggcuuucaaaauaagaaaugggaccuuuuuguugaacgaagcaaagccuacagcaacuguuacccuuaugaugugccggauuaugccucccuuaggucacuaguugccucauccggcacacuggaguuuaacaaugaaagcuucaauuggacuggagucacucaaaacggaacaaguucugcuugcauaaggagaucuaguaguaguuucuuuaguagauuaaauugguugacccacuuaaacuacacauacccagcauugaacgugacuaugccaaacaaugaacaauuugacaaauuguacauuugggggguucaccacccggguacggacaaggaccaaaucuuccuguaugcucaaucaucaggaagaaucacaguaucuaccaaaagaagccaacaagcuguaaucccaaauaucggaucuagacccagaauaagggauaucccuagcagaauaagcaucuauuggacaauaguaaaaccgggagacauacuuuugauuaacagcacagggaaucuaauugcuccuagggguuacuucaaaauacgaagugggaaaagcucaauaaugagaucagaugcacccauuggcaaaugcaagucugaaugcaucacuccaaauggaagcauucccaaugacaaaccauuccaaaauguaaacaggaucacauacggggccugucccagauauguuaagcauagcacucugaaauuggcaacaggaaugcgaaauguaccagagaaacaaacuagaggcauauuuggcgcaauagcggguuucauagaaaaugguugggagggaaugguggaugguugguacgguuucaggcaucaaaauucugaaggaagaggacaagcagcagaucucaaaagcacucaagcagcaaucgaucaaaucaaugggaagcugaaucgguugaucgggaaaaccaacgagaaauuccaucagauugaaaaagaauucucagaaguagaaggaagaauucaggaccuugagaaauauguugaggacacuaaaauagaucucuggucauauaacgcggagcuucuuguugcccuggagaaccaacauacaauugaucuaacugacucagaaaugaacaaacuguuugaaaaaacaaagaagcaacugagggaaaaugcugaggauaugggaaaugguuguuucaaaauauaccacaaaugugacaaugccugcauaggaucaauaagaaauggaacuuaugaccacaauguguacagggaugaagcauuaaacaaccgguuccagaucaaggggguugagcugaagucaggguacaaagauuggauccuauggauuuccuuugccauaucauguuuuuugcuuuguguugcuuuguugggguucaucaugugggccugccaaaagggcaacauuaggugcaacauuugcauuuga

SEQ ID NO: 45665 - RNA, 1701 nt, Artificial Sequence; identical to SEQ ID NO: 45059
  derived and/or modified CDS sequence (wt) from hemagglutinin__InfluenzaA__ALN39708

SEQ ID NO: 45666 - RNA, 1701 nt, Artificial Sequence
  derived and/or modified CDS sequence (wt) from hemagglutinin__InfluenzaA__ALN39709
augaagacuaucauugcuuugagcuacauucuaugucugguuuucgcucaaaaacuuccuggaaaugacaauagcacggcaacgcugugccuugggcaccaugcaguaccaaacggaacgauagugaaaacaaucacgaaugaccgaauugaaguuacuaaugcuacugagcugguucagaauucuucaauaggugaaauaugcgacaguccucaucagauccuugauggagaaaacugcacacuaauugaugcucuauugggagacccucagugugauggcuuucaaaacaagaaaugggaccuuuuuguugaacgaagcaaagccuacagcaacuguuacccuuaugaugugccggauuaugccucccuuaggucacuaguugccucauccggcacacuggaguuuaacaaugaaagcuucaauugggcuggagucacucaaaacggaacaaguucuucuugcaugaggggaucuaauaguaguuuuuuuaguagauuaaauugguugacccacuuaaacuccaaauacccagcauuaaacgugacuaugccaaacaaugaacaauuugacaaauuguacauuugggggguucaccacccggguacggacaaggaccaaaucuuccuguaugcacaaucaucaggaagaaucacaguaucuaccaaaagaagccaacaagcuguaaccccgaauaucggaucuagacccagaauaagggauaucccuagcagaauaagcaucuauuggacaauaguaaaaccgggagacauacuuuugauuaacagcacagggaaucuaauugcuccuagggguuacuucaaaauacgaagugggaaaagcucaauaaugagaucagaugcacccauuggcaaaugcaagucugaaugcaucacuccaaauggaagcauucccaaugacaaaccauuccaaaauguaaacaggaucacauacggggccugucccagauauguuaagcaaagcacucugaaauuggcaacaggaaugcgaaauguaccagagagacaaacuagaggcauauuuggcgcaauagcggguuucauagaaaaugguugggagggaaugguggaugguugguacggcuucaggcaucaaaauucugagggaagaggacaagcagcagaucucaaaagcacucaagcagcaaucgaucaaaucaaugggaagcugaaucgauugaucgggaaaaccaacgagaaauuccaucagauugaaaaagaauucucagaaguagaagggagaauucaggaccuugagaaauauguugaggacacaaaaauagaucucuggucauacaacgcggagcuucuuguugcccuggagaaccaacauacaauugaucuaacugacucagaaaugaacaaacuguuugaaaaaacaaagaagcaacugagggaaaaugcugaggauaugggcaaugguuguuucaaaauauaccacaaaugugacaaugccugcauaggaucaaucagaaauggaaccuaugaccacgauguauacagggaugaagcauuaaacaaccgguuccagaucaagggaguugagcugaagucaggguacaaagauuggauccuauggauuuccuuugccauaucauguuuuuugcuuuguguugcuuuguugggguucaucaugugggccugccaaaagggcaacauuaggugcaacauuugcauuuga

SEQ ID NO: 45667 - RNA, 1701 nt, Artificial Sequence; identical to SEQ ID NO: 45383
  derived and/or modified CDS sequence (wt) from hemagglutinin__InfluenzaA__ALN39710

SEQ ID NO: 45668 - RNA, 1701 nt, Artificial Sequence; identical to SEQ ID NO: 45059
  derived and/or modified CDS sequence (wt) from hemagglutinin__InfluenzaA__ALN39711

SEQ ID NO: 45669 - RNA, 1701 nt, Artificial Sequence
  derived and/or modified CDS sequence (wt) from hemagglutinin__InfluenzaA__ALN39712
augaagacuaucauugcuuugagcuacauucuaugucugguuuucgcucaaaaaauuccuggaaaugacaauagcacggcaacgcugugccuugggcaccaugcaguaccaaacggaacgauagugaaaacaaucacaaaugaccgaauugaaguuacuaaugcuacugagcugguucagaauuccucaauaggugaaauaugcgacaguccucaucagauccuugauggagaaaacugcacacuaauagaugcucuauugggagacccucagugugauggcuuucaaaauaagaaaugggaccuuuuuguugaacgaagcaaagccuacagcaacuguuacccuuaugaugugccggauuaugccucccuuaggucacuaguugccucauccggcacacuggaguuuaacaaugaaagcuucaauuggacuggagucacucaaaacggaacaaguucugcuugcauaaggagaucuaguaguaguuucuuuaguagauuaaauugguugacccacuuaaacuacacauacccagcauugaacgugacuaugccaaacaaugaacaauuugacaaauuguacauuugggggguucaccacccggguacggacaaggaccaaaucuuccuguaugcucaaucaucaggaagaaucacaguaucuaccaaaagaagccaacaagcuguaaucccaaauaucggaucuagacccagaauaagggauaucccuagcagaauaagcaucuauuggacaauaguaaaaccgggagacauacuuuugauuaacagcacagggaaucuaauugcuccuagggguuacuucaaaauacgaagugggaaaagcucaauaaugagaucagaugcacccauuggcaaaugcaagucugaaugcaucacuccaaauggaagcauucccaaugacaaaccauuccaaaauguaaacaggaucacauacggggccugucccagauauguuaagcauagcacucugaaauuggcaacaggaaugcgaaauguaccagagaaacaaacuagaggcauauuuggcgcaauagcggguuucauagaaaaugguugggagggaaugguggaugguugguacgguuucaggcaucaaaauucugagggaagaggacaagcagcagaucucaaaagcacucaagcagcaaucgaucaaaucaaugggaagcugaaucgauugaucgggaaaaccaacgagaaauuccaucagauugaaaaagaauucucagaaguagaaggaagaauucaggaccuugagaaauauguugaggacacuaaaauagaucucuggucauacaacgcagagcuucuuguugcccuggagaaccaacauacaauugaucuaacugacucagaaaugaacaaacuguuugaaaaaacaaagaagcaacugagggaaaaugcugaggauaugggaaaugguuguuucaaaauauaccacaaaugugacaaugccugcauaggaucaauaagaaauggaacuuaugaccacaauguguacagggaugaagcauuaaacaaccgguuccagaucaagggaguugagcugaagucaggguacaaagauuggauccuauggauuuccuuugccauaucauguuuuuugcuuuguguugcuuuguugggguucaucaugugggccugccaaaagggcaacauuaggugcaacauuugcauuuga

SEQ ID NO: 45670 - RNA, 1701 nt, Artificial Sequence
  derived and/or modified CDS sequence (wt) from hemagglutinin__InfluenzaA__ALN39713
augaagacuaucauugcuuugagcuacauucuaugucugguuuucgcucaaaaaauuccuggaaaugacaauagcacggcaacgcugugccuugggcaccaugcaguaccaaacggaacgauagugaaaacaaucacaaaugaccgaauugaaguuacuaaugcuacugaguugguucagaauuccucaauaggugaaauaugcgacaguccucaucagauccuugauggagaaaacugcacacuaauagaugcucuauugggagacccucagugugauggcuuucaaaauaagaaaugggaccuuuuuguugaacgaagcaaagccuacagcaacuguuacccuuaugaugugccggauuaugccucccuuaggucacuaguugccucauccggcacacuggaguuuaacaaugaaagcuucaauuggacuggagucacucaaaacggaacaaguucugcuugcauaaggggaucuaguaguaguuucuuuaguagauuaaauugguugacccacuuaaacuacacauacccagcauugaacgugacuaugccaaacaaugaacaauuugacaaauuguacauuugggggguucaccacccggguacggacaaggaccaaaucuuccuguaugcucaaucaucaggaagaaucacaguaucuaccaaaagaagccaacaagcuguaaucccaaauaucggaucuagacccagaauaagggauaucccuagcagaauaagcaucuauuggacaauaguaaaaccgggagacauacuuuugauuaacagcacagggaaucuaauugcuccuagggguuacuucaaaauacgaagugggaaaagcucaauaaugagaucagaugcacccauuggcaaaugcaagucugaaugcaucacuccaaauggaagcauucccaaugacaaaccauuccaaaauguaaacaggaucacauacggggccugucccagauauguuaagcauagcacucugaaauuggcaacaggaaugcgaaauguaccagagaaacaaacuagaggcauauuuggcgcaauagcggguuucauagaaaaugguugggagggaaugguggaugguugguacgguuucaggcaucaaaauucugagggaagaggacaagcagcagaucucaaaagcacucaagcagcaaucgaucaaaucaaugggaagcugaaucgguugaucgggaaaaccaacgagaaauuccaucagauugaaaaagaauucucagaaguagaaggaagaauucaggaccuugagaaauauguugaggacacuaaaauagaucucuggucauauaacgcggagcuucuuguugcccuggagaaccaacauacaauugaucuaacugacucagaaaugaacaaacuguuugaaaaaacaaagaagcaacugagggaaaaugcugaggauaugggaaaugguuguuucaaaauauaccacaaaugugacaaugccugcauaggcucgauaagaaauggaacuuaugaccacaauguguacagggaugaagcauuaaauaaccgguuccagaucaaggggguugagcugaagucaggguacaaagauuggauccuauggauuuccuuugccauaucauguuuuuugcuuuguguugcuuuguugggguucaucaugugggccugccaaaagggcaacauuaggugcaacauuugcauuuga

SEQ ID NO: 45671 - RNA, 1701 nt, Artificial Sequence
  derived and/or modified CDS sequence (wt) from hemagglutinin__InfluenzaA__ALN39714
augaagacuaucauugcuuugagcuacauucuaugucugguuuucgcucaaaaaauuccuggaaaugacaauagcacggcaacgcugugccuugggcaccaugcaguaccaaacggaacgauagugaaaacaaucacgaaugaccgaauugaaguuacuaaugcuacugagcugguucagaauuccucaauaggugaaauaugcgacaguccucaucagauccuugauggagaaaacugcacacuaauagaugcucuauugggagacccucagugugauggcuuucaaaauaagaaaugggaccuuuuuguugaacgaagcaaagccuacagcaacuguuacccuuaugaugugccggauuaugccucccuuaggucacuaguugccucauccggcacacuggaguuuaacaaugaaagcuucaauugggcuggagucacucaaaacggaacaaguucuucuugcauaaggggaucuaauaguaguuucuuuaguagauuaaauugguugacccacuuaaacuccaaauacccagcauuaaacgugacuaugccaaacaaugaacaauuugacaaauuguacauuugggggguucaccacccggguacggacaaggaccaaaccuuccuguaugcacaaccaucaggaagaaucacaguaucuaccaaaagaagccaacaagcuguaaucccgaauaucggaucuagacccagaauaagggauaucccuagcagaauaagcaucuauuggacaauaguaaaaccgggagacauacuuuugauuaacagcacagggaaucuaauugcuccuagggguuacuucaaaauacgaagugggaaaagcucaauaaugagaucagaugcacccauuggcaaaugcaagucugaaugcaucacuccaaauggaagcauucccaaugacaaaccauuccaaaauguaaacaggaucacauacggggccugucccagauauguuaagcaaagcacucugaaauuggcaacaggaaugcgaaauguaccagagagacaaacuagaggcauauuuggcgcaauagcggguuucauagaaaaugguugggagggaaugguggaugguugguacggcuucaggcaucaaaauucugagggaagaggacaagcagcagaucucaaaagcacucaagcagcaaucgaucaaaucaaugggaagcugaaucgauugaucgggaaaaccaacgagaaauuccaucagauugaaaaagaauucucagaaguagaagggagaauucaggaccuugagaaauauguugaggacacaaaaauagaucucuggucauacaacgcggagcuucuuguugcccuggagaaccaacauacaauugaucuaacugacucagaaaugaacaaacuguuugaaaaaacaaagaagcaacugagggaaaacgcugaggauaugggcaaugguuguuucaaaauauaccacaaaugugacaaugccugcauaggaucaaucagaaauggaacuuaugaccacgauguguacagggaugaagcauuaaacaaccgguuccagaucaagggaguugagcugaagucaggguacaaagauuggauccuauggauuuccuuugccauaucauguuuuuugcuuuguguugcuuuguugggguucaucaugugggccugccaaaagggcaacauuaggugcaacauuugcauuuga

SEQ ID NO: 45672 - RNA, 1701 nt, Artificial Sequence
  derived and/or modified CDS sequence (wt) from hemagglutinin__InfluenzaA__ALN39715
augaagacuaucauugcuuugagcuacauucuaugucugguuuucgcucaaaaaauuccuggaaaugacaauagcacggcaacgcugugccuugggcaccaugcaguaccaaacggaacgauagugaaaacaaucacaaaugaccgaauugaaguuacuaaugcuacugagcugguucagaauuccucaauaggugaaauaugcgacaguccucaucagauccuugauggagaaaacugcacacuaauagaugcucuauugggagacccucagugugauggcuuucaaaauaagaaaugggaccuuuuuguugaacgaagcaaagccuacagcaacuguuacccuuaugaugugccggauuaugccucccuuaggucacuaguugccucauccggcacacuggaguuuaacaaugaaagcuucaauuggacuggagucacucaaaacggaacaaguucugcuugcauaaggaaaucuaguaguaguuucuuuaguagauuaaauugguugacccacuuaaacuacacauacccagcauugaacgugacuaugccaaacaaugaacaguuugacaaauuguacauuugggggguucaccacccggguacggacaaggaccaaaucuuccuguaugcucgaucaucaggaagaaucacaguaucuaccaaaagaagccaacaagcuguaaucccaaauaucggaucuagacccagaauaagggauaucccuagcagaauaagcaucuauuggacaauaguaaaaccgggagacauacuuuugauuaacagcacagggaaucuaauugcuccuagggguuacuucaaaauacgaagugggaaaagcucaauaaugagaucagaugcacccauuggcaaaugcaagucugaaugcaucacuccaaauggaagcauucccaaugacaaaccauuccaaaauguaaacaggaucacauacggggccugucccagauauguuaagcauagcacucugaaauuggcaacaggaaugcgaaauguaccagagaaacaaacuagaggcauauuuggcgcaauagcggguuucauagaaaaugguugggagggaaugguggaugguugguacgguuucaggcaucaaaauucugagggaagaggacaagcagcagaucucaaaagcacucaagcagcaaucgaucaaaucaaugggaagcugaaucgauugaucgggaaaaccaacgagaaauuccaucagauugaaaaagaauucucagaaguagaaggaagaauucaggaccuugagaaauauguugaggacacuaaaauagaucucuggucauacaacgcggagcuucuuguugcccuggagaaucaacauacaauugaucuaacugacucagaaaugaacaaacuguuugaaaaaacaaagaagcaacugagggaaaaugcugaggauaugggaaaugguuguuucaaaauauaccacaaaugugacaaugccugcauaggaucaauaagaaauggaacuuaugaccacaauguguacagggaugaagcauuaaacaaccgguuccagaucaagggaguugagcugaagucaggguacaaagauuggauccuauggauuuccuuugccauaucauguuuuuugcuuuguguugcuuuguugggguucaucaugugggccugccaaaagggcaacauuaggugcaacauuugcauuuga

SEQ ID NO: 45673 - RNA, 1701 nt, Artificial Sequence; identical to SEQ ID NO: 45006
  derived and/or modified CDS sequence (wt) from hemagglutinin__InfluenzaA__ALN39716

SEQ ID NO: 45674 - RNA, 1701 nt, Artificial Sequence
  derived and/or modified CDS sequence (wt) from hemagglutinin__InfluenzaA__ALN39717
augaagacuaucauugccuugagcuacauucuaugucugguuuucgcucaaaaaauuccuggaaaugacaauagcacggcaacgcugugccuugggcaccaugcaguaccaaacggaacgauagugaaaacaaucacaaaugaccgaauugaaguuacuaaugcuacugagcugguucagaauuccucaauaggugaaauaugcgacaguccucaucagauccuugauggagaaaacugcacacuaauagaugcucuauugggagacccucagugugauggcuuucaaaauaagaaaugggaccucuuuguugaacgaagcaaagccuacagcaacuguuacccuuaugaugugccggauuaugccucccuuaggucacuaguugccucauccggcacacuggaguuuaacaaugaaagcuucaauuggacuggagucacucaaaacggaacaaguucugcuugcauaaggagaucuaguaguaguuucuuuaguagauuaaauugguugacccacuuaaacuacacauacccagcauugaacgugacuaugccaaacaaugaacaauuugacaaauuguacauuugggggguucaccacccggguacggacaaggaccaaaucuuccuguaugcucaaucaucaggaagaaucacaguaucuaccaaaagaagccaacaagcuguaaucccaaauaucggaucuagacccagaauaagggauaucccuagcagaauaagcaucuauuggacaauaguaaaaccgggagacauacuuuugauuaacagcacagggaaucuaauugcuccuagggguuacuucaaaauacgaagugggaaaagcucaauaaugagaucagaugcacccauuggcaaaugcaagucugaaugcaucacuccaaauggaagcauucccaaugacaaaccauuccaaaauguaaacaggaucacauacggggccugucccagauauguuaagcauagcacucugaaauuggcaacaggaaugcgaaauguaccagagaaacaaacuagaggcauauuuggcgcaauagcggguuucauagaaaaugguugggagggaaugguggaugguugguacgguuucaggcaucaaaauucugagggaagaggacaagcagcagaucucaaaagcacucaagcagcaaucgaucaaaucaaugggaagcugaaucgauugaucgggaaaaccaacgagaaauuccaucagauugaaaaagaauucucagaaguagaaggaagaauucaggaccuugagaaauauguugaggacacuaaaauagaucucuggucauacaacgcggagcuucuuguugcccuggagaaccaacauacaauugaucuaacugacucagaaaugaacaaacuguuugaaaaaacaaagaagcaacugagggaaaaugcugaggauaugggaaaugguuguuucaaaauauaccacaaaugugacaaugccugcauaggaucaauaagaaauggaacuuaugaccacaauguguacagggaugaagcauuaaacaaccgguuccagaucaagggaguugagcugaagucaggguacaaagauuggauccuauggauuuccuuugccauaucauguuuuuugcuuuguguugcuuuguugggguucaucaugugggccugccaaaagggcaacauuaggugcaacauuugcauuuga

SEQ ID NO: 45675 - RNA, 1701 nt, Artificial Sequence
  derived and/or modified CDS sequence (wt) from hemagglutinin__InfluenzaA__ALN39718
augaagacuaucauugcuuugagcuacauucuaugucugguuuucgcucaaaaaauuccuggaaaugacaauagcacggcaacgcugugccuugggcaccaugcaguaccaaacggaacgauagugaaaacaaucacaaaugaccgaauugaaguuacuaaugcuacugaguugguucagaauuccucaauaggugaaauaugcgacaguccucaucagauccuugauggagaaaacugcacacuaauagaugcucuauugggagacccucagugugauggcuuucaaaauaagaaaugggaccuuuuuguugaacggagcaaagccuacagcaacuguuacccuuaugaugugccggauuaugccucccuuaggucacuaguugccucauccggcacacuggaguuuaacaaugaaagcuucaauuggacuggagucacucaaaacggaacaaguucugcuugcauaaggagaucuaguaguaguuucuuuaguagauuaaauugguugacccacuuaaacuacacauacccagcauugaacgugacuaugccaaacaaugaacaauuugacaaauuguacauuugggggguucaccacccggguacggacaaggaccaaaucuuccuguaugcucaaucaucaggaagaaucacaguaucuaccaaaagaagccaacaagcuguaaucccaaauaucggaucuagacccagaauaagggauaucccuagcagaauaagcaucuauuggacaauaguaaaaccgggagacauacuuuugauuaacagcacagggaaucuaauugcuccuagggguuacuucaaaauacgaagugggaaaagcucaauaaugagaucagaugcacccauuggcaaaugcaagucugaaugcaucacuccaaauggaagcauucccaaugacaaaccauuccaaaauguaaacaggaucacauacggggccugucccagauaugucaagcauagcacucugaaauuggcaacaggaaugcgaaauguaccagagaaacaaacuagaggcauauuuggcgcaauagcggguuucauagaaaaugguugggagggaaugguggaugguugguacgguuucaggcaucaaaauucugagggaagaggacaagcagcagaucucaaaagcacucaagcagcaaucgaucaaaucaaugggaagcugaaucgguugaucgggaaaaccaacgagaaauuccaucagauugaaaaagaauucucagaaguagaaggaagaauucaggaccuugagaaauauguugaggacacuaaaauagaucucuggucauauaacgcggagcuucuuguugcccuggagaaccaacauacaauugaucuaacugacucagaaaugaacaaacuguuugaaaaaacaaagaagcaacugagggaaaaugcugaggauaugggaaaugguuguuucaaaauauaccacaaaugugacaaugccugcauaggaucaauaagaaauggaacuuaugaccacaauguguacagggaugaagcauuaaacaaccgguuccagaucaaggggguugagcugaagucagaguacaaagauuggauccuauggauuuccuuugccauaucauguuuuuugcuuuguguugcuuuguugggguucaucaugugggccugccaaaagggcaacauuaggugcaacauuugcauuuga

SEQ ID NO: 45676 - RNA, 1701 nt, Artificial Sequence
  derived and/or modified CDS sequence (wt) from hemagglutinin__InfluenzaA__ALN39734
augaagacuaucauugccuugagcuacauucuaugccugguuuucgcucaaaaaauuccuggaaaugacaauagcacggcaacgcugugccuugggcaccaugcaguaccaaacggaacgauagugaaaacaaucacaaaugaccgaauugaaguuacuaaugcuacugagcugguucagaauuccucaauaggugaaauaugcgacaguccucaucagauccuugauggagaaaacugcacacuaauagaugcucuauugggagacccucagugugauggcuuucaaaauaagaaaugggaccuuuuuguugaacgaagcaaagccuacagcaacuguuacccuuaugaugugccggauuaugccucccuuaggucacuaguugccucauccggcacacuggaguuuaacaaugaaagcuucaauuggacuggagucacucaaaacggaacaaguucugcuugcauaaggagaucuaguaguaguuucuuuaguagauuaaauugguugacccacuuaaacuacacauacccagcauugaacgugacuaugccaaacaaugaacaauuugacaaauuguacauuugggggguucaccacccggguacggacaaggaccaaaucuuccuguaugcucaaucaucaggaagaaucacaguaucuaccaaaagaagccaacaagcuguaaucccaaauaucggaucuagacccagaauaagggauaucccuagcagaauaagcaucuauuggacaauaguaaaaccgggagacauacuuuugauuaacagcacagggaaucuaauugcuccuagggguuacuucaaaauacgaagugggaaaagcucaauaaugagaucagaugcacccauuggcaaaugcaagucugaaugcaucacuccaaauggaagcauucccaaugacaaaccauuccaaaauguaaacaggaucacauacggggccugucccagauauguuaagcauagcacucugaaauuggcaacaggaaugcgaaauguaccagagaaacaaacuagaggcauauuuggcgcaauagcggguuucauagaaaaugguugggagggaaugguggaugguugguacgguuucaggcaucaaaauucugagggaagaggacaagcagcagaucucaaaagcacucaagcagcaaucgaucaaaucaaugggaagcugaaucgauugaucgggaaaaccaacgagaaauuccaucagauugaaaaagaauucucagaaguagaaggaagaauucaggaccuugagaaauauguugaggacacuaaaauagaucucuggucauacaacgcggagcuucuuguugcccuggagaaccaacauacaauugaucuaacugacucagaaaugaacaaacuguuugaaaaaacaaagaagcaacugagggaaaaugcugaggauaugggaaaugguuguuucaaaauauaccacaaaugugacaaugccugcauaggaucaauaagaaauggaacuuaugaccacaauguguacagggaugaagcauuaaacaaccgguuccagaucaagggaguugagcugaagucaggguacaaagauuggauccuauggauuuccuuugccauaucauguuuuuugcuuuguguugcuuuguugggguucaucaugugggccugccaaaagggcaacauuaggugcaacauuugcauuuga

SEQ ID NO: 45677 - RNA, 1701 nt, Artificial Sequence
  derived and/or modified CDS sequence (wt) from hemagglutinin__InfluenzaA__ALN39735
augaagacuaucauugccuugagcuacauucuaugucugguuuucgcucaaaaaauuccuggaaaugacaauagcacggcaacgcugugccuugggcaccaugcaguaccaaacggaacgauagugaaaacaaucacagaugaccgaauugaaguuacuaaugcuacugagcugguucagaauuccucaauaggugaaauaugcgacaguccucaucagauccuugauggagaaaacugcacacuaauagaugcucuauugggagacccucagugugauggcuuucaaaauaagaaaugggaccuuuuuguugaacgaagcaaagccuacagcaacuguuacccuuaugaugugccggauuaugccucccuuaggucacuaguugccucauccggcacacuggaguuuaacaaugaaagcuucaauuggacuggagucacucaaaacggaacaaguucugcuugcauaaggagaucuaguaguaguuucuuuaguagauuaaauugguugacccacuuaaacuacacauacccagcauugaacgugacuaugccaaacaaugaacaauuugacaaauuguacauuugggggguucaccacccggguacggacaaggaccaaaucuuccuguaugcucaaucaucaggaagaaucacaguaucuaccaaaagaagccaacaagcuguaaucccaaauaucggaucuagacccagaauaagggauaucccuagcagaauaagcaucuauuggacaauaguaaaaccgggagacauacuuuugauuaacagcacagggaaucuaauugcuccuagggguuacuucaaaauacgaagugggaaaagcucaauaaugagaucagaugcacccauuggcaaaugcaagucugaaugcaucacuccaaauggaagcauucccaaugacaaaccauuccaaaauguaaacaggaucacauacggggccugucccagauauguuaagcauagcacucugaaauuggcaacaggaaugcgaaauguaccagagaaacaaacuagaggcauauuuggcgcaauagcggguuucauagaaaaugguugggagggaaugguggaugguugguacgguuucaggcaucaaaauucugagggaagaggacaagcagcagaucucaaaagcacucaagcagcaaucgaucaaaucaaugggaagcugaaucgauugaucgggaaaaccaacgagaaauuccaucagauugaaaaagaauucucagaaguagaaggaagaauucaggaccuugagaaauauguugaggacacuaaaauagaucucuggucauacaacgcggagcuucuuguugcccuggagaaccaacauacaauugaucuaacugacucagaaaugaacaaacuguuugaaaaaacaaagaagcaacugagggaaaaugcugaggauaugggaaaugguuguuucaaaauauaccacaaaugugacaaugccugcauaggaucaauaagaaauggaacuuaugaccacaauguguacagggaugaagcauuaaacaaccgguuccagaucaagggaguugagcugaagucaggguacaaagauuggauccuauggauuuccuuugccauaucauguuuuuugcuuuguguugcuuuguugggguucaucaugugggccugccaaaagggcaacauuaggugcaacauuugcauuuga

SEQ ID NO: 45678 - RNA, 1701 nt, Artificial Sequence
  derived and/or modified CDS sequence (wt) from hemagglutinin__InfluenzaA__ALN39736
augaagacuaucauugcuuugagcuacauucuaugucugguuuucgcucaaaaaauuccuggaaaugacaauagcacggcaacgcugugccuugggcaccaugcaguaccaaacggaacgauagugaaaacaaucacaaaugaccgaauugaaguuacuaaugcuacugaguugguucagaauuccucaauaggugaaauaugcgacaguccucaucagauccuugauggagaaaacugcacacuaauagaugcucuauugggagacccucagugugauggcuuucaaaauaagaaaugggaccuuuuuguugaacgaagcaaagccuacagcaauuguuacccuuaugaugugccggauuaugccucccuuaggucacuaguugccucauccggcacacuggaguuuaacaaugaaagcuucaauuggacuggagucacucaaaacggaacaaguucugcuugcauaaggagaucuaguaguaguuucuuuaguagauuaaauugguugacccacuuaaacuacacauacccagcauugaacgugacuaugccaaacaaugaacaauuugacaaauuguacauuugggggguucaccacccggguacggacaaggaccaaaucuuccuguaugcucaaccaucaggaagaaucacaguaucuaccaaaagaagccaacaagcuguaaucccaaauaucggaucuagacccagaauaagggauaucccuagcagaauaagcaucuauuggacaauaguaaaaccgggagacauacuuuugauuaacagcacagggaaucuaauugcuccuagggguuacuucaaaauacgaggugggaaaagcucaauaaugagaucagaugcacccauuggcaaaugcaagucugaaugcaucacuccaaauggaagcauucccaaugacaaaccauuccaaaauguaaacaggaucacauacggggccugucccagauauguuaagcauagcacucugaaauuggcaacaggaaugcgaaauguaccagagaaacaaacuagaggcauauuuggcgcaauagcggguuucauagaaaaugguugggagggaaugguggaugguugguacgguuucaggcaucaaaauucugagggaagaggacaagcagcagaucucaaaagcacucaagcagcaaucgaucaaaucaaugggaagcugaaucgguugaucgggaaaaccaacgagaaauuccaucagauugaaaaagaauucucagaaguagaaggaagaauucagaaccuugagaaauauguugaggacacuaaaauagaucucuggucauauaacgcggagcuucuuguugcccuggagaaccaacauacaauugaucuaacugacucagaaaugaacaaacuguuugaaaaaacaaagaagcaacugagggaaaaugcugaggauaugggaaaugguuguuucaaaauauaccacaaaugugacaaugccugcauaggaucaauaagaaauggaacuuaugaccacaauguguacagggaugaagcauuaaacaaccgguuccagaucaaggggguugagcugaagucaggguacaaagauuggauccuauggauuuccuuugccauaucauguuuuuugcuuuguguugcuuuguugggguucaucaugugggccugccaaaagggcaacauuaggugcaacauuugcauuuga

SEQ ID NO: 45679 - RNA, 1701 nt, Artificial Sequence; identical to SEQ ID NO: 45059
  derived and/or modified CDS sequence (wt) from hemagglutinin__InfluenzaA__ALN39737

SEQ ID NO: 45680 - RNA, 1701 nt, Artificial Sequence
  derived and/or modified CDS sequence (wt) from hemagglutinin__InfluenzaA__ALN39738
augaagacuaucauugcuuugagcuacauucuaugucugguuuucgcucaaaaaauuccuggaaaugacaauagcacggcaacgcugugccuugggcaccaugcaguaccaaacggaacgauagugaaaacaaucacaaaugaccgaauugaaguuacuaaugcuacugaguugguucagaauuccucaauaggugaaauaugcgacaguccucaucagauccuugauggagaaaacugcacacuaauagaugcucuauugggagacccucugugugauggcuuucaaaauaagaaaugggaccuuuuuguugaacgaagcaaagccuacagcaacuguuacccuuaugaugugccggauuaugccucccuuaggucacuaguugccucauccggcacacuggaguuuaacaaugaaagcuucaauuggacuggagucacucaaaacggaacaaguucugcuugcauaaggagaucuaguaguaguuucuuuaguagauuaaauugguugacccacuuaaacuacacauacccagcauugaacgugacuaugccaaacaaugaacaauuugacaaauuguacauuugggggguucaccacccggguacggacaaggaccaaaucuuccuguaugcucaaucaucaggaagaaucacaguaucuaccaaaagaagccaacaagcuguaaucccaaauaucggaucuagacccagaauaagggauaucccuagcagaauaagcaucuauuggacaauaguaaaaccgggagacauacuuuugauuaacagcacagggaaucuaauugcuccuagggguuacuucaaaauacgaagugggaaaagcucaauaaugagaucagaugcacccauuggcaaaugcaagucugaaugcaucacuccaaauggaagcauucccaaugacaaaccauuccaaaauguaaacaggaucacauacggggccugucccagauauguuaagcauagcacucugaaauuggcaacaggaaugcgaaauguaccagagaaacaaacuagaggcauauuuggcgcaauagcggguuucauagaaaaugguugggagggaaugguggaugguugguacgguuucaggcaucaaaauucugagggaagaggacaagcagcagaucucaaaagcacucaagcagcaaucgaucaaaucaaugggaagcugaaucgguugaucgggaaaaccaacgagaaauuccaucagauugaaaaagaauucucagaaguagaaggaagaauucaggaccuugagaaauauguugaggacacuaaaauagaucucuggucauauaacgcggagcuucuuguugcccuggagaaccaacauacaauugaucuaacugacucagaaaugaacaaacuguuugaaaaaacaaagaagcaacugagggaaaaugcugaggauaugggaaaugguuguuucaaaauauaccacaaaugugacaaugccugcauaggaucaauaagaaauggaacuuaugaccacaauguguacagggaugaagcauuaaacaaccgguuccagaucaaggggguugagcugaagucaggguacaaagauuggauccuauggauuuccuuugccauaucauguuuuuugcuuuguguugcuuuguugggguucaucaugugggccugccaaaagggcaacauuaggugcaacauuugcauuuga

SEQ ID NO: 45681 - RNA, 1701 nt, Artificial Sequence
  derived and/or modified CDS sequence (wt) from hemagglutinin__InfluenzaA__ALN39739
augaagacuaucauugcuuugggcuacauucuaugucugguuuucgcucaaaaaauuccuggaaaugacaauagcacggcaacgcugugccuugggcaccaugcaguaccaaacggaacgauagugaaaacaaucacaaaugaccgaauugaaguuacuaaugcuacugaacugguucagaauuccucaauaggugaaauaugcgacaguccucauaagauccuugauggagaaaacugcacacuaauagaugcucuauugggagacccucagugugauggcuuucaaaauaagaaaugggaccuuuuuguugaacgaagcaaagccuacagcaacuguuacccuuaugaugugccggauuaugccucccuuaggucacuaguugccucauccggcacacuggaguuuaacaaugaaagcuucaauuggacuggagucacucaaaacggaacaaguucugcuugcauaaggagaucuaguaguaguuucuuuaguagauuaaauugguugacccacuuagacuacacauacccagcauugaacgugacuaugccaaacaaugaacaauuugacaaauuguacauuugggggguucaccacccggguacggacaaggaccaaaucuuccuguaugcucaaucaucaggaagaaucacaguaucuaccaaaagaagccaacaagcuguaaucccaaauaucggaucuagacccagaauaagggauaucccuagcagaauaagcaucuauuggacaauaguaaaaccgggagacauacuuuugauuaacagcacagggaaucuaauugcuccuagggguuacuucaaaauacgaagugggaaaagcucaauaaugagaucagaugcacccauuggcaaaugcaagucugaaugcaucacuccaaauggaagcauucccaaugacaaaccauuccaaaauguaaacaggaucacauacggggccugucccagauauguuaagcauagcacucugaaauuggcaacaggaaugcgaaauguaccagagaaacaaacuagaggcauauuuggcgcaauagcggguuucauagaaaaugguugggagggaaugguggaugguugguacgguuucaggcaucaaaauucugagggaagaggacaagcagcagaucucaaaagcacucaagcagcaaucgaucaaaucaaugggaagcugaaucgauugaucgggaaaaccaacgagaaauuccaucagauugaaaaagaauucucagaaguagaaggaagaauucaggaccuugagaaauauguugaggacacuaaaauagaucucuggucauacaacgcggagcuucuuguugcccuggagaaccaacauacaauugaucuaacugacucagaaaugaacaaacuguuugaaaaaacaaagaagcaacugagggaaaaugcugaggauaugggaaaugguuguuucaaaauauaccacaaaugugacaaugccugcauaggaucaauaagaaauggaacuuaugaccacaauguguacagggaugaagcauuaaacaaccgguuccagaucaagggaguugagcugaagucaggguacaaagauuggauccuauggauuuccuuugccauaucauguuuuuugcuuuguguugcuuuguugggguucaucaugugggccugccaaaagggcaacauuaggugcaacauuugcauuuga

SEQ ID NO: 45682 - RNA, 1701 nt, Artificial Sequence
  derived and/or modified CDS sequence (wt) from hemagglutinin__InfluenzaA__ALN39740
augaagacuaucauugcuuugagcuacauucuaugucugguuuucgcucaaaaaauuccuggaaaugacaauagcacggcaacgcugugccuugggcaccaugcaguaccaaacggaacgauagugaaaacaaucacaaaugaccgaauugaaguuacuaaugcuacugagcugguucagaauuccucaauaggugaaauaugcgacaguccucaucagauccuugauggagaaaacugcacacuaauagaugcucuauugggagacccucagugugauggcuuucaaaauaagaaaugggaccuuuuuguugaacgaagcaaagccuacagcaacuguuacccuuaugaugugccggauuaugccucccuuaggucacuaguugccucauccggcacacuggaguuuaacaaugaaagcuucaauuggacuggagucacucaaaacggaacaaguucugcuugcauaaggaaaucuaguaguaguuucuuuaguagauuaaauugguugacccacuuaaacuacacauacccagcauugaacgugacugugccaaacaaugaacaauuugacaaauuguacauuugggggguucaccacccggguacggacaaggaccaaaucuuccuguaugcucgaucaucaggaagaaucacaguaucuaccaaaagaagccaacaagcuguaaucccaaauaucggauauagacccagaauaagggauaucccuagcagaauaagcaucuauuggacaauaguaaaaccgggagacauacuuuugauuaacagcacagggaaucuaauugcuccuagggguuacuucaaaauacgaagugggaaaagcucaauaaugagaucagaugcacccauuggcaaaugcaagucugaaugcaucacuccaaauggaagcauucccaaugacaaaccauuccaaaauguaaacaggaucacauacggggccugucccagauauguuaagcauagcacucugaaauuggcaacaggaaugcgaaauguaccagagaaacaaacuagaggcauauuuggcgcaauagcggguuucauagaaaaugguugggagggaaugguggaugguugguacgguuucaggcaucaaaauucugaggggagaggacaagcagcagaucucaaaagcacucaagcagcaaucgaucaaaucaaugggaagcugaaucgauugaucgggaaaaccaacgagaaauuccaucagauugaaaaagaauucucagaaguagaaggaagaauucaggaccuugagaaauauguugaggacacuaaaauagaucucuggucauacaacgcggagcuucuuguugcccuggagaaucaacauacaauugaucuaacugacucagaaaugaacaaacuguuugaaaaaacaaagaagcaacugagggaaaaugcugaggauauggggaaugguuguuucaaaauauaccacaaaugugacaaugccugcauaggaucaauaagaaauggaacuuaugaccacaauguguacagggaugaagcauuaaacaaccgguuccagaucaagggaguugagcugaagucaggguacaaagauuggauccuauggauuuccuuugccauaucauguuuuuugcuuuguguugcuuuguugggguucaucaugugggccugccaaaagggcaacauuaggugcaacauuugcauuuga

SEQ ID NO: 45683 - RNA, 1701 nt, Artificial Sequence
  derived and/or modified CDS sequence (wt) from hemagglutinin__InfluenzaA__ALN39741
augaagacuaucauugcuuugagcuacauucuaugucugguuuucgcucaaaaaauuccuggaaaugacaauagcacggcaacgcugugccuugggcaccaugcaguaccaaacggaacgauagugaaaacaaucacaaaugaccgaauugaaguuacuaaugcuacugaguugguucagaauuccucaauaggugaaauaugcgacaguccucaucagauccuugauggagaaaacugcacacuaauagaugcucuauugggagacccucagugugauggcuuucaaaauaagaaaugggaccuuuuuguugaacgaagcaaagccuacagcaacuguuacccuuaugaugugccggauuaugccucccuuaggucacuaguugccucauccggcacacuggaguuuaacaaugaaagcuucaauuggacuggagucacucaaaacggaacaaguucugcuugcauaaggagaucuaguaguaguuucuuuaguagauuaaauugguuaacccacuuaaacuacacauacccagcauugaacgugacuaugccaaacaaugaacaauuugacaaauuauacauuugggggguucaccacccggguacggacaaggaccaaaucuuccuguaugcucaaucaucaggaagaaucacaguaucuaccaaaagaagccaacaagcuguaaucccaaauaucggaucuagacccagaauaagggauaucccuagcagaauaagcaucuauuggacaauaguaaaaccgggagacauacuuuugauuaacagcacagggaaucuaauugcuccuagggguuacuucaaaauacgaagugggaaaagcucaauaaugagaucagaugcacccauuggcaaaugcaagucugaaugcaucacuccaaauggaagcauucccaaugacaaaccauuccaaaauguaaacaggaucacauacggggccugucccagauauguuaagcauagcacucugaaauuggcaacaggaaugcgaaauguaccagagaaacaaacuagaggcauauuuggcgcaauagcggguuucauagaaaaugguugggagggaaugguggaugguugguacgguuucaggcaucaaaauucugagggaagaggacaagcagcagaucucaaaagcacucaagcagcaaucgaucaaaucaaugggaagcugaaucgguugaucgggaaaaccaacgagaaauuccaucagauugaaaaagaauucucagaaguagaaggaagaauucaggaccuugagaaauauguugaggacacuaaaauagaucucuggucauauaacgcggagcuucuuguugcccuggagaaccaacauacaauugaucuaacugacucagaaaugaacaaacuguuugaaaaaacaaagaagcaacugagagaaaaugcugaggauaugggaaaugguuguuucaaaauauaccacaaaugugacaaugccugcauaggaucaauaagaaauggaacuuaugaccacaauguguacagggaugaagcauuaaacaaccgguuccagaucaaggggguugagcugaagucaggguacaaagauuggauccuauggauuuccuuugccauaucauguuuuuugcuuuguguugcuuuguugggguucaucaugugggccugccaaaagggcaacauuaggugcaacauuugcauuuga

SEQ ID NO: 45684 - RNA, 1701 nt, Artificial Sequence
  derived and/or modified CDS sequence (wt) from hemagglutinin__InfluenzaA__ALN39742
augaagacuaucauugcuuugagcuacauucuaugucugguuuucgcucaaaaaauuccuggaaaugacaauagcacggcaacgcugugccuugggcaccaugcaguaccaaacggaacgauagugaaaacaaucacaaaugaccgaauugaaguuacuaaugcuacugaguugguucagaauuccucaauaggugaaauaugcgacaguccucaucagauccuugauggagaaaacugcacacuaauagaugcucuauugggagacccucagugugauggcuuucaaaauaagaaaugggaccuuuuuguugaacgaagcaaagccuacagcaacuguuacccuuaugaugugccggauuaugccucccuuaggucacuaguugccucauccggcacacuggaguuuaacaaugaaagcuucaauuggacuggagucacucaaaacggaacaaguucugcuugcauaaggagaucuaguaguaguuucuuuaguagauuaaauugguugacccacuuaaacuacacauacccagcauugaacgugacuaugccaaacaaugaacaauuugacaaauuguacauuugggggguucaccacccggguacggacaaggaccaaaucuuccuguaugcucaaucaucaggaagaaucacaguaucuaccaaaagaagccaacaagcuguaaucccaaauaucggaucuagacccagaauaagggauaucccuagcagaauaagcaucuauuggacaauaguaaaaccgggagacauacuuuugauuaacagcacagggaaucuaauugcuccuagggguuacuucaaaauacgaagugggaaaagcucaauaaugagaucagaugcacccauuggcaaaugcaagucugaaugcaucacuccaaauggaagcauucccaaugacaaaccauuccaaaauguaaacaggaucacauacggggacugucccagauauguuaagcauagcacucugaaauuggcaacaggaaugcgaaauguaccagagaaacaaacuagaggcauauuuggcgcaauagcggguuucauagaaaaugguugggagggaaugguggaugguugguacgguuucaggcaucaaaauucugagggaagaggacaagcagcagaucucaaaagcacucaagcagcaaucgaucaaaucaaugggaagcugaaucgguugaucgggaaaaccaacgagaaauuccaucagauugaaaaagaauucucagaaguagaaggaagaauucaggaccuugagaaauauguugaggacacuaaaauagaucucuggucauauaacgcggagcuucuuguugcccuggagaaccaacauacaauugaucuaacugacucagaaaugaacaaacuguuugaaaaaacaaagaagcaacugagggaaaaugcugaggauaugggaaaugguuguuucaaaauauaccacaaaugugacaaugccugcauaggaucaauaagaaauggaacuuaugaccacaauguguacagggaugaagcauuaaacaaccgguuccagaucaaggggguugagcugaagucaggguacaaagauuggauccuauggauuuccuuugccauaucauguuuuuugcuuuguguugcuuuguugggguucaucaugugggccugccaaaagggcaacauuaggugcaacauuugcauuuga

SEQ ID NO: 45685 - RNA, 1701 nt, Artificial Sequence
  derived and/or modified CDS sequence (wt) from hemagglutinin__InfluenzaA__ALN39743
augaagacuaucauugcuuugagcuacauucuaugucugguuuucgcucaaaaaauuccuggaaaugacaauagcacggcaacgcugugccuugggcaccaugcaguaccaaacggaacgauagugaaaacaaucacaaaugaccgaauugaaguuacuaaugcuacugagcugguucagaauuccucaauaggugaaauaugcgacaguccucaucagauccuugauggagaaaacugcacacuaauagaugcucuauugggagacccucagugugauggcuuucaaaauaagaaaugggaccuuuuuguugaacgaagcaaagccuacagcaacuguuacccuuaugaugugccggauuaugccucccuuaggucacuaguugccucauccggcacacuggaguuuaacaaugaaagcuucaauuggacuggagucacucaaaacggaacaaguucugcuugcauaaggaaaucuaguaguaguuucuuuaguagauuaaauugguugacccacuuaaacuacauauacccagcauugaacgugacuaugccaaacaaugaacaauuugacaaauuguacauuugggggguucaccacccggguacggacaaggaccaaaucuuccuguaugcucaaucaucaggaagaaucacaguaucuaccaaaagaagccaacaagcuguaaucccaaauaucggaucuagacccagaauaagagauaucccuagcagaauaagcaucuauuggacaauaguaaaaccgggagacauacuuuugauuaacagcacagggaaucuaauugcuccuagggguuacuucaaaauacgaagugggaaaagcucaauaaugagaucagaugcacccauuggcaaaugcaagucugaaugcaucacuccaaauggaagcauucccaaugacaaaccauuccaaaauguaaacaggaucacauacggggccugucccagauauguuaagcauagcacucugaaauuggcaacaggaaugcgaaauguaccagagaaacaaacuagaggcauauuuggcgcaauagcggguuucauagaaaaugguugggagggaaugguggaugguugguacgguuucaggcaucaaaauucugaggggagaggacaagcagcagaucucaaaagcacucaagcagcaaucgaucaaaucaaugggaagcugaaucgauugaucgggaaaaccaacgagaaauuccaucagauugaaaaagaauucucagaaguagaaggaagaauucaggaccuugagaaauauguugaggacacuaaaauagaucucuggucauacaacgcggagcuucuuguugcccuggagaaucaacauacaauugaucuaacugacucagaaaugaacaaacuauuugaaaaaacaaagaagcaacugagggaaaaugcugaggauaugggaaaugguuguuucaaaauauaccacaaaugugacaaugccugcauaggaucaauaagaaauggaacuuaugaccacaauguguacagggaugaagcauuaaacaaccgguuccagaucaagggaguugagcugaagucaggguacaaagauuggauccuauggauuuccuuugccauaucauguuuuuugcuuuguguugcuuuguugggguucaucaugugggccugccaaaagggcaacauuaggugcaacauuugcauuuga

SEQ ID NO: 45686 - RNA, 1701 nt, Artificial Sequence
  derived and/or modified CDS sequence (wt) from hemagglutinin__InfluenzaA__ALN39744
augaagacuaucauugcuuugagcuacauucuaugucugguuuucgcucaaaaaauuccuggaaaugacaauagcacggcaacgcugugccuugggcaccaugcaguaccaaacggaacgauagugaaaacaaucacaaaugaccgaauugaaguuacuaaugcuacugagcugguucagaauuccucaauaggugaaauaugcgacaguccucaucagauccuugauggagaaaacugcacacuaauagaugcucuauugggagacccucagugugauggcuuucaaaauaagaaaugggaccuuuuuguugaacgaagcaaagccuacagcaacuguuacccuuaugaugugccggauuaugccucccuuaggucacuaguugccucauccggcacacuggaguuuaacaaugaaagcuucaauuggacuggagucacucaaaacggaacaaguucugcuugcauaaggaaaucuaguaguaguuucuuuaguagauuaaauugguugacccacuuaaacuacacauacccagcauugaacgugacuaugccaaacaaugaacaauuugacaaauuguacauuugggggguucaccacccggguacggacaaggaccaaaucuuccuguaugcucaaucaucaggaagaaucacaguaucuaccaaaagaagccaacaagcuguaaucccaaauaucggaucuagacccagaauaagagauaucccuagcagaauaagcaucuauuggacaauaguaaaaccgggagacauacuuuugauuaacagcacagggaaucuaauugcuccuagggguuacuucaaaauacgaagugggaaaagcucaauaaugagaucagaugcacccauuggcaaaugcaagucugaaugcaucacuccaaauggaagcauucccaaugacaaaccauuccaaaauguaaacaggaucacauacggggccugucccagauauguuaagcauagcacucugaaauuggcaacaggaaugcgaaauguaccagagaaacaaacuagaggcauauuuggcgcaauagcggguuucauagaaaaugguugggagggaaugguggaugguugguacgguuucaggcaucaaaauucugaggggagaggacaagcagcagaucucaaaagcacucaagcagcaaucgaucaaaucaaugggaagcugaaucgauugaucgggaaaaccaacgagaaauuccaucagauugaaaaagaauucucagaaguagaaggaagaauucaggaccuugagaaauauguugaggacacuaaaauagaucucuggucauacaacgcggagcuucuuguugcccuggagaaucaacauacaauugaucuaacugacucagaaaugaacaaacuauuugaaaaaacaaagaagcaacugagggaaaaugcugaggauaugggaaaugguuguuucaaaauauaccacaaaugugacaaugccugcauaggaucaauaagaaauggaacuuaugaccacaauguguacagggaugaagcauuaaacaaccgguuccagaucaagggaguugagcugaagucaggguacaaagauuggauccuauggauuuccuuugccauaucauguuuuuugcuuuguguugcuuuguugggguucaucaugugggccugccaaaagggcaacauuaggugcaacauuugcauuuga

SEQ ID NO: 45687 - RNA, 1701 nt, Artificial Sequence
  derived and/or modified CDS sequence (wt) from hemagglutinin__InfluenzaA__ALN39745
augaagacuaucauugcuuugagcuacauucuaugucugguuuucgcucaaaaaauuccuggaaaugacaauagcacggcaacgcugugccuugggcaccaugcaguaccaaacggaacgauagugaaaacaaucacaaaugaccgaauugaaguuacuaaugcuacugagcugguucagaauuccucaauaggugaaauaugcgacaguccucaucagauccuugauggagaaaacugcacacuaauagaugcucuauugggagacccucagugugauggcuuucaaaauaagaaaugggaccuuuuuguugaacgaagcaaagccuacagcaacuguuacccuuaugaugugccggauuaugccucccuuaggucacuaguugccucauccggcacacuggaguuuaacaaugaaagcuucaauuggacuggagucacucaaaacggaacaaguucugcuugcauaaggaaaucuaguaguaguuucuuuaguagauuaaauugguugacccacuuaaacuacaaauacccagcauugaacgugacuaugccaaacaaugaacaauuugacaaauuguacauuugggggguucaccacccggguacggacaaggaccaaaucuuccuguaugcucaaucaucaggaagaaucacaguaucuaccaaaagaagccaacaagcuguaaucccaaauaucggaucuagacccagaauaagagauaucccuagcagaauaagcaucuauuggacaauaguaaaaccgggagacauacuuuugauuaacagcacagggaaucuaauugcuccuagggguuacuucaaaauacgaagugggaaaagcucaauaaugagaucagaugcacccauuggcaaaugcaagucugaaugcaucacuccaaauggaagcauucccaaugacaaaccauuccaaaauguaaacaggaucacauacggggccugucccagauauguuaagcauagcacucugaaauuggcaacaggaaugcgaaauguaccagagaaacaaacuagaggcauauuuggcgcaauagcggguuucauagaaaaugguugggagggaaugguggaugguugguacgguuucaggcaucaaaauucugaggggagaggacaagcagcagaucucaaaagcacucaagcagcaaucgaucaaaucaaugggaagcugaaucgauugaucgggaaaaccaacgagaaauuccaucagauugaaaaagaauucucagaaguagaaggaagaauucaggaccuugagaaauauguugaggacacuaaaauagaucucuggucauacaacgcggagcuucuuguugcccuggagaaucaacauacaauugaucuaacugacucagaaaugaacaaacuauuugaaaaaacaaagaagcaacugagggaaaaugcugaggauaugggaaaugguuguuucaaaauauaccacaaaugugacaaugccugcauaggaucaauaagaaauggaacuuaugaccacaauguguacagggaugaagcauuaaacaaccgguuccagaucaagggaguugagcugaagucaggguacaaagauuggauccuauggauuuccuuugccauaucauguuuuuugcuuuguguugcuuuguugggguucaucaugugggccugccaaaagggcaacauuaggugcaacauuugcauuuga

SEQ ID NO: 45688 - RNA, 1701 nt, Artificial Sequence; identical to SEQ ID NO: 45686
  derived and/or modified CDS sequence (wt) from hemagglutinin__InfluenzaA__ALN39746

SEQ ID NO: 45689 - RNA, 1701 nt, Artificial Sequence
  derived and/or modified CDS sequence (wt) from hemagglutinin__InfluenzaA__ALN39747
augaagacuaucauugccuugagcuacauucuaugucugguuuucgcucaaaaaauuccuggaaaugacaauagcacggcaacgcugugccuugggcaccaugcaguaccaaacggaacgauagugaaaacaaucacaaaugaccgaauugaaguuacuaaugcuacugagcugguucagaauuccucaauaggugaaauaugcgacaguccucaucagauccuugauggagaaaacugcacacuaauagaugcucuauugggagacccucagugugauggcuuucaaaauaagaaaugggaccuuuuuguugaacgaagcaaagccuacagcaacuguuacccuuaugaugugccggauuacgccucccuuaggucacuaguugccucaucuggcacacuggaguuuaacaaugaaagcuucaauuggacuggagucacucaaaacggaacaaguucugcuugcauaaggagaucuaguaguaguuucuuuaguagauuaaauugguugacccacuuaaaauacacauacccagcauugaacgugacuaugccaaacaaugaacaauuugacaaauuguacauuugggggguucaccacccggguacggacaaggaccaaaucuuccuguaugcucaaucaucaggaagaaucacaguaucuaccaaaagaagccaacaagcuguaaucccaaauaucggaucuagacccagaauaagggauaucccuagcagaauaagcaucuauuggacaauaguaaaaccgggagacauacuuuugauuaacagcacagggaaucuaauugcuccuagggguuacuucaaaauacgaagugggaaaagcucaauaaugagaucagaugcacccauuggcaaaugcaagucugaaugcaucacuccaaauggaagcauucccaaugacaaaccauuccaaaauguaaacaggaucacauacggggccugucccagauauguuaagcauagcacucugaaauuggcaacaggaaugcgaaauguaccagagaaacaaacuagaggcauauuuggcgcaauagcggguuucauagaaaaugguugggagggaaugguggaugguugguacgguuucaggcaucaaaauucugagggaagaggacaagcagcagaucucaaaagcacucaagcagcaaucgaucaaaucaaugggaagcugaaucgauugaucgggaaaaccaacgagaaauuccaucagauugaaaaagaauucucagaaguagaaggaagaauucaggaccuugagaaauauguugaggacacuaaaauagaucucuggucauacaacgcggagcuucuuguugcccuggagaaccaacauacaauugaucuaacugacucagaaaugaacaaacuguuugaaaaaacaaagaagcaacugagggaaaaugcugaggauaugggaaaugguuguuucaaaauauaccacaaaugugacaaugccugcauaggaucaauaagaaauggaacuuaugaccacaauguguacagggaugaagcauuaaacaaccgguuccagaucaagggaguugagcugaagucaggguacaaagauuggauccuauggauuuccuuugccauaucauguuuuuugcuuuguguugcuuuguugggguucaucaugugggccugccaaaagggcaacauuaggugcaacauuugcauuuga

SEQ ID NO: 45690 - RNA, 1701 nt, Artificial Sequence
  derived and/or modified CDS sequence (wt) from hemagglutinin__InfluenzaA__ALN39748
augaagacuaucauugcuuugagcuacauucuaugucugguuuucgcucaaaaaauuccuggaaaugacaauagcacggcaacgcugugccuugggcaccaugcagugccaaacggaacgauagugaaaacaaucacaaaugaccgaauugaaguuacuaaugcuacugaguugguucagaauuccucaauaggugaaauaugcgacaguccucaucagauccuugauggagaaaacugcacacuaauagaugcucuauugggagacccucagugugauggcuuucaaaauaagaaaugggaccuuuuuguugaacgaagcaaagccuacagcaacuguuacccuuaugaugugccggauuaugccucccuuaggucacuaguugccucauccggcacacuggaguuuaacaaugaaagcuucaauuggacuggagucacucaaaacggaacaaguucugcuugcauaagaagaucuaguaguaguuucuuuaguagauuaaauugguugacccacuuaaacuacgcauacccagcauugaacgugacuaugccaaacaaugaacaauuugacaaauuguacauuugggggguucaccacccggguacggacaaggaccaaaucuuccuguaugcucaaucaucgggaagaaucacaguaucuaccaaaagaagccaacaagcuguaaucccaaauaucggaucuagacccagaauaagggauaucccuagcagaauaagcaucuauuggacaauaguaaaaccgggagacauacuuuugauuaacagcacagggaaucuaauugcuccuagggguuacuucaaaauacuaagugggaaaagcucaauaaugagaucagaugcacccauuggcaaaugcaagucugaaugcaucacuccaaauggaagcauucccaaugacaaaccauuccaaaauguaaacaggaucacauacggggccugucccagauauguuaagcauagcacucugaaauuggcaacaggaaugcgaaauguaccagagaaacaaacuagaggcauauuuggcgcaauagcggguuucauagaaaaugguugggaaggaaugguggaugguugguacgguuucaggcaucaaaauucugagggaagaggacaagcagcagaucucaaaagcacucaagcagcaaucgaucaaaucaaugggaagcugaaucgguugaucgggaaaaccaacgagaaauuccaucagauugaaaaagaauucucagaaguagaaggaagaauucaggaccuugagaaauauguugaggacacuaaaauagaucucuggucauauaacgcggagcuucuuguugcccuggagaaccaacauacaauugaucuaacugacucagaaaugaacaaacuguuugaaaaaacaaagaagcaacugagggaaaaugcugaggauaugggaaaugguuguuucaaaauauaccacaaaugugacaaugccugcauaggaucaauaagaaauggaacuuaugaccacaauguguacagggaugaagcauuaaacaaccgguuccagaucaaggggguugagcugaagucaggguacaaagauuggauccuauggauuuccuuugccauaucauguuuuuugcuuuguguugcuuuguugggguucaucaugugggccugccaaaagggcaacauuaggugcaacauuugcauuuga

SEQ ID NO: 45691 - RNA, 1701 nt, Artificial Sequence
  derived and/or modified CDS sequence (wt) from hemagglutinin__InfluenzaA__ALN39749
augaagacuaucauugcuuugagcuacauucuaugucugguuuucgcucaaaaacuuccuggaaaugacaauagcacggcaacgcugugccuugggcaccaugcaguaccaaacggaacgauagugaaaacaaucacgaaugaccgaauugaaguuacuaaugcuacugagcugguucagaauuccucaauaggugaaauaugcaacaguccucaucagauccuugauggagaaaacugcacacuaauagaugcucuauugggagacccucagugugauggcuuucaaaacaagaaaugggaccuuuuuguugaacgaagcaaagccuacagcaacuguuacccuuaugaugugccggauuaugccucccuuaggucacuaguugccucauccggcacacuggaguuuaacaaugaaagcuucaauugggcuggagucacucaaaacggaacaaguucuucuugcauaaggggaucuaauaguaguuucuuuaguagauuaaauugguugacccacuuaaacuccaaauacccagcauuaaacgugacuaugccaaacaaugaacaauuugacaaauuguacauuugggggguucaccacccggguacggacaaggaccaaaucuuccuguaugcacaaccaucaggaagaaucacaguaucuaccaaaagaagccaacaagcuguaaucccgaauaucggaucuagacccagaauaagggauaucccuagcagaauaagcaucuauuggacaauaguaaaaccgggagacauacuuuugauuaacagcacagggaaucuaauugcuccuagggguuacuucaaaauacgaagugggaaaagcucaauaaugagaucagaugcaccuauuggcaaaugcaagucugaaugcaucacuccaaauggaagcauucccaaugacaaaccauuccaaaauguaaacaggaucacauacggggccugucccagauauguuaagcaaagcacucuaaaauuggcaacaggaaugcgaaauguaccagagagacaaacuagaggcauauuuggcgcaauagcggguuucauagaaaaugguugggagggaaugguggaugguugguacggcuucaggcaucaaaauucugagggaagaggacaagcagcagaucucaaaagcacucaagcagcaaucgaucaaaucaaugggaaacugaaucgauugaucgggaaaaccaacgagaaauuccaucagauugaaaaagaauucucagaaguagaagggagaauucaggaccuugagaaauauguugaggacacaaaaauagaucucuggucauacaacgcggagcuucuuguugcccuggagaaccaacauacaauugaucuaacugacucagaaaugaacaaacuguuugaaaaaacaaagaagcaacugagggaaaaugcugaggauaugggcaaugguuguuucaaaauauaccacaaaugugacaaugccugcauaggaucaaucagaaauggaacuuaugaccacgauguauacagggaugaagcauuaaacaaccgguuccagaucaagggaguugagcugaagucaggguacaaagauuggauccuauggauuuccuuugccauaucauguuuuuugcuuuguguugcuuuguugggguucaucaugugggccugccaaaagggcaacauuagaugcaacauuugcauuuga

SEQ ID NO: 45692 - RNA, 1701 nt, Artificial Sequence; identical to SEQ ID NO: 45006
  derived and/or modified CDS sequence (wt) from hemagglutinin__InfluenzaA__ALN39750

SEQ ID NO: 45693 - RNA, 1701 nt, Artificial Sequence
  derived and/or modified CDS sequence (wt) from hemagglutinin__InfluenzaA__ALN39789
augaagacuaucauugcuuugagcuacauucuaugucugguuuucgcucaaaaaauuccuggaaaugacaauagcacggcaacgcugugccuugggcaccaugcaguaccaaacggaacgauagugaaaacaaucacaaaugaccgaauugaaguuacuaaugcuacugaguugguucagaauuccucaauaggugaaauaugcgacaguccucaucagauccuugauggagaaaacugcacacuaauagaugcucuauugggagacccucagugugauggcuuucaaaauaagaaaugggaccuuuuuguugaacgaagcaaagccuacagcaacuguuacccuuaugaugugccggauuaugccucccuuaggucacuaguugccucauccggcacacuggaguuuaacaaugaaagcuucaauuggacuggagucacucaaaacggaacaaguucugcuugcauaaggagaucuaguaguaguuucuuuaguagauuaaauugguugacccacuuaaacuacacauacccagcauugaacgugacuaugccaaacaaugaacaauuugacaaauuguacauuugggggguucaccacccggguacggacaaggaccaaaucuuccuguaugcucaaucaucaggaagaaucacaguaucuaccaaaagaagccaacaagcuguaaucccaaauaucggaucuagacccagaauaagggauaucccuagcagaauaagcaucuauuggacaauaguaaaaccgggagacauacuuuugauuaacagcacagggaaucuaauugcuccuagggguuacuucaaaauacgaagugggaaaagcucaauaaugagaucagaugcacccauuggcaaaugcaagucugaaugcaucacuccaaauggaagcauucccaaugacaaaccauuccaaaauguaaacaggaucacauacggggccuguccuagauaugucaagcauagcacucugaaauuggcaacaggaaugcgaaauguaccagagaaacaaacuagaggcauauuuggcgcaauagcggguuucauagaaaaugguugggagggaaugguggaugguugguacgguuucaggcaucaaaauucugagggaagaggacaagcagcagaucucaaaagcacucaagcagcaaucgaucaaaucaaugggaagcugaaucgguugaucgggaaaaccaacgagaaauuccaucaaauugaaaaagaauucucagaaguagaaggaagaauucaggaccuugagaaauauguugaggacacuaaaauagaucucuggucauauaacgcggagcuucuuguugcccuggagaaccaacauacaauugaucuaacugacucagaaaugaacaaacuguuugaaaaaacaaagaagcaacugagggaaaaugcugaggauaugggaaaugguuguuucaaaauauaccacaaaugugacaaugccugcauaggaucaauaagaaauggaacuuaugaccacaauguguacagggaugaagcauuaaacaaccgguuccagaucaaggggguugagcugaagucaggguacaaagauuggauccuauggauuuccuuugccauaucauguuuuuugcuuuguguugcuuuguugggguucaucaugugggccugccaaaagggcaacauuaggugcaacauuugcauuuga

SEQ ID NO: 45694 - RNA, 1701 nt, Artificial Sequence; identical to SEQ ID NO: 44983
  derived and/or modified CDS sequence (wt) from hemagglutinin__InfluenzaA__ALO75895

SEQ ID NO: 45695 - RNA, 1701 nt, Artificial Sequence
  derived and/or modified CDS sequence (wt) from hemagglutinin__InfluenzaA__ALO75907
auggagaaaauagugcuucuucuugcaauaguuagccuuguuaaaggugaucagauuugcauugguuaccaugcaaacaacucgacggagcagguugacacgauaauggaaaagaacgucacuguuacacaugcccaagacauacuggaaaagacacacaauggaaagcucugcgauuuaaauggagugaagccucugauuuuaaaggauuguaguguagcuggaugguuccuuggaaaccgaaugugugacgaguucaucagagugccggaauggucuuacauaguggagagggcuaacccagccaaugaccucuguuauccagggaaccucaaugacuaugaggaacugaaacaccuauugagcagaauaaaucauuuugagaagacucugaucauccccaagaguucuuggcccaaucauacaucaucaggggugagugcagcauguccauaccagggaaugcccuccuuuuucagaaaugugguauggcuuaccaaaaagaacgaugcauacccaacaauaaagaugagcuacaauaauaccuauagggaagaucuuuugauacugugggggauucaucauuccaacaaugcagcagagcagacaaaucucuauaaaaacccaaccaccuauguuuccguugggacaucaacauuaaaccagagauuggagccaaaaauagcuacuagaucccaaguaaacgggcaacguggaagaauggauuucuucuggaccauuuuaaaaccgaaugaugcaauccacuucgagaguaauggaaauuuuauugcuccagaauaugcauacaaaauugucaagaaaggggacucaacaauuaugaaaagugaaauggaauaugggcacugcaacaccaaaugucaaacuccaauaggggcgauaaacucuaguaugccauuccacaauauacacccucucacuaucggggagugccccaaauacgugaaaucgaacaaauuaguccuugcgacugggcucagaaauaguccucuaagagaaagaagaagaaaaagaggacuauuuggagcuauagcaggguuuauagagggaggauggcaaggaaugguagaugguugguauggguaccaccauagcaaugaacaggggaguggguacgcugcagacagagaauccacccaaaaggcaauagauggaguuaccaauaaggucaacucgauaauagacaaaaugaacacucaauuugaggccguuggaagagaauuuaauaacuuagaacggagaauagagaauuuaaauaagaaaauggaagacggauucuuagaugucuggacuuauaaugcugaacuuuuaguucucauggaaaaugagagaacucuagauuuccaugacucaaaugucaagaaccuuuaugacaagguccgacuacagcuuagggauaaugcaaaggagcuggguaaugguuguuucgaguucuaucacaaaugugauaaugaauguauggaaaguguaagaaaugggacguaugacuacccccuguauucagaagaagcaagguuaaaaagggaagaaauaagcggagugaaauuggaaucaauaggaacuuaccaaauacugucaaauuauucaacaguggcgaguucccuagcacuggcaaucauuguggcuggucuaucuuuauggaugugcuccaaugggucguuacaaugcagaauuugcauuuaa

SEQ ID NO: 45696 - RNA, 1701 nt, Artificial Sequence
  derived and/or modified CDS sequence (wt) from hemagglutinin__InfluenzaA__ALO75919
auggagaaaauagugcuucuucuugcaauaguuagccuuguuaaaggugaucagauuugcauugguuaccaugcaaacaacucgacggagcagguugacacgauaauggaaaagaacgucacuguuacacaugcccaagacauacuggaaaagacacacaauggaaagcucugcgauuuaaauggagugaagccucugauuuuaaaggauuguaguguagcuggauggcuccauggaaaccgaaugugugacgaguucaucagagugccggaauggucuuacauaguggagagggcuaacccagccaaugaccucuguuauccagggaaccucaaugacuaugaggaacugaaacaccuauugagcagaauaaaucauuuugagaagacucugaucauccccaagaguucuuggcccaaucauacaucaucaggggugagugcagcauguccauaccagggaaugcccuccuuuuucagaaaugugguauggcuuaccaaaaagaacgaugcauacccaacaauaaagaugagcuacaauaauaccuauagggaagaucuuuugauacugugggggauucaucauuccaacaaugcagcagagcagacaaaucucuauaaaaacccaaccaccuauguuuccguugggacaucaacauuaaaccagagauuggagccaaaaauagcuacuagaucccaaguaaacgggcaacguggaagaauggauuucuucuggaccauuuuaaaaccgaaugaugcaauccacuucgagaguaauggaaauuuuauugcuccagaauaugcauacaaaauugucaagaaaggggacucaacaauuaugaaaagugaaauggaauaugggcacugcaacaccaaaugucaaacuccaauaggggcgauaaacucuaguaugccauuccacaauauacacccucucacuaucggggagugccccaaauacgugaaaucgaacaaauuaguccuugcgacugggcucagaaauaguccucuaagagaaagaagaagaaaaagaggacuauuuggagcuauagcaggguuuauagagggaggauggcaaggaaugguagaugguugguauggguaccaccauagcaaugaacaggggaguggguacgcugcagacagagaauccacccaaaaggcaauagauggaguuaccaauaaggucaacucgauaauagacaaaaugaacacucaauuugaggccguuggaagagaauuuaauaacuuagaacggagaauagagaauuuaaauaagaaaauggaagacggauucuuagaugucuggacuuauaaugcugaacuuuuaguucucauggaaaaugagagaacucuagauuuccaugacucaaaugucaagaaccuuuaugacaagguccgacuacagcuuagggauaaugcaaaggagcuggguaaugguuguuucgaguucuaucacaaaugugauaaugaauguauggaaaguguaagaaaugggacguaugacuacccccuguauucagaagaagccagcuuaaaaagggaagaaauaagcggagugaaauuggaaucaauaggaacuuaccaaauacugucaauuuauucaacaguggcgaguucccuagcacuggcaaucauaguggcugguuuaucuuuauggaugugcuccaaugggucguugcagugcagaauuugcauuuaa

SEQ ID NO: 45697 - RNA, 1683 nt, Artificial Sequence
  derived and/or modified CDS sequence (wt) from hemagglutinin__InfluenzaA__ALT20080
auggagacaguaucacuaauaacuauacuacuaguagcaacaguaagcaaugcagauaaaaucugcaucggcuaucaaucaacaaacucuacagaaacuguggacacacuaacagaaaacaaugucccugugacacaugcaaaagaauugcuccacacagagcauaaugggaugcugugugcaacaagcuugggacaaccucuuauuuuagacaccugcaccauugaagggcuaaucuauggcaauccuucuugugaucuaucgcuggaaggaagagaaugguccuauaucgucgagagaccaucagcuguuaacggauuguguuaccccgggaauguagaaaaucuagaagagcuaaggucacuuuuuaguucugcuaggucuuaucaaagaauccagauuuucccagacacaaucuggaaugugucuuacgaugggacaagcacagcaugcucagguucauucuacagaagcaugagaugguugacucgaaagaacggcgauuacccuauccaagacgcccaauacacaaauaaucaagggaagaacauucuuuucauguggggcauaaaucacccacccaccgauacuacgcagagagaucuauacacgagaaccgacacaacaacgaguguggcaacagaagaaauaaauaggaucuucaaaccauugauaggaccaagaccucuugucaacgguuugaugggaagaauugauuauuauuggucgguuuugaaaccaggucaaacacugcgaauaaaaucugaugggaaccuaauagcuccaugguuuggacacauucuuucaggagagagccacggaagaauucugaagacuaaucuaaaaagggguagcugcaccgugcaaugucagacagagaaagguggcuuaaacacaacauugccauuccaaaauguaaguaaguaugcauuuggaaacugcucaaaauacauuggcauaaagagucucaaacuugcaguuggucugaggaaugugccuucuagaucuaguagaggacuauucggggccauagcaggguuuauagagggagguuggucaggacuagucgcugguugguauggguuccagcauucaaaugaccaagggguugguauggcagcagauagagacucaacucaaaaggcaauugauaaaauaacauccaaagugaauaauauagucgacaaaaugaacaagcaauaugaaaucaucgaucaugaauucagugagguagaaacuagacuuaacaugaucaauaauaagauugaugaucaaauccaggauauaugggcauauaaugcagaauugcuaguucugcucgaaaaccagaaaacacucgaugagcaugaugcaaauguaaacaaucuauauaauaaaguaaagagggcguuggguuccaaugcgguggaagaugggaaaggauguuucgagcuauaccacaaaugugaugaccaaugcauggagacaauucgaaacgggaccuacaacagaaggaaauaucaagaggagucaaaauuagaaagacagaaaauagagggggucaagcuggaaucugaaggaacuuacaaaauccucaccauuuauucgacugucgccucaucucuugugauugcaaugggguuugcugccuucuuguucugggccauguccaaugggucuugcagaugcaacauuuguauauaa

SEQ ID NO: 45698 - RNA, 1701 nt, Artificial Sequence
  derived and/or modified CDS sequence (wt) from hemagglutinin__InfluenzaA__ALT66860
augaaggcaauacuaguaguucugcuauauacauuuacaaccgcaaaugcagacacauuauguauagguuaucaugcgaacaauucaacagacacuguagacacaguacuagaaaagaauguaacaguaacacacucuguuaaucuucuggaagacaagcauaacggaaaacuaugcaaacuaagagggguagccccauugcauuuggguaaauguaacauugcuggcuggauccugggaaauccagagugugaaucacucuccacagcaaguucaugguccuacauuguggaaacaucuaauucagacaauggaacguguuacccaggagauuucaucaauuaugaggagcuaagagagcaauugagcucagugucaucauuugaaagguuugaaauauuccccaagacaaguucauggcccaaucaugacucgaacaaagguguaacggcagcauguccucacgcuggagcaaaaagcuucuacaaaaacuugauauggcuaguuaaaaaaggaaauucauacccaaagcucaaccaauccuacauuaaugauaaagggaaagaaguccucgugcuguggggcauucaccauccaucuacuacugcugaccaacaaagucucuaucagaaugcagaugcauauguuuuuguggggacaucaagauacagcaagaaguucaagccggaaauagcaacaagacccaaagugagggaucaagaagggagaaugaacuauuacuggacacuaguagagccgggagacaaaauaacauucgaagcaacuggaaaucuagugguaccgagauaugcauucacaauggaaagaaaugcuggaucugguauuaucauuucagauacaccaguccacgauugcaauacaacuugucagacacccgagggugcuauaaacaccagccucccauuucagaauauacauccgaucacaauugggaaauguccaaaguauguaaaaagcacaaaauugagacuggccacaggauugaggaaugucccgucuauucaaucuagaggccuauucggggccauugccggcuucauugaagggggguggacagggaugguagauggaugguacgguuaucaccaucaaaaugagcaggggucaggauaugcagccgaccugaagagcacacaaaaugccauugacaagauuacuaacaaaguaaauucuguuauugaaaagaugaauacacaguucacagcaguggguaaagaguucaaccaccuggaaaaaagaauagagaaucuaaauaaaaaaguugaugaugguuuccuggacauuuggacuuacaaugccgaacuguugguucuauuggaaaaugaaagaacuuuggacuaucacgauucaaaugugaagaacuuguaugaaaaaguaagaaaccaguuaaaaaacaaugccaaggaaauuggaaacggcugcuuugaauuuuaccacaaaugcgauaacacgugcauggaaagugucaaaaaugggacuuaugacuacccaaaauacucagaggaagcaaaauuaaacagagaaaaaauagaugggguaaagcuggaaucaacaaggaucuaccagauuuuggcgaucuauucaacugucgccaguucauugguacugguagucucccugggggcaaucagcuucuggaugugcucuaaugggucucuacaguguagaauauguauuuaa

SEQ ID NO: 45699 - RNA, 1701 nt, Artificial Sequence
  derived and/or modified CDS sequence (wt) from hemagglutinin__InfluenzaA__AMA65391
augaaggcaauacuaguaguucugcuauauacauuuacaaccgcaaaugcagacacauuauguauagguuaucaugcgaacaauucaacagacacuguagacacaguacuagaaaagaauguaacaguaacacacucuguuaaccuucuggaagacaagcauaacggaaaacuaugcaaacuaagagggguagccccauugcauuuggguaaauguaacauugcuggcuggauccugggaaauccagagugugaaucacucuccacagcaaguucaugguccuacauuguggaaacaucuaauucagacaauggaacguguuacccaggagauuucaucaauuaugaggagcuaagagagcaauugagcucagugucaucauuugaaagguuugagauauuccccaagacaaguucauggcccaaucaugacucgaacaaagguguaacggcagcauguccucacgcuggagcaaaaagcuucuacaaaaacuugauauggcuaguuaaaaaaggaaauucauacccaaagcucaaccaauccuacauuaaugauaaagggaaagaaguccucgugcuguggggcauucaccauccaucuacuacugcugaccaacaaagucucuaucagaaugcagaugcauauguuuuuguggggacaucaagauacagcaagaaguucaagccggaaauagcaacaagacccaaagugaggggucaagaagggagaaugaacuauuacuggacacuaguagagccgggagacaaaauaacauucgaagcaacuggaaaucuagugguaccgagauaugcauucacaauggaaagaaaugcuggaucugguauuaucauuucagauacaccaguccacgauugcaauacaacuugucagacacccgagggugcuauaaacaccagccucccauuucagaauauacauccgaucacaauuggaaaauguccaaaguauguaaaaagcacaaaauugagacuggccacaggauugaggaauguuccgucuauucaaucuagaggccuauucggggccauugccggcuucauugaagggggguggacagggaugguagauggaugguacgguuaucaccaucaaaaugagcaggggucaggauaugcagccgaccugaagagcacacaaaaugccauugacaagauuacuaacaaaguaaauucuguuauugaaaagaugaauacacaguucacagcaguggguaaagaguucaaccaccuggaaaaaagaauagagaaucuaaauaaaaaaguugaugaugguuuccuggacauuuggacuuacaaugccgaacuguugguucuauuggaaaaugaaagaacuuuggacuaucacgauucaaaugugaagaacuuguaugaaaaaguaagaaaccaguuaaaaaacaaugccaaggaaauuggaaacggcugcuuugaauuuuaccacaaaugcgauaacacgugcauggaaagugucaaaaaugggacuuaugacuacccaaaauacucagaggaagcaaaauuaaacagagaaaaaauagaugggguaaagcuggaaucaacaaggauuuaccagauuuuggcgaucuauucaacugucgccaguucauugguacugguagucuuccugggggcaaucagcuucuggaugugcucuaaugggucucuacaguguagaauauguauuuaa

SEQ ID NO: 45700 - RNA, 1701 nt, Artificial Sequence
  derived and/or modified CDS sequence (wt) from hemagglutinin__InfluenzaA__AMA65393
augaaggcaauacuaguaguucugcuauauacauuuacaaccgcaaaugcagacacauuauguauagguuaucaugcgaacaauucaacagacacuguagacacaguacuagaaaagaauguaacaguaacacacucuguuaaucuucuggaagacaagcauaacggaaaacuaugcaaacuaagagggguagccccauugcauuuggguaaauguaacauugcuggcuggauccugggaaauccagagugugaaucacucuccacagcaaguucaugguccuacauuguggaaacaucuaauucagacaauggaacguguuacccaggagauuucaucaauuaugaggagcuaagagagcaauugagcucagugucaucauuugaaagguuugaaauauuccccaagacaaguucauggcccaaucaugacucgaacaaagguguaacggcagcauguccucacgcuggagcaaaaagcuucuacaaaaacuugauauggcuaguuaaaaaaggaaauucauacccaaagcucaaccaauccuacauuaaugauaaagggaaagaaguccucgugcuguggggcauucaccauccaucuacuacugcugaccaacaaagucucuaucagaaugcagaugcauauguuuuuguggggacaucaagauacagcaagaaguucaagccggaaauagcaacaagacccaaagugagggaucaagaagggagaaugaacuauuacuggacacuaguagagccgggagacaaaauaacauucgaagcaacuggaaaucuagugguaccgagauaugcauucacaauggaaagaaaugcuggaucugguauuaucauuucagauacaccaguccacgauugcaauacaacuugucagacacccgagggugcuauaaacaccagccucccauuucagaauauacauccgaucacaauugggaaauguccaaaguauguaaaaagcacaaaauugagacuggccacaggauugaggaaugucccgucuauucaaucuagaggccuauucggggccauugccggcuucauugaagggggguggacagggaugguagauggaugguacgguuaucaccaucaaaaugagcaggggucaggauaugcagccgaccugaagagcacacaaaaugccauugacaagauuacuaacaaaguaaauucuguuauugaaaagaugaauacacaguucacagcaguggguaaagaguucaaccaccuggaaaaaagaauagagaaucuaaauaaaaaaguugaugaugguuuccuggacauuuggacuuacaaugccgaacuguugguucuauuggaaaaugaaagaacuuuggacuaucacgauucaaaugugaagaacuuguaugaaaaaguaagaaaccaguuaaaaaacaaugccaaggaaauuggaaacggcugcuuugaauuuuaccacaaaugcgauaacacgugcauggaaagugucaaaaaugggacuuaugacuacccaaaauacucagaggaagcaaaauuaaacagagaaaaaauagaugggguaaagcuggaaucaacaaggaucuaccagauuuuggcgaucuauucaccugucgccaguucauugguacugguagucuuccugggggcaaucagcuucuggaugugcucuaaugggucucuacaguguagaauauguauuuaa

SEQ ID NO: 45701 - RNA, 1701 nt, Artificial Sequence
  derived and/or modified CDS sequence (wt) from hemagglutinin__InfluenzaA__BAA02768
augaaagcaaaacuacuaguccuguuaugugcauuuacagcuacagaugcagacacaauauguauaggcuaccaugcgaacaacucaaccgacacuguugacacaguacuugagaagaacgugacagugacacacucugucaaccuacuugaggacagucacaacggaaaacuaugucgacuaaaaggaauagccccacuacaauuggguaauugcagcauugccggauggaucuuaggaaacccagaaugcgaaucacuguuuucuaaggaaucaugguccuacauugcagaaacaccaaacuccgagaauggaacauguuacccaggguauuucgccgacuaugaggaacugagggagcaauugaguucaguaucaucauucgagagauucgaaauauuccccaaagaaagcucauggcccaaccacaccguaaccaaaggaguaacggcaucaugcucccauaaugggaaaagcaguuuuuacagaaauuugcuauggcugacggggaagaauggcuuguacccaaaucugagcaaguccuaugugaacaacaaagagaaagaaguccuuguacuaugggguguucaucacccgucuaacauaggggaccaaagggccaucuaucauacagaaaaugcuuaugucucuguagugucuucacauuauagcaggagauucaccccagaaauagcaaaaagacccaaaguaagaggucaagaaggaagaauuaacuacuacuggacucugcuggaacccggggacacaauaauauuugaggcaaauggaaaucuaauagcgccaugguaugcuuucgcacugaguagaggcuuugggucaggaaucaucaccucaaacgcaucaauggaugaaugugacgcgaagugucaaacaccccagggagcuauaaacaguagucuuccuuuccagaauguacacccagucacaauaggagaguguccaaaguaugucaggaguacaaaauuaaggaugguuacaggacuaaggaacaucccauccauucaauccagagguuuguuuggagccauugccgguuucauugaagggggguggacuggaaugauagauggaugguaugguuaucaucaucagaaugaacaaggaucuggcuaugcugcggaucaaaaaagcacacaaaaugccauuaacggaauuacaaacaaggugaauucuguaaucgagaaaaugaacacucaauucacagcugugggcaaagaauucaacaaauuagaaagaaggauggaauacuuaaauaaaaaaguugaugauggauuucuggacauuuggacauauaaugcagaauuguugguucuacuggaaaaugaaaggacuuuggauuuucaugacucaaaugugaagaaucuguaugagaaaguaaaaagccaauuaaagaauaaugccaaagaaauaggauacggguguuuugaauucuaccacaaguguaacaaugaaugcauggaaagugugaaaaauggaacuuaugacuauccaaaauauuccgaggaaucaaaguuaaacagggaaaaaauugauggagugaaauuggaaucaaugggagucuaucagauucuggcgaucuacucaacugucgccaguucacuggugcuuuuggucucccugggggcaaucagcuucuggauguguucuaaugggucuuugcaguguagaauaugcaucuga

SEQ ID NO: 45702 - RNA, 1701 nt, Artificial Sequence
  derived and/or modified CDS sequence (wt) from hemagglutinin__InfluenzaA__BAA02769
augaaagcaaaacuacuaguccuguuaugugcauuuacagcuacagaugcagacacaauauguauaggcuaccaugcgaacaacucaaccgacacuguugacacaguacuugagaagaacgugacagugacacacucugucaaccuacuugaggacagucacaacggaaaacuaugucgacuaaaaggaauagccccacuacaauuggguaauugcagcauugccggauggaucuuaggaaacccagaaugcgaaucacuguuuucuaaggaaucaugguccuacauugcagaaacaccaaacuccgagaauggaacauguuacccaggguauuucgccgacuaugaggaacugagggagcaauugaguucaguaucaucauucgagagauucgaaauauuccccaaagaaagcucauggcccaaccacaccguaaccaaaggaguaacggcaucaugcucccauaaugggaaaagcaguuuuuacagaaauuugcuauggcugacggggaagaauggcuuguacccaaaucugagcaaguccuaugugaacaacaaagagaaagaaguccuuguacuaugggguguucaucacccgucuaacauaagggaccaaagggccaucuaucauacagaaaaugcuuaugucucuguagugucuucacauuauagcaggagauucaccccagaaauagcaaaaagacccaaaguaagagaucaagaaggaagaauuaacuacuacuggacucugcuggaacccggggacacaauaauauuugaggcaaauggaaaucuaauagcgccaugguaugcuuucgcacugaguagaggcuuugggucaggaaucaucaccucaaacgcaucaauggaugaaugugacgcgaagugucaaacaccccagggagcuauaaacaguagucuuccuuuccagaauguacacccagucacaauaggagaguguccaaaguaugucaggaguacaaaauuaaggaugguuaaaggacuaaggaacaucccauccauucaauccagagguuuguuuggagccauugccgguuucauugaagggggguggacuggaaugauagauggaugguaugguuaucaucaucagaaugaacaaggaucuggcuaugcugcggaucaaaaaagcacacaaaaugccauuaacggaauuacaaacaaggugaauucuguaaucgagaaaaugaacacucaauucacagcugugggcaaagaauucaacaaauuagaaagaaggauggaauacuuaaauaaaaaaguugaugauggauuucuggacauuuggacauauaaugcagaauuguugguucuacuggaaaaugaaaggacuuuggauuuucaugacucaaaugugaagaaucuguaugagaaaguaaaaagccaauuaaagaauaaugccaaagaaauaggauacggguguuuugaauucuaccacaaguguaacaaugaaugcauggaaagugugaaaaauggaacuuaugacuauccaaaauauuccgaggaaucaaaguuaaacagggaaaaaauugauggagugaaauuggaaucaaugggagucuaucagauucuggcgaucuacucaacugucgccaguucacuggugcuuuuggucucccugggggcaaucagcuucuggauguguucuaaugggucuuugcaguguagaauaugcaucuga

SEQ ID NO: 45703 - RNA, 1689 nt, Artificial Sequence
  derived and/or modified CDS sequence (wt) from hemagglutinin__InfluenzaA__BAC43764
auggccaucauuuaucucauucuccuguucacagcagugagaggggaccagauaugcauuggauaccaugccaauaauuccacagagaaggucgacacaauucuagagcggaacgucacugugacucaugccaagaacauucuugagaagacccauaacggaaaguuaugcaaacuaaacggaaucccuccacuugaacuaggggacuguagcauugccggauggcuccuuggaaauccagaaugugauaggcuucuaauugugccagaaugguccuauauaauggagaaagaaaacccgagagacgguuuguguuauccaggcagcuucaaugauuaugaagaauugaaacaucuccucagcagcgugaaacauuucgagaaaguaaagauucugcccaaagauagauggacacagcauacaacaacuggagguucgcgggccugugcggugucugguaauccaucauucuucaggaacauggucuggcugacaaagaaaggaucaaauuauccgguugccaaaggaucguacaacaauacaagcggagaacaaaugcugauaauuuggggggugcaccaucccauugaugagacagaacaaauaacauuguaccagaaugugggaaccuauguuuccguaggcacaucaacauugaacaaaaggucaaccccagaaauagcaacaaggccuaaagugaauggacuaggaaguagaauggaauucucuuggacccucuuggauaugugggacaccauaaauuuugagaguacugguaaucuaauugcaccagaguauggauucaaaauaucgaaaagagguaguucagggaucaugaaaacagaaggaacacuugagaacugugagaccaaaugccaaacuccuuugggagcaauaaauacaacauugccuuuucauaauguccacccacugacaauaggugagugccccaaauauguaaaaucggagaaguuggucuuagcaacaggacuaaggaauguuccccagauugaaucaagaggauuguuuggggcaauagcugguuuuauagaaggaggauggcaaggaaugguugaugguugguauggauaccaucacagcaaugaccagggaucaggauaugcagcagacaaagaauccacucaaaaggcauuugauggaaucaccaacaagguaaauucugugauugaaaagaugaacacccaauuugaagcuguugggaaagaauucaguaacuuagagagaagacuggagaacuugaacaaaaagauggaagacggguuucuagauguguggacauacaaugcugagcuucuaguucugauggaaaaugagaggacacuugacuuucaugauuccaaugucaagaaucuguaugauaaagucagaaugcagcugagagacaacgucaaagaacuaggaaauggauguuuugaauuuuaucacaaaugugaugaugaaugcaugaauagugugaaaaacgggacguaugauuaucccaaguaugaagaagagucuaaacuaaauagaaaugaaaucaaagggguaaaauugagcagcauggggguuuaucaaauccuugccauuuaugccacaguagcagguucucugucacuggcaaucaugauggcugggaucucuuucuggaugugcuccaacgggucucugcaguucaggaucugcauauga

SEQ ID NO: 45704 - RNA, 1707 nt, Artificial Sequence
  derived and/or modified CDS sequence (wt) from hemagglutinin__InfluenzaA__BAE07201
auggagaaaauagugcuucuuuuugcaauagucagucuuguuaaaagugaucagauuugcauugguuaccaugcaaacaacucgacagagcagguugacacaauaauggaaaagaacguuacuguuacacaugcccaagacauacuggaaaagacacacaacgggaagcucugcgaucuagauggagugaagccucuaauuuugagagauuguaguguagcuggauggcuccucggaaacccaaugugugacgaauucaucaaugugccggaauggucuuacauaguggagaaggccaauccagccaaugaccucuguuacccaggggauuucaacgacuaugaagaauugaaacaccuauugagcagaauaaaccauuuugagaaaauucagaucauccccaaaaauucuugguccagucaugaagccucauuaggggugagcucagcauguccauaccaaggaaaguccuccuuuuucaggaaugugguauggcuuaucaaaaagaacaaugcauacccaacaauaaagaggagcuacaauaauaccaaccaagaagaucuuuugguauugugggggauucaccauccuaaugaugcggcagagcagacuaggcucuaucaaaacccaaccaccuacauuuccguugggacaucaacacuaaaccagagauugguaccaaaaauagcuacuagauccaaaguaaacgggcaaaauggaaggauggaguucuucuggacaauuuuaaaaccgaaugaugcaaucaacuucgagagcaauggaaauuucauugcuccagaauaugcauacaaaauugucaagaaaggggacucagcaauuaugaaaagugaauuggaauaugguaacugcaacaccaagugucaaacuccaaugggggcgauaaacucuaguaugccauuccacaauauacacccucucaccaucggggaaugccccaaauaugugaaaucaaacagauuaguccuugcgacugggcucagaaauagcccucaaagagagagaagaagaaaaaagagaggauuauuuggagcuauagcagguuuuauagagggaggauggcagggaaugguagaugguugguauggguaccaccauagcaaugagcaggggaguggguacgcugcagacaaagaauccacucaaaaggcaauagauggagucaccaauaaggucaacucgaucauugacaaaaugaacacucaguuugaggccguuggaagggaauuuaauaacuuagaaaggagaauagagaauuuaaacaagaagauggaagacggauuccuagaugucuggacuuauaaugcugaacuucugguucucauggaaaaugagagaacucuagacuuucaugacucaaaugucaagaaccuuuacgacaagguccgacuacagcuuagggauaaugcaaaggagcuggguaacgguuguuucgaguucuaucacaaaugugauaaugaauguauggaaaguguaagaaacggaacguaugacuacccgcaguauucagaagaagcaagacuaaaaagagaggaaauaaguggaguaaaauuggagucaauaggaacuuaccaaauacugucaauuuauucuacaguggcgaguucccuagcacuggcaaucaugguagcuggucuaucuuuauggaugugcuccaaugggucguuacaaugcagaauuugcauuuaa

SEQ ID NO: 45705 - RNA, 1701 nt, Artificial Sequence
  derived and/or modified CDS sequence (wt) from hemagglutinin__InfluenzaA__BAH95823
augaaggcaauacuaguaguucugcuauauacauuugcaaccgcaaaugcagacacauuauguauagguuaucaugcgaacaauucaacagacacuguagacacaguacuagaaaagaauguaacaguaacacacucuguuaaccuucuagaagacaagcauaacgggaaacuaugcaaacuaagagggguagccccauugcauuuggguaaauguaacauugcuggcuggauccugggaaauccagagugugaaucacucuccacagcaagcucaugguccuacauuguggaaacaucuaguucagacaauggaacguguuacccaggagauuucaucgauuaugaggagcuaagagagcaauugagcucagugucaucauuugaaagguuugagauauuccccaagacaaguucauggcccaaucaugacucgaacaaagguguaacggcagcauguccucaugcuggagcaaaaagcuucuacaaaaauuuaauauggcuaguuaaaaaaggaaauucauacccaaagcucagcaaauccuacauuaaugauaaagggaaagaaguccucgugcuauggggcauucaccauccaucuacuagugcugaccaacaaagucucuaucagaaugcagaugcauauguuuuuguggggucaucaagauacagcaagaaguucaagccggaaauagcaauaagacccaaagugagggaucaagaagggagaaugaacuauuacuggacacuaguagagccgggagacaaaauaacauucgaagcaacuggaaaucuagugguaccgagauaugcauucgcaauggaaagaaaugcuggaucugguauuaucauuucagauacaccaguccacgauugcaauacaacuugucagacacccaagggugcuauaaacaccagccucccauuucagaauauacauccgaucacaauuggaaaauguccaaaacauguaaaaagcacaaaauugagacuggccacaggauugaggaaugucccgucuauucaaucuagaggccuauuuggggccauugccgguuucauugaagggggguggacagggaugguagauggaugguacgguuaucaccaucaaaaugagcaggggucaggauaugcagccgaccugaagagcacacagaaugccauugacgagauuacuaacaaaguaaauucuguuauugaaaagaugaauacacaguucacagcaguagguaaagaguucaaccaccuggaaaaaagaauagagaauuugaauaaaaaaguugaugaugguuuccuggacauuuggacuuacaaugccgaacuguugguucuauuggaaaaugaaagaacuuuggacuaccacgauucaaaugugaagaacuuauaugaaaagguaagaagccagcuaaaaaacaaugccaaggaaauuggaaacggcugcuuugaauuuuaccacaaaugcgauaacacgugcauggaaagugucaaaaaugggacuuaugacuacccaaaauacucagaggaagcaaaauuaaacagagaagaaauagaugggguaaagcuggaaucaacaaggauuuaccagauuuuggcgaucuauucaacugucgccaguucauugguacugguagucucccugggggcaaucaguuucuggaugugcucuaaugggucucuacaguguagaauauguauuuaa

SEQ ID NO: 45706 - RNA, 1701 nt, Artificial Sequence; identical to SEQ ID NO: 34676
  derived and/or modified CDS sequence (wt) from hemagglutinin__InfluenzaA__BAH95824

SEQ ID NO: 45707 - RNA, 1707 nt, Artificial Sequence
  derived and/or modified CDS sequence (wt) from hemagglutinin__InfluenzaA__BAJ07997
auggagaaaauagugcuucuuuuugcaauagucagucuuguuaaaagugaucagauuugcauugguuaccaugcaaacaacucgacagagcagguugacacaauaauggaaaagaacguuacuguuacacaugcccaagacauacuggaaaagacacacaacgggaagcucugcgaucuagauggagugaagccucuaauuuugagagauuguaguguagcuggauggcuccucggaaacccaaugugugacgaauucaucaaugugccggaauggucuuacauaguggagaaggccaauccagccaaugaccucuguuacccaggggauuucaacgacuaugaagaauugaaacaccuauugagcagaauaaaccauuuugagaaaauucagaucauccccaaaaauucuugguccagucaugaagccucauuaggggugagcucagcauguccauaccaaggaaaguccuccuuuuucaggaaugugguauggcuuaucaaaaagaacaaugcauacccaacaauaaagaggagcuacaauaauaccaaccaagaagaucuuuugguauugugggggauucaccauccuaaugaugcggcagagcagacuaggcucuaucaaaacccaaccaccuacauuuccguugggacaucaacacuaaaccagagauugguaccaaaaauagcuacuagauccaaaguaaacgggcaaaguggaaggauggaguucuucuggacaauuuuaaaaccgaaugaugcaaucaacuucgagagcaauggaaauuucauugcuccagaauaugcauacaaaauugucaagaaaggggacucagcaauuaugaaaagugaauuggaauaugguaacugcaacaccaagugucaaacuccaaugggggcgauaaacucuaguaugccauuccacaauauacacccucucaccaucggggaaugccccaaauaugugaaaucaaacagauuaguccuugcgacugggcucagaaauagcccucaaagagagagaagaagaaaaaagagaggauuauuuggagcuauagcagguuuuauagagggaggauggcagggaaugguagaugguugguauggguaccaccauagcaaugagcaggggaguggguacgcugcagacaaagaauccacucaaaaggcaauagauggagucaccaauaaggucaacucgaucauugacaaaaugaacacucaguuugaggccguuggaagggaauuuaauaacuuagaaaggagaauagagaauuuaaacaagaagauggaagacggauuccuagaugucuggacuuauaaugcugaacuucugguucucauggaaaaugagagaacucuagacuuucaugacucaaaugucaagaaccuuuacgacaagguccgacuacagcuuagggauaaugcaaaggagcuggguaacgguuguuucgaguucuaucacaaaugugauaaugaauguauggaaaguguaagaaacggaacguaugacuacccgcaguauucagaagaagcaagacuaaaaagagaggaaauaaguggaguaaaauuggagucaauaggaacuuaccaaauacugucaauuuauucuacaguggcgaguucccuagcacuggcaaucaugguagcuggucuaucuuuauggaugugcuccaaugggucguuacaaugcagaauuugcauuuaa

SEQ ID NO: 45708 - RNA, 1701 nt, Artificial Sequence
  derived and/or modified CDS sequence (wt) from hemagglutinin__InfluenzaA__BAJ39949
augaaggcaauacuaguaguucugcuauauacauuugcaaccgcaaaugcagacacauuauguauagguuaucaugcgaacaauucaacagacacuguagacacaguacuagaaaagaauguaacaguaacacacucuguuaaccuucuagaagacaagcauaacgggaaacuaugcaaacuaagagggguagccccauugcauuuggguaaauguaacauugcuggcuggauccugggaaauccagagugugaaucacucuccacagcaagcucaugguccuacauuguggaaacaucuaguucagacaauggaacguguuacccaggagauuucaucgauuaugaggagcuaagagagcaauugagcucagugucaucauuugaaagguuugagauauuccccaagacaaguucauggcccaaucaugacucgaacaaagguguaacggcagcauguccucaugcuggagcaaaaagcuucuacaaaaauuuaauauggcuaguuaaaaaaggaaauucauacccaaagcucagcaaauccuacauuaaugauaaagggaaagaaguccucgugcuauggggcauucaccauccaucuacuagugcugaccaacaaagucucuaucagaaugcagauacauauguuuuuguggggacaucaagauacagcaagaaguucaagccggaaauagcaauaagacccaaagugagggaucaagaagggagaaugaacuauuacuggacacuaguagagccgggagacaaaauaacauucgaagcaacuggaaaucuagugguaccgagauaugcauucgcaauggaaagaaaugcuggaucugguauuaucauuucagauacaccaguccacgauugcaauacaacuugucagacacccaagggugcuauaaacaccagccucccauuucagaauauacauccgaucacaauuggaaaauguccaaaauauguaaaaagcacaaaauugagacuggccacaggauugaggaaugucccgucuauucaaucuagaggccuauuuggggccauugccgguuucauugaagggggguggacagggaugguagauggaugguacgguuaucaccaucaaaaugagcaggggucaggauaugcagccgaccugaagagcacacagaaugccauugacgagauuacuaacaaaguaaauucuguuauugaaaagaugaauacacaguucacagcaguagguaaagaguucaaccaccuggaaaaaagaauagagaauuuaaauaaaaaaguugaugaugguuuccuggacauuuggacuuacaaugccaaacuguugguucuauugaaaaaugaaagaacuuuggacuaccacgauucaaaugugaagaacuuauaugaaaagguaagaagccaguuaaaaaacaaugccaaggaaauuggaaacggcugcuuugaauuuuaccacaaaugcgauaacacgugcauggaaagugucaaaaaugggacuuaugacuacccaaaauacucagaggaagcaaaauuaaacagagaagaaauagaugggguaaagcuggaaucaacaaggauuuaccagauuuuggcgaucuauucaacugucgccaguucauugguacugguagucucccugggggcaaucaguuucuggaugugcucuaaugggucucuacaguguagaauauguauuuaa

SEQ ID NO: 45709 - RNA, 1701 nt, Artificial Sequence
  derived and/or modified CDS sequence (wt) from hemagglutinin__InfluenzaA__BAJ39950
augaaggcaauacuaguaguucugcuauauacauuugcaaccgcaaaugcagacacauuauguauagguuaucaugcgaacaauucaacagacacuguagacacaguacuagaaaagaauguaacaguaacacacucuguuaaccuucuagaagacaagcauaacgggaaacuaugcaaacuaagagggguagccccauugcauuuggguaaauguaacauugcuggcuggauccugggaaauccagagugugaaucacucuccacagcaagcucaugguccuacauugcggaaacaucuaguucagacaauggaacguguuacccaggagauuucaucgauuaugaggagcuaagagagcaauugagcucagugucaucauuugaaagguuugagauauuccccaagacuaguucauggcccaaucaugacucgaacaaaggcguaacggcagcauguccucaugcuggagcaaaaagcuucuacaaaaauuuaauauggcuaguuaaaaaaggaaauucauacccaaagcucagcaaauccuacauuaaugauaaagggaaagaaguccucgugcuauggggcauucaccauccaucuacuagugcugaccaacaaagucucuaucagaaugcagaugcauauguuuuuguggggacaucaagauacagcaagaaguucaagccggaaauagcaauaagacccaaagugagggaucaagaagggagaaugaacuauuacuggacacuaguagagccgggagacaaaauaacauucgaagcaacuggaaaucuagugguaccgagauaugcauucgcaauggaaagaaaugcuggaucugguauuaucauuucagauacaccaguccacgauugcaauacaacuugucagacacccaagggugcuauaaacaccagccucccauuucagaauauacauccgaucacaauuggaaaauguccaaaauauguaaaaagcacaaaauugagacuggccacaggauugaggaaugucccgucuauucaaucuagaggccuauuuggggccauugccgguuucauugaagggggguggacagggaugguagauggaugguacgguuaucaccaucaaaaugagcaggggucaggauaugcagccgaccugaagagcacacagaaugccauugacgagauuacuaacaaaguaaauucuguuauugaaaagaugaauacacaguucacagcaguagguaaagaguucaaccaccuggaaaaaagaauagagaauuuaaauaaaaaaguugaugaugguuuccuggacauuuggacuuacaaugccgaacuguugguucuauuggaaaaugaaagaacuuuggacuaccacgauucaaaugugaagaacuuauaugaaaagguaagaagccaguuaaaaaacaaugccaaggaaauuggaaacggcugcuuugaauuuuaccacaaaugcgauaacacgugcauggaaagugucaaaaaugggacuuaugacuacccaaaauacucagaggaagcaaaauuaaacagagaagaaauagaugggguaaagcuggaaucaacaaggauuuaccagauuuuggcgaucuauucaacugucgccaguucauugguacugguagucucccugggggcaaucaguuucuggaugugcucuaaugggucucuacaguguagaauauguauuuaa

SEQ ID NO: 45710 - RNA, 1701 nt, Artificial Sequence
  derived and/or modified CDS sequence (wt) from hemagglutinin__InfluenzaA__BAJ39951
augaaggcaauacuaguaguucugcuauauacauuugcaaccgcaaaugcagacacauuauguauagguuaucaugcgaacaauucaacagacacuguagacacaguacuagaaaagaauguaacaguaacacacucuguuaaccuucuagaagacaagcauaacgggaaacuaugcaaacuaagagggguagccccauugcauuuggguaaauguaacauugcuggcuggauccugggaaauccagagugugaaucacucuccacagcaagcucaugguccuacauuguggaaacaucuaguucagacaauggaacguguuacccaggagauuucaucgauuaugaggagcuaagagagcaauugagcucagugucaucauuugaaagguuugagauauuccccaagacaaguucauggcccaaucaugacucgaacaaaggcguaacggcagcauguccucaugcuggagcaaaaagcuucuacaaaaauuuaauauggcuaguuaaaaaaggaaauucauacccaaagcucagcaaauccuacauuaaugauaaagggaaagaaguccucgugcuauggggcauucaccauccaucuacuagugcugaccaacaaagucucuaucagaaugcagauacauauguuuuuguggggacaucaagauacagcaagaaguucaagccggaaauagcaauaagacccaaagugagggaucaagaagggagaaugaacuauuacuggacacuaguagagccgggagacaaaauaacauucgaagcaacuggaaaucuagugguaccgagauaugcauucgcaauggaaagaaaugcuggaucugguauuaucauuucagauacaccaguccacgauugcaauacaacuugucagacacccaagggugcuauaaacaccagccucccauuucagaauauacauccgaucacaauuggaaaauguccaaaauauguaaaaagcacaaaauugagacuggccacaggauugaggaaugucccgucuuuucaaucuagaggccuauuuggggccauugccgguuucauugaagggggguggacagggaugguagauggaugguacgguuaucaccaucaaaaugagcaggggucaggauaugcagccgaccugaaaagcacacagaaugccauugacgagauuacuaacaaaguaaauucuguuauugaaaagaugaauacacaguucacagcaguagguaaagaguucaaccaccuggaaaaaagaauagagaauuuaaauaaaaagguugaugaugguuuccuggacauuuggacuuacaaugccgaacuguugguucuauuggaaaaugaaagaacuuuggacuaccacgauucaaaugugaagaacuuauaugaaaagguaagaagccaguuaaaaaacaaugccaaggaaauuggaaacggcugcuuugaauuuuaccacaaaugcgauaacacgugcauggaaagugucaaaaaugggacuuaugacuacccaaaauacucagaggaagcaaaauuaaacagagaagaaauagaugggguaaagcuggaaucaacaaggauuuaccagauuuuggcgaucuauucaacugucgccaguucauugguacugguagucucccugggggcaaucaguuucuggaugugcucuaaugggucucuacaguguagaauauguauuuaa

SEQ ID NO: 45711 - RNA, 1701 nt, Artificial Sequence
  derived and/or modified CDS sequence (wt) from hemagglutinin__InfluenzaA__BAJ39952
augaaggcaauacuaguaguucugcuauauacauuugcaaccgcaaaugcagacacauuauguauagguuaucaugcgaacaauucaacagacacuguagacacaguacuagaaaagaauguaacaguaacacacucuguuaaccuucuagaagacaagcauaacgggaaacuaugcaaacuaagagggguagccccauugcauuuggguaaauguaacauugcuggcuggauccugggaaauccagagugugaaucacucuccacagcaagcucaugguccuacauuguggaaacaucuaguucagacaauggaacguguuacccaggagauuucaucgauuaugaggagcuaagagagcaauugagcucagugucaucauuugaaagguuugagauauuccccaagacaaguucauggcccaaucaugacucgaacaaagguguaacggcagcauguccucaugcuggagcaaaaagcuucuacaaaaauuuaauauggcugguuaaaaaaggaaauucauacccaaagcucagcaaauccuacauuaaugauaaagggaaagaaguccucgugcuauggggcauucaccauccaucuacuagugcugaccaacaaagucucuaucagaaugcagauacauauguuuuuguggggacaucaagauacagcaagaaguucaagccggaaauagcaauaagacccaaagugagggaucaagaagggagaaugaacuauuacuggacacuaguagagccgggagacaaaauaacauucgaagcaacuggaaaucuagugguaccgagauaugcauucgcaauggaaagaaaugcuggaucugguauuaucauuucagauacaccaguccacgauugcaauacaacuugucagacacccaagggugcuauaaacaccagccucccauuucagaauauacauccgaucacaauuggaaaauguccaaaauauguaaaaagcacaaaauugagacuggccacaggauugaggaaugucccgucuauucaaucuagaggccuauuuggggccauugccgguuucauugaagggggguggacagggaugguagauggaugguacgguuaucaccaucaaaaugagcaggggucaggauaugcagccgaccugaagagcacacagaaugccauugacgagauuacuaacaaaguaaauucuguuauugaaaagaugaauacacaguucacagcaguagguaaagaguucaaccaccuggaaaaaagaauagagaauuuaaauaaaaaaguugaugaugguuuccuggacauuuggacuuacaaugccgaacuguugguucuauuggaaaaugaaagaacuuuggacuaccacgauucaaaugugaagaacuuauaugaaaagguaagaagccaguuaaaaaacaaugccaaggaaauuggaaacggcugcuuugaauuuuaccacaaaugcgauaacacgugcauggaaagugucaaaaaugggacuuaugacuacccaaaauacucagaggaagcaaaauuaaacagagaagaaauagaugggguaaagcuggaaucaacaaggauuuaccagauuuuggcgaucuauucaacugucgccaguucauugguacugguagucucccugggggcaaucaguuucuggaugugcucuaaugggucucuacaguguagaauauguauuuaa

SEQ ID NO: 45712 - RNA, 1701 nt, Artificial Sequence
  derived and/or modified CDS sequence (wt) from hemagglutinin__InfluenzaA__BAJ39953
augaaggcaauacuaguaguucugcuauauacauuugcaaccgcaaaugcagacacauuauguauagguuaucaugcgaacaauucaacagacacuguagacacaguacuagaaaagaauguaacaguaacacacucuguuaaccuucuagaagacaagcauaacgggaaacuaugcaaacuaagagggguagccccauugcauuuggguaaauguaacauugcuggcuggauccugggaaauccagagugugaaucacucuccacagcaagcucaugguccuacauuguggaaacaucuaguucagacaauggaacguguuacccaggagauuucaucgauuaugaggagcuaagagagcaauugagcucagugucaucauuugaaagguuugagauauuccccaagacaaguucauggcccaaucaugacucgaacaaaggcguaacggcagcauguccucaugcuggagcaaaaagcuucuacaaaaauuuaauauggcuaguuaaaaaaggaaauucauacccaaagcucagcaaauccuacauuaaugauaaagggaaagaaguccucgugcuauggggcauucaccauccaucuacuagugcugaccaacaaagucucuaucagaaugcagauacauauguuuuuguggggacaucaagauacagcaagaaguucaagccggaaauagcaauaagacccaaagugagggaucaagaagggagaaugaacuauuacuggacacuaguagagccgggagacaaaauaacauucgaagcaacuggaaaucuagugguaccgagauaugcauucgcaauggaaagaaaugcuggaucugguauuaucauuucagauacaccaguccacgauugcaauacaacuugucagacacccaagggugcuauaaacaccagccucccauuucagaauauacauccgaucacaauuggaaaauguccaaaauauguaaaaagcacaaaauugagacuggccacaggauugaggaaugucccgucuauucaaucuagaggccuauuuggggccauugccgguuucauugaagggggguggacagggaugguagauggaugguacgguuaucaccaucaaaaugagcaggggucaggauaugcagccgaccugaaaagcacacagaaugccauugacgagauuacuaacaaaguaaauucuguuauugaaaagaugaauacacaguucacagcaguagguaaagaguucaaccaccuggaaaaaagaauagagaauuuaaauaaaaagguugaugaugguuuccuggacauuuggacuuacaaugccaaacuguugguucuauuggaaaaugaaagaacuuuggacuaccacgauucaaaugugaaaaacuuauaugaaaagguaagaagccaguuaaaaaacaaugccaaggaaauuggaaacggcugcuuugaauuuuaccacaaaugcgauaacacgugcauggaaagugucaaaaaugggacuuaugacuacccaaaauacucagaggaagcaaaauuaaacagagaagaaauagaugggguaaagcuggaaucaacaaggauuuaccagauuuuggcgaucuauucaacugucgccaguucauugguacugguagucucccugggggcaaucaguuucuggaugugcucuaaugggucucuacaguguagaauauguauuuaa

SEQ ID NO: 45713 - RNA, 1701 nt, Artificial Sequence
  derived and/or modified CDS sequence (wt) from hemagglutinin__InfluenzaA__BAJ39954
augaaggcaauacuaguaguucugcuauauacauuugcaaccgcaaaugcagacacauuauguauagguuaucaugcgaacaauucaacagacacuguagacacaguacuagaaaagaauguaacaguaacacacucuguuaaccuucuagaagacaagcauaacgggaaacuaugcaaacuaagagggguagccccauugcauuuggguaaauguaacauugcuggcuggauccugggaaauccagagugugaaucacucuccacagcaagcucaugguccuacauuguggaaacaucuaguucagacaauggaacguguuacccaggagauuucaucgauuaugaggagcuaagagagcaauugagcucagugucaucauuugaaagguuugagauauuccccaagacaaguucauggcccaaucaugacucgaacaaagguguaacggcagcauguccucaugcuggagcaaaaagcuucuacaaaaauuuaauauggcugguuaaaaaaggaaauucauacccaaagcucagcaaauccuacauuaaugauaaagggaaagaaguccucgugcuauggggcauucaccauccaucuacuagugcugaccaacaaagucucuaucagaaugcagauacauauguuuuuguggggacaucaagauacagcaagaaguucaagccggaaauagcaauaagacccaaagugagggaucaagaagggagaaugaacuauuacuggacacuaguagagccgggagacaaaauaacauucgaagcaacuggaaaucuagugguaccgagauaugcauucgcaauggaaagaaaugcuggaucugguauuaucauuucagauacaccaguccacgauugcaauacaacuugucagacacccaagggugcuauaaacaccagccucccauuucagaauauacauccgaucacaauuggaaaauguccaaaauauguaaaaagcacaaaauugagacuggccacaggauugaggaaugucccgucuauucaaucuagaggccuauuuggggccauugccgguuucauugaagggggguggacagggaugguagauggaugguacgguuaucaccaucaaaaugagcaggggucaggauaugcagccgaccugaagagcacacagaaugccauugacgagauuacuaacaaaguaaauucuguuauugaaaagaugaauacacaguucacagcaguagguaaagaguucaaccaccuggaaaaaagaauagagaauuuaaauaaaaaaguugaugaugguuuccuggacauuuggacuuacaaugccgaacuguugguucuauuggaaaaugaaagaacuuuggacuaccacgauucaaaugugaaaaacuuauaugaaaagguaagaagccaguuaaaaaacaaugccaaggaaauuggaaacggcugcuuugaauuuuaccacaaaugcgauaacacgugcauggaaagugucaaaaaugggacuuaugacuacccaaaauacucagaggaagcaaaauuaaacagagaagaaauagaugggguaaagcuggaaucaacaaggauuuaccagauuuuggcgaucuauucaacugucgccaguucauugguacugguagucucccugggggcaaucaguuucuggaugugcucuaaugggucucuacaguguagaauauguauuuaa

SEQ ID NO: 45714 - RNA, 1701 nt, Artificial Sequence
  derived and/or modified CDS sequence (wt) from hemagglutinin__InfluenzaA__BAJ39955
augaaggcaauacuaguaguucugcuauauacauuugcaaccgcaaaugcagacacauuaaguauagguuaucaugcgaacaauucaacagacacuguagacacaguacuagaaaagaauguaacaguaacacacucuguuaaccuucuagaagacaagcauaacgggaaacuaugcaaacuaagagggguagccccauugcauuuggguaaauguaacauugcaggcuggauccugggaaauccagagugugaaucacucuccacagcaagcucaugguccuacauuguggaaacaucuaguucagacaauggaacguguuacccaggagauuucaucgauuaugaggagcuaagagagcaauugagcucagugucaucauuugaaagguuugagauauuccccaagacaaguucauggcccaaucaugacucgaacaaaggcguaacggcagcauguccucaugcuggagcaaaaagcuucuacaaaaauuuaauauggcuaguuaaaaaaggaaauucauacccaaagcucagcaaauccuacauuaaugauaaagggaaagaaguccucgugcuauggggcauucaccauccaucuauuagugcugaccaacaaagucucuaucagaaugcagauacauauguuuuuguggggacaucaagauacagcaagaaguucaagccggaaauagcaauaagacccaaagugagggaucaagaagggagaaugaacuauuacuggacacuaguagagccgggagacaaaauaacauucgaagcaacuggaaaucuagugguaccgagauaugcauucgcaauggaaagaaaugcuggaucugguauuaucauuucagauacaccaguccacgauugcaauacaacuugucagacacccaagggugcuauaaacaccagccucccauuucagaauauacauccgaucacaauuggaaaauguccaaaauauguaaaaagcacaaaauugagacuggccacaggauugaggaaugucccgucuauucaaucuagaggccuauuuggggccauugccgguuucauugaagggggguggacagggaugguagauggaugguacgguuaucaccaucaaaaugagcaggggucaggauaugcagccgaccugaaaagcacacagaaugccauugacgagauuacuaacaaaguaaauucuguuauugaaaagaugaauacacaguucacagcaguagguaaagaguucaaccaccuggaaaaaagaauagagaauuuaaauaaaaagguugaugaugguuuccuggacauuuggacuuacaaugccgaacuguugguucuauuggaaaaugaaagaacuuuggacuaccacgauucaaaugugaagaacuuauaugaaaagguaagaagccaguuaaaaaacaaugccaaggaaauuggaaacggcugcuuugaauuuuaccacaaaugcgauaacacgugcauggaaagugucaaaaaugggacuuaugacuacccaaaauacucagaggaagcaaaauuaaacagagaagaaauagaugggguaaagcuggaaucaacaaggauuuaccagauuuuggcgaucuauucaacugucgccaguucauugguacugguagucucccugggggcaaucaguuucuggaugugcucuaaugggucucuacaguguaaaauauguauuuaa

SEQ ID NO: 45715 - RNA, 1701 nt, Artificial Sequence
  derived and/or modified CDS sequence (wt) from hemagglutinin__InfluenzaA__BAJ39956
augaaggcaauacuaguaguucugcuauauacauuugcaaccgcaaaugcagacacauuauguauagguuaucaugcgaacaauucaacagacacuguagacacaguacuagaaaagaauguaacaguaacacacucuguuaaccuucuagaagacaagcauaacgggaaacuaugcaaacuaagagggguagccccauugcauuuggguaaauguaacauugcuggcuggauccugggaaauccagagugugaaucacucuccacagcaagcucaugguccuacauugcggaaacaucuaguucagacaauggaacguguuacccaggagauuucaucgauuaugaggagcuaagagagcaauugagcucagugucaucauuugaaagguuugagauauuccccaagacuaguucauggcccaaucaugacucgaacaaaggcguaacggcagcauguccucaugcuggagcaaaaagcuucuacaaaaauuuaauauggcuaguuaaaaaaggaaauucauacccaaagcucagcaaauccuacauuaaugauaaagggaaagaaguccucgugcuauggggcauucaccauccaucuacuagugcugaccaacaaagucucuaucagaaugcagaugcauauguuuuuguggggacaucaagauacagcaagaaguucaagccggaaauagcaauaagacccaaagugagggaucaagaagggagaaugaacuauuacuggacacuaguagagccgggagacaaaauaacauucgaagcaacuggaaaucuagugguaccgagauaugcauucgcaauggaaagaaaugcuggaucugguauuaucauuucagauacaccaguccacgauugcaauacaacuugucagacacccaagggugcuauaaacaccagccucccauuucagaauauacauccgaucacaauuggaaaauguccaaaauauguaaaaagcacaaaauugagacuggccacaggauugaggaaugucccgucuauucaaucuagaggccuauuuggggccauugccgguuucauugaagggggguggacagggaugguagauggaugguacgguuaucaccaucaaaaugagcaggggucaggauaugcagccgaccugaagagcacacagaaugccauugacgagauuacuaacaaaguaaauucuguuauugaaaagaugaauacacaguucacagcaguagguaaagaguucaaccaccuggaaaaaagaauagagaauuuaaauaaaaagguugaugaugguuuccuggacauuuggacuuacaaugccgaacuguugguucuauuggaaaaugaaagaacuuuggacuaccacgauucaaaugugaagaacuuauaugaaaagguaagaagccaguuaaaaaacaaugccaaggaaauuggaaacggcugcuuugaauuuuaccacaaaugcgauaacacgugcauggaaagugucaaaaaugggacuuaugacuacccaaaauacucagaggaagcaaaauuaaacagagaagaaauagaugggguaaagcuggaaucaacaaggauuuaccagauuuuggcgaucuauucaacugucgccaguucauugguacugguagucucccugggggcaaucaguuucuggaugugcucuaaugggucucuacaguguagaauauguauuuaa

SEQ ID NO: 45716 - RNA, 1701 nt, Artificial Sequence
  derived and/or modified CDS sequence (wt) from hemagglutinin__InfluenzaA__BAJ39957
augaaggcaauacuaguaguucugcuauauacauuugcaaccgcaaaugcagacacauuauguauagguuaucaugcgaacaauucaacagacacuguagacacaguacuagaaaagaauguaacaguaacacacucuguuaaccuucuagaagacaagcauaacgggaaacuaugcaaacuaagagggguagccccauugcauuuggguaaauguaacauugcuggcuggauccugggaaauccagagugugaaucacucuccacagcaagcucaugguccuacauuguggaaacaucuaguucagacaauggaacguguuacccaggagauuucaucgauuaugaggagcuaagagagcaauugagcucagugucaucauuugaaagguuugagauauuccccaagacuaguucauggcccaaucaugacucgaacaaaggcguaacggcagcauguccucaugcuggagcaaaaagcuucuacaaaaauuuaauauggcuaguuaaaaaaggaaauucauacccaaagcucagcaaauccuacauuaaugauaaagggaaagaaguccucgugcuauggggcauucaccauccaucuacuagugcugaccaacaaagucucuaucagaaugcagauacauauguuuuuguggggacaucaagauacagcaagaaguucaagccggaaauagcaauaagacccaaagugagggaucaagaagggagaaugaacuauuacuggacacuaguagagccgggagacaaaauaacauucgaagcaacuggaaaucuagugguaccgagauaugcauucgcaauggaaagaaaugcuggaucugguauuaucauuucagauacaccaguccacgauugcaauacaacuugucagacacccaagggugcuauaaacaccagccucccauuucagaauauacauccgaucacaauuggaaaauguccaaaauauguaaaaagcacaaaauugagacuggccacaggauugaggaaugucccgucuauucaaucuagaggccuauuuggggccauugccgguuucauugaagggggguggacagggaugguagauggaugguacgguuaucaccaucaaaaugagcaggggucaggauaugcagccgaccugaaaagcacacagaaugccauugacgagauuacuaacaaaguaaauucuguuauugaaaagaugaauacacaguucacagcaguagguaaagaguucaaccaccuggaaaaaagaauagagaauuuaaauaaaaagguugaugaugguuuccuggacauuuggacuuacaaugccgaacuguugguucuauuggaaaaugaaagaacuuuggacuaccacgauucaaaugugaagaacuuauaugaaaagguaagaagccaguuaaaaaacaaugccaaggaaauuggaaacggcugcuuugaauuuuaccacaaaugcgauaacacgugcauggaaagugucaaaaaugggacuuaugacuacccaaaauacucagaggaagcaaaauuaaacagagaagaaauagaugggguaaagcuggaaucaacaaggauuuaccagauuuuggcgaucuauucaacugucgccaguucauugguacugguagucucccugggggcaaucaguuucuggaugugcucuaaugggucucuacaguguagaauauguauuuaa

SEQ ID NO: 45717 - RNA, 1701 nt, Artificial Sequence
  derived and/or modified CDS sequence (wt) from hemagglutinin__InfluenzaA__BAJ39958
augaaggcaauacuaguaguucugcuauauacauuugcaaccgcaaaugcagacacauuauguauagguuaucaugcgaacaauucaacagacacuguagacacaguacuagaaaagaauguaacaguaacacacucuguuaaccuucuagaagacaagcauaacgggaaacuaugcaaacuaagagggguagccccauugcauuuggguaaauguaacauugcuggcuggauccugggaaauccagagugugaaucacucuccacagcaagcucaugguccuacauuguggaaacaucuaguucagacaauggaacguguuacccaggagauuucaucgauuaugaggagcuaagagagcaauugagcucagugucaucauuugaaagguuugagauauuccccaagacaaguucauggcccaaucaugacucgaacaaaggcguaacggcagcauguccucaugcuggagcaaaaagcuucuacaaaaauuuaauauggcuaguuaaaaaaggaaauucauacccaaagcucagcaaauccuacauuaaugauaaagggaaagaaguccucgugcuauggggcauucaccauccaucuacuagugcugaccaacaaagucucuaucagaaugcagaugcauauguuuuuguggggacaucaagauacagcaagaaguucaagccggaaauagcaauaagacccaaagugagggaucaagaagggagaaugaacuauuacuggacacuaguagagccgggagacaaaauaacauucgaagcaacuggaaaucuagugguaccgagauaugcauucgcaauggaaagaaaugcuggaucugguauuaucauuucagauacaccaguccacgauugcaauacaacuugucagacacccaagggugcuauaaacaccagccucccauuucagaauauacauccgaucacaauuggaaaauguccaaaauauguaaaaagcacaaaauugagacuggccacaggauugaggaaugucccgucuauucaaucuaggggccuauuuggggccauugccgguuucauugaagggggguggacagggaugguagauggaugguacgguuaucaccaucaaaaugagcaggggucaggauaugcagccgaccugaaaagcacacagaaugccauugacgagauuacuaacaaaguaaauucuguuauugaaaagaugaauacacaguucacagcaguagguaaagaguucaaccaccuggaaaaaagaauagagaauuuaaauaaaaagguugaugaugguuuccuggacauuuggacuuacaaugccgaacuguugguucuauuggaaaaugaaagaacuuuggacuaccacgauucaaaugugaagaacuuauaugaaaagguaaaaagccaguuaaaaaacaaugccaaggaaauuggaaacggcugcuuugaauuuuaccacaaaugcgauaacacgugcauggaaaguguaaaaaaugggacuuaugacuacccaaaauacucaaaggaagcaaaauuaaacagagaaaaaauagaugggguaaagcuggaaucaacaaggauuuaccagauuuuggcgaucuauucaacugucgccaguucauugguacugguagucucccugggggcaaucaguuucuggaugugcucuaaugggucucuacaguguagaauauguauuuaa

SEQ ID NO: 45718 - RNA, 1701 nt, Artificial Sequence
  derived and/or modified CDS sequence (wt) from hemagglutinin__InfluenzaA__BAJ39959
augaaggcaauacuaguaguucugcuauauacauuugcaaccgcaaaugcagacacauuauguauagguuaucaugcgaacaauucaacagacacuguagacacaguacuagaaaagaauguaacaguaacacacucuguuaaccuucuagaagacaagcauaacgggaaacuaugcaaacuaagagggguagccccauugcauuuggguaaauguaacauugcuggcuggauccugggaaauccagagugugaaucacucuccacagcaagcucaugguccuacauuguggaaacaucuaguucagacaauggaacguguuacccaggagauuucaucgauuaugaggagcuaagagagcaauugagcucagugucaucauuugaaagguuugagauauuccccaagacaaguucauggcccaaucaugacucgaacaaaggcguaacggcagcauguccucaugcuggagcaaaaagcuucuacaaaaauuuaauauggcuaguuaaaaaaggaaauucauacccaaagcucagcaaauccuacauuaaugauaaagggaaagaaguccucgugcuauggggcauucaccauccaucuacuagugcugaccaacaaagucucuaucagaaugcagaugcauauguuuuuguggggacaucaagauacagcaagaaguucaagccggaaauagccauaagacccaaagugagggaucaagaagggagaaugaacuauuacuggacacuaguagagccgggagacaaaauaacauucgaagcaacuggaaaucuagugguaccgagauaugcauucgcaauggaaagaaaugcuggaucugguauuaucauuucagauacaccaguccacgauugcaauacaacuugucagacacccaagggugcuauaaacaccagccucccauuucagaauauacauccgaucacaauuggaaaauguccaaaauauguaaaaagcacaaaauugagacuggccacaggauugaggaaugucccguuuauucaaucuaggggccuauuuggggccauugccgguuucauugaagggggguggacagggaugguagauggaugguacgguuaucaccaucaaaaugagcaggggucaggauaugcagccgaccugaagagcacacagaaugccauugacgagauuacuaacaaaguaaauucuguuauugaaaagaugaauacacaguucacagcaguagguaaagaguucaaccaccuggaaaaaagaauagagaauuuaaauaaaaagguugaugaugguuuccuggacauuuggacuuacaaugccgaacuguugguucuauuggaaaaugaaagaacuuuggacuaccacgauucaaaugugaagaacuuauaugaaaagguaaaaagccaguuaaaaaacaaugccaaggaaauuggaaacggcugcuuugaauuuuaccacaaaugcgauaacacgugcauggaaaguguaaaaaaugggacuuaugacuacccaaaauacucaaaggaagcaaaauuaaacagagaagaaauagaugggguaaagcuggaaucaacaaggauuuaccagauuuuggcgaucuauucaacugucgccaguucauugguacugguagucucccugggggcaaucaguuucuggaugugcucuaaugggucucuacaguguagaauauguauuuaa

SEQ ID NO: 45719 - RNA, 1701 nt, Artificial Sequence
  derived and/or modified CDS sequence (wt) from hemagglutinin__InfluenzaA__BAJ39960
augaaggcaauacuaguaguucugcuauauacauuugcaaccgcaaaugcagacacauuauguauagguuaucaugcgaacaauucaacagacacuguagacacaguacuagaaaagaauguaacaguaacacacucuguuaaccuucuagaagacaagcauaacgggaaacuaugcaaacuaagagggguagccccauugcauuuggguaaauguaacauugcuggcuggauccugggaaauccagagugugaaucacucuccacagcaagcucaugguccuacauuguggaaacaucuaguucagacaauggaacguguuacccaggagauuucaucgauuaugaggagcuaagagagcaauugagcucagugucaucauuugaaagguuugagauauuccccaagacaaguucauggcccaaucaugacucgaacaaaggcguaacggcagcauguccucaugcuggagcaaaaagcuucuacaaaaauuuaauauggcuaguuaaaaaaggaaauucauacccaaagcucagcaaauccuacauuaaugauaaagggaaagaaguccucgugcuauggggcauucaccauccaucuacuagugcugaccaacaaagucucuaucagaaugcagaugcauauguuuuuguggggacaucaagauacagcaagaaguucaagccggaaauagcaauaagacccaaagugagggaucaagaagggagaaugaacuauuacuggacacuaguagagccgggagacaaaauaacauucgaagcaacuggaaaucuagugguaccgagauaugcauucgcaauggaaagaaaugcuggaucugguauuaucauuucagauacaccaguccacgauugcaauacaacuugucagacacccaagggugcuauaaacaccagccucccauuucagaauauacauccgaucacaauuggaaaauguccaaaauauguaaaaagcacaaaauugagacuggccacaggauugaggaaugucccgucuauucaaucuaggggccuauuuggggccauugccgguuucauugaagggggguggacagggaugguagauggaugguacgguuaucaccaucaaaaugagcaggggucaggauaugcagccgaccugaaaagcacacagaaugccauugacgagauuacuaacaaaguaaauucuguuauugaaaagaugaauacacaguucacagcaguagguaaagaguucaaccaccuggaaaaaagaauagagaauuuaaauaaaaagguugaugaugguuuccuggacauuuggacuuacaaugccgaacuguugguucuauuggaaaaugaaagaacuuuggacuaccacgauucaaaugugaagaacuuauaugaaaagguaagaagccaguuaaaaaacaaugccaaggaaauuggaaacggcugcuuugaauuuuaccacaaaugcgauaacacgugcauggaaaguguaaaaaaugggacuuaugacuacccaaaauacucagaggaagcaaaauuaaacagagaagaaauagaugggguaaagcuggaaucaacaaggauuuaccagauuuuggcgaucuauucaacugucgccaguucauugguacugguagucucccugggggcaaucaguuucuggaugugcucuaaugggucucuacaguguagaauauguauuuaa

SEQ ID NO: 45720 - RNA, 1701 nt, Artificial Sequence
  derived and/or modified CDS sequence (wt) from hemagglutinin__InfluenzaA__BAJ39961
augaaggcaauacuaguaguucugcuauauacauuugcaaccgcaaaugcagacacauuauguauagguuaucaugcgaacaauucaacagacacuguagacacaguacuagaaaagaauguaacaguaacacacucuguuaaccuucuagaagacaagcauaacgggaaacuaugcaaacuaagagggguagccccauugcauuuggguaaauguaacauugcuggcuggauccugggaaauccagagugugaaucacucuccacagcaagcucaugguccuacauuguggaaacaucuaguucagacaauggaacguguuacccaggagauuucaucgauuaugaggagcuaagagagcaauugagcucagugucaucauuugaaagguuugagauauuccccaagacaaguucauggcccaaucaugacucgaacaaaggcguaacggcagcauguccucaugcuggagcaaaaagcuucuacaaaaauuuaauauggcuaguuaaaaaaggaaauucauacccaaagcucagcaaauccuacauuaaugauaaagggaaagaaguccucgugcuauggggcauucaccauccaucuacuagugcugaccaacaaagucucuaucagaaugcagaugcauauguuuuuguggggacaucaagauacagcaagaaguucaagccggaaauagcaauaagacccaaagugagggaucaagaagggagaaugaacuauuacuggacacuaguagagccgggagacaaaauaacauucgaagcaacuggaaaucuagugguaccgagauaugcauucgcaauggaaagaaaugcuggaucugguauuaucauuucagauacaccaguccacgauugcaauacaacuugucagacacccgagggugcuauaaacaccagccucccauuucagaauauacauccgaucacaauuggaaaauguccaaaauauguaaaaagcacaaaauugagacuggccacaggauugaggaaugucccgucuauucaaucuagaggccuauuuggggccauugccgguuucauugaagggggguggacagggaugguagauggaugguacgguuaucaccaucaaaaugagcaggggucaggauaugcagccgaccugaagagcacacagaaugccauugacgagauuacuaacaaaguaaauucuguuauugaaaagaugaauacacaguucacagcaguagguaaagaguucaaccaccuggaaaaaagaauagagaauuuaaauaaaaagguugaugaugguuuccuggacauuuggacuuacaaugccgaacuguugguucuauuggaaaaugaaagaacuuuggacuaccacgauucaaaugugaagaacuuauaugaaaagguaagaagccaguuaaaaaacaaugccaaggaaauuggaaacggcugcuuugaauuuuaccacaaaugcgauaacacgugcauggaaaguguaaaaaaugggacuuaugacuacccaaaauacucagaggaagcaaaauuaaacagagaagaaauagaugggguaaagcuggaaucaacaaggauuuaccagauuuuggcgaucuauucaacugucgccaguucauugguacugguagucucccugggggcaaucaguuucuggaugugcucuaaugggucucuacaguguagaauauguauuuaa

SEQ ID NO: 45721 - RNA, 1701 nt, Artificial Sequence
  derived and/or modified CDS sequence (wt) from hemagglutinin__InfluenzaA__BAJ39962
augaaggcaauacuaguaguucugcuauauacauuugcaaccgcaaaugcagacacauuauguauagguuaucaugcgaacaauucaacagacacuguagacacaguacuagaaaagaauguaacaguaacacacucuguuaaccuucuagaagacaagcauaacgggaaacuaugcaaacuaagagggguagccccauugcauuuggguaaauguaacauugcuggcuggauccugggaaauccagagugugaaucacucuccacagcaagcucaugguccuacauugcggaaacaucuaguucagacaauggaacguguuacccaggagauuucaucgauuaugaggagcuaagagagcaauugagcucagugucaucauuugaaagguuugagauauuccccaagacuaguucauggcccaaucaugacucgaacaaaggcguaacggcagcauguccucaugcuggagcaaaaagcuucuacaaaaauuuaacauggcuaguuaaaaaaggaaauucauacccaaagcucagcaaauccuacauuaaugauaaagggaaagaaguccucgugcuauggggcauucaccauccaucuacuagugcugaccaacaaagucucuaucagaaugcagaugcauauguuuuuguggggacaucaagauacagcaagaaguucaagccggaaauagcaauaagacccaaagugagggaucaagaagggagaaugaacuauuacuggacacuaguagagccgggagacaaaauaacauucgaagcaacuggaaaucuagugguaccgagauaugcauucgcaauggaaagaaaugcuggaucugguauuaucauuucagauacaccaguccacgauugcaauacaacuugucagacacccaagggugcuauaaacaccagccucccauuucagaauauacauccgaucacaauuggaaaauguccaaaauauguaaaaagcacaaaauugagacuggccacaggauugaggaaugucccguuuauucaaucuagaggccuauuuggggccauugccgguuucauugaagggggguggacagggaugguagauggaugguacgguuaucaccaucaaaaugagcaggggucaggauaugcagccgaccugaagagcacacagaaugccauugacgagauuacuaacaaaguaaauucuguuauugaaaagaugaauacacaguucacagcaguagguaaagaguucaaccaccuggaaaaaagaauagagaauuuaaauaaaaaaguugaugaugguuuccuggacauuuggacuuacaaugccgaacuguugguucuauuggaaaaugaaagaacuuuggacuaccacgauucaaaugugaagaacuuauaugaaaagguaaaaagccaguuaaaaaacaaugccaaggaaauuggaaacggcugcuuugaauuuuaccacaaaugcgauaacacgugcauggaaaguguaaaaaaugggacuuaugacuacccaaaauacucaaaggaagcaaaauuaaacagagaagaaauagaugggguaaagcuggaaucaacaaggauuuaccagauuuuggcgaucuauucaacugucgccaguucauugguacugguagucucccugggggcaaucaguuucuggaugugcucuaaugggucucuacaguguagaauauguauuuaa

SEQ ID NO: 45722 - RNA, 1701 nt, Artificial Sequence
  derived and/or modified CDS sequence (wt) from hemagglutinin__InfluenzaA__BAJ39963
augaaggcaauacuaguaguucugcuauauacauuugcaaccgcaaaugcagacacauuauguauagguuaucaugcgaacaauucaacagacacuguagacacaguacuagaaaagaauguaacaguaacacacucuguuaaccuucuagaagacaagcauaacgggaaacuaugcaaacuaagagggguagccccauugcauuuggguaaauguaacauugcuggcuggauccugggaaauccagagugugaaucacucuccacagcaagcucaugguccuacauuguggaaacaucuaguucagacaauggaacguguuacccaggagauuucaucgauuaugaggagcuaagagagcaauugagcucagugucaucauuugaaagguuugagauauuccccaagacuaguucauggcccaaucaugacucgaacaaaggcguaacggcagcauguccucaugcuggagcaaaaagcuucuacaaaaauuuaauauggcuaguuaaaaaaggaaauucauacccaaagcucagcaaauccuacauuaaugauaaagggaaagaaguccucgugcuauggggcauucaccauccaucuacuagugcugaccaacaaagucucuaucagaaugcagaugcauauguuuuuguggggacaucaagauacagcaagaaguucaagccggaaauagcaauaagacccaaagugagggaucaagaagggagaaugaacuauuacuggacacuaguagagccgggagacaaaauaacauucgaagcaacuggaaaucuagugguaccgagauaugcauucgcaauggaaagaaaugcuggaucugguauuaucauuucagauacaccaguccacgauugcaauacaacuugucagacacccaagggugcuauaaacaccagccucccauuucagaauauacauccgaucacaauuggaaaauguccaaaauauguaaaaagcacaaaauugagacuggccacaggguugaggaaugucccgucuauucaaucuagaggccuauuuggggccauugccgguuucauugaagggggguggacagggaugguagauggaugguacgguuaucaccaucaaaaugagcaggggucaggauaugcagccgaccugaagagcacacagaaugccauugacgagauuacuaacaaaguaaauucuguuauugaaaagaugaauacacaguucacagcaguagguaaagaguucaaccaccuggaaaaaagaauagagaauuuaaauaaaaagguugaugauggguuccuggacauuuggacuuacaaugccgaacuguugguucuauuggaaaaugaaagaacuuuggacuaccacgauucaaaugugaagaacuuauaugaaaagguaagaagccaguuaaaaaacaaugccaaggaaauuggaaacggcugcuuugaauuuuaccacaaaugcgauaacacgugcauggaaagugucaaaaaugggacuuaugacuacccaaaauacucagaggaagcaaaauuaaacagagaagaaauagaugggguaaagcuggaaucaacaaggauuuaccagauuuuggcgaucuauucaacugucgccaguucauugguacugguagucucccugggggcaaucaguuucuggaugugcucuaaugggucucuacaguguagaauauguauuuaa

SEQ ID NO: 45723 - RNA, 1701 nt, Artificial Sequence
  derived and/or modified CDS sequence (wt) from hemagglutinin__InfluenzaA__BAJ39964
augaaggcaauacuaguaguucugcuauauacauuugcaaccgcaaaugcagacacauuauguauagguuaucaugcgaacaauucaacagacacuguagacacaguacuagaaaagaauguaacaguaacacacucuguuaaccuucuagaagacaagcauaacgggaaacuaugcaaacuaagagggguagccccauugcauuuggguaaauguaacauugcuggcuggauccugggaaauccagagugugaaucacucuccacagcaagcucaugguccuacauuguggaaacaucuaguucagacaauggaacguguuacccaggagauuucaucgauuaugaggagcuaagagagcaauugagcucagugucaucauuugaaagguuugagauauuccccaagacaaguucauggcccaaucaugacucgaacaaagguguaacggcagcauguccucaugcuggagcaaaaagcuucuacaaaaauuuaauauggcuaguuaaaaaaggaaauucauacccaaagcucagcaaauccuacauuaaugauaaagggaaagaaguccucgugcuauggggcauucaccauccaucuacuagugcugaccaacaaagucucuaucagaaugcagauacauauguuuuuguggggacaucaagauacagcaagaaguucaagccggaaauagcaauaagacccaaagugagggaucaagaagggagaaugaacuauuacuggacacuaguagagccgggagacaaaauaacauucgaagcaacuggaaaucuagugguaccgagauaugcauucgcaauggaaagaaaugcuggaucugguauuaucauuucagauacaccaguccacgauugcaauacaacuugucagacacccaagggugcuauaaacaccagccucccauuucagaauauacauccgaucacaauuggaaaauguccaaaauauguaaaaagcacaaaauugagacuggccacaggauugaggaaugucccgucuauucaaucuagaggccuauuuggggccauugccgguuucauugaagggggguggacagggaugguagauggaugguacgguuaucaccaucaaaaugagcaggggucaggauaugcagccgaccugaagagcacacagaaugccauugacgagauuacuaacaaaguaaauucuguuauugaaaagaugaauacacaguucacagcaguagguaaagaguucaaccaccuggaaaaaagaauagagaauuuaaauaaaaaaguugaugaugguuuccuggacauuuggacuuacaaugccgaacuguugguucuauuggaaaaugaaagaacuuuggacuaccacgauucaaaugugaagaacuuauaugaaaagguaagaagccaguuaaaaaacaaugccaaggaaauuggaaacggcugcuuugaauuuuaccacaaaugcgauaacacgugcauggaaagugucaaaaaugggacuuaugacuacccaaaauacucagaggaagcaaaauuaaacagagaagaaauagaugggguaaagcuggaaucaacaaggauuuaccagauuuuggcgaucuauucaacugucgccaguucauugguacugguagucucccugggggcaaucaguuucuggaugugcucuaaugggucucuacaguguagaauauguauuuaa

SEQ ID NO: 45724 - RNA, 1701 nt, Artificial Sequence
  derived and/or modified CDS sequence (wt) from hemagglutinin__InfluenzaA__BAJ39965
augaaggcaauacuaguaguucugcuauauacauuugcaaccgcaaaugcagacacauuauguauagguuaucaugcgaacaauucaacagacacuguagacacaguacuagaaaagaauguaacaguaacacacucuguuaaccuucuagaagacaagcauaacgggaaacuaugcaaacuaagagggguagccccauugcauuuggguaaauguaacauugcuggcuggauccugggaaauccagagugugaaucacucuccacagcaagcucaugguccuacauuguggaaacaucuaguucagacaauggaacguguuacccaggagauuucaucgauuaugaggagcuaagagagcaauugagcucagugucaucauuugaaagguuugagauauuccccaagacaaguucauggcccaaucaugacucgaacaaaggcguaacggcagcauguccucaugcuggagcaaaaagcuucuacaaaaauuuaauauggcuaguuaaaaaaggaaauucauacccaaagcucagcaaauccuacauuaaugauaaagggaaagaaguccucgugcuauggggcauucaccauccaucuacuagugcugaccaacaaagucucuaucagaaugcagaugcauauguuuuuguggggacaucaagauacagcaagaaguucaagccggaaauagcaauaagacccaaagugagggaucaagaagggagaaugaacuauuacuggacacuaguagagccgggagacaaaauaacauucgaagcaacuggaaaucuagugguaccgagauaugcauucgcaauggaaagaaaugcuggaucugguauuaucauuucagauacaccaguccacgauugcaauacaacuugucagacacccaagggugcuauaaacaccagccucccauuucagaauauacauccgaucacaauuggaaaauguccaaaauauguaaaaagcacaaaauugagacuggccacaggauugaggaaugucccgucuauucaaucuagaggccuauuuggggccauugccgguuucauugaagggggguggacagggaugguagauggaugguacgguuaucaccaucaaaaugagcaggggucaggauaugcagccgaccugaagagcacacagaaugccauugacgagauuacuaacaaaguaaauucuguuauugaaaagaugaauacacaguucacagcaguagguaaagaguucaaccaccuggaaaaaagaauagagaauuuaaauaaaaaaguugaugaugguuuccuggacauuuggacuuacaaugccgaacuguugguucuauuggaaaaugaaagaacuuuggacuaccacgauucaaaugugaagaacuuauaugaaaagguaagaagccaguuaaaaaacaaugccaaggaaauuggaaacggcugcuuugaauuuuaccacaaaugcgauaacacgugcauggaaagugucaaaaaugggacuuaugacuacccaaaauacucagaggaagcaaaauuaaacagagaagaaauagaugggguaaagcuggaaucaacaaggauuuaccagauuuuggcgaucuauucaacugucgccaguucauugguacugguagucucccugggggcaaucaguuucuggaugugcucuaaugggucucuacaguguagaauauguauuuaa

SEQ ID NO: 45725 - RNA, 1701 nt, Artificial Sequence
  derived and/or modified CDS sequence (wt) from hemagglutinin__InfluenzaA__BAJ39966
augaaggcaauacuaguaguucugcuauauacauuugcaaccgcaaaugcagacacauuauguauagguuaucaugcgaacaauucaacagacacuguagacacaguacuagaaaagaauguaacaguaacacacucuguuaaccuucuagaagacaagcauaacgggaaacuaugcaaacuaagagggguagccccauugcauuuggguaaauguaacauugcuggcuggauccugggaaauccagagugugaaucacucuccacagcaagcucaugguccuacauuguggaaacaucuaguucagacaauggaacguguuacccaggagauuucaucgauuaugaggagcuaagagagcaauugagcucagugucaucauuugaaagguuugagauauuccccaagacaaguucauggcccaaucaugacucgaacaaaggcguaacggcagcauguccucaugcuggagcaaaaagcuucuacaaaaauuuaauauggcuaguuaaaaaaggaaauucauacccaaagcucagcaaauccuacauuaaugauaaagggaaagagguccucgugcuauggggcauucaccauccaucuacuagugcugaccaacaaagucucuaucagaaugcagaugcauauguuuuuguggggacaucaagauacagcaagaaguucaagccggaaauagcaauaagacccaaagugagggaucaagaagggagaaugaacuauuacuggacacuaguagagccgggagacaaaauaacauucgaagcaacuggaaaucuagugguaccgagauaugcauucgcaauggaaagaaaugcuggaucugguauuaucauuucagauacaccaguccacgauugcaauacaacuugucagacacccaagggugcuauaaacaccagccucccauuucagaauauacauccgaucacaauuggaaaauguccaaaauauguaaaaagcacaaaauugagacuggccacaggauugaggaaugucccgucuauucaaucuaggggccuauuuggggccauugccgguuucauugaagggggguggacagggaugguagauggaugguacgguuaucaccaucaaaaugagcaggggucaggauaugcagccgaccugaaaagcacacagaaugccauugacgagauuacuaacaaaguaaauucuguuauugaaaagaugaauacacaguucacagcaguagguaaagaguucaaccaccuggaaaaaagaauagagaauuuaaauaaaaagguugaugaugguuuccuggacauuuggacuuacaaugccgaacuguugguucuauuggaaaaugaaagaacuuuggacuaccacgauucaaaugugaagaacuuauaugaaaagguaagaagccaguuaaaaaacaaugccaaggaaauuggaaacggcugcuuugaauuuuaccacaaaugcgauaacacgugcauggaaagugucaaaaaugggacuuaugacuacccaaaauacucagaggaagcaaaauuaaacagagaagaaauagaugggguaaagcuggaaucaacaaggauuuaccagauuuuggcgaucuauucaacugucgccaguucauugguacugguagucucccugggggcaaucaguuucuggaugugcucuaaugggucucuacaguguagaauauguauuuaa

SEQ ID NO: 45726 - RNA, 1701 nt, Artificial Sequence
  derived and/or modified CDS sequence (wt) from hemagglutinin__InfluenzaA__BAJ39967
augaaggcaauacuaguaguucugcuauauacauuugcaaccgcaaaugcagacacauuauguauagguuaucaugcgaacaauucaacagacacuguagacacaguacuagaaaagaauguaacaguaacacacucuguuaaccuucuagaagacaagcauaacgggaaacuaugcaaacuaagagggguagccccauugcauuuggguaaauguaacauugcuggcuggauccugggaaauccagagugugaauuacucuccacagcaagcucaugguccuacauuguggaaacaucuaguucagacaauggaacguguuacccaggagauuucaucgauuaugaggagcuaagagagcaauugagcucagugucaucauuugaaagguuugagauauuccccaagacaaguucauggcccaaucaugacucggacaaagguguaacggcagcauguccucaugcuggagcaaaaagcuucuacaaaaauuuaauauggcuaguuaaaaaaggaaauucauacccaaagcucagcaaauccuacauuaaugauaaagggaaagaaguccucgugcuauggggcauucaccauccaucuacuagugcugaccaacaaagucucuaucagaaugcagaugcauauguuuuuguggggacaucaagauacagcaagaaguucaagccggaaauagcaauaagacccaaagugagggaucaagaagggagaaugaacuauuacuggacacuaguagagccgggagacaaaauaacauucgaagcaacuggaaaucuagugguaccgagauaugcauucgcaauggaaagaaaugcuggaucugguauuaucauuucagauacaccaguccacgauugcaauacaacuugucagacacccaagggugcuauaaacaccagccucccauuucagaauauacauccgaucacaauuggaaaauguccaaaauauguaaaaagcacaaaauugagacuggccacaggauugaggaaugucccgucuauucaaucuagaggccuauuuggggccauugccggcuucauugaagggggguggacagggaugguagauggaugguacgguuaucaccaucaaaaugagcaggggucaggauaugcagccgaccugaagagcacacagaaugccauugacgagauuacuaacaaaguaaauucuguuauugaaaagaugaauacccaguucacagcauuagguaaagaguucaaccaccuggaaaaaaaaauagagaauuuaaauaaaaaaguugaugaugguuuccuggacauuuggacuuacaaugccgaacuguugguucuauuggaaaaugaaagaacuuuggacuaccacgauucaaaugugaagaacuuauaugaaaagguaagaagccaguuaaaaaacaaugccaaggaaauuggaaacggcugcuuugaauuuuaccacaaaugcgauaacacgugcauggaaagugucaaaaaugggacuuaugacuacccaaaauacucagaggaagcaaaauuaaacagagaagaaauagaugggguaaagcuggaaucaacaaggauuuaccagauuuuggcgaucuauucaacugucgccaguucauugguacugguagucucccugggggcaaucaguuucuggaugugcucuaaugggucucuacaguguagaauauguauuuaa

SEQ ID NO: 45727 - RNA, 1701 nt, Artificial Sequence
  derived and/or modified CDS sequence (wt) from hemagglutinin__InfluenzaA__BAJ39968
augaaggcaauacuaguaguucugcuauauacauuugcaaccgcaaaugcagacacauuauguauagguuaucaugcgaacaauucaacagacacuguagacacaguacuagaaaagaauguaacaguaacacacucuguuaaccuucuagaagacaagcauaacgagaaacuaugcaaacuaagagggguagccccauugcauuuggguaaauguaacauugcuggcuggauccugggaaauccagagugugaaucacucuccacagcaagcucaugguccuacauuguggaaacaucuaguucagacaauggaacguguuacccaggagauuucaucgauuaugaggagcuaagagagcaauugagcucagugucaucauuugaaagguuugagauauuccccaagacaaguucauggcccaaucaugacucgaacaaaggcguaacggcagcauguccucaugcuggagcaaaaagcuucuacaaaaauuuaauauggcuaguuaaaaaaggaaauucauacccaaagcucagcaaauccuacauuaaugauaaagggaaagaaguccucgugcuauggggcauucaccauccaucuacuagugcugaccaacaaagucucuaucagaaugcagaugcauauguuuuuguggggacaucaagauacagcaagaaguucaagccggaaauagcaauaagacccaaagugagggaucaagaagggagaaugaacuauuacuggacacuaguagagccgggagacaaaauaacauucgaagcaacuggaaaucuagugguaccgagauaugcauucgcaauggaaagaaaugcuggaucugguauuaucauuucagauacaccaguccacgauugcaauacaacuugucagacacccaagggugcuauaaacaccagccucccauuucagaauauacauccgaucacaauuggaaaauguccaaaauauguaaaaagcacaaaauugagacuggccacaggauugaggaaugucccgucuauucaaucuagaggccuauuuggggccauugccgguuucauugaagggggguggacagggaugguagauggaugguacgguuaucaccaucaaaaugagcaggggucaggauaugcagccgaccugaagagcacacagaaugccauugacgagauuacuaacaaaguaaauucuguuauugaaaagaugaauacacaguucacagcaguagguaaagaguucaaccaccuggaaaaaagaauagagaauuuaaauaaaaagguugaugaugguuuccuggacauuuggacuuacaaugccgaacuguugguucuauuggaaaaugaaagaacuuuggacuaccacgauucaaaugugaagaacuuauaugaaaagguaagaagccaguuaaaaaacaaugccaaggaaauuggaaacggcugcuuugaauuuuaccacaaaugcgauaacacgugcauggaaaguguaaaaaaugggacuuaugacuacccaaaauacucagaggaagcaaaauuaaacagagaagaaauagaugggguaaagcuggaaucaacaaggauuuaccagauuuuggcgaucuauucaacugucgccaguucauugguacugguagucucccugggggcaaucaguuucuggaugugcucuaaugggucucuacaguguagaauauguauuuaa

SEQ ID NO: 45728 - RNA, 1701 nt, Artificial Sequence
  derived and/or modified CDS sequence (wt) from hemagglutinin__InfluenzaA__BAJ39969
augaaggcaauacuaguaguucugcuauauacauuugcaaccgcaaaugcagacacauuauguauagguuaucaugcgaacaauucaacagacacuguagacacaguacuagaaaagaauguaacaguaacacacucuguuaaccuucuagaagacaagcauaacgggaaacuaugcaaacuaagagggguagccccauugcauuuggguaaauguaacauugcuggcuggauccugggaaauccagagugugaaucacucuccacagcaagcucaugguccuacauuguggaaacaucuaguucagacaauggaacguguuacccaggagauuucaucgauuaugaggagcuaagagagcaauugagcucagugucaucauuugaaagguuugagauauuccccaagacaaguucauggcccaaucaugacucgaacaaagguguaacggcagcauguccucaugcuggagcaaaaagcuucuacaaaaauuuaauauggcuaguuaaaaaaggaaauucauacccaaagcucagcaaauccuacauuaaugauaaagggaaagaaguccucgugcuauggggcauucaccauccaucuacuagugcugaccaacaaagucucuaucagaaugcagauacauauguuuuuguggggacaucaagauacagcaagaaguucaagccggaaauagcaauaagacccaaagugagggaucaagaagggagaaugaacuauuacuggacacuaguagagccgggagacaaaauaacauucgaagcaacuggaaaucuagugguaccgagauaugcauucgcaauggaaagaaaugcuggaucugguauuaucauuucagauacaccaguccacgauugcaauacaacuugucagacacccaagggugcuauaaacaccagccucccauuucagaauauacauccgaucacaauuggaaaauguccaaaauauguaaaaagcacaaaauugagacuggccacaggauugaggaaugucccgucuauucaaucuagaggccuauuuggggccauugccgguuucauugaagggggguggacagggaugguagauggaugguacgguuaucaccaucaaaaugagcaggggucaggauaugcagccgaccugaaaagcacacagaaugccauugacgagauuacuaacaaaguaaauucuguuauugaaaagaugaauacacaguucacagcaguagguaaagaguucaaccaccuggaaaaaagaauagagaauuuaaauaaaaagguugaugaugguuuccuggacauuuggacuuacaaugccgaacuguugguucuauuggaaaaugaaagaacuuuggacuaccacgauucaaaugugaagaacuuauaugaaaagguaagaagccaguuaaaaaacaaugccaaggaaauuggaaacggcugcuuugaauuuuaccacaaaugcgauaacacgugcauggaaagugucaaaaaugggacuuaugacuacccaaaauacucagaggaagcaaaauuaaacagagaagaaauagaugggguaaagcuggaaucaacaaggauuuaccagauuuuggcgaucuauucaacugucgccaguucauugguacugguagucucccugggggcaaucaguuucuggaugugcucuaaugggucucuacaguguagaauauguauuuaa

SEQ ID NO: 45729 - RNA, 1701 nt, Artificial Sequence
  derived and/or modified CDS sequence (wt) from hemagglutinin__InfluenzaA__BAJ39970
augaaggcaauacuaguaguucugcuauauacauuugcaaccgcaaaugcagacacauuauguauagguuaucaugcgaacaauucaacagacacuguagacacaguacuagaaaagaauguaacaguaacacacucuguuaaccuucuagaagacaagcauaacgggaaacuaugcaaacuaagagggguagccccauugcauuuggguaaauguaacauugcuggcuggauccugggaaauccagagugugaaucacucuccacagcaagcucaugguccuacauuguggaaacaucuaguucagacaauggaacguguuacccaggagauuucaucgauuaugaggagcuaagagagcaauugagcucagugucaucauuugaaagguuugagauauuccccaagacaaguucauggcccaaucaugacucgaacaaaggcguaacggcagcauguccucaugcuggagcaaaaagcuucuacaaaaauuuaauauggcuaguuaaaaaaggaaauucauacccaaagcucagcaaauccuacauuaaugauaaagggaaagaaguccucgugcuauggggcauucaccauccaucuacuagugcugaccaacaaagucucuaucagaaugcagaugcauauguuuuuguggggacaucaagauacagcaagaaguucaagccggaaauagcaauaagacccaaagugagggaucaagaagggagaaugaacuauuacuggacacuaguagagccgggagacaaaauaacauucgaagcaacuggaaaucuagugguaccgagauaugcauucgcaauggaaagaaaugcuggaucugguauuaucauuucagauacaccaguccacgauugcaauacaacuugucagacacccaagggugcuauaaacaccagccucccauuucagaauauacauccgaucacaauuggaaaauguccaaaauauguaaaaagcacaaaauugagacuggccacaggauugaggaaugucccgucuauucaaucuagaggccuauuuggggccauugccgguuucauugaagggggguggacagggaugguagauggaugguacgguuaucaccaucaaaaugagcaggggucaggauaugcagccgaccugaaaagcacacagaaugccauugacgagauuacuaacaaaguaaauucuguuauugaaaagaugaauacacaguucacagcaguagguaaagaguucaaccaccuggaaaaaagaauagagaauuuaaauaaaaaaguugaugaugguuuccuggacauuuggacuuacaaugccgaacuguugguucuauuggaaaaugaaagaacuuuggacuaccacgauucaaaugugaagaacuuauaugaaaagguaagaagccaguuaaaaaacaaugccaaggaaauuggaaacggcugcuuugaauuuuaccacaaaugcgauaacacgugcauggaaagugucaaaaaugggacuuaugacuacccaaaauacucagaggaagcaaaauuaaacagagaagaaauagaugggguaaagcuggaaucaacaaggauuuaccagauuuuggcgaucuauucaacugucgccaguucauugguacugguagucucccugggggcaaucaguuucuggaugugcucuaaugggucucuacaguguagaauauguauuuaa

SEQ ID NO: 45730 - RNA, 1701 nt, Artificial Sequence
  derived and/or modified CDS sequence (wt) from hemagglutinin__InfluenzaA__BAJ39971
augaaggcaauacuaguaguucugcuauauacauuugcaaccgcaaaugcagacacauuauguauagguuaucaugcgaacaauucaacagacacuguagacacaguacuagaaaagaauguaacaguaacacacucuguuaaccuucuagaagacaagcauaacgggaaacuaugcaaacuaagagggguagccccauugcauuuggguaaauguaacauugcuggcuggauccugggaaauccagagugugaaucacucuccacagcaagcucaugguccuacauuguggaaacaucuaguucagacaauggaacguguuacccaggagauuucaucgauuaugaggagcuaagagagcaauugagcucagugucaucauuugaaagguuugagauauuccccaagacaaguucauggcccaaucaugacucgaacaaaggcguaacggcagcauguccucaugcuggagcaaaaagcuucuacaaaaauuuaauauggcuaguuaaaaaaggaaauucauacccaaagcucagcaaauccuacauuaaugauaaagggaaagagguccucgugcuauggggcauucaccauccaucuacuagugcugaccaacaaagucucuaucagaaugcagaugcauauguuuuuguggggacaucaagauacagcaagaaguucaagccggaaauagcaauaagacccaaagugagggaucaagaagggagaaugaacuauuacuggacacuaguagagccgggagacaaaauaacauucgaagcaacuggaaaucuagugguaccgagauaugcauucgcaauggaaagaaaugcuggaucugguauuaucauuucagauacaccaguccacgauugcaauacaacuugucagacacccaagggugcuauaaacaccagccucccauuucagaauauacauccgaucacaauuggaaaauguccaaaauauguaaaaagcacaaaauugagacuggccacaggauugaggaaugucccgucuauucaaucuaggggccuauuuggggccauugccgguuucauugaagggggguggacagggaugguagauggaugguacgguuaucaccaucaaaaugagcaggggucaggauaugcagccgaccugaaaagcacacagaaugccauugacgagauuacuaacaaaguaaauucuguuauugaaaagaugaauacacaguucacagcaguagguaaagaguucaaccaccuggaaaaaagaauagagaauuuaaauaaaaagguugaugaugguuuccuggacauuuggacuuacaaugccgaacuguugguucuauuggaaaaugaaagaacuuuggacuaccacgauucaaaugugaagaacuuauaugaaaagguaagaagccaguuaaaaaacaaugccaaggaaauuggaaacggcugcuuugaauuuuaccacaaaugcgauaacacgugcauggaaaguguaaaaaaugggacuuaugacuacccaaaauacucagaggaagcaaaauuaaacagagaagaaauagaugggguaaagcuggaaucaacaaggauuuaccagauuuuggcgaucuauucaacugucgccaguucauugguacugguagucucccugggggcaaucaguuucuggaugugcucuaaugggucucuacaguguagaauauguauuuaa

SEQ ID NO: 45731 - RNA, 1701 nt, Artificial Sequence
  derived and/or modified CDS sequence (wt) from hemagglutinin__InfluenzaA__BAJ39972
augaaggcaauacuaguaguucugcuauauacauuugcaaccgcaaaugcagacacauuauguauagguuaucaugcgaacaauucaacagacacuguagacacaguacuagaaaagaauguaacaguaacacacucuguuaaccuucuagaagacaagcauaacgggaaacuaugcaaacuaagagggguagccccauugcauuuggguaaauguaacauugcuggcuggauccugggaaauccagagugugaaucacucuccacagcaagcucaugguccuacauuguggaaacaucuaguucagacaauggaacguguuacccaggagauuucaucgauuaugaggagcuaagagagcaauugagcucagugucaucauuugaaagguuugagauauuccccaagacaaguucauggcccaaucaugacucgaacaaagguguaacggcagcauguccucaugcuggagcaaaaagcuucuacaaaaauuuaauauggcuaguuaaaaaaggaaauucauacccaaagcucagcaaauccuacauuaaugauaaagggaaagaaguccucgugcuauggggcauucaccauccaucuacuagugcugaccaacaaagucucuaucagaaugcagaugcauauguuuuuguggggacaucaagauacagcaagaaguucaagccggaaauagcaauaagacccaaagugagggaucaagaagggagaaugaacuauuacuggacacuaguagagccgggagacaaaauaacauucgaagcaacuggaaaucuagugguaccgagauaugcauucgcaauggaaagaaaugcuggaucugguauuaucauuucagauacaccaguccacgauugcaauacaacuugucagacacccgagggugcuauaaacaccagccucccauuucagaauauacauccgaucacaauuggaaaauguccaaaauauguaaaaagcacaaaauugagacuggccacaggauugaggaaugucccgucuauucaaucuagaggccuauuuggggccauugccgguuucauugaagggggguggacagggaugguagauggaugguacgguuaucaccaucaaaaugagcaggggucaggauaugcagccgaccugaaaagcacacagaaugccauugacgagauuacuaacaaaguaaauucuguuauugaaaagaugaauacacaguucacagcaguagguaaagaguucaaccaccuggaaaaaagaauagagaauuuaaauaaaaaaguugaugaugguuuccuggacauuuggacuuacaaugccgaacuguugguucuauuggaaaaugaaagaacuuuggacuaccacgauucaaaugugaagaacuuauaugaaaagguaagaagccaguuaaaaaacaaugccaaggaaauuggaaacggcugcuuugaauuuuaccacaaaugcgauaacacgugcauggaaagugucaaaaaugggacuuaugacuacccaaaauacucagaggaagcaaaauuaaacagagaagaaauagaugggguaaagcuggaaucaacaaggauuuaccagauuuuggcgaucuauucaacugucgccaguucauugguacugguagucucccugggggcaaucaguuucuggaugugcucuaaugggucucuacaguguagaauauguauuuaa

SEQ ID NO: 45732 - RNA, 1701 nt, Artificial Sequence
  derived and/or modified CDS sequence (wt) from hemagglutinin__InfluenzaA__BAJ39973
augaaggcaauacuaguaguucugcuauauacauuugcaaccgcaaaugcagacacauuauguauagguuaucaugcgaacaauucaacagacacuguagacacaguacuagaaaagaauguaacaguaacacacucuguuaaccuucuagaagacaagcauaacgggaaacuaugcaaacuaagagggguagccccauugcauuuggguaaauguaacauugcuggcuggauccugggaaauccagagugugaaucacucuccacagcaagcucaugguccuacauuguggaaacaucuaguucagacaauggaacguguuacccaggagauuucaucgauuaugaggagcuaagagagcaauugagcucagugucaucauuugaaagguuugagauauuccccaagacaaguucauggcccaaucaugacucgaacaaaggcguaacggcagcauguccucaugcuggagcaaaaagcuucuacaaaaauuuaauauggcuaguuaaaaaaggaaauucauacccaaagcucagcaaauccuacauuaaugauaaagggaaagaaguccucgugcuauggggcauucaccauccaucuacuagugcugaccaacaaagucucuaucagaaugcagauacauauguuuuuguggggacaucaagauacagcaagaaguucaagccggaaauagcaauaagacccaaagugagggaucaagaagggagaaugaacuauuacuggacacuaguagagccgggagacaaaauaacauucgaagcaacuggaaaucuagugguaccgagauaugcauucgcaauggaaagaaaugcuggaucugguauuaucauuucagauacaccaguccacgauugcaauacaacuugucagacacccaagggugcuauaaacaccagccucccauuucagaauauacauccgaucacaauuggaaaauguccaaaauauguaaaaagcacaaaauugagacuggccacaggauugaggaaugucccgucuauucaaucuagaggccuauuuggggccauugccgguuucauugaagggggguggacagggaugguagauggaugguacgguuaucaccaucaaaaugagcaggggucaggauaugcagccgaccugaagagcacacagaaugccauugacgagauuacuaacaaaguaaauucuguuauugaaaagaugaauacacaguucacagcaguagguaaagaguucaaccaccuggaaaaaagaauagagaauuuaaauaaaaagguugaugaugguuuccuggacauuuggacuuacaaugccgaacuguugguucuauuggaaaaugaaagaacuuuggacuaccacgauucaaaugugaagaacuuauaugaaaagguaaaaagccaguuaaaaaacaaugccaaggaaauuggaaacggcugcuuugaauuuuaccacaaaugcgauaacacgugcauggaaagugucaaaaaugggacuuaugacuacccaaaauacucagaggaagcaaaauuaaacagagaagaaauagaugggguaaagcuggaaucaacaaggauuuaccagauuuuggcgaucuauucaacugucgccaguucauugguacugguagucucccugggggcaaucaguuucuggaugugcucuaaugggucucuacaguguagaauauguauuuaa

SEQ ID NO: 45733 - RNA, 1701 nt, Artificial Sequence
  derived and/or modified CDS sequence (wt) from hemagglutinin__InfluenzaA__BAJ39974
augaaggcaauacuaguaguucugcuauauacauuugcaaccgcaaaugcagacacauuauguauagguuaucaugcgaacaauucaacagacacuguagacacaguacuagaaaagaauguaacaguaacacacucuguuaaccuucuagaagacaagcauaacgggaaacuaugcaaacuaagagggguagccccauugcauuuggguaaauguaacauugcuggcuggauccugggaaauccagagugugaaucacucuccacagcaagcucaugguccuacauuguggaaacaucuaguucagacaauggaacguguuacccaggagauuucaucgauuaugaggagcuaagagagcaauugagcucagugucaucauuugaaagguuugagauauuccccaagacaaguucauggcccaaucaugacucgaacaaaggcguaacggcagcauguccucaugcuggagcaaaaagcuucuacaaaaauuuaauauggcuaguuaaaaaaggaaauucauacccaaagcucagcaaauccuacauuaaugauaaagggaaagaaguccucgugcuauggggcauucaccauccaucuacuagugcugaccaacaaagucucuaucagaaugcagaugcauauguuuuuguggggacaucaagauacagcaagaaguucaagccggaaauagcaauaagacccaaagugagggaucaagaagggagaaugaacuauuacuggacacuaguagagccgggagacaaaauaacauucgaagcaacuggaaaucuagugguaccgagauaugcauucgcaauggaaagaaaugcuggaucugguauuaucauuucagauacaccaguccacgauugcaauacaacuugucagacacccaagggugcuauaaacaccagccucccauuucagaauauacauccgaucacaauuggaaaauguccaaaauauguaaaaagcacaaaauugagacuggccacaggauugaggaaugucccgucuauucaaucuaggggccuauuuggggccauugccgguuucauugaagggggguggacagggaugguagauggaugguacgguuaucaccaucaaaaugagcaggggucaggauaugcagccgaccugaagagcacacagaaugccauugacgagauuacuaacaaaguaaauucuguuauugaaaagaugaauacacaguucacagcaguagguaaagaguucaaccaccuggaaaaaagaauagagaauuuaaauaaaaagguugaugaugguuuccuggacauuuggacuuacaaugccgaacuguugguucuauuggaaaaugaaagaacuuuggacuaccacgauucaaaugugaagaacuuauaugaaaagguaagaagccaguuaaaaaacaaugccaaggaaauuggaaacggcugcuuugaauuuuaccacaaaugcgauaacacgugcauggaaagugucaaaaaugggacuuaugacuacccaaaauacucagaggaagcaaaauuaaacagagaagaaauagaugggguaaagcuggaaucaacaaggauuuaccagauuuuggcgaucuauucaacugucgccaguucauugguacugguagucucccugggggcaaucaguuucuggaugugcucuaaugggucucuacaguguagaauauguauuuaa

SEQ ID NO: 45734 - RNA, 1701 nt, Artificial Sequence
  derived and/or modified CDS sequence (wt) from hemagglutinin__InfluenzaA__BAJ39975
augaaggcaauacuaguaguucugcuauauacauuugcaaccgcaaaugcagacacauuauguauagguuaucaugcgaacaauucaacagacacuguagacacaguacuagaaaagaauguaacaguaacacacucuguuaaccuucuagaagacaagcauaacgggaaacuaugcaaacuaagagggguagccccauugcauuuggguaaauguaacauugcuggcuggauccugggaaauccagagugugaaucacucuccacagcaagcucaugguccuacauuguggaaacaucuaguucagacaauggaacguguuacccaggagauuucaucgauuaugaggagcuaagagagcaauugagcucagugucaucauuugaaagguuugagauauuccccaagacaaguucauggcccaaucaugacucgaacaaaggcguaacggcagcauguccucaugcuggagcaaaaagcuucuacaaaaauuuaauauggcuaguuaaaaaaggaaauucauacccaaagcucagcaaauccuacauuaaugauaaagggaaagaaguccucgugcuauggggcauucaccauccaucuacuagugcugaccaacaaagucucuaucagaaugcagaugcauauguuuuuguggggacaucaagauacagcaagaaguucaagccggaaauagcaauaagacccaaagugagggaucaagaagggagaaugaacuauuacuggacacuaguagagccgggagacaaaauaacauucgaagcaacuggaaaucuagugguaccgagauaugcauucgcaauggaaagaaaugcuggaucugguauuaucauuucagauacaccaguccacaauugcaauacaacuugucagacacccaagggugcuauaaacaccagccucccauuucagaauauacauccgaucacaauuggaaaauguccaaaauauguaaaaagcacaaaauugagacuggccacaggauugaggaaugucccgucuauucaaucuagaggccuauuuggggccauugccggcuucauugaagggggguggacagggaugguagauggaugguacgguuaucaccaucaaaaugagcaggggucaggauaugcagccgaccugaagagcacacagaaugccauugacgagauuacuaacaaaguaaauucuguuauugaaaagaugaauacacaguucacagcaguagguaaagaguucaaccaccuggaaaaaagaauagagaauuuaaauaaaaagguugaugaugguuuccuggacauuuggacuuacaaugccgaacuguugguucuauuggaaaaugaaagaacuuuggacuaccacgauucaaaugugaagaacuuauaugaaaagguaagaagccaguuaaaaaacaaugccaaggaaauuggaaacggcugcuuugaauuuuaccacaaaugcgauaacacgugcauggaaagugucaaaaaugggacuuaugacuacccaaaauacucagaggaagcaaaauuaaacagagaagaaauagaugggguaaagcuggaaucaacaaggauuuaccagauuuuggcgaucuauucaacugucgccaguucauugguacugguagucucccugggggcaaucaguuucuggaugugcucuaaugggucucuacaguguagaauauguauuuaa

SEQ ID NO: 45735 - RNA, 1701 nt, Artificial Sequence
  derived and/or modified CDS sequence (wt) from hemagglutinin__InfluenzaA__BAJ39976
augaaggcaauacuaguaguucugcuauauacauuugcaaccgcaaaugcagacacauuauguauagguuaucaugcgaacaauucaacagacacuguagacacaguacuagaaaagaauguaacaguaacacacucuguuaaccuucuagaagacaagcauaacgagaaacuaugcaaacuaagagggguagccccauugcauuuggguaaauguaacauugcuggcuggauccugggaaauccagagugugaaucacucuccacagcaagcucaugguccuacauuguggaaacaucuaguucagacaauggaacguguuacccaggagauuucaucgauuaugaggagcuaagagagcaauugagcucagugucaucauuugaaagguuugagauauuccccaagacaaguucauggcccaaucaugacucgaacaaaggcguaacggcagcauguccucaugcuggagcaaaaagcuucuacaaaaauuuaauauggcuaguuaaaaaaggaaauucauacccaaagcucagcaaauccuacauuaaugauaaagggaaagaaguccucgugcuauggggcauucaccauccaucuacuagugcugaccaacaaagucucuaucagaaugcagaugcauauguuuuugugggaacaucaagauacagcaagaaguucaagccggaaauagcaauaagacccaaagugagggaucaagaagggagaaugaacuauuacuggacacuaguagagccgggagacaaaauaacauucgaagcaacuggaaaucuagugguaccgagauaugcauucgcaauggaaagaaaugcuggaucugguauuaucauuucagauacaccaguccacgauugcaauacaacuugucagacacccaagggugcuauaaacaccagccucccauuucagaauauacauccgaucacaauuggaaaauguccaaaauauguaaaaagcacaaaauugagacuggccacaggauugaggaaugucccgucuauucaaucuagaggccuauuuggggccauugccggcuucauugaagggggguggacagggaugguagauggaugguacgguuaucaccaucaaaaugagcaggggucaggauaugcagccgaccugaagagcacacagaaugccauugacaagauuacuaacaaaguaaauucuguuauugaaaagaugaauacacaguucacagcaguagguaaagaguucaaccaccuggaaaaaagaauagagaauuuaaauaaaaagguugaugaugguuuccuggacauuuggacuuacaaugccgaacuguugguucuauuggaaaaugaaagaacuuuggacuaccacgauucaaaugugaagaacuuauaugaaaagguaagaagccaguuaaaaaacaaugccaaggaaauuggaaacggcugcuuugaauuuuaccacaaaugcgauaacacgugcauggaaaguguaaaaaaugggacuuaugacuacccaaaauacucagaggaagcaaaauuaaacagagaagaaauagaugggguaaagcuggaaucaacaaggauuuaccagauuuuggcgaucuauucaacugucgccaguucauugguacugguagucucccugggggcaaucaauuucuggaugugcucuaaugggucucuacaguguagaauauguauuuaa

SEQ ID NO: 45736 - RNA, 1701 nt, Artificial Sequence
  derived and/or modified CDS sequence (wt) from hemagglutinin__InfluenzaA__BAJ39977
augaaggcaauacuaguaguucugcuauauacauuugcaaccgcaaaugcagacacauuauguauagguuaucaugcgaacaauucaacagacacuguagacacaguacuagaaaagaauguaacaguaacacacucuguuaaccuucuagaagacaagcauaacgggaaacuaugcaaacuaagagggguagccccauugcauuuggguaaauguaacauugcuggcuggauccugggaaauccagagugugaaucacucuccacagcaagcucaugguccuacauuguggaaacaucuaguucagacaauggaacguguuacccaggagauuucaucgauuaugaggagcuaagagagcaauugagcucagugucaucauuugaaagguuugagauauuccccaagacuaguucauggcccaaucaugacucgaacaaaggcguaacggcagcauguccucaugcuggagcaaaaagcuucuacaaaaauuuaauauggcuaguuaaaaaaggaaauucauacccaaagcucagcaaauccuacauuaaugauaaagggaaagaaguccucgugcuauggggcauucaccauccaucuacuagugcugaccaacaaagucucuaucagaaugcagaugcauauguuuuuguggggacaucaagauacagcaagaaguucaagccggaaauagcaauaagacccaaagugagggaucaagaagggagaaugaacuauuacuggacacuaguagagccgggagacaaaauaacauucgaagcaacuggaaaucuagugguaccgagauaugcauucgcaauggaaagaaaugcuggaucugguauuaucauuucagauacaccaguccacgauugcaauacaacuugucagacacccaagggugcuauaaacaccagccucccauuucagaauauacauccgaucacaauuggaaaauguccaaaauauguaaaaagcacaaaauugagacuggccacaggauugaggaaugucccgucuauucaaucuagaggccuauuuggggccauugccgguuucauugaagggggguggacagggaugguagauggaugguacgguuaucaccaucaaaaugagcaggggucaggauaugcagccgaccugaagagcacacagaaugccauugacgagauuacuaacaaaguaaauucuguuauugaaaagaugaauacacaguucacagcaguagguaaagaguucaaccaccuggaaaaaagaauagagaauuuaaauaaaaagguugaugaugguuuccuggacauuuggacuuacaaugccgaacuguugguucuauuggaaaaugaaagaacuuuggacuaccacgauucaaaugugaagaacuuauaugaaaagguaagaagccaguuaaaaaacaaugccaaggaaauuggaaacggcugcuuugaauuuuaccacaaaugcgauaacacgugcauggaaaguguaaaaaaugggacuuaugacuacccaaaauacucagaggaagcaaaauuaaacagagaagaaauagaugggguaaagcuggaaucaacaaggauuuaccagauuuuggcgaucuauucaacugucgccaguucauugguacugguagucucccugggggcaaucaguuucuggaugugcucuaaugggucucuacaguguagaauauguauuuaa

SEQ ID NO: 45737 - RNA, 1701 nt, Artificial Sequence
  derived and/or modified CDS sequence (wt) from hemagglutinin__InfluenzaA__BAJ39978
augaaggcaauacuaguaguucugcuauauacauuugcaaccgcaaaugcagacacauuauguauagguuaucaugcgaacaauucaacagacacuguagacacaguacuagaaaagaauguaacaguaacacacucuguuaaccuucuagaagacaagcauaacgggaaacuaugcaaacuaagagggguagccccauugcauuuggguaaauguaacauugcuggcuggauccugggaaauccagagugugaaucacucuccacagcaagcucaugguccuacauuguggaaacaucuaguucagacaauggaacguguuacccaggagauuucaucgauuaugaggagcuaagagagcaauugagcucagugucaucauuugaaagguuugagaucuucccuaagacaaguucauggcccaaucaugacucgaacaaagguguaacggcagcauguccucaugcuggagcaaaaagcuucuacaaaaauuuaauauggcuaguuaaaaaaggaaauucauacccaaagcucagcaaauccuacauuaaugauaaagggaaagaaguccucgugcuauggggcauucaccauccaucuacuagugcugaccaacaaagucucuaucagaaugcagaugcauauguuuuuguggggacaucaagauacagcaagaaguucaagccggaaauagcaauaagacccaaagugagggaacaagaagggagaaugaacuauuacuggacacuaguagagccgggagacaaaauaacauucgaagcaacuggaaaucuagugguaccgagauaugcauucgcaauggaaagaaaugcuggaucugguauuaucauuucagauacaccaguccacgauugcaauacaacuugucagacacccaagggugcuauaaacaccagccucccauuucagaauauacauucgaucacaauuggaaaauguccaaaauauguaaaaagcacaaaauugagacuggccacaggauugaggaaugucccgucuauucaaucuagaggccuauuuggggccauugccgguuucauugaagggggguggacagggaugguagauggaugguacgguuaucaccaucaaaaugagcaggggucaggauaugcagccgaccugaagagcacacagaaugccauugacgagauuacuaacaaaguaaauucuguuauugaaaagaugaauacacaguucacagcaguagguaaagaguucaaccaccuggaaaaaagaauagagaauuuaaauaaaaagguugaugaugguuuccuggacauuuggacuuacaaugccgaacuguugguucuauuggaaaaugaaagaacuuuggacuaccacgauucaaaugugaagaacuuauaugaaaagguaaaaagccaguuaaaaaacaaugccaaggaaauuggaaacggcugcuuugaauuuuaccacaaaugcgauaacacgugcauggaaagugucaaaaaugggacuuaugacuacccaaaauacucagaggaagcaaaauuaaacagagaaaaaauagaugggguaaagcuggaaucaacaaggauuuaccagauuuuggcgaucuauucaacugucgccaguucauugguacugguagucucccugggggcaaucaguuucuggaugugcucuaaugggucucuacaguguagaauauguauuuaa

SEQ ID NO: 45738 - RNA, 1701 nt, Artificial Sequence
  derived and/or modified CDS sequence (wt) from hemagglutinin__InfluenzaA__BAJ39979
augaaggcaauacuaguaguucugcuauauacauuugcaaccgcaaaugcagacacauuauguauagguuaucaugcgaacaauucaacagacacuguagacacaguacuagaaaagaauguaacaguaacacacucuguuaaccuucuagaagacaagcauaacgggaaacuaugcaaacuaagagggguagccccauugcauuuggguaaauguaacauugcuggcuggauccugggaaauccagagugugaauuacucuccacagcaagcucaugguccuacauuguggaaacaucuaguucagacaauggaacguguuacccaggagauuucaucgauuaugaggagcuaagagagcaauugagcucagugucaucauuugaaagguuugagauauuccccaagacaaguucauggcccaaucaugacucggacaaagguguaacggcagcauguccucaugcuggagcaaaaagcuucuacaaaaauuuaauauggcuaguuaaaaaaggaaauucauacccaaagcucagcaaauccuacauuaaugauaaagggaaagaaguccucgugcuauggggcauucaccauccaucuacuagugcugaccaacaaagucucuaucagaaugcagaugcauauguuuuuguggggacaucaagauacagcaagaaguucaagccggaaauagcaauaagacccaaagugagggaucaagaagggagaauggacuauuacuggacacuaguagagccgggagacaaaauaacauucgaagcaacuggaaaucuagugguaccgagauaugcauucgcaauggaaagaaaugcuggaucugguauuaucauuucagauacaccaguccacaauugcaauacaacuugucagacacccaagggugcuauaaacaccagccucccauuucagaauauacauccgaucacaauuggaaaauguccaaaauauguaaaaagcacaaaauugagacuggccacaggauugaggaaugucccgucuauucaaucuagaggccuauuuggggccauugccggcuucauugaagggggguggacagggaugguagauggaugguacgguuaucaccaucaaaaugagcaggggucaggauaugcagccgaccugaaaagcacacagaaugccauugacaagauuacuaacaaaguaaauucuguuauugaaaagaugaauacacaguucacagcaguagguaaagaguucaaccaccuggaaaauagaauagagaauuuaaauaaaaagguugaugaugguuuccuggacauuuggacuuacaaugccgaacuguugguucuauuggaaaaugaaagaacuuuggacuaccaugauucaaaugugaaaaacuuauaugaaaagguaagaagccaguuaaaaaacaaugccaaggaaauuggaaacggcugcuuugaauuuuaccacaaaugcgauaacacgugcauggaaagugucaaaaaugggacuuaugacuacccaaaauacucagaggaagcaaaauuaaacagagaagaaauagaugggguaaagcuggaaucaacaaggauuuaccagauuuuggcgaucuauucaacugucgccaguucauugguacugguagucucccugggggcaaucaguuucuggaugugcucuaaugggucucuacaguguagaauauguauuuaa

SEQ ID NO: 45739 - RNA, 1701 nt, Artificial Sequence; identical to SEQ ID NO: 45711
  derived and/or modified CDS sequence (wt) from hemagglutinin__InfluenzaA__BAJ39980

SEQ ID NO: 45740 - RNA, 1701 nt, Artificial Sequence
  derived and/or modified CDS sequence (wt) from hemagglutinin__InfluenzaA__BAJ39981
augaaggcaauacuaguaguucugcuauauacauuugcaaccgcaaaugcagacacauuauguauagguuaucaugcgaacaauucaacagacacuguagacacaguacuagaaaagaauguaacaguaacacacucuguuaaccuucuagaagacaagcauaacgggaaacuaugcaaacuaagagggguagccccauugcauuuggguaaauguaacauugcuggcuggauccugggaaauccagagugugaaucacucuccacagcaagcucaugguccuacauuguggaaacaucuaguucagacaauggaacguguuauccaggagauuucaucgauuaugaggagcuaagagagcaauugagcucagugucaucauuugaaagguuugagauauuccccaagacaaguucauggcccaaucaugacucgaacaaagguguaacggcagcauguccucaugcuggagcaaaaagcuucuacaaaaauuuaauauggcuaguuaaaaaaggaaauucauacccaaagcucagcaaauccuacauuaaugauaaagggaaagaaguccucgugcuauggggcauucaccauccaucuacuagugcugaccaacaaagccucuaucagaaugcagaugcauauguuuuuguggggacaucaagauacagcaagaaguucaagccggaaauagcaauaagacccaaagugagggaucaagaagggagaaugaacuauuacuggacacuaguagagccgggagacaaaauaacauucgaagcaacuggaaaucuagugguaccgagauaugcauucgcaauggaaagaaaugcuggaucugguauuaucauuucagauacaccaguccacgauugcaauacaacuugucagacacccaagggugcuauaaacaccagccucccauuucagaauauacauccgaucacaauuggaaaauguucaaaauauguaaaaagcacaaaauugagacuggccacaggauugaggaaugucccgucuauucaaucuagaggccuauuuggggccauugccgguuucauugaagggggguggacagggaugguagauggaugguacgguuaucaccaucaaaaugagcaggggucaggauaugcagccgaccugaagagcacacagaaugccauugacgagauuacuaacaaaguaaauucuguuauugaaaagaugaauacacaguucacagcaguagguaaagaguucaaccaccuggaaaaaagaauagagaauuuaaauaaaaaaguugaugaugguuuccuggacauuuggacuuacaaugccgaacuguugguucuauuggaaaaugaaagaacuuuggacuaccacgauucaaaugugaagaacuuauaugaaaagguaaaaagccaguuaaaaaacaaugccaaggaaauuggaaacggcugcuuugaauuuuaucacaaaugcgauaacacgugcauggaaagugucaaaaaugggacuuaugacuacccaaaauacucaaaggaagcaaaauuaaacagagaaaaaauagaugggguaaagcuggaaucaacaaggauuuaccagauuuuggcgaucuauucaacugucgccaguucauugguacugguagucucccugggggcaaucaguuucuggaugugcucuaaugggucucuacaguguagaauauguauuuaa

SEQ ID NO: 45741 - RNA, 1701 nt, Artificial Sequence
  derived and/or modified CDS sequence (wt) from hemagglutinin__InfluenzaA__BAJ39982
augaaggcaauacuaguaguucugcuauauacauuugcaaccgcaaaugcagccacauuauguauagguuaucaugcgaacaauucaacagacacuguagacacauuacuagaaaagaauguaacaguaacacacucuguuaaccuucuagaagacaagcauaacgggaagcuaugcaaacuaagagggguagccccauugcauuuggguaaauguaacauugcuggcuggauccugggaaauccagagugugaaucacucuccacagcaagcucaugguccuacauuguggaaacaucuaguucagacaauggaacguguuacccaggagauuucaucgauuaugaggagcuaagagagcaauugagcucagugucaucauuugaaagguuugagauauuccccaagacaaguucauggcccaaucaugacucgaacaaagguguaacggcagcauguccucaugcuggagcaaaaagcuucuacaaaaauuuaauauggcuaguuaaaaaaggaaauucauacccaaagcucagcaaauccuacauuaaugauaaagggaaagaaguccucgugcuauggggcauucaccauccaucuacuagugcugaccaacaaagucucuaucagaaugcagaugcauauguuuuuguggggacaucaagauacagcaagaaguucaagccggaaauagcaauaagacccaaagugagggaucaagaagggagaaugaacuauuacuggacacuaguagagccgggagacaaaauaacauucgaagcaacuggaaaucuagugguaccgagauaugcauucgcaauggaaagaaaugcuggaucugguauuaucauuucagauacaccaguccacgauugcaauacaacuugucagacacccaagggugcuauaaacaccagccucccauuucagaauauacauccgaucacaauuggaaaauguccaaaauauguaaaaagcacaaaauugagacuggccacaggauugaggaaugucccgucuauucaaucuagaggccuauuuggggccauugccgguuucauugaagggggguggacagggaugguagauggaugguacgguuaucaccaucaaaaugagcaggggucaggauaugcagccgaccugaagagcacacagaaugccauugacgagauuacuaacaaaguaaauucuguuauugaaaagaugaauacacaguucacagcaguagguaaagaguucaaccaccuggaaaaaagaauagagaauuuaaauaaaaaaguugaugaugguuuccuggacauuuggacuuacaaugccgaacuguugguucuauuggaaaaugaaagaacuuuggacuaccacgauucaaaugugaagaacuuauaugaaaagguaagaagccaguuaaaaaacaaugccaaggaaauuggaaacggcugcuuugaauuuuaccacaaaugcgauaacacgugcauggaaagugucaaaaaugggacuuaugauuacccaaaauacucagaggaagcaaaauuaaacagagaagaaauagaugggguaaagcuggaaucaacaaggauuuaccagauuuuggcgaucuauucaacugucgccaguucauugguacugguagucucccugggggcaaucaguuucuggaugugcucuaaugggucucuacaguguagaauauguauuuaa

SEQ ID NO: 45742 - RNA, 1701 nt, Artificial Sequence
  derived and/or modified CDS sequence (wt) from hemagglutinin__InfluenzaA__BAJ39983
augaaggcaauauuaguaguucugcuauauacauuugcaaccgcaaaugcagacacauuauguauagguuaucaugcgaacaauucaacagacacuguagacacaguacuagaaaagaauguaacaguaacacacucuguuaaccuucuagaagacaagcauaacgggaaacuaugcaaacuaagagggguagccccauugcauuuggguaaauguaacauugcuggcuggaucuugggaaauccagagugugaaucacucuccacagcaagcucaugguccuacauugcggaaacaucuaguucagacaauggaacguguuacccaggagauuucaucgauuaugaggagcuaagagagcaauugagcucagugucaucauuugaaagguuugagauauuccccaagacuaguucauggcccaaucaugacucgaacaaaggcguaacggcagcauguccucaugcuggagcaaaaagcuucuacaaaaauuuaauauggcuaguuaaaaaaggaaauucauacccaaagcucagcaaauccuacauuaaugauaaagggaaagaaguccucgugcuauggggcauucaccauccaucuacuagugcugaccaacaaagucucuaucagaaugcagaugcauauguuuuuguggggacaucaagauacagcaagaaguucaagccggaaauagcaauaagacccaaagugagggaucaagaagggagaaugaacuauuacuggacacuaguagagccgggagacaaaauaacauucgaagcaacuggaaaucuagugguaccgagauaugcauucgcaauggaaagaaaugcuggaucugguauuaucauuucagauacaccaguccacgauugcaauacaacuugucagacacccaagggugcuauaaacaccagccucccauuucagaauauacauccgaucacaauuggaaaauguccaaaauauguaaaaagcacaaaauugagacuggccacaggauugaggaaugucccgucuauucaaucuagaggccuauuuggggccauugccgguuucauugaagggggguggacagggaugguagauggaugguacgguuaucaccaucaaaaugagcaggggucaggauaugcagccgaccugaagagcacacagaaugccauugacgagauuacuaacaaaguaaauucuguuauugaaaagaugaauacacaguucacagcaguagguaaagaguucaaccaccuggaaaaaagaauagagaauuuaaauaaaaagguugaugaugguuuccuggacauuuggacuuacaaugccgaacuguugguucuauuggaaaaugaaagaacuuuggacuaccacgauucaaaugugaagaacuuauaugaaaagguaagaagccaguuaaaaaacaaugccaaggaaauuggaaacggcugcuuugaauuuuaccacaaaugcgauaacacgugcauggaaagugucaaaaaugggacuuaugacuacccaaaauacucagaggaagcaaaauuaaacagagaagaaauagaugggguaaagcuggaaucaacaaggauuuaccagauuuuggcgaucuauucaacugucgccaguucauugguacugguagucucccugggggcaaucaguuucuggaugugcucuaaugggucucuacaguguagaauauguauuuaa

SEQ ID NO: 45743 - RNA, 1701 nt, Artificial Sequence
  derived and/or modified CDS sequence (wt) from hemagglutinin__InfluenzaA__BAJ39984
augaaggcaauauuaguaguucugcuauauacauuugcaaccgcaaaugcagacacauuauguauagguuaucaugcgaacaauucaacagacacuguagacacaguacuagaaaagaauguaacaguaacacacucuguuaaccuucuagaagacaagcauaacgggaaacuaugcaaacuaagagggguagccccauugcauuuggguaaauguaacauugcuggcuggauccugggaaauccagagugugaauuacucuccacagcaagcucaugguccuacauuguggaaacaucuaguucagacaauggaacguguuacccaggagauuucaucgauuaugaggagcuaagagagcaauugagcucagugucaucauuugaaagguuugagauauuccccaagacaaguucauggcccaaucaugacucgaacaaagguguaacggcagcauguccucaugcuggagcaaaaagcuucuacaaaaauuuaauauggcuaguuaaaaaaggaaauucauacccaaagcucagcaaauccuacauuaaugauaaagggaaagaaguccucgugcuauggggcauucaccauccaucuacuagugcugaccaacaaagucucuaucagaaugcagaugcauauguuuuuguggggacaucaagauacagcaagaaguucaagccggaaauagcaauaagacccaaagugagggaucaagaagggagaaugaacuauuacuggacacuaguagagccgggagacaaaauaacauucgaagcaacuggaaaucuagugguaccgagauaugcauucgcaauggaaagaaaugcuggaucugguauuaucauuucagauacaccaguccacaauugcaauacaacuugucagacacccaagggugcuauaaacaccagccucccauuucagaauauacauccgaucacaauuggaaaauguccaaaauauguaaaaagcacaaaauugagacuggccacaggauugaggaaugucccgucuauucaaucuagaggccuauuuggggccauugccggcuucauugaagggggguggacagggaugguagauggaugguacgguuaucaccaucaaaaugagcaggggucaggauaugcagccgaccugaagagcacacagaaugccauugacaagauuacuaacaaaguaaauucuguuauugaaaagaugaauacacaguucacagcaguagguaaagaguucaaccaccuggaaaaaagaauagagaauuuaaauaaaaagguugaugaugguuuccuggacauuuggacuuacaaugccgaacuguugguucuauuggaaaaugaaagaacuuuggacuaccaugauucaaaugugaagaacuuauaugaaaagguaagaagccaguuaaaaaacaaugccaaggaaauuggaaacggcugcuuugaauuuuaccacaaaugcgauaacacgugcauggaaagugucaaaaaugggacuuaugacuacccaaaauacucagaggaagcaaaauuaaacagagaagaaauagaugggguaaagcuggaaucaacaaggauuuaccagauuuuggcgaucuauucaacugucgccaguucauugguacugguagucucccugggggcaaucaguuucuggaugugcucuaaugggucucuacaguguagaauauguauuuaa

SEQ ID NO: 45744 - RNA, 1701 nt, Artificial Sequence; identical to SEQ ID NO: 45722
  derived and/or modified CDS sequence (wt) from hemagglutinin__InfluenzaA__BAJ39985

SEQ ID NO: 45745 - RNA, 1701 nt, Artificial Sequence
  derived and/or modified CDS sequence (wt) from hemagglutinin__InfluenzaA__BAJ39987
augaagacaauacuaguaguucugcuauauacauuugcaaccgcaaaugcagacacauuauguauagguuaucaugcgaacaauucaacagacacuguagacacaguacuagaaaagaauguaacaguaacacacucuguuaaucuucuagaagacaagcauaacgggaaacuaugcaaacuaagagggguagccccauugcauuuggguaaauguaacauugcuggcuggauccugggaaauccagagugugaaucacucuccacagcaagcucaugguccuacauuguggaaacaucuaguucagacaauggaacguguuacccaggagauuucaucgauuaugaggagcuaagagagcaauugagcucagugucaucauuugaaagguuugagauauuccccaagacaaguucauggcccaaucaugacucgaacaaagguguaacggcagcauguccucaugcuggagcaaaaagcuucuacaaaaauuuaauauggcugguuaaaaaaggaaauucauacccaaagcucagcaaauccuacauuaaugauaaagggaaagaaguccucgugcuauggggcauucaccauccaucuacuagugcugaccaacaaagucucuaucagaaugcagauacauauguuuuuguggggacaucaagauacagcaagaaguucaagccggaaauagcaauaagacccaaagugagggaucaagaagggagaaugaacuauuacuggacacuaguagagccgggagacaaaauaacauucgaagcaacuggaaaucuagugguaccgagauaugcauucgcaauggaaagaaaugcuggaucugguauuaucauuucagauacaccaguccacgauugcaauacaacuugucagacacccaagggugcuauaaacaccagccucccauuucagaauauacauccgaucacaauuggaaaauguccaaaauauguaaaaagcacaaaauugagacuggccacaggauugaggaaugucccgucuauucaaucuagaggccuauuuggggccauugccgguuucauugaagggggguggacagggaugguagauggaugguacgguuaucaccaucaaaaugagcaggggucaggauaugcagccgaccugaagagcacacagaaugccauugacgagauuacuaacaaaguaaauucuguuauugaaaagaugaauacacaguucacagcaguagguaaagaguucaaccaccuggaaaaaagaauagagaauuuaaauaaaaaaguugaugaugguuuccuggacauuuggacuuacaaugccgaacuguugguucuauuggaaaaugaaagaacuuuggacuaccacgauucaaaugugaagaacuuauaugaaaagguaagaagccaguuaaaaaacaaugccaaggaaauuggaaacggcugcuuugaauuuuaccacaaaugcgauaacacgugcauggaaagugucaaaaaugggacuuaugacuacccaaaauacucaaaggaagcaaaauuaaacagagaagaaauagaugggguaaagcuggaaucaacaaggauuuaccagauuuuggcgaucuauucaacugucgccaguucauugguacugguagucucccugggggcaaucaguuucuggaugugcucuaaugggucucuacaguguagaauauguauuuaa

SEQ ID NO: 45746 - RNA, 1701 nt, Artificial Sequence
  derived and/or modified CDS sequence (wt) from hemagglutinin__InfluenzaA__BAJ39988
augaaggcaauacuaguaguucugcuauauacauuugcaaccgcaaaugcagacacauuauguauagguuaucaugcgaacaauucaacagacacuguagacacaguacuagaaaagaauguaacaguaacacacucuguuaaccuucuagaagacaagcauaacgggaaacuaugcaaacuaagagggguagccccauugcauuuggguaaauguaacauugcuggcuggauccugggaaauccagagugugaaucacucuccacagcaagcucaugguccuacauuguggaaacaucuaguucagacaauggaacguguuauccaggagauuucaucgauuaugaggagcuaagagagcaauugagcucagugucaucauuugaaagguuugagauauuccccaagacaaguucauggcccaaucaugacucgaacaaagguguaacggcagcauguccucaugcuggagcaaaaagcuucuacaaaaauuuaauauggcuaguuaaaaaaggaaauucauacccaaagcucagcaaauccuacauuaaugauaaagggaaagaaguccucgugcuauggggcauucaccauccaucuacuagugcugaccaacaaagcaucuaucagaaugcagaugcauauguuuuuguggggacaucaagauacagcaagaaguucaagccggaaauagcaauaagacccaaagugagggaucaagaagggagaaugaacuauuacuggacacuaguagagccgggagacaaaauaacauucgaagcaacuggaaaucuagugguaccgagauaugcauucgcaauggaaagaaaugcuggaucugguauuaucauuucagauacaccaguccacgauugcaauacaacuugucagacacccaagggugcuauaaacaccagccucccauuucagaauauacauccgaucacaauuggaaaauguucaaaauauguaaaaagcacaaaauugagacuggccacaggauugaggaaugucccgucuauucaaucuagaggccuauuuggggccauugccgguuucauugaagggggguggacagggaugguagauggaugguacgguuaucaccaucaaaaugagcaggggucaggauaugcagccgaccugaagagcacacagaaugccauugacgagauuacuaacaaaguaaauucuguuauugaaaagaugaauacacaguucacagcaguagguaaagaguucaaccaccuggaaaaaagaauagagaauuuaaauaaaaaaguugaugaugguuuccuggacauuuggacuuacaaugccgaacuguugguucuauuggaaaaugaaagaacuuuggacuaccacgauucaaaugugaagaacuuauaugaaaagguaagaagccaguuaaaaaacaaugccaaggaaauuggaaacggcugcuuugaauuuuaucacaaaugcgauaacacgugcauggaaagugucaaaaaugggacuuaugacuacccaaaauacucagaggaagcaaaauuaaacagagaagaaauagaugggguaaagcuggaaucaacaaggauuuaccagauuuuggcgaucuauucaacugucgccaguucauugguacugguagucucccugggggcaaucaguuucuggaugugcucuaaugggucucuacaguguagaauauguauuuaa

SEQ ID NO: 45747 - RNA, 1701 nt, Artificial Sequence
  derived and/or modified CDS sequence (wt) from hemagglutinin__InfluenzaA__BAJ39989
augaaggcaauacuaguaguucugcuauauacauuugcaaccgcaaaugcagacacauuauguauagguuaucaugcgaacaauucaacagacacuguagacacaguacuagaaaagaauguaacaguaacacacucuguuaaccuucuagaagacaagcauaacgggaaacuaugcaaacuaagagggguagccccauugcauuuggguaaauguaacauugcuggcuggauccugggaaauccagagugugaaucacucuccacagcaagcucaugguccuacauuguggaaacaucuaguucagacaauggaacguguuacccaggagauuucaucgauuaugaggagcuaagagagcaauugagcucagugucaucauuugaaagguuugagauauuccccaagacaaguucauggcccaaucaugacucgaacaaaggcguaacggcagcauguccucaugcuggagcaaaaagcuucuacaaaaauuuaauauggcuaguuaaaaaaggaaauucauacccaaagcucagcaaauccuacauuaaugauaaagggaaagaaguccucgugcuauggggcauucaccauccaucuacuaaugcugaccaacaaagucucuaucagaaugcagaugcauauguuuuuguggggacaucaagauacagcaagaaguucaagccggaaauagcaauaagacccaaagugagggaucaagaagggagaaugaacuauuacuggacacuaguagagccgggagacaaaauaacauucgaagcaacuggaaaucuagugguaccgagauaugcauucgcaauggaaagaaaugcuggaucugguauuaucauuucagauacaccaguccacgauugcaauacaacuugucagacacccaagggugcuauaaacaccagccucccauuucagaauauacauccgaucacaauuggaaaauguccaaaauauguaaaaagcacaaaauugagacuggccacaggauugaggaaugucccgucuauucaaucuagaggccuauuuggggccauugccgguuucauugaagggggguggacagggaugguagauggaugguacgguuaucaccaucaaaaugagcaggggucaggauaugcagccgaccugaagagcacacagaaugccauugacgagauuacuaacaaaguaaauucuguuauugaaaagaugaauacacaguucacagcaguagguaaagaguucaaccaccuggaaaaaagaauagagaauuuaaauaaaaagguugaugaugguuuccuggacauuuggacuuacaaugccgaacuguugguucuauuggaaaaugaaagaacuuuggacuaccacgauucaaaugugaagaacuuauaugaaaagguaagaagccaguuaaaaaacaaugccaaggaaauuggaaacggcugcuuugaauuuuaccacaaaugcgauaacacgugcauggaaaguguaaaaaaugggacuuaugacuacccaaaauacucagaggaagcaaaauuaaacagagaagaaauagaugggguaaagcuggaaucaacaaggauuuaccagauuuuggcgaucuauucaacugucgccaguucauugguacugguagucucccugggggcaaucaguuucuggaugugcucuaaugggucucuacaguguagaauauguauuuaa

SEQ ID NO: 45748 - RNA, 1701 nt, Artificial Sequence; identical to SEQ ID NO: 35767
  derived and/or modified CDS sequence (wt) from hemagglutinin__InfluenzaA__BAJ39990

SEQ ID NO: 45749 - RNA, 1701 nt, Artificial Sequence
  derived and/or modified CDS sequence (wt) from hemagglutinin__InfluenzaA__BAJ39993
augaaggcaauacuaguaguucugcuauauacauuugcaaccgcaaaugcagacacauuauguauagguuaucaugcgaacaauucaacagacacuguagacacaguacuagaaaagaauguaacaguaacacacucuguuaaccuucuagaagacaagcauaacgggaaacuaugcaaacuaagagggguagccccauugcauuuggguaaauguaacauugcuggcuggauccugggaaauccagagugugaaucacucuccacagcaagcucaugguccuacauuguggaaacaucuaguucagacaauggaacguguuacccaggagauuucaucgauuaugaggagcuaagagagcaauugagcucagugucaucauuugaaagguuugagauauuccccaagacaaguucauggcccaaucaugacucgaacaaaggcguaacggcagcauguccucaugcuggagcaaaaagcuucuacaaaaauuuaauauggcuaguuaaaaaaggaaauucauacccaaagcucagcaaauccuacauuaaugauaaagggaaagaaguccucgugcuauggggcauucaccauccaucuacuagugcugaccaacaaagucucuaucagaaugcagaugcauauguuuuuguggggacaucaagauacagcaagaaguucaagccggaaauagcaauaagacccaaagugagggaucaagaagggagaaugaacuauuacuggacacuaguagagccgggagacaaaauaacauucgaagcaacuggaaaucuagugguaccgagauaugcauucgcaauggaaagaaaugcuggaucugguauuaucauuucagauacaccaguccacgauugcaauacaacuugucagacacccaagggugcuauaaacaccagccucccauuucagaauauacauccgaucacaauuggaaaauguccaaaauauguaaaaagcacaaaauugagacuggccacaggauugaggaaugucccgucuauucaaucuagaggccuauuuggggccauugccgguuucauugaagggggguggacagggaugguagauggaugguacgguuaucaccaucaaaaugagcaggggucaggauaugcagccgaccugaaaagcacacagaaugccauugacgagauuacuaacaaaguaaauucuguuauugaaaagaugaauacacaguucacagcaguagguaaagaguucaaccaccuggaaaaaagaauagagaauuuaaauaaaaagguugaugauggguuccuggacauuuggacuuacaaugccgaacuguugguucuauuggaaaaugaaagaacuuuggacuaccacgauucaaaugugaagaacuuauaugaaaagguaagaagccaguuaaaaaacaaugccaaggaaauuggaaacggcugcuuugaauuuuaccacaaaugcgauaacacgugcauggaaagugucaaaaaugggacuuaugacuacccaaaauacucagaggaagcaaaauuaaacagagaagaaauagaugggguaaagcuggaaucaacaaggauuuaccagauuuuggcgaucuauucaacugucgccaguucauugguacugguagucucccugggggcaaucaguuucuggaugugcucuaaugggucucuacaguguagaauauguauuuaa

SEQ ID NO: 45750 - RNA, 1701 nt, Artificial Sequence
  derived and/or modified CDS sequence (wt) from hemagglutinin__InfluenzaA__BAJ39994
augaaggcaauacuaguaguucugcuauauacauuugcaaccgcaaaugcagacacauuauguauagguuaucaugcgaacaauucaacagacacuguagacacaguacuagaaaagaauguaacaguaacacacucuguuaaccuucuagaagacaagcauaacgggaaacuaugcaaacuaagagggguagccccauugcauuuggguaaauguaacauugcuggcuggauccugggaaauccagagugugaaucacucuccacagcaagcucaugguccuacauuguggaaacaucuaguucagacaauggaacguguuacccaggagauuucaucgauuaugaggagcuaagagagcaauugagcucagugucaucauuugaaagauuugagauauuccccaagacaaguucauggcccaaucaugacucgaacaaagguguaacggcagcauguccucaugcuggagcaaaaagcuucuacaaaaauuuaauauggcuaguuaaaaaaggaaauucauacccaaagcucagcaaauccuacauuaaugauaaagggaaagaaguccucgugcuauggggcauucaccauccaucuacuagugcugaccaacaaagucucuaucagaaugcagauacauauguuuuuguggggacaucaagauacagcaagaaguucaagccggaaauagcaauaagacccaaagugagggaucaagaagggagaaugaacuauuacuggacacuaguagagccgggagacaaaauaacauucgaagcaacuggaaaucuagugguaccgagauaugcauucgcaauggaaagaaaugcuggaucugguauuaucauuucagauacaccaguccacgauugcaauacaacuugucagacacccaagggugcuauaaacaccagccucccauuucagaauauacauccgaccacaauuggaaaauguccaaaauauguaaaaagcacaaaauugagacuggccacaggauugaggaaugucccgucuauucaaucuagaggccuauuuggggccauugccgguuucauugaagggggguggacagggaugguagauggaugguacgguuaucaccaucaaaaugagcaggggucaggauaugcagccgaccugaagagcacacagaaugccauugacgagauuacuaacaaaguaaauucuguuauugaaaagaugaauacacaguucacagcaguagguaaagaguucaaccaccuggaaaaaagaauagagaauuuaaauaaaaaaguugaugaugguuuccuggacauuuggacuuacaaugccgaacuguugguucuauuggaaaaugaaagaacuuuggacuaccacgauucaaaugugaagaacuuauaugaaaagguaaaaagccaguuaaaaaacaaugccaaggaaauuggaaacggcugcuuugaauuuuaccacaaaugcgauaacacgugcuuggaaagugucaaaaaugggacuuaugacuacccaaaauacucagaggaagcaaaauuaaacagagaaaaaauagaugggguaaagcuggaaucaacaaggauuuaccagauuuuggcgaucuauucaacugucgccaguucauugguacugguagucucccugggggcaaucaguuucuggaugugcucuaaugggucucuacaguguagaauauguauuuaa

SEQ ID NO: 45751 - RNA, 1701 nt, Artificial Sequence
  derived and/or modified CDS sequence (wt) from hemagglutinin__InfluenzaA__BAJ39996
augaaggcaauacuaguaguucugcuauauacauuugcaaccgcaaaugcagacacauuauguauagguuaucaugcgaacaauucaacagacacuguagacacaguacuagaaaagaauguaacaguaacacacucuguuaaccuucuagaagacaagcauaacgggaaacuaugcaaacuaagagggguagccccauugcauuuggguaaauguaacauugcuggcuggauccugggaaauccagagugugaaucacucuccacagcaagcucaugguccuacauuguggaaacaucuaguucagacaauggaacguguuacccaggagauuucaucgauuaugaggagcuaagagagcaauugagcucagugucaucauuugaaagguuugagauauuccccaagacuaguucauggcccaaucaugacucgaacaaaggcguaacggcagcauguccucaugcuggagcaaaaagcuucuacaaaaauuuaauauggcuaguuaaaaaaggaaauucauacccaaagcucagcaaauccuacauuaaugauaaagggaaagaaguccucgugcuauggggcauucaccauccaucuacuagugcugaccaacaaagucucuaucagaaugcagaugcauauguuuuuguggggacaucaagauacagcaagaaguucaagccggaaauagcaauaagacccaaagugagggaucaagaagggagaaugaacuauuacuggacacuaguagagccgggagacaaaauaacauucgaagcaacuggaaaucuagugguaccgagauaugcauucgcaauggaaagaaaugcuggaucugguauuaucauuucagauacaccaguccacgauugcaauacaacuugucagacacccaagggugcuauaaacaccagccucccauuucagaauauacauccgaucacaauuggaaaauguccaaaauauguaaaaagcacaaaauugagacuggccacaggauugaggaaugucccgucuauucaaucuagaggccuauuuggggccauugccgguuucauugaagggggguggacagggaugguagauggaugguacgguuaucaccaucaaaaugagcaggggucaggauaugcagccgaccugaagagcacacagaaugccauugacgagauuacuaacaaaguaaauucuguuauugaaaagaugaauacacaguucacagcaguagguaaagaguucaaccaccuggaaaaaagaauagagaauuuaaauaaaaaaguugaugaugguuuccuggacauuuggacuuacaaugccgaacuguugguucuauuggaaaaugaaagaacuuuggacuaccacgauucaaaugugaagaacuuauaugaaaagguaagaagccaguuaaaaaacaaugccaaggaaauuggaaacggcugcuuugaauuuuaccacaaaugcgauaacacgugcauggaaagugucaaaaaugggacuuaugacuacccaaaauacucagaggaagcaaaauuaaacagagaagaaauagaugggguaaagcuggaaucaacaaggauuuaccagauuuuggcgaucuauucaacugucgccaguucauugguacugguagucucccugggggcaaucaguuucuggaugugcucuaaugggucucuacaguguagaauauguauuuaa

SEQ ID NO: 45752 - RNA, 1701 nt, Artificial Sequence
  derived and/or modified CDS sequence (wt) from hemagglutinin__InfluenzaA__BAJ39997
augaaggcaauacuaguaguucugcuauauacauuugcaaccgcaaaugcagacacauuauguauagguuaucaugcgaacaauucaacagacacuguagacacaguacuagaaaagaauguaacaguaacacacucuguuaaccuucuagaagacaagcauaacgggaaacuaugcaaacuaagagggguagccccauugcauuuggguaaauguaacauugcuggcuggauccugggaaauccagagugugaaucacucuccacagcaagcucaugguccuacauuguggaaacaucuaguucagacaauggaacguguuacccaggagauuucaucgauuaugaggagcuaagagagcaauugagcucagugucaucauuugaaagauuugagauauuccccaagacaaguucauggcccaaucaugacucgaacaaagguguaacggcagcauguccucaugcuggagcaaaaagcuucuacaaaaauuuaauauggcuaguuaaaaaaggaaauucauacccaaagcucagcaaauccuacauuaaugauaaagggaaagaaguccucgugcuauggggcauucaccauccaucuacuagugcugaccaacaaagucucuaucagaaugcagauacauauguuuuuguggggacaucaagauacagcaagaaguucaagccggaaauagcaauaagacccaaagugagggaucaagaagggagaaugaacuauuacuggacacuaguagagccgggagacaaaauaacauucgaagcaacuggaaaucuagugguaccgagauaugcauucgcaauggaaagaaaugcuggaucugguauuaucauuucagauacaccaguccacgauugcaauacaacuugucagacacccaagggugcuauaaacaccagccucccauuucagaauauacauccgaccacaauuggaaaauguccaaaauauguaaaaagcacaaaauugagacuggccacaggauugaggaaugucccgucuauucaaucuagaggccuauuuggggccauugccgguuucauugaagggggguggacagggaugguagauggaugguacgguuaucaccaucaaaaugagcaggggucaggauaugcagccgaccugaagagcacacagaaugccauugacgagauuacuaacaaaguaaauucuguuauugaaaagaugaauacacaguucacagcaguagguaaagaguucaaccaccuggaaaaaagaauagagaauuuaaauaaaaaaguugaugaugguuuccuggacauuuggacuuacaaugccgaacuguugguucuauuggaaaaugaaagaacuuuggacuaccacgauucaaaugugaagaacuuauaugaaaagguaagaagccaguuaaaaaacaaugccaaggaaauuggaaacggcugcuuugaauuuuaccacaaaugcgauaacacgugcauggaaagugucaaaaaugggacuuaugacuacccaaaauacucagaggaagcaaaauuaaacagagaagaaauagaugggguaaagcuggaaucaacaaggauuuaccagauuuuggcgaucuauucaacugucgccaguucauugguacugguagucucccugggggcaaucaguuucuggaugugcucuaaugggucucuacaguguagaauauguauuuaa

SEQ ID NO: 45753 - RNA, 1701 nt, Artificial Sequence; identical to SEQ ID NO: 45722
  derived and/or modified CDS sequence (wt) from hemagglutinin__InfluenzaA__BAJ39998

SEQ ID NO: 45754 - RNA, 1701 nt, Artificial Sequence
  derived and/or modified CDS sequence (wt) from hemagglutinin__InfluenzaA__BAJ39999
augaaggcaauacuaguaguucugcuauauacauuugcaaccgcaaaugcagacacauuauguauagguuaucaugcgaacaauucaacagacacuguagacacaguacuagaaaggaauguaacaguaacacacucuguuaaccuucuagaagacaagcauaacgggaaacuaugcaaacuaagagggguagccccauugcauuuggguaaauguaacauugcuggcuggauccugggaaauccagagugugaaucacucuccacagcaagcucaugguccuacauuguggaaacaucuaguucagacaauggaacguguuacccaggagauuucaucgauuaugaggagcuaagagagcaauugagcucagugucaucauuugaaagguuugagauauuccccaagacaaguucauggcccaaucaugacucgaacaaagguguaacggcagcauguccucaugcuggagcaaaaagcuucuacaaaaauuuaauauggcuaguuaaaaaaggaaauucauacccaaagcucagcaaauccuacauuaaugauaaagggaaagaaguccucgugcuauggggcauucaccauccaucuacuagugcugaccaacaaagucucuaucagaaugcagauacauauguuuuuguggggacaucaagauacagcaagaaguucaagccggaaauagcaauaagacccaaagugagggaucaagaagggagaaugaacuauuacuggacacuaguagagccgggagacaaaauaacauucgaagcaacuggaaaucuagugguaccgagauaugcauucgcaauggaaagaaaugcuggaucugguauuaucauuucagauacaccaguccacgauugcaauacaacuugucagacacccaagggugcuauaaacaccagccucccauuucagaauauacauccgaucacaauuggaaaauguccaaaauauguaaaaagcacaaaauugagacuggccacaggauugaggaaugucccgucuauucaaucuagaggccuauuuggggccauugccgguuucauugaagggggguggacagggaugguagauggaugguacgguuaucaccaucaaaaugagcaggggucaggauaugcagccgaccugaagagcacacagaaugccauugacgagauuacuaacaaaguaaauucuguuauugaaaagaugaauacacaguucacagcaguagguaaagaguucaaccaccuggaaaaaagaauagagaauuuaaauaaaaaaguugaugaugguuuccuggacauuuggacuuacaaugccgaacuguugguucuauuggaaaaugaaagaacuuuggacuaccacgauucaaaugugaagaacuuauaugaaaagguaagaagccaguuaaaaaacaaugccaaggaaauuggaaacggcugcuuugaauuuuaccacaaaugcgauaacacgugcauggaaagugucaaaaaugggacuuaugacuacccaaaauacucagaggaagcaaaauuaaacagagaagaaauagaugggguaaagcuggaaucaacaaggauuuaccagauuuuggcgaucuauucaacugucgccaguucauugguacugguagucucccugggggcaaucaguuucuggaugugcucuaaugggucucuacaguguagaauauguauuuaa

SEQ ID NO: 45755 - RNA, 1701 nt, Artificial Sequence
  derived and/or modified CDS sequence (wt) from hemagglutinin__InfluenzaA__BAJ40000
augaagacaauacuaguaguucugcuauauacauuugcaaccgcaaaugcagacacauuauguauagguuaucaugcgaacaauucaacagacacuguagacacaguacuagaaaagaauguaacaguaacacacucuguuaaucuucuagaagacaagcauaacgggaaacuaugcaaacuaagagggguagccccauugcauuuggguaaauguaacauugcuggcuggauccugggaaauccagagugugaaucacucuccacagcaagcucaugguccuacauuguggaaacaucuaguucagacaauggaacguguuacccaggagauuucaucgauuaugaggagcuaagagagcaauugagcucagugucaucauuugaaagguuugagauauuccccaagacaaguucauggcccaaucaugacucgaacaaagguguaacggcagcauguccucaugcuggagcaaaaagcuucuacaaaaauuuaauauggcugguuaaaaaaggaaauucauacccaaagcucagcaaauccuacauuaaugauaaagggaaagaaguccucgugcuauggggcauucaccauccaucuacuagugcugaccaacaaagucucuaucagaaugcagauacauauguuuuuguggggacaucaagauacagcaagaaguucaagccggaaauagcaauaagacccaaagugagggaucaagaagggagaaugaacuauuacuggacacuaguagagccgggagacaaaauaacauucgaagcaacuggaaaucuagugguaccgagauaugcauucgcaauggaaagaaaugcuggaucugguauuaucauuucagauacaccaguccacgauugcaauacaacuugucagacacccaagggugcuauaaacaccagccucccauuucagaauauacauccgaucacaauuggaaaauguccaaaauauguaaaaagcacaaaauugagacuggccacaggauugaggaaugucccgucuauucaaucuagaggccuauuuggggccauugccgguuucauugaagggggguggacagggaugguagauggaugguacgguuaucaccaucaaaaugagcaggggucaggauaugcagccgaccugaagagcacacagaaugccauugacgagauuacuaacaaaguaaauucuguuauugaaaagaugaauacacaguucacagcaguagguaaagaguucaaccaccuggaaaaaagaauagagaauuuaaauaaaaaaguugaugaugguuuccuggacauuuggacuuacaaugccgaacuguugguucuauuggaaaaugaaagaacuuuggacuaccacgauucaaaugugaagaacuuauaugaaaagguaagaagccaguuaaaaaacaaugccaaggaaauuggaaacggcugcuuugaauuuuaccacaaaugcgauaacacgugcauggaaagugucaaaaaugggacuuaugacuacccaaaauacucagaggaagcaaaauuaaacagagaagaaauagaugggguaaagcuggaaucaacaaggauuuaccagauuuuggcgaucuauucaacugucgccaguucauugguacugguagucucccugggggcaaucaguuucuggaugugcucuaaugggucucuacaguguagaauauguauuuaa

SEQ ID NO: 45756 - RNA, 1701 nt, Artificial Sequence
  derived and/or modified CDS sequence (wt) from hemagglutinin__InfluenzaA__BAJ40001
augaaggcaauacuaguaguucugcuauauacauuugcaaccgcaaaugcagacacauuauguauagguuaucaugcgaacaauucaacagacacuguagacacaguacuagaaaagaauguaacaguaacacacucuguuaaccuucuagaagacaagcauaacgggaaacuaugcaaacuaagagggguagccccauugcauuuggguaaauguaacauugcuggcuggauccugggaaauccagagugugaaucacucuccacagcaagcucaugguccuacauuguggaaacaucuaguucagacaauggaacguguuacccaggagauuucaucgauuaugaggagcuaagagagcaauugagcucagugucaucauuugaaagguuugagauauuccccaagacuaguucauggcccaaucaugacucgaacaaaggcguaacggcagcauguccucaugcuggagcaaaaagcuucuacaaaaauuuaauauggcuaguuaaaaaaggaaauucauacccaaagcucagcaaauccuacauuaaugauaaagggaaagaaguccucgugcuauggggcauucaccauccaucuacuagugcugaccaacaaagucucuaucagaaugcagaugcauauguuuuuguggggacaucaagauacagcaagaaguucaagccggaaauagcaauaagacccaaagugagggaucaagaagggagaaugaacuauuacuggacacuaguagagccgggagacaaaauaacauucgaagcaacuggaaaucuagugguaccgagauaugcauucgcaauggaaagaaaugcuggaucugguauuaucauuucagauacaccaguccacgauugcaauacaacuugucagacacccaagggugcuauaaacaccagccucccauuucagaauauacauccgaucacaauuggaaaauguccaaaauauguaaaaagcacaaaauugagacuggccacaggguugaggaaugucccgucuauucaaucuagaggccuauuuggggccauugccgguuucauugaagggggguggacagggaugguagauggaugguacgguuaucaccaucaaaaugagcaggggucaggauaugcagccgaccugaagagcacacagaaugccauugacgagauuacuaacaaaguaaauucuguuauugaaaagaugaauacacaguucacagcaguagguaaagaguucaaccaccuggaaaaaagaauagagaauuuaaauaaaaagguugaugaugguuuccuggacauuuggacuuacaaugccgaacuguugguucuauuggaaaaugaaagaacuuuggacuaccacgauucaaaugugaagaacuuauaugaaaagguaaaaagccaguuaaaaaacaaugccaaggaaauuggaaacggcugcuuugaauuuuaccacaaaugcgauaacacgugcauggaaaguguaaaaaaugggacuuaugacuacccaaaauacucagaggaagcaaaauuaaacagagaagaaauagaugggguaaagcuggaaucaacaaggauuuaccagauuuuggcgaucuauucaacugucgccaguucauugguacugguagucucccugggggcaaucaguuucuggaugugcucuaaugggucucuacaguguagaauauguauuuaa

SEQ ID NO: 45757 - RNA, 1701 nt, Artificial Sequence
  derived and/or modified CDS sequence (wt) from hemagglutinin__InfluenzaA__BAJ40002
augaaggcaauacuaguaguucugcuauauacauuugcaaccgcaaaugcagacacauuauguauagguuaucaugcgaacaauucaacagacacuguagacacaguacuagaaaagaauguaacaguaacacacucuguuaaccuucuagaagacaagcauaacgggaaacuaugcaaacuaagagggguagccccauugcauuuggguaaauguaacauugcuggcuggauccugggaaauccagagugugaaucacucuccacagcaagcucaugguccuacauuguggaaacaucuaguucagacaauggaacguguuacccaggagauuucaucgauuaugaggagcuaagagagcaauugagcucagugucaucauuugaaagguuugagauauuccccaagacaaguucauggcccaaucaugacucgaacaaaggcguaacggcagcauguccucaugcuggagcaaaaagcuucuacaaaaauuuaauauggcuaguuaaaaaaggaaauucauacccaaagcucagcaaauccuacauuaaugauaaagggaaagaaguccucgugcuauggggcauucaccauccaucuacuagugcugaccaacaaagucucuaucagaaugcagaugcauauguuuuuguggggacaucaagauacagcaagaaguucaagccggaaauagcaauaagacccaaagugagggaucaagaagggagaaugaacuauuacuggacacuaguagagccgggagacaaaauaacauucgaagcaacuggaaaucuagugguaccgagauaugcauucgcaauggaaagaaaugcuggaucugguauuaucauuucagauacaccaguccacgauugcaauacaacuugucagacacccaagggugcuauaaacaccagccucccauuucagaauauacauccgaucacaauuggaaaauguccaaaauauguaaaaagcacaaaauugagacuggccacaggguugaggaaugucccgucuauucaaucuagaggccuauuuggggccauugccgguuucauugaagggggguggacagggaugguagauggaugguacgguuaucaccaucaaaaugagcaggggucaggauaugcagccgaccugaagagcacacagaaugccauugacgagauuacuaacaaaguaaauucuguuauugaaaagaugaauacacaguucacagcaguagguaaagaguucaaccaccuggaaaaaagaauagagaauuuaaauaaaaaaguugaugaugguuuccuggacauuuggacuuacaaugccgaacuguugguucuauuggaaaaugaaagaacuuuggacuaccacgauucaaaugugaagaacuuauaugaaaagguaagaagccaguuaaaaaacaaugccaaggaaauuggaaacggcugcuuugaauuuuaccacaaaugcgauaacacgugcauggaaagugucaaaaaugggacuuaugacuacccaaaauacucagaggaagcaaaauuaaacagagaagaaauagaugggguaaagcuggaaucaacaaggauuuaccagauuuuggcgaucuauucaacugucgccaguucauugguacugguagucucccugggggcaaucaguuucuggaugugcucuaaugggucucuacaguguagaauauguauuuaa

SEQ ID NO: 45758 - RNA, 1701 nt, Artificial Sequence
  derived and/or modified CDS sequence (wt) from hemagglutinin__InfluenzaA__BAJ40003
augaaggcaauacuaguaguucugcuauauacauuugcaaccgcaaaugcagacacauuauguauagguuaucaugcgaacaauucaacagacacuguagacacaguacuagaaaagaauguaacaguaacacacucuguuaaccuucuagaagacaagcauaacgggaaacuaugcaaacuaagagggguagccccauugcauuuggguaaauguaacauugcuggcuggauccugggaaauccagagugugaaucacucuccacagcaagcucaugguccuacauuguggaaacaucuaguucagacaauggaacguguuacccaggagauuucaucgauuaugaggagcuaagagagcaauugagcucagugucaucauuugaaagguuugagauauuccccaagacaaguucauggcccaaucaugacucgaacaaaggcguaacggcagcauguccucaugcuggagcaaaaagcuucuacaaaaauuuaauauggcuaguuaaaaaaggaaauucauacccaaagcucagcaaauccuacauuaaugauaaagggaaagaaguccucgugcuauggggcauucaccauccaucuacuagugcugaccaacaaagucucuaucagaaugcagaugcauauguuuuuguggggacaucaagauacagcaagaaguucaagccggaaauagcaauaagacccaaagugagggaucaagaagggagaaugaacuauuacuggacacuaguagagccgggagacaaaauaacauucgaagcaacuggaaaucuagugguaccgagauaugcauucgcaauggaaagaaaugcuggaucugguauuaucauuucagauacaccaguccacgauugcaauacaacuugucagacacccaagggugcuauaaacaccagccucccauuucagaauauacauccgaucacaauuggaaaauguccaaaauauguaaaaagcacaaaauugagacuggccacaggauugaggaaugucccgucuauucaaucuagaggccuauuuggggccauugccgguuucauugaagggggguggacagggaugguagauggaugguacgguuaucaccaucaaaaugagcaggggucaggauaugcagccgaccugaagagcacacagaaugccauugacgagauuacuaacaaaguaaauucuguuauugaaaagaugaauacacaguucacagcaguagguaaagaguucaaccaccuggaaaaaagaauagagaauuuaaauaaaaaaguugaugaugguuuccuggacauuuggacuuacaaugccgaacuguugguucuauuggaaaaugaaagaacuuuggacuaccacgauucaaaugugaagaacuuauaugaaaagguaaaaagccaguuaaaaaacaaugccaaggaaauuggaaacggcugcuuugaauuuuaccacaaaugcgauaacacgugcauggaaagugucaaaaaugggacuuaugacuacccaaaauacucagaggaagcaaaauuaaacagagaagaaauagaugggguaaagcuggaaucaacaaggauuuaccagauuuuggcgaucuauucaacugucgccaguucauugguacugguagucucccugggggcaaucaguuucuggaugugcucuaaugggucucuacaguguagaauauguauuuaa

SEQ ID NO: 45759 - RNA, 1701 nt, Artificial Sequence
  derived and/or modified CDS sequence (wt) from hemagglutinin__InfluenzaA__BAJ40004
augaaggcaauacuaguaguucugcuauauacauuugcaaccgcaaaugcagacacauuauguauagguuaucaugcgaacaauucaacagacacuguagacacaguacuagaaaagaauguaacaguaacacacucuguuaaccuucuagaagacaagcauaacgggaaacuaugcaaacuaagagggguagccccauugcauuuggguaaauguaacauugcuggcuggauccugggaaauccagagugugaaucacucuccacagcaagcucaugguccuacauuguggaaacaucuaguucagacaauggaacguguuacccaggagauuucaucgauuaugaggagcuaagagagcaauugagcucagugucaucauuugaaagguuugagauauuccccaagacaaguucauggcccaaucaugacucgaacaaaggugaaacggcagcauguccucaugcuggagcaaaaagcuucuacaaaaauuuaauauggcuaguuaaaaaaggaaauucauacccaaagcucagcaaauccuacauuaaugauaaagggaaagaaguccucgugcuauggggcauucaccauccaucuacuagugcugaccaacaaagucucuaucagaaugcagaugcauauguuuuuguggggacaucaagauacagcaagaaguucaagccggaaauagcaauaagacccaaagugagggaucaagaagggagaaugaacuauuacuggacacuaguagagccgggagacaaaauaacauucgaagcaacuggaaaucuagugguaccaagauaugcauucgcaauggaaagaaaugcuggaucugguauuaucauuucagauacaccaguccacgauugcaauacaacuugucagacacccaagggugcuauaaacaccagccucccauuucagaauauacauccgaucacaauuggaaaauguccaaaauauguaaaaagcacaaaauugagacuggccacaggauugaggaaugucccgucuauucaaucuagaggccuauuuggggccauugccgguuucauugaagggggguggacagggaugguagauggaugguacgguuaucaccaucaaaaugagcaggggucaggauaugcagccgaccugaagagcacacagaaugccauugacaagauuacuaacaaaguaaauucuguuauugaaaagaugaauacacaguucacagcaguagguaaagaguucaaccaccuggaaaaaagaauagagaauuuaaauaaaaaaguugaugaugguuuccuggacauuuggacuuacaaugccgaacuguugguucuauuggaaaaugaaagaacuuuggacuaccacgauucaaaugugaagaacuuauaugaaaagguaaaaagccaguuaaaaaacaaugccaaggaaauuggaaacggcugcuuugaauuuuaccacaaaugcgauaacacgugcauggaaagugucaaaaaugggacuuaugacuacccaaaauacucagaggaagcaaaauuaaacagagaaaaaauagaugggguaaagcuggaaucaacaaggauuuaccagauuuuggcgaucuauucaacugucgccaguucauugguacugguagucucccugggggcaaucaguuucuggaugugcucuaaugggucucuacaguguagaauauguauuuaa

SEQ ID NO: 45760 - RNA, 1701 nt, Artificial Sequence
  derived and/or modified CDS sequence (wt) from hemagglutinin__InfluenzaA__BAJ40006
augaaggcaauacuaguaguucugcuauauacauuugcaaccgcaaaugcagacacauuauguauagguuaucaugcgaacaauucaacugacacuguagacacaguacuagaaaagaauguaacaguaacacacucuguuaaccuucuagaagacaagcauaacgggaaacuaugcaaacuaagagggguagccccauugcauuuggguaaauguaacauugcuggcuggauccugggaaauccagagugugaaucacucuccacagcaagcucaugguccuacauuguggaaacaucuaguucagacaauggaacguguuacccaggagauuucaucgauuaugaggagcuaagagagcaauugagcucagugucaucauuugaaagguuugagauauuccccaagacaaguucauggcccaaucaugacucgaacaaagguguaacggcagcauguccucaugcuggagcaaaaagcuucuacaaaaauuuaauauggcuaguuaaaaaaggaaauucauacccaaagcucagcaaauccuacauuaaugauaaagggagagaaguccucgugcuauggggcauucaccauccaucuacuagugcugaccaacaaagucucuaucagaaugcagauacauauguuuuuguggggacaucaagauacagcaagaaguucaagccggaaauagcaauaagacccaaagugagggaucaagaagggagaaugaacuauuacuggacacuaguagagccgggagacaaaauaacauucgaagcaacuggaaaucuagugguaccgagauaugcauucgcaauggaaagaaaugcuggaucugguauuaucauuucagauacaccaguccacgauugcaauacaacuugucagacacccaagggugcuauaaacaccagccucccauuucagaauauacauccgaucacaauuggaaaauguccaaaauauguaaaaagcacaaaauugagacuggccacaggauugaggaaugucccgucuauucaaucuagaggccuauuuggggccauugccgguuucauugaagggggguggacagggaugguagauggaugguacgguuaucaccaucaaaaugagcaggggucaggauaugcagccgaccugaagagcacacagaaugccauugacgagauuacuaacaaaguaaauucuguuauugaaaagaugaauacacaguucacagcaguagguaaagaguucaaccaccuggaaaaaagaauagagaauuuaaauaaaaaaguugaugaugguuuccuggacauuuggacuuacaaugccgaacuguugguucuauuggaaaaugaaagaacuuuggacuaccacgauucaaaugugaagaacuuauaugaaaagguaagaagccaguuaaaaaacaaugccaaggaaauuggaaacggcugcuuugaauuuuaccacaaaugcgauaacacgugcauggaaagugucaaaaaugggacuuaugacuacccaaaauacucagaggaagcaaaauuaaacagagaagaaauagaugggguaaagcuggaaucaacaaggauuuaccagauuuuggcgaucuauucaacugucgccaguucauugguacugguagucucccugggggcaaucaguuucuggaugugcucuaaugggucucuacaguguagaauauguauuuaa

SEQ ID NO: 45761 - RNA, 1701 nt, Artificial Sequence; identical to SEQ ID NO: 35767
  derived and/or modified CDS sequence (wt) from hemagglutinin__InfluenzaA__BAJ40007

SEQ ID NO: 45762 - RNA, 1701 nt, Artificial Sequence
  derived and/or modified CDS sequence (wt) from hemagglutinin__InfluenzaA__BAJ40008
augaaggcaauacuaguaguucugcuauauacauuugcaaccgcaaaugcagacacauuauguauagguuaucaugcgaacaauucaacagacacuguagacacaguacuagaaaagaauguaacaguaacacacucuguuaaccuucuagaagacaagcauaacgggaaacuaugcaaacuaagagggguagccccauugcauuuggguaaauguaacauugcuggcuggauccugggaaauccagagugugaaucacucuccacagcaagcucaugguccuacauuguggaaacaucuaguucagacaauggaacguguuacccaggagauuucaucgauuaugaggagcuaagagagcaauugagcucagugucaucauuugaaagguuugagauauuccccaagacuaguucauggcccaaucaugacucgaacaaaggcguaacggcagcauguccucaugcuggagcaaaaagcuucuacaaaaauuuaauauggcuaguuaaaaaaggaaauucauacccaaagcucagcaaauccuacauuaaugauaaagggaaagaaguccucgugcuauggggcauucaccauccaucuacuagugcugaccaacaaagucucuaucagaaugcagaugcauauguuuuuguggggacaucaagauacagcaagaaguucaagccggaaauagcaauaagacccaaagugagggaucaagaagggagaaugaacuauuacuggacacuaguagagccgggagacaaaauaacauucgaagcaacuggaaaucuagugguaccgagauaugcauucgcaauggaaagaaaugcuggaucugguauuaucauuucagauacaccaguccacgauugcaauacaacuugucagacacccaagggugcuauaaacaccagccucccauuucagaauauacauccgaucacaauuggaaaauguccaaaauauguaaaaagcacaaaauugagacuggccacaggguugaggaaugucccgucuauucaaucuagaggccuauuuggggccauugccgguuucauugaagggggguggacagggaugguagauggaugguacgguuaucaccaucaaaaugagcaggggucaggauaugcagccgaccugaagagcacacagaaugccauugacgagauuacuaacaaaguaaauucuguuauugaaaagaugaauacacaguucacagcaguagguaaagaguucaaccaccuggaaaaaagaauagagaauuuaaauaaaaagguugaugauggguuccuggacauuuggacuuacauugccgaacuguugguucuauuggaaaaugaaagaacuuuggacuaccacgauucaaaugugaagaacuuauaugaaaagguaagaagccaguuaaaaaacaaugccaaggaaauuggaaacggcugcuuugaauuuuaccacaaaugcgauaacacgugcauggaaagugucaaaaaugggacuuaugacuacccaaaauacucagaggaagcaaaauuaaacagagaagaaauagaugggguaaagcuggaaucaacaaggauuuaccagauuuuggcgaucuauucaacugucgccaguucauugguacugguagucucccugggggcaaucaguuucuggaugugcucuaaugggucucuacaguguagaauauguauuuaa

SEQ ID NO: 45763 - RNA, 1701 nt, Artificial Sequence
  derived and/or modified CDS sequence (wt) from hemagglutinin__InfluenzaA__BAJ40009
augaaggcaauacuaguaguucugcuauauacauuugcaaccgcaaaugcagacacauuauguauagguuaucaugcgaacaauucaacagacacuguagacacaguacuagaaaagaauguaacaguaacacacucuguuaaccuucuagaagacaagcauaacgggaaacuaugcaaacuaagagggguagccccauugcauuuggguaaauguaacauugcuggcuggauccugggaaauccagagugugaaucacucuccacagcaagcucaugguccuacauuguggaaacaucuaguucagacaauggaacguguuacccaggagauuucaucgauuaugaggagcuaagagagcaauugagcucagugucaucauuugaaagguuugagauauuccccaagacaaguucauggcccaaucaugacucggacaaagguguaacggcagcauguccucaugcuggagcaaaaagcuucuacaaaaauuuaauauggcuaguuaaaaaaggaaauucauacccaaagcucagcaaauccuacauuaaugauaaagggaaagaaguccucgugcuauggggcauucaccauccaucuacuagugcugaccaacaaagucucuaucagaaugcagaugcauauguuuuuguggggacaucaagauacagcaagaaguucaagccggaaauagcaauaagacccaaagugagggaucaagaagggagaauggacuauuacuggacacuaguagagccgggagacaaaauaacauucgaagcaacuggaaaucuagugguaccgagauaugcauucgcaauggaaagaaaugcuggaucugguauuaucauuucagauacaccaguccacaauugcaauacaacuugucagacacccaagggugcuauaaacaccagccucccauuucagaauauacauccgaucacaauuggaaaauguccaaaauauguaaaaagcacaaaauugagacuggccacaggauugaggaaugucccgucuauucaaucuagaggccuauuuggggccauugccggcuucauugaagggggguggacagggaugguagauggaugguacgguuaucaccaucaaaaugagcaggggucaggauaugcagccgaccugaagagcacacagaaugccauugacaagauuacuaacaaaguaaauucuguuauugaaaagaugaauacacaguucacagcaguagguaaagaguucaaccaccuggaaaauagaauagagaauuuaaauaaaaagguugaugaugguuuccuggacauuuggacuuacaaugccgaacuguugguucuauuggaaaaugaaagaacuuuggacuaccaugauucaaaugugaagaacuuauaugaaaagguaagaagccaguuaaaaaacaaugccaaggaaauuggaaacggcugcuuugaauuuuaccacaaaugcgauaacacgugcauggaaagugucaaaaaugggacuuaugacuacccaaaauacucagaggaagcaaaauuaaacagagaagaaauagaugggguaaagcuggaaucaacaaggauuuaccagauuuuggcgaucuauucaacugucgccaguucauugguacugguagucucccugggggcaaucaguuucuggaugugcucuaaugggucucuacaguguagaauauguauuuaa

SEQ ID NO: 45764 - RNA, 1701 nt, Artificial Sequence
  derived and/or modified CDS sequence (wt) from hemagglutinin__InfluenzaA__BAJ40010
augaaggcaauacuaguaguucugcuauauacauuugcaaccgcaaaugcagacacauuauguauagguuaucaugcgaacaauucaacagacacuguagacacaguacuagaaaagaauguaacaguaacacacucuguuaaccuucuagaagacaagcauaacgggaaacuaugcaaacuaagagggguagccccauugcauuuggguaaauguaacauugcuggcuggauccugggaaauccagagugugaauuacucuccacagcaagcucaugguccuacauuguggaaacaucuaguucagacaauggaacguguuacccaggagauuucaucgauuaugaggagcuaagagagcaauugagcucagugucaucauuugaaagguuugagauauuccccaagacaaguucauggcccaaucaugacucggacaaagguguaacggcagcauguccucaugcuggagcaaaaagcuucuacaaaaauuuaauauggcuaguuaaaaaaggaaauucauacccaaagcucagcaaauccuacauuaaugauaaagggaaagaaguccucgugcuauggggcauucaccauccaucuacuagugcugaccaacaaagucucuaucagaaugcagaugcauauguuuuuguggggacaucaagauacagcaagaaguucaagccggaaauagcaauaagacccaaagugagggaucaagaagggagaauggacuauuacuggacacuaguagagccgggagacaaaauaacauucgaagcaacuggaaaucuagugguaccgagauaugcauucgcaauggaaagaaaugcuggaucugguauuaucauuucagauacaccaguccacaauugcaauacaacuugucagacacccaagggugcuauaaacaccagccucccauuucagaauauacauccgaucacaauuggaaaauguccaaaauauguaaaaagcacaaaauugagacuggccacaggauugaggaaugucccgucuauucaaucuagaggccuauuuggggccauugccggcuucauugaagggggguggacagggaugguagauggaugguacgguuaucaccaucaaaaugagcaggggucaggauaugcagccgaccugaagagcacacagaaugccauugacaagauuacuaacaaaguaaauucuguuauugaaaagaugaauacacaguucacagcaguagguaaagaguucaaccaccuggaaaaaagaauagagaauuuaaauaaaaagguugaugaugguuuccuggacauuuggacuuacaaugccgaacuguugguucuauuggaaaaugaaagaacuuuggacuaccaugauucaaaugugaagaacuuauaugaaaagguaagaagccaguuaaaaaacaaugccaaggaaauuggaaacggcugcuuugaauuuuaccacaaaugcgauaacacgugcauggaaagugucaaaaaugggacuuaugacuacccaaaauacucagaggaagcaaaauuaaacagagaagaaauagaugggguaaagcuggaaucaacaaggauuuaccagauuuuggcgaucuauucaacugucgccaguucauugguacugguagucucccugggggcaaucaguuucuggaugugcucuaaugggucucuacaguguagaauauguauuuaa

SEQ ID NO: 45765 - RNA, 1701 nt, Artificial Sequence; identical to SEQ ID NO: 45754
  derived and/or modified CDS sequence (wt) from hemagglutinin__InfluenzaA__BAJ40011

SEQ ID NO: 45766 - RNA, 1701 nt, Artificial Sequence
  derived and/or modified CDS sequence (wt) from hemagglutinin__InfluenzaA__BAJ40012
augaaggcaauacuaguaguucugcuauauacauuugcaaccgcaaaugcagacacauuauguauagguuaucaugcgaacaauucaacagacacuguagacacaguacuagaaaagaauguaacaguaacacacucuguuaaccuucuagaagacaagcauaacgggaaacuaugcaaacuaagagggguagccccauugcauuuggguaaauguaacauugcuggcuggauccugggaaauccagagugugaaucacucuccacagcaagcucaugguccuacauuguggaaacaucuaguucagacaauggaacguguuacccaggagauuucaucgauuaugaggagcuaagagagcaauugagcucagugucaucauuugaaagguuugagauauuccccaagacaaguucauggcccaaucaugacucgaacaaaggcguaacggcagcauguccucaugcuggagcaaaaagcuucuacaaaaauuuaauauggcuaguuaaaaaaggaaauucauacccaaagcucagcaaauccuacauuaaugauaaagggaaagaaguccucgugcuauggggcauucaccauccaucuacuagugcugaccaacaaagucucuaucagaaugcagaugcauauguuuuuguggggacaucaagauacagcaagaaguucaagccggaaauagcaauaagacccaaagugagggaucaagaagggagaaugaacuauuacuggacacuaguagagccgggagacaaaauaacauucgaagcaacuggaaaucuagugguaccgagauaugcauucgcaauggaaagaaaugcuggaucugguauuaucauuucagauacaccaguccacgauugcaauacaacuugucagacacccaagggugcuauaaacaccagccucccauuucagaauauacauccgaucacaauuggaaaauguccaaaauauguaaaaagcacaaaauugagacuggccacaggauugaggaaugucccgucuauucaaucuaggggccuauuuggggccauugccgguuucauugaagggggguggacagggaugguagauggaugguacgguuaucaccaucaaaaugagcaggggucaggauaugcagccgaccugaagagcacacagaaugccauugacgagauuacuaacaaaguaaauucuguuauugaaaagaugaauacacaguucacagcaguagguaaagaguuuaaccaccuggaaaaaagaauagagaauuuaaauaaaaagguugaugaugguuuccuggacauuuggacuuacaaugccgaacuguugguucuauuggaaaaugaaagaacuuuggacuaccacgauucaaaugugaagaacuuauaugaaaagguaagaagccaguuaaaaaacaaugccaaggaaauuggaaacggcugcuuugaauuuuaccacaaaugcgauaacacgugcauggaaaguguaaaaaaugggacuuaugacuacccaaaauacucagaggaagcaaaauuaaacagagaagaaauagaugggauaaagcuggaaucaacaaggauuuaccagauuuuggcgaucuauucaacugucgccaguucauugguacugguagucucccugggggcaaucaguuucuggaugugcucuaaugggucucuacaguguagaauauguauuuaa

SEQ ID NO: 45767 - RNA, 1701 nt, Artificial Sequence; identical to SEQ ID NO: 45754
  derived and/or modified CDS sequence (wt) from hemagglutinin__InfluenzaA__BAJ40013

SEQ ID NO: 45768 - RNA, 1701 nt, Artificial Sequence; identical to SEQ ID NO: 45754
  derived and/or modified CDS sequence (wt) from hemagglutinin__InfluenzaA__BAJ40014

SEQ ID NO: 45769 - RNA, 1701 nt, Artificial Sequence
  derived and/or modified CDS sequence (wt) from hemagglutinin__InfluenzaA__BAJ40015
augaaggcaauacuaguaguucugcuauauacauuugcaaccgcaaaugcagacacauuauguauagguuaucaugcgaacaauucaacagacacuguagacacaguacuagaaaagaauguaacaguaacacacucuguuaaccuucuagaagacaagcauaacgggaaacuaugcaaacuaagagggguagccccauugcauuuggguaaauguaacauugcuggcuggauccugggaaauccagagugugaaucacucuccacagcaagcucaugguccuacauuguggaaacaucuaguucagacaauggaacguguuacccaggagauuucauugauuaugaggagcuaagagagcaauugagcucagugucaucauuugaaagguuugagauauuccccaauacaaguucauggcccaaucaugacucgaacaaagguguaacggcagcauguccucaugcuggagcaaaaagcuucuacaaaaauuuaauauggcuaguuaaaaaaggaaauucauacccaaagcucagcaaauccuacauuaaugauaaagggaaagaaguccucgugcuauggggcauucaccauccaucuacuagugcugaccaacaaagucucuaucagaaugcagauacauauguuuuuguggggacaucaagauacagcaagaaguucaagccggaaauagcaauaagacccaaagugagggaucaagaagggagaaugaacuauuacuggacacuaguagagccgggagacaaaauaacauucgaagcaacuggaaaucuagugguaccgagauaugcauucgcaauggaaagaaaugcuggaucugguauuaucauuucagauacaccaguccacgauugcaauacaacuugucagacacccaagggugcuauaaacaccagccucccauuucagaauauacauccgaucacaauuggaaaauguccaaaauauguaaaaagcacaaaauugagacuggccacaggauugaggaaugucccgucuauucaaucuagaggccuauuuggggccauugccgguuucauugaagggggguggacagggaugguagauggaugguacgguuaucaccaucaaaaugagcaggggucaggauaugcagccgaccugaagagcacacagaaugccauugacgagauuacuaacaaaguaaauucuguuauugaaaagaugaauacacaguucacagcaguagguaaagaguucaaccaccuggaaaaaagaauagagaauuuaaauaaaaaaguugaugaugguuuccuggacauuuggacuuacaaugccgaacuguugguucuauuggaaaaugaaagaacuuuggacuaccacgauucaaaugugaagaacuuauaugaaaagguaagaagccaguuaaaaaacaaugccaaggaaauuggaaacggcugcuuugaauuuuaccacaaaugcgauaacacgugcauggaaagugucaaaaaugggacuuaugacuacccaaaauacucagaggaagcaaaauuaaacagagaagaaauagaugggguaaagcuggaaucaacaaggauuuaccagauuuuggcgaucuauucaacugucgccaguucauugguacugguagucucccugggggcaaucaguuucuggaugugcucuaaugggucucuacaguguagaauauguauuuaa

SEQ ID NO: 45770 - RNA, 1701 nt, Artificial Sequence; identical to SEQ ID NO: 45754
  derived and/or modified CDS sequence (wt) from hemagglutinin__InfluenzaA__BAJ40016

SEQ ID NO: 45771 - RNA, 1701 nt, Artificial Sequence
  derived and/or modified CDS sequence (wt) from hemagglutinin__InfluenzaA__BAJ40017
augaaggcaauacuaguaguucugcuauauacauuugcaaccgcaaaugcagacacauuauguauagguuaucaugcgaacaauucaacagacacuguagacacaguacuagaaaagaauguaacaguaacacacucuguuaaccuucuagaagacaagcauaacgggaaacuaugcaaacuaagagggguagccccauugcauuuggguaaauguaacauugcuggcuggauccugggaaauccagagugugaaucacucuccacagcaagcucaugguccuacauuguggaaacaucuaauucagacaauggaacguguuacccaggagauuucaucgauuaugaggagcuaagagagcaauugagcucagugucaucauuugaaagguuugagauauuccccaagacaaguucauggcccaaucaugacucgaacaaaggcguaacggcagcauguccucaugcuggagcaaaaagcuucuacaaaaauuuaauauggcuaguuaaaaaaggaaauucauacccaaagcucagcaaauccuacauuaaugauaaagggaaagaaguccucgugcuauggggcauucaccauccaucuacuagugcugaccaacaaagucucuaucagaaugcagaugcauauguuuuuguggggacaucaagauacagcaagaaguucaagccggaaauagcaauaagacccaaagugagggaucaagaagggagaaugaacuauuacuggacacuaguagagccgggagacaaaauaacauucgaagcaacuggaaaucuagugguaccgagauaugcauucgcaauggaaagaaaugcuggaucugguauuaucauuucagauacaccaguccacgauugcaauacaacuugucagacacccaaaggugcuauaaacaccagccucccauuucagaauauacauccgaucacaauuggaaaauguccaaaauauguaaaaagcacaaaauugagacuggccacaggauugaggaaugucccgucuauucaaucuaggggccuauuuggggccauugccgguuucauugaagggggguggacagggaugguagauggaugguacgguuaucaccaucaaaaugagcaggggucaggauaugcagccgaccugaaaagcacacagaaggccauugacgagauuacuaacaaaguaaauucuguuauugaaaagaugaauacacaguucacagcaguagguaaagaguucaaccaccuggaaaaaagaauagagaauuuaaauaaaaagguugaugaugguuuccuggacauuuggacuuacaaugccgaacuguugguucuauuggaaaaugaaagaacuuuggacuaccacgauucaaaugugaagaacuuauaugaaaagguaagaagccaguuaaaaaacaaugccaaggaaauuggaaacggcugcuuugaauuuuaccacaaaugcgauaacacgugcauggaaaguguaaaaaaugggacuuaugacuacccaaaauacucagaggaagcaaaauuaaacagagaagaaauagaugggguaaagcuggaaucaacaaggauuuaccagauuuuggcgaucuauucaacugucgccaguucauugguacugguagucucccugggggcaaucaguuucuggaugugcucuaaugggucucuacaguguagaauauguauuuaa

SEQ ID NO: 45772 - RNA, 1701 nt, Artificial Sequence; identical to SEQ ID NO: 35845
  derived and/or modified CDS sequence (wt) from hemagglutinin__InfluenzaA__BAJ40018

SEQ ID NO: 45773 - RNA, 1701 nt, Artificial Sequence; identical to SEQ ID NO: 45760
  derived and/or modified CDS sequence (wt) from hemagglutinin__InfluenzaA__BAJ40019

SEQ ID NO: 45774 - RNA, 1701 nt, Artificial Sequence
  derived and/or modified CDS sequence (wt) from hemagglutinin__InfluenzaA__BAJ40020
augaaggcaauacuaguaguucugcuauauacauuugcaaccgcaaaugcagacacauuauguauagguuaucaugcgaacaauucaacugacacuguagacacaguacuagaaaagaauguaacaguaacacacucuguuaaccuucuagaagacaagcauaacgggaaacuaugcaaacuaagagggguagccccauugcauuuggguaaauguaacauugcuggcuggauccugggaaauccagagugugaaucacucuccacagcaagcucaugguccuacauuguggaaacaucuaguucagacaauggaacguguuacccaggagauuucaucgauuaugaggagcuaagagagcaauugagcucagugucaucauuugaaagguuugagauauuccccaagacaaguucauggcccaaucaugacucgaacaaagguguaacggcagcauguccucaugcuggagcaaaaagcuucuacaaaaauuuaauauggcuaguuaaaaaaggaaauucauacccaaagcucagcaaauccuacauuaaugauaaagggagagaaguccucgugcuauggggcauucaccauccaucuacuagugcugaccaacaaagucucuaucagaaugcagauacauauguuuuuguggggacaucaagauacagcaagaaguucaagccggaaauagcaauaagacccaaagugagggaucaagaagggagaaugaacuauuacuggacacuaguagagccgggagacaaaauaacauucgaagcaacuggaaaucuagugguaccgagauaugcauucgcaauggaaagaaaugcuggaucugguauuaucauuucagauacaccaguccacgauugcaauacaacuugucagacacccaagggugcuauaaacaccagccucccauuucagaauauacauccgaucacaauuggaaaauguccaaaauauguaaaaagcacaaaauugagacuggccacaggauugaggaaugucccgucuauucaaucuagaggccuauuuggggccauugccgguuucauugaagggggguggacagggaugguagauggaugguacgguuaucaccaucaaaaugagcaggggucaggauaugcagccgaccugaaaagcacacagaaugccauugacgagauuacuaacaaaguaaauucuguuauugaaaagaugaauacacaguucacagcaguagguaaagaguucaaccaccuggaaaaaagaauagagaauuuaaauaaaaaaguugaugaugguuuccuggacauuuggacuuacaaugccgaacuguugguucuauuggaaaaugaaagaacuuuggacuaccacgauucaaaugugaagaacuuauaugaaaagguaagaagccaguuaaaaaacaaugccaaggaaauuggaaacggcugcuuugaauuuuaccacaaaugcgauaacacgugcauggaaagugucaaaaaugggacuuaugacuacccaaaauacucagaggaagcaaaauuaaacagagaagaaauagaugggguaaagcuggaaucaacaaggauuuaccagauuuuggcgaucuauucaacugucgccaguucauugguacugguagucucccugggggcaaucaguuucuggaugugcucuaaugggucucuacaguguagaauauguauuuaa

SEQ ID NO: 45775 - RNA, 1701 nt, Artificial Sequence
  derived and/or modified CDS sequence (wt) from hemagglutinin__InfluenzaA__BAJ40021
augaaggcaauacuaguaguucugcuauauacauuugcaaccgcaaaugcagacacauuauguauagguuaucaugcgaacaauucaacagacacuguagacacaguacuagaaaagaauguaacaguaacacacucuguuaaccuucuagaagacaagcauaacgggaaacuaugcaaacuaagagggguagccccauugcauuuggguaaauguaacauugcuggcuggauccugggaaauccagagugugaaucacucuccacagcaagcucaugguccuacauuguggaaacaucuaguucagacaauggaacguguuacccaggagauuucaucgauuaugaggagcuaagagagcaauugagcucagugucaucauuugaaagguuugagauauuccccaagacaaguucauggcccaaucaugacucgaacaaaggugaaacggcagcauguccucaugcuggagcaaaaagcuucuacaaaaauuuaauauggcuaguuaaaaaaggaaauucauacccaaagcucagcaaauccuacauuaaugauaaagggaaagaaguccucgugcuauggggcauucaccauccaucuacuagugcugaccaacaaagucucuaucagaaugcagaugcauauguuuuuguggggacaucaagauacagcaagaaguucaagccggaaauagcaauaagacccaaagugagggaucaagaagggagaaugaacuauuacuggacacuaguagagccgggagacaaaauaacauucgaagcaacuggaaaucuagugguaccaagauaugcauucgcaauggaaagaaaugcuggaucugguauuaucauuucagauacaccaguccacgauugcaauacaacuugucagacacccaagggugcuauaaacaccagccucccauuucagaauauacauccgaucacaauuggaaaauguccaaaauauguaaaaagcacaaaauugagacuggccacaggauugaggaaugucccgucuauucaaucuagaggccuauuuggggccauugccgguuucauugaagggggguggacagggaugguagauggaugguacgguuaucaccaucaaaaugagcaggggucaggauaugcagccgaccugaagagcacacagaaugccauugacaagauuacuaacaaaguaaauucuguuauugaaaagaugaauacacaguucacagcaguagguaaagaguucaaccaccuggaaaaaagaauagagaauuuaaauaaaaaaguugaugaugguuuccuggacauuuggacuuacaaugccgaacuguugguucuauuggaaaaugaaagaacuuuggacuaccacgauucaaaugugaagaacuuauaugaaaagguaagaagccaguuaaaaaacaaugccaaggaaauuggaaacggcugcuuugaauuuuaccacaaaugcgauaacacgugcauggaaagugucaaaaaugggacuuaugacuacccaaaauacucagaggaagcaaaauuaaacagagaagaaauagaugggguaaagcuggaaucaacaaggauuuaccagauuuuggcgaucuauucaacugucgccaguucauugguacugguagucucccugggggcaaucaguuucuggaugugcucuaaugggucucuacaguguagaauauguauuuaa

SEQ ID NO: 45776 - RNA, 1701 nt, Artificial Sequence
  derived and/or modified CDS sequence (wt) from hemagglutinin__InfluenzaA__BAJ40023
augaaggcaauacuaguaguucugcuauauacauuugcaaccgcaaaugcagacacauuauguauagguuaucaugcgaacaauucaacagacacuguagacacaguacuagaaaagaauguaacaguaacacacucuguuaaccuucuagaagacaagcauaacgggaaacuaugcaaacuaagagggguagccccauugcauuuggguaaauguaacauugcuggcuggauccugggaaauccagagugugaaucacucuccacagcaagcucaugguccuacauuguggaaacaucuaguucagacaauggaacguguuacccaggagauuucaucgauuaugaggagcuaagagagcaauugagcucagugucaucauuugaaagguuugagauauuccccaagacaaguucauggcccaaucaugacucgaacaaagguguaacggcagcauguccucaugcuggagcaaaaagcuucuacaaaaauuuaauauggcuaguuaaaaaaggaaauucauacccaaagcucagcaaauccuacauuaaugauaaagggaaagaaguccucgugcuauggggcauucaccauccaucuacuagugcugaccaacaaagucucuaucagaaugcagaugcauauguuuuuguggggacaucaagauacagcaagaaguucaagccggaaauagcaauaagacccaaagugagggaucaagaagggagaaugaacuauuacuggacacuaguagagccgggagacaaaauaacauucgaagcaacuggaaaucuagugguaccgagauaugcauucgcaauggaaagaaaugcuggaucugguauuaucauuucagauacaccaguccacgauugcaauacaacuugucagacacccaagggugcuauaaacaccagccucccauuucagaauauacauccgaucacaauuggaaaauguccaaaauauguaaaaagcacaaaauugagacuggccacaggauugaggaaugucccgucuauucaaucuagaggccuauuuggggccauugccgguuucauugaaggaggguggacagggaugguagauggaugguacgguuaucaccaucaaaaugagcaggggucaggauaugcagccgaccugaagagcacacagaaugccauugacaagauuacuaacaaaguaaauucuguuauugaaaagaugaauacacaguucacagcaguagguaaagaguucaaccaccuggaaaaaagaauagagaauuuaaauaaaaaaguugaugaugguuuccuggacauuuggacuuacaaugccgaacuguugguucuauuggaaaaugaaagaacuuuggacuaccacgauucaaaugugaagaacuuauaugaaaagguaagaagccaguuaaaaaacaaugccaaggaaauuggaaacggcugcuuugaauuuuaccacaaaugcgauaacacgugcauggaaagugucaaaaaugggacuuaugacuacccaaaauacucagaggaagcaaaauuaaacagagaagaaauagaugggguaaagcuggaaucaacaaggauuuaccagauuuuggcgaucuauucaacugucgccaguucauugguacugguagucucccugggggcaaucaguuucuggaugugcucuaaugggucucuacaguguagaauauguauuuaa

SEQ ID NO: 45777 - RNA, 1701 nt, Artificial Sequence
  derived and/or modified CDS sequence (wt) from hemagglutinin__InfluenzaA__BAJ40024
augaaggcaauacuaguaguucugcuauauacauuugcaaccgcaaaugcagacacauuauguauagguuaucaugcgaacaauucaacagacacuguagacacaguacuagaaaagaauguaacaguaacacacucuguuaaccuucuagaagacaagcauaacgggaaacuaugcaaacuaagagggguagccccauugcauuuggguaaauguaacauugcuggcuggauccugggaaauccagagugugaaucacucuccacagcaagcucaugguccuacauuguggaaacaucuaguucagacaauggaacguguuacccaggagauuucaucgauuaugaggagcuaagagagcaauugagcucagugucaucauuugaaagguuugagauauuccccaagacaaguucauggcccaaucaugacucgaacaaagguguaacggcagcauguccucaugcuggagcaaaaagcuucuacaaaaauuuaauauggcuaguuaaaaaaggaaauucauacccaaagcucagcaaauccuacauuaaugauaaagggaaagaaguccucgugcuauggggcauucaccauccaucuacuagugcugaccaacaaagucucuaucagaaugcagauacauauguuuuuguggggacaucaagauacagcaagaaguucaagccggaaauagcaauaagacccaaagugagggaucaagaagggagaaugaacuauuacuggacacuaguagagccgggagacaaaauaacauucgaagcaacuggaaaucuagugguaccgagauaugcauucgcaauggaaagaaaugcuggaucugguauuaucauuucagauacaccaguccacgauugcaauacaacuugucagacacccaagggugcuauaaacaccagccucccauuucagaauauacauccgaucacaauuggaaaauguccaaaauauguaaaaagcacaaaauugagacuggccacaggauugaggaaugucccgucuauucaaucuagaggccuauuuggggccauugccgguuucauugaagggggguggacagggaugguagauggaugguacgguuaucaccaucaaaaugagcaggggucaggauaugcagccgaccugaagagcacacagaaugccauugacgagauuacuaacaaaguaaauucuguuauugaaaagaugaauacacaguucacagcaguagguaaagaguucaaccaccuggaaaaaagaauagagaauuuaaauaaaaaaguugaugaugguuuccuggacauuuggacuuacaaugccgaacuguugguucuauuggaaaaugaaagaacuuuggauuaccacgauucaaaugugaagaacuuauaugaaaagguaagaagccaguuaaaaaacaaugccaaggaaauuggaaacggcugcuuugaauuuuaccacaaaugcgauaacacgugcauggaaagugucaaaaaugggacuuaugacuacccaaaauacucagaggaagcaaaauuaaacagagaaaaaauagaugggguaaagcuggaaucaacaaggauuuaccagauuuuggcgaucuauucaacugucgccaguucauugguacugguagucucccugggggcaaucaguuucuggaugugcucuaaugggucucuacaguguagaauauguauuuaa

SEQ ID NO: 45778 - RNA, 1701 nt, Artificial Sequence; identical to SEQ ID NO: 45754
  derived and/or modified CDS sequence (wt) from hemagglutinin__InfluenzaA__BAJ40025

SEQ ID NO: 45779 - RNA, 1701 nt, Artificial Sequence; identical to SEQ ID NO: 35845
  derived and/or modified CDS sequence (wt) from hemagglutinin__InfluenzaA__BAJ40026

SEQ ID NO: 45780 - RNA, 1701 nt, Artificial Sequence
  derived and/or modified CDS sequence (wt) from hemagglutinin__InfluenzaA__BAJ40027
augaaggcaauacuaguaguucugcuauauacauuugcaaccgcaaaugcagacacauuauguauagguuaucaugcgaacaauucaacagacacuguagacacaguacuagaaaagaauguaacaguaacacacucuguuaaccuucuagaagacaagcauaacgggaaacuaugcaaacuaagagggguagccccauugcauuuggguaaauguaacauugcuggcuggauccugggaaauccagagugugaaucacucuccacagcaagcucaugguccuacauuguggaaacaucuaguucagacaauggaacguguuacccaggagauuucaucgauuaugaggagcuaagagagcaauugagcucagugucaucauuugaaagguuugagauauuccccaagacaaguucauggcccaaucaugacucgaacaaaggugaaacggcagcauguccucaugcuggagcaaaaagcuucuacaaaaauuuaauauggcuaguuaaaaaaggaaauucauacccaaagcucagcaaauccuacauuaaugauaaagggaaagaaguccucgugcuauggggcauucaccauccaucuacuagugcugaccaacaaagucucuaucagaaugcagaugcauauguuuuuguggggacaucaagauacagcaagaaguucaagccggaaauagcaauaagacccaaagugagggaucaagaagggagaaugaacuauuacuggacacuaguagagccgggagacaaaauaacauucgaagcaacuggaaaucuagugguaccaagauaugcauucgcaauggaaagaaaugcuggaucugguauuaucauuucagauacaccaguccacgauugcaauacaacuugucagacacccaagggugcuauaaacaccagccucccauuucagaauauacauccgaucacaauuggaaaauguccaaaauauguaaaaagcacaaaauugagacuggccacaggauugaggaaugucccgucuauucaaucuagaggccuauuuggggccauugccgguuucauugaagggggguggacagggaugguagauggaugguacgguuaucaccaucaaaaugagcaggggucaggauaugcagccgaccugaaaagcacacagaaugccauugacaagauuacuaacaaaguaaauucuguuauugaaaagaugaauacacaguucacagcaguagguaaagaguucaaccaccuggaaaaaagaauagagaauuuaaauaaaaaaguugaugaugguuuccuggacauuuggacuuacaaugccgaacuguugguucuauuggaaaaugaaagaacuuuggacuaccacgauucaaaugugaaaaacuuauaugaaaagguaaaaagccaguuaaaaaacaaugccaaggaaauuggaaacggcugcuuugaauuuuaccacaaaugcgauaacacgugcauggaaagugucaaaaaugggacuuaugacuacccaaaauacucagaggaagcaaaauuaaacagagaagaaauagaugggguaaagcuggaaucaacaaggauuuaccagauuuuggcgaucuauucaacugucgccaguucauugguacugguagucucccugggggcaaucaguuucuggaugugcucuaaugggucucuacaguguagaauauguauuuaa

SEQ ID NO: 45781 - RNA, 1701 nt, Artificial Sequence
  derived and/or modified CDS sequence (wt) from hemagglutinin__InfluenzaA__BAJ40028
augaaggcaauacuaguaguucugcuauauacauuugcaaccgcaaaugcagacacauuauguauagguuaucaugcgaacaauucaacagacacuguagacacaguacuagaaaagaauguaacaguaacacacucuguuaaccuucuagaagacaagcauaacgggaaacuaugcaaacuaagagggguagccccauugcauuuggguaaauguaacauugcuggcuggauccugggaaauccagagugugaaucacucuccacagcaagcucaugguccuacauuguggaaacaucuaguucagacaauggaacguguuacccaggagauuucaucgauuaugaggagcuaagagagcaauugagcucagugucaucauuugaaagguuugagauauuccccaagacaaguucauggcccaaucaugacucgaacaaagguguaacggcagcauguccucaugcuggagcaaaaagcuucuacaaaaauuuaauauggcuaguuaaaaaaggaaauucauacccaaagcucagcaaauccuacauuaaugauaaagggaaagaaguccucgugcuauggggcauucaccauccaucuacuagugcugaccaacaaagucucuaucagaaugcagaugcauauguuuuuguggggacaucaagauacagcaagaaguucaagccggaaauagcaauaagacccaaagugagggaucaagaagggagaaugaacuauuacuggacacuaguagagccgggagacaaaauaacauucgaagcaacuggaaaucuagugguaccgagauaugcauucgcaauggaaagaaaugcuggaucugguauuaucauuucagauacaccaguccacgauugcaauacaacuugucagacacccaagggugcuauaaacaccagccucccauuucagaauauacauccgaucacaauuggaaaauguccaaaauauguaaaaagcacaaaauugagacuggccacaggauugaggaaugucccgucuauucaaucuagaggccuauuuggggccauugccgcuuucauugaagggggguggacagggaugguagauggaugguacgguuaucaccaucaaaaugagcaggggucaggauaugcagccgaccugaaaagcacacagaaugccauugacaagauuacuaacaaaguaaauucuguuauugaaaagaugaauacacaguucacagcaguagguaaagaguucaaccaccuggaaaaaagaauagagaauuuaaauaaaaaaguugaugaugguuuccuggacauuuggacuuacaaugccgaacuguugguucuauuggaaaaugaaagaacuuuggacuaccacgauucaaaugugaagaacuuauaugaaaagguaagaagccaguuaaaaaacaaugccaaggaaauuggaaacggcugcuuugaauuuuaccacaaaugcgauaacacgugcauggaaagugucaaaaaugggacuuaugacuacccaaaauacucagaggaagcaaaauuaaacagagaagaaauagaugggguaaagcuggaaucaacaaggauuuaccagauuuuggcgaucuauucaacugucgccaguucauugguacugguagucucccugggggcaaucaguuucuggaugugcucuaaugggucucuacaguguagaauauguauuuaa

SEQ ID NO: 45782 - RNA, 1701 nt, Artificial Sequence
  derived and/or modified CDS sequence (wt) from hemagglutinin__InfluenzaA__BAJ40029
augaaggcaauacuaguaguucugcuauauacauuugcaaccgcaaaugcagacacauuauguauagguuaucaugcgaacaauucaacagacacuguagacacaguacuagaaaggaauguaacaguaacacacucuguuaaccuucuagaagacaagcauaacgggaaacuaugcaaacuaagagggguagccccauugcauuuggguaaauguaacauugcuggcuggauccugggaaauccagagugugaaucacucuccacagcaagcucaugguccuacauuguggaaacaucuaguucagacaauggaacguguuacccaggagauuucaucgauuaugaggagcuaagagagcaauugagcucagugucaucauuugaaagguuugagauauuccccaagacaaguucauggcccaaucaugacucgaacaaagguguaacggcagcauguccucaugcuggagcaaaaagcuucuacaaaaauuuaauauggcuaguuaaaaaaggaaauucauacccaaagcucagcaaauccuacauuaaugauaaagggaaagaaguccucgugcuauggggcauucaccauccaucuacuagugcugaucaacaaagucucuaucagaaugcagauacauauguuuuuguggggacaucaagauacagcaagaaguucaagccggaaauagcaauaagacccaaagugagggaucaagaagggagaaugaacuauuacuggacacuaguagagccgggagacaaaauaacauucgaagcaacuggaaaucuagugguaccgagauaugcauucgcaauggaaagaaaugcuggaucugguauuaucauuucagauacaccaguccacgauugcaauacaacuugucagacacccaagggugcuauaaacaccagccucccauuucagaauauacauccgaucacaauuggaaaauguccaaaauauguaaaaagcacaaaauugagacuggccacaggauugaggaaugucccgucuauucaaucuagaggccuauuuggggccauugccgguuucauugaagggggguggacagggaugguagauggaugguacgguuaucaccaucaaaaugagcaggggucaggauaugcagccgaccugaagagcacacagaaugccauugacgagauuacuaacaaaguaaauucuguuauugaaaagaugaauacacaguucacagcaguagguaaagaguucaaccaccuggaaaaaagaauagagaauuuaaauaaaaaaguugaugaugguuuccuggacauuuggacuuacaaugccgaacuguugguucuauuggaaaaugaaagaacuuuggacuaccacgauucaaaugugaagaacuuauaugaaaagguaagaagccaguuaaaaaacaaugccaaggaaauuggaaacggcugcuuugaauuuuaccacaaaugcgauaacacgugcauggaaagugucaaaaaugggacuuaugacuacccaaaauacucagaggaagcaaaauuaaacagagaagaaauagaugggguaaagcuggaaucaacaaggauuuaccagauuuuggcgaucuauucaacugucgccaguucauugguacugguagucucccugggggcaaucaguuucuggaugugcucuaaugggucucuacaguguagaauauguauuuaa

SEQ ID NO: 45783 - RNA, 1701 nt, Artificial Sequence
  derived and/or modified CDS sequence (wt) from hemagglutinin__InfluenzaA__BAJ40030
augaaggcaauacuaguaguucugcuauauacauuugcaaccgcaaaugcagacacauuauguauagguuaucaugcgaacaauucaacugacacuguagacacaguacuagaaaagaauguaacaguaacacacucuguuaaccuucuagaagacaagcauaacgggaaacuaugcaaacuaagagggguagccccauugcauuuggguaaauguaacauugcuggcuggauccugggaaauccagagugugaaucacucuccacagcaagcucaugguccuacauuguggaaacaucuaguucagacaauggaacguguuacccaggagauuucaucgauuaugaggagcuaaaagagcaauugagcucagugucaucauuugaaagguuugagauauuccccaagacaaguucauggcccaaucaugacucgaacaaagguguaacggcagcauguccucaugcuggagcaaaaagcuucuacaaaaauuuaauauggcuaguuaaaaaaggaaauucauacccaaagcucagcaaauccuacauuaaugauaaagggagagaaguccucgugcuauggggcauucaccauccaucuacuagugcugaccaacaaagucucuaucagaaugcagauacauauguuuuuguggggacaucaagauacagcaagaaguucaagccggaaauagcaauaagacccaaagugagggaucaagaagggagaaugaacuauuacuggacacuaguagagccgggagacaaaauaacauucgaagcaacuggaaaucuagugguaccgagauaugcauucgcaauggaaagaaaugcuggaucugguauuaucauuucagauacaccaguccacgauugcaauacaacuugucagacacccaagggugcuauaaacaccagccucccauuucagaauauacauccgaucacaauuggaaaauguccaaaauauguaaaaagcacaaaauugagacuggccacaggauugaggaaugucccgucuauucaaucuagaggccuauuuggggccauugccgguuucauugaagggggguggacagggaugguagauggaugguacgguuaucaccaucaaaaugagcaggggucaggauaugcagccgaccugaagagcacacagaaugccauugacgagauuacuaacaaaguaaauucuguuauugaaaagaugaauacacaguucacagcaguagguaaagaguucaaccaccuggaaaaaagaauagagaauuuaaauaaaaaaguugaugaugguuuccuggacauuuggacuuacaaugccgaacuguugguucuauuggaaaaugaaagaacuuuggacuaccacgauucaaaugugaagaacuuauaugaaaagguaagaagccaguuaaaaaacaaugccaaggaaauuggaaacggcugcuuugaauuuuaccacaaaugcgauaacacgugcauggaaagugucaaaaaugggacuuaugacuacccaaaauacucagaggaagcaaaauuaaacagagaagaaauagaugggguaaagcuggaaucaacaaggauuuaccagauuuuggcgaucuauucaacugucgccaguucauugguacugguagucucccugggggcaaucaguuucuggaugugcucuaaugggucucuacaguguagaauauguauuuaa

SEQ ID NO: 45784 - RNA, 1701 nt, Artificial Sequence; identical to SEQ ID NO: 45722
  derived and/or modified CDS sequence (wt) from hemagglutinin__InfluenzaA__BAJ40031

SEQ ID NO: 45785 - RNA, 1701 nt, Artificial Sequence; identical to SEQ ID NO: 45754
  derived and/or modified CDS sequence (wt) from hemagglutinin__InfluenzaA__BAJ40032

SEQ ID NO: 45786 - RNA, 1701 nt, Artificial Sequence; identical to SEQ ID NO: 45783
  derived and/or modified CDS sequence (wt) from hemagglutinin__InfluenzaA__BAJ40033

SEQ ID NO: 45787 - RNA, 1701 nt, Artificial Sequence
  derived and/or modified CDS sequence (wt) from hemagglutinin__InfluenzaA__BAJ40034
augaaggcaauacuaguaguucugcuauauacauuugcaaccgcaaaugcagacacauuauguauagguuaucaugcgaacaauucaacagacacuguagacacaguacuagaaaggaauguaacaguaacacacucuguuaaccuucuagaagacaagcauaacgggaaacuaugcaaacuaagagggguagccccauugcauuuggguaaauguaacauugcuggcuggauccugggaaauccagagugugaaucacucuccacagcaagcucaugguccuacauuguggaaacaucuaguucagacaauggaacguguuacccaggagauuucaucgauuaugaggagcuaagagagcaauugagcucagugucaucauuugaaagguuugagauauuccccaagacaaguucauggcccaaucaugacucgaacaaagguguaacggcagcauguccucaugcuggagcaaaaagcuucuacaaaaauuuaauauggcuaguuaaaaaaggaaauucauacccaaagcucagcaaauccuacauuaaugauaaagggaaagaaguccucgugcuauggggcauucaccauccaucuacuagugcugaccaacaaagucucuaucagaaugcagauacauauguuuuuguggggacaucaagauacagcaagaaguucaagccggaaauagcaauaagacccaaagugagggaucaagaagggagaaugaacuauuacuggacacuaguagagccgggagacaaaauaacauucgaagcaacuggaaaucuagugguaccgagauaugcauucgcaauggaaagaaaugcuggaucugguauuaucauuucagauacaccaguccacgauugcaauacaacuugucagacacccaagggugcuauaaacaccagccucccauuucagaauauacauccgaucacaauuggaaaauguccaaaauauguaaaaagcacaaaauugagacuggccacaggauugaggaaugucccgucuauucaaucuagaggccuauuuggggccauugccgguuucauugaagggggguggacagggaugguagauggaugguacgguuaucaccaucaaaaugagcaggggucaggauaugcagccgaccugaagagcacacagaaugccauugacgagauuacuaacaaaguaaauucuguuauugaaaagaugaauacacaguucacagcaguagguaaagaguucaaccaccuggaaaaaagaauagagaauuuaaauaaaaaaguugaugaugguuuccuggacauuuggacuuacaaugccgaacuguugguucuauuggaaaaugaaagaacuuuggacuaccacgauucaaaugugaagaacuuauaugaaaagguaagaagccaguuaaaaaacaaugccaaggaaauuggaaacggcugcuuugaauuuuaccacaaaugcgauaacacgugcauggaaagugucaaaaaugggacuuaugacuacccaaaauacucagaggaagcaaaauuaaacagagaaaaaauagaugggguaaagcuggaaucaacaaggauuuaccagauuuuggcgaucuauucaacugucgccaguucauugguacugguagucucccugggggcaaucaguuucuggaugugcucuaaugggucucuacaguguagaauauguauuuaa

SEQ ID NO: 45788 - RNA, 1701 nt, Artificial Sequence
  derived and/or modified CDS sequence (wt) from hemagglutinin__InfluenzaA__BAJ40035
augaaggcaauacuaguaguucugcuauauacauuugcaaccgcaaaugcagacacauuauguauagguuaucaugcgaacaauucaacagacacuguagacacaguacuagaaaagaacguaacaguaacacacucuguuaaccuucuagaagacaagcauaacgggaaacuaugcaaacuaagagggguagccccauugcauuuggguaaauguaacauugcuggcuggauccugggaaauccagagugugaaucacucuccacagcaagcucaugguccuacauuguggaaacaucuaguucagacaauggaacguguuacccaggagauuucaucgauuaugaggagcuaagagagcaauugagcucagugucaucauuugaaagauuugagauauuccccaagacaaguucauggcccaaucaugacucgaacaaagguguaacggcagcauguccucaugcuggagcaaaaagcuucuacaaaaauuuaauauggcuaguuaaaaaaggaaauucauacccaaagcucagcaaauccuacauuaaugauaaagggaaagaaguccucgugcuauggggcauucaccauccaucuacuagugcugaccaacaaagucucuaucagaaugcagauacauauguuuuuguggggacaucaagauacagcaagaaguucaagccggaaauagcaauaagacccaaagugagggaucaagaagggagaaugaacuauuacuggacacuaguagagccgggagacaaaauaaaauucgaagcaacuggaaaucuagugguaccgagauaugcauucgcaauggaaagaaaugcuggaucugguauuaucauuucagauacaccaguccacgauugcaauacaacuugucagacacccaagggugcuauaaacaccagccucccauuucagaauauacauccgaucacaauuggaaaauguccaaaauauguaaaaagcacaaaauugagacuggccacaggauugaggaaugucccaucuauucaaucuagaggccuauuuggggccauugccgguuucauugaagggggguggacagggaugguagauggaugguacgguuaucaccaucaaaaugagcaggggucaggauaugcagccgaccugaagagcacacagaaugccauugacgagauuacuaacaaaguaaauucuguuauugaaaagaugaauacacaguucacagcaguagguaaagaguucaaccaccuggaaaaaagaauagagaauuuaaauaaaaaaguugaugaugguuuccuggacauuuggacuuacaaugccgaacuguugguucuauuggaaaaugaaagaacuuuggacuaccacgauucaaaugugaagaacuuauaugaaaagguaagaaaccaguuaaaaaacaaugccaaggaaauuggaaacggcugcuuugaauuuuaccacaaaugcgauaacacgugcauggaaagugucaaaaaugggacuuaugacuacccaaaauacucagaggaagcaaaauuaaacagagaagaaauagaugggguaaagcuggaaucaacaaggauuuaccagauuuuggcgaucuauucaacugucgccaguucauugguacugguagucucccugggggcaaucaguuucuggaugugcucuaaugggucucuacaguguagaauauguauuuaa

SEQ ID NO: 45789 - RNA, 1701 nt, Artificial Sequence
  derived and/or modified CDS sequence (wt) from hemagglutinin__InfluenzaA__BAJ40036
augaaggcaauacuaguaguucugauauauacauuugcaaccgcaaaugcagacacauuauguauagguuaucaugcgaacaauucaacagacacuguagacacaguacuagaaaagaauguaacaguaacacacucuguuaaccuucuagaagacaagcauaacgggaaacuaugcaaacuaagagggguagccccauugcauuuggguaaauguaacauugcuggcuggauccugggaaauccagagugugaaucacucuccacagcaagcucaugguccuacauuguggaaacaucuaguucagacaauggaacguguuacccaggagauuucaucgauuaugaggagcuaagagagcaauugagcucagugucaucauuugaaagguuugagauauuccccaagacuaguucauggcccaaucaugacucgaacaaaggcguaacggcagcauguccucaugcuggagcaaaaagcuucuacaaaaauuuaauauggcuaguuaaaaaaggaaauucauacccaaagcucagcaaauccuacauuaaugauaaagggaaagaaguccucgugcuauggggcauucaccauccaucuacuagugcugaccaacaaagucucuaucagaaugcagaugcauauguuuuuguggggacaucaagauacagcaagaaguucaagccggaaauagcaauaagacccaaagugagggaucaagaagggagaaugaacuauuacuggacaauaguagagccgggagacaaaauaacauucgaagcaacuggaaaucuagugguaccgagauaugcauucgcaauggaaagaaaugcuggaucugguauuaucauuucagauacaccaguccacgauugcaauacaacuugucagacacccaagggugcuauaaacaccagccucccauuucagaauauacauccgaucacaauuggaaaauguccaaaauauguaaaaagcacaaaauugagacuggccacaggguugaggaaugucccgucuauucaaucuagaggccuauuuggggccauugccgguuucauugaagggggguggacagggaugguagauggaugguacgguuaucaccaucaaaaugagcaggggucaggauaugcagccgaccugaaaagcacacagaaugccauugacgagauuacuaacaaaguaaauucuguuauugaaaagaugaauacacaguucacagcaguagguaaagaguucaaccaccuggaaaaaagaauagagaauuuaaauaaaaagguugaugauggguuccuggacauuuggacuuacaaugccgaacuguugguucuauuggaaaaugaaagaacuuuggacuaccacgauucaaaugugaagaacuuauaugaaaagguaaaaagccaguuaaaaaacaaugccaaggaaauuggaaacggcugcuuugaauuuuaccacaaaugcgauaacacgugcauggaaagugucaaaaaugggacuuaugacuacccaaaauacucagaggaagcaaaauuaaacagagaagaaauagaugggguaaagcuggaaucaacaaggauuuaccagauuuuggcgaucuauucaacugucgccaguucauugguacugguagucucccugggggcaaucaguuucuggaugugcucuaaugggucucuacaguguagaauauguauuuaa

SEQ ID NO: 45790 - RNA, 1701 nt, Artificial Sequence; identical to SEQ ID NO: 45711
  derived and/or modified CDS sequence (wt) from hemagglutinin__InfluenzaA__BAJ40037

SEQ ID NO: 45791 - RNA, 1701 nt, Artificial Sequence
  derived and/or modified CDS sequence (wt) from hemagglutinin__InfluenzaA__BAJ40038
augaaggcaauacuacuaguucugcuauauacauuugcaaccgcaaaugcagacacauuauguauagguuaucaugcgaacaauucaacagacacuguagacacaguacuagaaaagaauguaacaguaacacacucuguuaaccuucuagaagacaagcauaacgggaaacuaugcaaacuaagagggguagccccauugcauuuggguaaauguaacauugcuggcuggauccugggaaauccagagugugaaucacucuccacagcaagcucaugguccuacauuguggaaacaucuaguucagacaauggaacguguuacccaggagauuucaucgauuaugaggagcuaagagagcaauugagcucagugucaucauuugaaagguuugagauauuccccaagacaaguucauggcccaaucaugacucgaacaaagguguaacggcagcauguccucaugcuggagcaaaaagcuucuacaaaaauuuaauauggcuaguuaaaaaaggaaauucauacccaaagcucagcaaauccuacauuaaugauaaagggaaagaaguccucgugcuauggggcauucaccauccaucuacuagugcugaccaacaaagucucuaucagaaugcagauacauauguuuuuguggggacaucaagauacagcaagaaguucaagccggaaauagcaauaagacccaaagugagggaucaagaagggagaaugaacuauuacuggacaauaguagagccgggagacaaaauaacauucgaagcaacuggaaaucuagugguaccgagauaugcauucgcaauggaaagaaaugcuggaucugguauuaucauuucagauacaccaguccacgauugcaauacaacuugucagacacccaagggugcuauaaacaccagccucccauuucagaauauacauccgaucacaauuggaaaauguccaaaauauguaaaaagcacaaaauugagacuggccacaggauugaggaaugucccgucuauucaaucuagaggccuauuuggggccauugccgguuucauugaagggggguggacagggaugguagauggaugguacgguuaucaccaucaaaaugagcaggggucaggauaugcagccgaccugaagagcacacagaaugccauugacgagauuacuaacaaaguaaauucuguuauugaaaagaugaauacacaguucacagcaguagguaaagaguucaaccaccuggaaaaaagaauagagaauuuaaauaaaaaaguugaugaugguuuccuggacauuuggacuuacaaugccgaacuguugguucuauuggaaaaugaaagaacuuuggacuaccacgauucaaaugugaagaacuuauaugaaaagguaagaagccaguuaaaaaacaaugccaaggaaauuggaaacggcugcuuugaauuuuaccacaaaugcgauaacacgugcauggaaagugucaaaaaugggacuuaugacuacccaaaauacucagaggaagcaaaauuaaacagagaagaaauagaugggguaaagcuggaaucaacaaggauuuaccagauuuuggcgaucuauucaacugucgccaguucauugguacugguagucucccugggggcaaucaguuucuggaugugcucuaaugggucucuacaguguagaauauguauuuaa

SEQ ID NO: 45792 - RNA, 1701 nt, Artificial Sequence
  derived and/or modified CDS sequence (wt) from hemagglutinin__InfluenzaA__BAJ40039
augaaggcaauacuaguaguucugcuauauacauuugcaaccgcaaaugcagacacauuauguauagguuaucaugcgaacaauucaacagacacuguagacacaguacuagaaaagaauguaacaguaacacacucuguuaaccuucuagaagacaagcauaacgggaaacuaugcaaacuaagagggguagccccauugcauuuggguaaauguaacauugcuggcuggauccugggaaauccagagugugaaucacucuccacagcaagcucaugguccuacauuguggaaacaucuaguucagacaauggaacguguuacccaggagauuucaucgauuaugaggagcuaagagagcaauugagcucagugucaucauuugaaagguuugagauauuccccaagacuaguucauggcccaaucaugacucgaacaaaggcguaacggcagcauguccucaugcuggagcaaaaagcuucuacaaaaauuuaauauggcuaguuaaaaaaggaaauucauacccaaagcucagcaaauccuacauuaaugauaaagggaaagaaguccucgugcuauggggcauucaccauccaucuacuagugcugaccaacaaagucucuaucagaaugcagaugcauauguuuuuguggggacaucaagauacagcaagaaguucaagccggaaauagcaauaagacccaaagugagggaucaagaagggagaaugaacuauuacuggacacuaguagagccgggagacaaaauaacauucgaagcaacuggaaaucuagugguaccgagauaugcauucgcaauggaaagaaaugcuggaucugguauuaucauuucagauacaccaguccacgauugcaauacaacuugucagacacccaagggugcuauaaacaccagccucccauuucagaauauacauccgaucacuauuggaaaauguccaaaauauguaaaaagcacaaaauugagacuggccacaggguugaggaaugucccgucuauucaaucuagaggccuauuuggggccauugccgguuucauugaagggggguggacagggaugguagauggaugguacgguuaucaccaucaaaaugagcaggggucaggauaugcagccgaccugaagagcacacagaaugccauugacgagauuacuaacaaaguaaauucuguuauugaaaagaugaauacacaguucacagcaguagguaaagaguucaaccaccuggaaaaaagaauagagaauuuaaauaaaaagguugaugauggguuccuggacauuuggacuuacaaugccgaacuguugguucuauuggaaaaugaaagaacuuuggacuaccacgauucaaaugugaagaacuuauaugaaaagguaagaagccaguuaaaaaacaaugccaaggaaauuggaaacggcugcuuugaauuuuaccacaaaugcgauaacacgugcauggaaagugucaaaaaugggacuuaugacuacccaaaauacucagaggaagcaaaauuaaacagagaagaaauagaugggguaaagcuggaaucaacaaggauuuaccagauuuuggcgaucuauucaacugucgccaguucauugguacugguagucucccugggggcaaucaguuucuggaugugcucuaaugggucucuacaguguagaauauguauuuaa

SEQ ID NO: 45793 - RNA, 1701 nt, Artificial Sequence
  derived and/or modified CDS sequence (wt) from hemagglutinin__InfluenzaA__BAJ40040
augaaggcaauacuaguaguucugcuauauacauuugcaaccgcaaaugcagacacauuauguauagguuaucaugcgaacaauucaacugacacuguagacacaguacuagaaaagaauguaacaguaacacacucuguuaaccuucuagaagacaagcauaacgggaaacuaugcaaacuaagagggguagccccauugcauuuggguaaauguaacauugcuggcuggauccugggaaauccagagugugaaucacucuccacagcaagcucaugguccuacauuguggaaacaucuaguucagacaauggaacguguuacccaggagauuucaucgauuaugaggagcuaagagagcaauugagcucagugucaucauuugaaagguuugagauauuccccaagacaaguucauggcccaaucaugacucgaacaaagguguaacggcagcauguccucaugcuggagcaaaaagcuucuacaaaaauuuaauauggcuaguuaaaaaaggaaauucauacccaaagcucagcaaauccuacauuaaugauaaagggagagaaguccucgugcuauggggcauucaccauccaucuacuagugcugaccaacaaagucucuaucagaaugcagauacauauguuuuuguggggacaucaagauacagcaagaaguucaagccggaaauagcaauaagacccaaagugagggaucaagaagggagaaugaacuauuacuggacacuaguagagccgggagacaaaauaacauucgaagcaacuggaaaucuagugguaccgagauaugcauucgcaauggaaagaaaugcuggauaugguauuaucauuucagauacaccaguccacgauugcaauacaacuugucagacacccaagggugcuauaaacaccagccucccauuucagaauauacauccgaucacaauuggaaaauguccaaaauauguaaaaagcacaaaauugagacuggccacaggauugaggaaugucccgucuauucaaucuagaggccuauuuggggccauugccgguuucauugaagggggguggacagggaugguagauggaugguacgguuaucaccaucaaaaugagcaggggucaggauaugcagccgaccugaagagcacacagaaugccauugacgagauuacuaacaaaguaaauucuguuauugaaaagaugaauacacaguucacagcaguagguaaagaguucaaccaccuggaaaaaagaauagagaauuuaaauaaaaaaguugaugaugguuuccuggacauuuggacuuacaaugccgaacuguugguucuauuggaaaaugaaagaacuuuggacuaccacgauucaaaugugaaaaacuuauaugaaaagguaagaagccaguuaaaaaacaaugccaaggaaauuggaaacggcugcuuugaauuuuaccacaaaugcgauaacacgugcauggaaagugucaaaaaugggacuuaugacuacccaaaauacucagaggaagcaaaauuaaacagagaagaaauagaugggguaaagcuggaaucaacaaggauuuaccagauuuuggcgaucuauucaacugucgccaguucauugguacugguagucucccugggggcaaucaguuucuggaugugcucuaaugggucucuacaguguagaauauguauuuaa

SEQ ID NO: 45794 - RNA, 1701 nt, Artificial Sequence
  derived and/or modified CDS sequence (wt) from hemagglutinin__InfluenzaA__BAJ40041
augaaggcaauacuaguaguucugcuauauacauuugcaaccgcaaaugcagacacauuauguauagguuaucaugcgaacaauucaacagacacuguagacacaguacuagaaaagaauguaacaguaacacacucuguuaaucuucuagaagacaagcauaacgggaaacuaugcaaacuaagagggguagccccauugcauuuggguaaauguaacauugcuggcuggauccugggaaauccagagugugaaucacucuccacagcaagcucaugguccuacauuguggaaacaucuaguucagacaauggaacguguuacccaggagauuucaucgauuaugaggagcuaagagagcaauugagcucagugucaucauuugaaagguuugagauauuccccaagacaaguucauggcccaaucaugacucgaacaaagguguaacggcagcauguccucaugcuggagcaaaaagcuucuacaaaaauuuaauauggcugguuaaaaaaggaaauucauacccaaagcucagcaaauccuacauuaaugauaaagggaaagaaguccucgugcuauggggcauucaccauccaucuacuagugcugaccaacaaagucucuaucagaaugcagauacauauguuuuuguggggacaucaagauacagcaagaaguucaagccggaaauagcaauaagacccaaagugagggaucaagaagggagaaugaacuauuacuggacacuaguagagccgggagacaaaauaacauucgaagcaacuggaaaucuagugguaccgagauaugcauucgcaauggaaagaaaugcuggaucugguauuaucauuucagauacaccaguccacgauugcaauacaacuugucagacacccaagggugcuauaaacaccagccucccauuucagaauauacauccgaucacaauuggaaaauguccaaaauauguaaaaagcacaaaauugagacuggccacaggauugaggaaugucccgucuauucaaucuagaggccuauuuggggccauugccgguuucauugaagggggguggacagggaugguagauggaugguaugguuaucaccaucaaaaugagcaggggucaggauaugcagccgaccugaagagcacacagaaugccauugacgagauuacuaacaaaguaaauucuguuauugaaaagaugaauacacaguucacagcaguagguaaagaguucaaccaccuggaaaaaagaauagagaauuuaaauaaaaaaguugaugaugguuuccuggacauuuggacuuacaaugccgaacuguugguucuauuggaaaaugaaagaacuuuggacuaccacgauucaaaugugaagaacuuauaugaaaagguaagaagccaguuaaaaaacaaugccaaggaaauuggaaacggcugcuuugaauuuuaccacaaaugcgauaacacgugcauggaaagugucaaaaaugggacuuaugacuacccaaaauacucagaggaagcaaaauuaaacagagaagaaauagaugggguaaagcuggaaucaacaaggauuuaccagauuuuggcgaucuauucaacugucgccaguucauugguacugguagucucccugggggcaaucaguuucuggaugugcucuaaugggucucuacaguguagaauauguauuuaa

SEQ ID NO: 45795 - RNA, 1701 nt, Artificial Sequence
  derived and/or modified CDS sequence (wt) from hemagglutinin__InfluenzaA__BAJ40042
augaaggcaauacuaguaguucugcuauauacauuugcaaccgcaaaugcagacacauuauguauagguuaucaugcgaacaauucaacugacacuguagacacaguacuagaaaagaauguaacaguaacacacucuguuaaccuucuagaagacaagcauaacgggaaacuaugcaaacuaagagggguagccccauugcauuuggguaaauguaacauugcuggcuggauccugggaaauccagagugugaaucacucuccacagcaagcucaugguccuacauuguggaaacaucuaguucagacaauggaacguguuacccaggagauuucaucgauuaugaggagcuaaaagagccauugagcucagugucaucauuugaaagguuugagauauuccccaagacaaguucauggcccaaucaugacucgaacaaagguguaacggcagcauguccucaugcuggagcaaaaagcuucuacaaaaauuuaauauggcuaguuaaaaaaggaaauucauacccaaagcucagcaaauccuacauuaaugauaaagggagagaaguccucgugcuauggggcauucaccauccaucuacuagugcugaccgacaaagucucuaucagaaugcagauacauauguuuuuguggggacaucaagauacagcaagaaguucaagccggaaauagcaauaagacccaaagugagggaucaagaagggagaaugaacuauuacuggacacuaguagagccgggagacaaaauaacauucgaagcaacuggaaaucuagugguaccgagauaugcauucgcaauggaaagaaaugcuggaucugguauuaucauuucagauacaccaguccacgauugcaauacaacuugucagacacccaagggugcuauaaacaccagccucccauuucagaauauacauccgaucacaauuggaaaauguccaaaauauguaaaaagcacaaaauugagacuggccacaggauugaggaaugucccgucuauucaaucuagaggccuauuuggggccauugccgguuucauugaagggggguggacagggaugguagauggaugguacgguuaucaccaucaaaaugagcaggggucaggauaugcagccgaccugaagagcacacagaaugccauugacgagauuacuaacaaaguaaauucuguuauugaaaagaugaauacacaguucacagcaguagguaaagaguucaaccaccuggaaaaaagaauagagaauuuaaauaaaaaaguugaugaugguuuccuggacauuuggacuuacaaugccgaacuguugguucuauuggaaaaugaaagaacuuuggacuaccacgauucaaaugugaagaacuuauaugaaaagguaagaagccaguuaaaaaacaaugccaaggaaauuggaaacggcugcuuugaauuuuaccacaaaugcgauaacacgugcauggaaagugucaaaaaugggacuuaugacuacccaaaauacucagaggaagcaaaauuaaacagagaagaaauagaugggguaaagcuggaaucaacaaggauuuaccagauuuuggcgaucuauucaacugucgccaguucauugguacugguagucucccugggggcaaucaguuucuggaugugcucuaaugggucucuacaguguagaauauguauuuaa

SEQ ID NO: 45796 - RNA, 1701 nt, Artificial Sequence
  derived and/or modified CDS sequence (wt) from hemagglutinin__InfluenzaA__BAJ40043
augaaggcaauacuaguaguucugcuauauacauuugcaaccgcaaaugcagacacauuauguauagguuaucaugcgaacaauucaacagacacuguagacacaguacuagaaaagaauguaacaguaacacacucuguuaaccuucuagaagacaagcauaacgggaaacuaugcaaacuaagagggguagccccauugcauuuggguaaauguaacauugcuggcuggauccugggaaauccagagugugaaucacucuccacagcaagcucaugguccuacauuguggaaacaucuaguucagacaauggaacguguuacccaggagauuucaucgauuaugaggagcuaagagagcaauugagcucagugucaucauuugaaagguuugagauauuccccaagacaaguucauggcccaaucaugacucgaacaaagguguaacggcagcauguccucaugcuggagcaaaaagcuucuacaaaaauuuaauauggcuaguuaaaaaaggaaauucauacccaaagcucagcaaauccuacauuaaugauaaagggaaagaaguccucgugcuauggggcauucaccauccaucuacuagugcugaccaacaaagucucuaucagaaugcagauacauauguuuuuguggggacaucaagauacagcaagaaguucaagccggaaauagcaauaagacccaaagugagggaucaagaagggagaaugaacuauuacuggacacuaguagagccgggagacaaaauaacauucgaagcaacuggaaaucuagugguaccgagauaugcauucgcaauggaaagaaaugcuggaucugguauuaucauuucagauacaccaguccacgauugcaauacaacuugucagacacccaagggugcuauaaacaccagccucccauuucagaauauacauccgaucacaauuggaaaauguccaaaauauguaaaaagcacaaaauugagacuggccacaggauugaggaaugucccgucuauucaaucuagaggccuauuuggggccauugccgguuucauugaagggggguggacagggaugguagauggaugguacgguuaucaccaucaaaaugagcaggggucaggauaugcagccgaccugaagagcacacagaaugccauugacgagauuacuaacaaaguaaauucuguuauugaaaagaugaauacacaguucacagcaguagguaaagaguucaaccaccuggaaaaaagaauagagaauuuaaauaaaaaaguugaugaugguuuccuggacauuuggacuuacaaugccgaacuguugguucuauuggaaaaugaaagaacuuuggacuaccacgauucaaaugugaagaacuuauaugaaaagguaagaagccaguuaaaaaacaaugccaaggaaauuggaaacggcugcuuugaauuuuaccacaaaugcgauaacacgugcauggaaagugucaaaaaugggacuuaugacuacccaaaauacucagaggaagcaaaauuaaacagagaagaaauagaugggguaaagcuggaaucaacaaggauuuaccaaauuuuggcgaucuauucaacugucgccaguucauugguacugguagucucccugggggcaaucaguuucuggaugugcucuaaugggucucuacaguguagaauauguauuuaa

SEQ ID NO: 45797 - RNA, 1701 nt, Artificial Sequence
  derived and/or modified CDS sequence (wt) from hemagglutinin__InfluenzaA__BAJ40044
augaaggcaauacuaguaguucugcuauauacauuugcaaccgcaaaugcagacacauuauguauagguuaucaugcgaacaauucaacagacacuguagacacaguacuagaaaagaauguaacaguaacacacucuguuaaccuucuagaagacaagcauaacgggaaacuaugcaaacuaagagggguagccccauugcauuuggguaaauguaacauugcuggcuggauccugggaaauccagagugugaaucacucuccacagcaagcucaugguccuacauuguggaaacaucuaguucagacaauggaacguguuacccaggagauuucaucgauuaugaggagcaaaaagagcaauugagcucagugucaucauuugaaagguuugagauauuccccaagacaaguucauggcccaaucaugacucgaacaaagguguaacggcagcauguccucaugcuggagcaaaaagcuucuacaaaaauuuaauauggcuaguuaaaaaaggaaauucauacccaaagcucagcaaauccuacauuaaugauaaagggaaagaaguccucgugcuauggggcauucaccauccaucuacuagugcugaccaacaaagucucuaucagaaugcagaugcauauguuuuuguggggacaucaagauacagcaagaaguucaagccggaaauagcaauaagacccaaagugagggaucaagaagggagaaugaacuauuacuggacacuaguagagccgggagacaaaauaacauucgaagcaacuggaaaucuagugguaccgagauaugcauucgcaauggaaauaaaugcuggaucugguauuaucauuucagauacaccaguccacgauugcaauacaacuugucagacacccaagggugcuauaaacaccagccucccauuucagaauauacauccgaucacaauuggaaaauguccaaaauauguaaaaagcacaaaauugagacuggccacaggauugaggaaugucccgucuauucaaucuagaggccuauuuggggccauugccgguuucauugaagggggguggacagggaugguagauggaugguacgguuaucaccaucaaaaugagcaggggucaggauaugcagccgaccugaagagcacacagaaugccauugacaagauuacuaacaaaguaaauucuguuauugaaaagaugaauacacaguucacagcaguagguaaagaguucaaccaccuggaaaaaagaauagagaauuuaaauaaaaaaguugaugaugguuuccuggacauuuggacuuacaaugccgaacuguugguucuauuggaaaaugaaagaacuuuggacuaccacgauucaaaugugaagaacuuauaugaaaagguaagaagccaguuaaaaaacaaugccaaggaaauuggaaacggcugcuuugaauuuuaccacaaaugcgauaacacgugcauggaaagugucaaaaaugggacuuaugacuacccaaaauacucagaggaagcaaaauuaaacagagaagaaauagaugggguaaagcuggaaucaacaaggauuuaccagauuuuggcgaucuauucaacugucgccaguucauugguacugguagucucccugggggcaaucaguuucuggaugugcucuaaugggucucuacaguguagaauauguauuuaa

SEQ ID NO: 45798 - RNA, 1701 nt, Artificial Sequence; identical to SEQ ID NO: 45760
  derived and/or modified CDS sequence (wt) from hemagglutinin__InfluenzaA__BAJ40045

SEQ ID NO: 45799 - RNA, 1701 nt, Artificial Sequence
  derived and/or modified CDS sequence (wt) from hemagglutinin__InfluenzaA__BAJ40046
augaaggcaauacuaguaguucugcuauauacauuugcaaccgcaaaugcagacacauuauguauagguuaucaugcgaacaauucaacagacacuguagacacaguacuagaaaagaauguaacaguaacacacucuguuaaccuucuagaagacaagcauaacgggaaacuaugcaaacuaagagggguagccccauugcauuuggguagauguaacauugcuggcuggauccugggaaauccagagugugaaucacucuccacagcaagcucaugguccuacauuguggaaacaucuauuucagacaauggaacguguuacccaggagauuucaucgauuaugaggagcuaaaagagcaauugagcucagugucaucauuugaaagguuugagauauuccccaagacaaguucauggcccaaucaugacucgaacaaagguguaacggcagcauguccucaugcuggagcaaaaagcuucuacaaaaauuuaauauggcuaguuaaaaaaggaaauucauacccaaagcucagcaaauccuacauuaaugauaaagggaaagaaguccucgugcuauggggcauucaccauccaucuacuagugcugaccaacaaagucucuaucagaaugcagaugcauauguuuuuguggggacaucaagauacagcaagaaguucaagccggaaauagcaauaagacccaaagugagggaucaagaagggagaaugaacuauuacuggacacuaguagagccgggagacaaaauaacauucgaagcaacuggaaaucuagugguaccgagauaugcauucgcaauggaaagaaaugcuggaucugguauuaucauuucagauacaccaguccacgauugcaauacaacuugucagacacccaagggugcuauaaacaccagccucccauuucagaauauacauccgaucacaauuggaaaauguccaaaauauguaaaaagcacaaaauugagacuggccacaggauugaggaaugucccgucuauucaaucuagaggccuauuuggggccauugccgguuucauugaagggggguggacagggaugguagauggaugguacgguuaucaccaucaaaaugagcaggggucaggauaugcagccgaccugaagagcacacagaaugccauugacaagauuacuaacaaaguaaauucuguuauugaaaagaugaauacacaguucacagcaguagguaaagaguucaaccaccuggaaaaaaaaauagagaauuuaaauaaaaaaguugaugaugguuuccuggacauuuggacuuacaaugccaaacuguugguucuauuggaaaaugaaagaacuuuggacuaccacgauucaaaugugaaaaacuuauaugaaaagguaagaagccaguuaaaaaacaaugccaaggaaauuggaaacggcugcuuugaauuuuaccacaaaugcgauaacacgugcauggaaagugucaaaaaugggacuuaugacuacccaaaauacucagaggaagcaaaauuaaacagagaagaaauagaugggguaaagcuggaaucaacaaggauuuaccagauuuuggcgaucuauucaacugucgccaguucauugguacugguagucucccugggggcaaucaguuucuggaugugcucuaaugggucucuacaguguagaauauguauuuaa

SEQ ID NO: 45800 - RNA, 1701 nt, Artificial Sequence; identical to SEQ ID NO: 45783
  derived and/or modified CDS sequence (wt) from hemagglutinin__InfluenzaA__BAJ40047

SEQ ID NO: 45801 - RNA, 1701 nt, Artificial Sequence
  derived and/or modified CDS sequence (wt) from hemagglutinin__InfluenzaA__BAJ40048
augaaggcaauacuaguaguucugcuauacacauuugcaaccgcaaaugcagacacauuauguauagguuaucaugcgaacaauucaacagacacuguagacacaguacuagaaaggaauguaacaguaacacacucuguuaaccuucuagaagacaagcauaacgggaaacuaugcaaacuaagagggguagccccauugcauuuggguaaauguaacauugcuggcuggauccugggaaauccagagugugaaucacucuccacagcaagcucaugguccuacauuguggaaacaucuaguucagacaauggaacguguuacccaggagauuucaucgauuaugaggagcuaagagagcaauugagcucagugucaucauuugaaagguuugagauauuccccaagacaaguucauggcccaaucaugacucgaacaaagguguaacggcagcauguccucaugcuggagcaaaaagcuucuacaaaaauuuaauauggcuaguuaaaaaaggaaauucauacccaaagcucagcaaauccuacauuaaugauaaagggaaagaaguccucgugcuauggggcauucaccauccaucuacuagugcugaccaacaaagucucuaucagaaugcagauacauauguuuuuguggggacaucaagauacagcaagaaguucaagccggaaauagcaauaagacccaaagugagggaucaagaagggagaaugaacuauuacuggacacuaguagagccgggagacaaaauaacauucgaagcaacuggaaaucuagugguaccgagauaugcauucgcaauggaaagaaaugcuggaucugguauuaucauuucagauacaccaguccacgauugcaauacaacuugucagacacccaagggugcuauaaacaccagccucccauuucagaauauacauccgaucacaauuggaaaauguccaaaauauguaaaaagcacaaaauugagacuggccacaggauugaggaaugucccgucuauucaaucuagaggccuauuuggggccauugccgguuucauugaagggggguggacagggaugguagauggaugguacgguuaucaccaucaaaaugagcaggggucaggauaugcagccgaccugaagagcacacagaaugccauugacgagauuacuaacaaaguaaauucuguuauugaaaagaugaauacacaguucacagcaguagguaaagaguucaaccaccuggaaaaaagaauagagaauuuaaauaaaaaaguugaugaugguuuccuggacauuuggacuuacaaugccgaacuguugguucuauuggaaaaugaaagaacuuuggacuaccacgauucaaaugugaagaacuuauaugaaaagguaagaagccaguuaaaaaacaaugccaaggaaauuggaaacggcugcuuugaauuuuaccacaaaugcgauaacacgugcauggaaagugucaaaaaugggacuuaugacuacccaaaauacucagaggaagcaaaauuaaacagagaagaaauagaugggguaaagcuggaaucaacaaggauuuaccagauuuuggcgaucuauucaacugucgccaguucauugguacugguagucucccugggggcaaucaguuucuggaugugcucuaaugggucucuacaguguagaauauguauuuaa

SEQ ID NO: 45802 - RNA, 1701 nt, Artificial Sequence
  derived and/or modified CDS sequence (wt) from hemagglutinin__InfluenzaA__BAJ40050
augaaggcaauacuaguaguucugcuauauacauuugcaaccgcaaaugcagacacauuauguauagguuaucaugcgaacaauucaacagacacuguagacacaguacuagaaaagaauguaacaguaacacacucuguuaaccuucuagaagacaagcauaacgggaaacuaugcaaacuaagagggguagccccauugcauuuggguaaauguaacauugcuggcuggauccugggaaauccagagugugaaucacucuccacagcaagcucaugguccuacauuguggaaacaucuaguucagacaauggaacguguuacccaggagauuucaucgauuaugaggagcuaaaagagcaauugagcucagugucaucauuugaaagguuugagauauuccccaagacaaguucauggcccaaucaugacucgaacaaagguguaacggcagcauguccucaugcuggagcaaaaagcuucuacaaaaauuuaauauggcuaguuaaaaaaggaaauucauacccaaagcucagcaaauccuacauuaaugauaaagggaaagaaguccucgugcuauggggcauucaccauccaucuacuagugcugaccaacaaagucucuaucagaaugcagaugcauauguuuuuguggggacaucaagauacagcaagaaguucaagccggaaauagcaauaagacccaaagugagggaucaagaagggagaaugaacuauuacuggacacuaguagagccgggagacaaaauaacauucgaagcaacuggaaaucuagugguaccgagauaugcauucgcaauggaaagaaaugcuggaucugguauuaucauuucagauacaccaguccacgauugcaauacaacuugucagacacccaagggugcuauaaacaccagccuuccauuucagaauauacauccgaucacaauuggaaaauguccaaaauauguaaaaagcacaaaauugagacuggccacaggauugaggaaugucccgucuauucaaucuagaggccuauuuggggccauugccgguuucauugaagggggguggacagggaugguagauggaugguacgguuaucaccaucaaaaugagcaggggucaggauaugcagccgaccugaagagcacacagaaugccauugacaagauuacuaacaaaguaaauucuguuauugaaaagaugaauacacaguucacagcaguagguaaagaguucaaccaccuggaaaaaagaauagagaauuuaaauaaaaaaguugaugaugguuuccuggacauuuggacuuacaaugccgaacuguugguucuauuggaaaaugaaagaacuuuggacuaccacgauucaaaugugaagaacuuauaugaaaagguaagaagccaguuaaaaaacaaugccaaggaaauuggaaacggcugcuuugaauuuuaccacaaaugcgauaacacgugcauggaaagugucaaaaaugggacuuaugacuacccaaaauacucagaggaagcaaaauuaaacagagaagaaauagaugggguaaagcuggaaucaacaaggauuuaccagauuuuggcgaucuauucaacugucgccaguucauugguacugguagucucccugggggcaaucaguuucuggaugugcucuaaugggucucuacaguguagaauauguauuuaa

SEQ ID NO: 45803 - RNA, 1701 nt, Artificial Sequence
  derived and/or modified CDS sequence (wt) from hemagglutinin__InfluenzaA__BAJ40051
augaaggcaauacuaguaguucugcuauauacauuugcaaccgcaaaugcagacacauuauguauagguuaucaugcgaacaauucaacagacacuguagacacaguacuagaaaagaauguaacaguaacacacucuguuaaccuucuagaagacaagcauaacgggaaacuaugcaaacuaagagggguagccccauugcauuuggguaaauguaacauugcuggcuggauccugggaaauccagagugugaaucacucuccacagcaagcucaugguccuacauuguggaaacaucuaguucagacaauggaacguguuacccaggagauuucaucgauuaugaggagcuaagagagcaauugagcucagugucaucauuugaaagguuugagauauuccccaagacaaguucauggcccaaucaugacucgaacaaagguguaacggcagcauguccucaugcuggagcaaaaagcuucuacaaaaauuuaauauggcuaguuaaaaaaggaaauucauacccaaagcucagcaaaucuuacauuaaugauaaagggaaagaaguccucgugcuauggggcauucaccauccaucuacuagugcugaccaacaaagucucuaucagaaugcagaugcauauguuuuuguggggacaucaagauacagcaagaaguucaagccggaaauagcaauaagacccaaagugagggaucaagaagggagaaugaacuauuacuggacacuaguagagccgggagacaaaauaacauucgaagcaacuggaaaucuagugguaccgagauaugcauucgcaauggaaagaaaugcuggaucugguauuaucauuucagauacaccaguccacgauugcaauacaacuugucagacacccaagggugcuauaaacaccagccucccauuucagaauauacauccgaucacaauuggaaaauguccaaaauauguaaaaagcacaaaauugagacuggccacaggauugaggaaugucccgucuauucaaucuagaggccuauuuggggccauugccgguuucauugaagggggguggacagggaugguagauggaugguacgguuaucaccaucaaaaugagcaggggucaggauaugcagccgaccugaagagcacacagaaugccauugacaagauuacuaacaaaguaaauucuguuauugaaaagaugaauacacaguucacagcaguagguaaagaguucaaccaccuggaaaaaagaauagagaauuuaaauaaaaaaguugaugaugguuuccuggacauuuggacuuacaaugccgaauuguugguucuauuggaaaaugaaagaacuuuggacuaccacgauucaaaugugaagaacuuauaugaaaagguaagaagccaguuaaaaaacaaugccaaggaaauuggaaacggcugcuuugaauuuuaccacaaaugcgauaacacgugcauggaaagugucaaaaaugggacuuaugacuacccaaaauacucagaggaagcaaaauuaaacagagaagaaauagaugggguaaagcuggaaucaacaaggauuuaccagauuuuggcgaucuauucaacugucgccaguucauugguacugguagucucccugggggcaaucaguuucuggaugugcucuaaugggucucuacaguguagaauauguauuuaa

SEQ ID NO: 45804 - RNA, 1701 nt, Artificial Sequence
  derived and/or modified CDS sequence (wt) from hemagglutinin__InfluenzaA__BAJ40052
augaaggcaauacuaguaguucugcuauauacauuugcaaccgcaaaugcagacacauuauguauagguuaucaugcgaacaauucaacugacacuguagacacaguacuagaaaagaauguaacaguaacacacucuguuaaccuucuagaagacaagcauaacgggaaacuaugcaaacuaagagggguagccccauugcauuuggguaaauguaacauugcuggcuggauccugggaaauccagagugugaaucacucuccacagcaagcucaugguccuacauuguggagacaucuaguucagacaauggaacguguuacccaggagauuucaucgauuaugaggagcuaagagagcaauugagcucagugucaucauuugaaagguuugagauauuccccaagacaaguucauggcccaaucaugacucgaacaaagguguaacggcagcauguccucaugcuggagcaaaaagcuucuacaaaaauuuaauauggcuaguuaaaaaaggaaauucauacccaaagcucagcaaauccuacauuaaugauaaagggagagaaguccuugugcuauggggcauucaccauccaucuacuacugcugaccaacaaagucucuaucagaaugcagauacauauguuuuuguggggacaucaagauacagcaagaaguucaagccggaaauagcaauaagacccaaagugagggaucaagaagggagaaugaacuauuacuggacacuaguagagccgggagacaaaauaacauucgaagcaacuggaaaucuagugguaccgagauaugcauucgcaauggaaagaaaugcuggaucugguauuaucauuucagauacaccaguccacgauugcaauacaacuugucagacacccaagggugcuauaaacaccagccucccauuucagaauauacauccgaucacaauuggaaaauguccaaaauauguaaaaagcacaaaauugagacuggccacaggauugaggaaugucccgucuauucaaucuagaggccuauuuggggccauugccgguuucauugaagggggguggacagggaugguagauggaugguacgguuaucaccaucaaaaugagcaggggucaggauaugcagccgaccugaagagcacacagaaugccauugacgagauuacuaacaaaguaaauucuguuauugaaaagaugaauacacaguucacagcaguagguaaagaguucaaccaccuggaaaaaagaauagagaauuuaaauaaaaaaguugaugaugguuuccuggacauuuggacuuacaaugccgaacuguugguucuauuggaaaaugaaagaacuuuggacuaccacgauucaaaugugaagaacuuauaugaaaagguaagaagccaguuaaaaaacaaugccaaggaaauuggaaacggcugcuuugaauuuuaccacaaaugcgauaacacgugcauggaaagugucaaaaaugggacuuaugacuacccaaaauacucagaggaagcaaaauuaaacagagaagaaauagaugggguaaagcuggaaucaacaaggauuuaccagauuuuggcgaucuauucaacugucgccaguucauugguacugguagucucccugggggcaaucaguuucuggaugugcucuaaugggucucuacaguguagaauauguauuuaa

SEQ ID NO: 45805 - RNA, 1701 nt, Artificial Sequence
  derived and/or modified CDS sequence (wt) from hemagglutinin__InfluenzaA__BAJ40053
augaaggcaauacuaguaguucugcuauauacauuugcaaccgcaaaugcagacacauuauguauagguuaucaugcgaacaauucaacagacacuguagacacaguacuagaaaagaacguaacaguaacacacucuguuaaccuucuagaagacaagcauaacgggaaacuaugcaaacuaagagggguagccccauugcauuuggguaaauguaacauugcuggcuggauccugggaaauccagagugugaaucacucuccacagcaagcucaugguccuacauuguggaaacaucuaguucagacaaugggacguguuacccaggagauuucaucgauuaugaggagcuaagagagcaauugagcucagugucaucauuugaaagauuugagauauuccccaagacaaguucauggcccaaucaugacucgaacaaagguguaacggcagcauguccucaugcuggagcaaaaagcuucuacaaaaauuuaauauggcuaguuaaaaaaggaaauucauacccaaagcucagcaaauccuacauuaaugauaaagggaaagaaguccucgugcuauggggcauucaccauccaucuacuagugcugaccaacaaagucucuaucagaaugcagauacauauguuuuuguggggacaucaagauacagcaagaaguucaagccggaaauagcaauaagacccaaagugagggaucaagaagggagaaugaacuauuacuggacacuaguagagccgggagacaaaauaacauucgaagcaacuggaaaucuagugguaccgagauaugcauucgcaauggaaagaaaugcuggaucugguauuaucauuucagauacaccaguccacgauugcaauacaacuugucagacacccaagggugcuauaaacaccagccucccauuucagaauauacauccgaucacaauuggaaaauguccaaaauauguaaaaagcacaaaauugagacuggccacaggauugaggaaugucccaucuauucaaucuagaggccuauuuggggccauugccgguuucauugaagggggguggacagggaugguagauggaugguacgguuaucaccaucaaaaugagcaggggucaggauaugcagccgaccugaagagcacacagaaugccauugacgagauuacuaacaaaguaaauucuguuauugaaaagaugaacacacaguucacagcaguagguaaagaguucaaccaccuggaaaaaagaauagagaauuuaaauaaaaaaguugaugaugguuuccuggacauuuggacuuacaaugccgaacuguugguucuauuggaaaaugaaagaacuuuggacuaccacgauucaaaugugaagaacuuauaugaaaagguaagaaaccaguuaaaaaacaaugccaaggaaauuggaaacggcugcuuugaauuuuaccacaaaugcgauaacacgugcauggaaagugucaaaaaugggacuuaugacuacccaaaauacucagaggaagcaaaauuaaacagagaagaaauagaugggguaaagcuggaaucaacaaggauuuaccagauuuuggcgaucuauucaacugucgccaguucauugguacugguagucucccugggggcaaucaguuucuggaugugcucuaaugggucucuacaguguagaauauguauuuaa

SEQ ID NO: 45806 - RNA, 1701 nt, Artificial Sequence
  derived and/or modified CDS sequence (wt) from hemagglutinin__InfluenzaA__BAJ40054
augaaggcaauacuaguaguucugcuauauacauuugcaaccgcaaaugcagacacauuauguauagguuaucaugcgaacaauucaacagacacuguagacacaguacuagaaaagaauguaacaguaacacacucuguuaaccuucuagaagacaagcauaacgggaaacuaugcaaacugagagggguagccccauugcauuuggguaaauguaacauugcuggcuggauccugggaaauccagagugugaaucacucuccacagcaagcucaugguccuacauuguggaaacaucuaguucagacaauggaacguguuacccaggagauuucaucgauuaugaggagcuaagagagcaauugagcucagugucaucauuugaaagguuugagauauuccccaagacaaguucauggcccaaucaugacucgaacaaagguguaacggcagcauguccucaugcuggagcaaaaagcuucuacaaaaauuuaauauggcuaguuaaaaaaggaaauucauacccaaagcucagcaaauccuacauuaaugauaaagggaaagaaguccucgugcuauggggcauucaccauccaucuacuagugcugaccaacaaagucucuaucagaaugcagaugcauauguuuuuguggggacaucaagauacagcaagaaguucaagccggaaauagcaauaagacccaaagugagggaucaagaagggagaaugaacuauuacuggacacuaguagagccgggagacaaaauaacauucgaagcaacuggaaaucuagugguaccgagauaugcauucgcaauggaaagaaaugcuggaucugguauuaucauuucagauacaccaguccacgauugcaauacaacuugucagacacccaagggugcuauaaacaccagccuuccauuucagaauauacauccgaucacaauuggaaaauguccaaaauauguaaaaagcacaaaauugagacuggccacaggauugaggaaugucccgucuauucaaucuagaggccuauuuggggccauugccgguuucauugaagggggguggacagggaugguagauggaugguacgguuaucaccaucaaaaugagcaggggucaggauaugcagccgaccugaagagcacacagaaugccauugacaagauuacuaacaaaguaaauucuguuauugaaaagaugaauacacaguucacagcaguagguaaagaguucaaccaccuggaaaaaagaauagagaauuuaaauaaaaaaguugaugaugguuuccuggacauuuggacuuacaaugccgaacuguugguucuauuggaaaaugaaagaacuuuggacuaccacgauucaaaugugaagaacuuauaugaaaagguaagaagccaguuaaaaaacaaugccaaggaaauuggaaacggcugcuuugaauuuuaccacaaaugcgauaacacgugcauggaaagugucaaaaaugggacuuaugacuacccaaaauacucagaggaagcaaaauuaaacagagaagaaauagaugggguaaagcuggaaucaacaaggauuuaccagauuuuggcgaucuauucaacugucgccaguucauugguacugguagucucccugggggcaaucaguuucuggaugugcucuaaugggucucuacaguguagaauauguauuuaa

SEQ ID NO: 45807 - RNA, 1701 nt, Artificial Sequence
  derived and/or modified CDS sequence (wt) from hemagglutinin__InfluenzaA__BAJ40055
augaaggcaauacuaguaguucugcuauauacauuugcaaccgcaaaugcagacacauuauguauagguuaucaugcgaacaauucaacagacacuguagacacaguacuagaaaagaauguaacaguaacacacucuguuaaucuucuagaagacaagcauaacgggaaacuaugcaaacuaagagggguagccccauugcauuuggguaaauguaacauugcuggcuggauccugggaaauccagagugugaaucacucuccacagcaagcucaugguccuacauuguggaaacaucuaguucagacaauggaacguguuacccaggagauuucaucgauuaugaggagcuaagagagcaauugagcucagugucaucauuugaaagguuugagauauuccccaagacaaguucauggcccaaucaugacucgaacaaagguguaacggcagcauguccucaugcuggagcaaaaagcuucuacaaaaauuuaauauggcugguuaaaaaaggaaauucauacccaaagcucagcaaauccuacauuaaugauaaagggaaagaaguccucgugcuauggggcauucaccauccaucuacuaguacugaccaacaaagucucuaucagaaugcagauacauauguuuuuguggggacaucaagauacagcaagaaguucaagccggaaauagcaauaagacccaaagugagggaucaagaagggagaaugaacuauuacuggacacuaguagagccgggagacaaaauaacauucgaagcaacuggaaaucuagugguaccgagauaugcauucgcaauggaaagaaaugcuggaucugguauuaucauuucagauacaccaguccacgauugcaauacaauuugucagacacccaagggugcuauaaacaccagccucccauuucagaauauacauccgaucacaauuggaaaauguccaaaauauguaaaaagcacaaaauugagacuggccacaggauugaggaaugucccgucuguucaaucuagaggccuauuuggggccauugccgguuucauugaagggggguggacagggaugguagauggaugguacgguuaucaccaucaaaaugagcaggggucaggauaugcagccgaccugaagagcacacagaaugccauugacgagauuacuaacaaaguaaauucuguuauugaaaagaugaauacacaguucacagcaguagguaaagaguucaaccaccuggaaaaaagaauagagaauuuaaauaaaaaaguugaugaugguuuccuggacauuuggacuuacaaugccgaacuguugguucuauuggaaaaugaaagaacuuuggacuaccacgauucaaaugugaagaacuuauaugaaaagguaagaagccaguuaaaaaacaaugccaaggaaauuggaaacggcugcuuugaauuuuaccacaaaugcgauaacacgugcauggaaagugucaaaaaugggacuuaugacuacccaaaauacucagaggaagcaaaauuaaacagagaagaaauagaugggguaaagcuggaaucaacaaggauuuaccagauuuuggcgaucuauucaacugucgccaguucauugguacugguagucucccugggggcaaucaguuucuggaugugcucuaaugggucucuacaguguagaauauguauuuaa

SEQ ID NO: 45808 - RNA, 1701 nt, Artificial Sequence
  derived and/or modified CDS sequence (wt) from hemagglutinin__InfluenzaA__BAJ40056
augaaggcaauacuaguaguucugcuauauacauuugcaaccgcaaaugcagacacauuauguauagguuaucaugcgaacaauucaacagacacuguagacacaguacuagaaaagaauguaacaguaacacacucuguuaaccuucuagaagacaagcauaacgggaaacuaugcaaacuaagagggguagccccauugcauuuggguaaauguaacauugcuggcuggauccugggaaauccagagugugaauuacucuccacagcaagcucaugguccuacauuguggaaacaucuaguucagacaauggaacguguuacccaggagauuucaucgauuaugaggagcuaagagagcaauugagcucagugucaucauuugaaagguuugagauauuccccaagacaaguucauggcccaaucaugacucgaacaaagguguaacggcagcauguccucaugcuggagcaaaaagcuucuacaaaaauuuaauauggcaaguuaaaaaaggaaauucauacccaaagcucagcaaauccuacauuaaugauaaagggaaagaaguccucgugcuauggggcauucaccauccaucuacuagugcugaccaacaaagucucuaucagaaugcagaugcauauguuuuuguggggacaucaagauacagcaagaaguucaagccggaaauagcaauaagacccaaagugagggaucaagaagggagaaugaacuauuacuggacacuaguagagccgggagacaaaauaacauucgaagcaacuggaaaucuagugguaccgagacaugcauucgcaauggaaagaaaugcuggaucugguauuaucauuucagauacaccaguccacaauugcaauacaacuugucagacacccaagggugcuauaaacaccagccucccauuucagaauauacauccgaucacaauuggaaaauguccaaaauauguaaaaagcccaaaauugagacuggccacaggauugaggaaugucccgucuauucaaucuagaggccuauuuggggccauugccggcuucauugaagggggguggacagggaugguagauggaugguacgguuaucaccaucaaaaugagcaggggucaggauaugcagccgaccugaagagcacacagaaugccauugacaagauuacuaacaaaguaaauucuguuauugaaaagaugaauacacaguucacagcaguagguaaagaguucaaccaccuggaaaaaagaauagagaauuuaaauaaaaagguugaugaugguuuccuggacauuuggacuuacaaugccgaacuguugguucuauuggaaaaugaaagaacuuuggacuaccaugauucauaugugaagaacuuauaugaaaagguaagaagccaguuaaaaaacaaugccaaggaaauuggaaacggcugcuuugaauuuuaccacaaaugcgauaacacgugcauggaaagugucaaaaaugggacuuaugacuacccaaaauacucagaggaagcaaaauuaaacagagaagaaauagaugggguaaagcuggaaucaacaaggauuuaccagauuuuggcgaucuauucaacugucgccaguucauugguacugguagucucccugggggcaaucaguuucuggaugugcucuaaugggucucuacaguguagaauauguauuuaa

SEQ ID NO: 45809 - RNA, 1701 nt, Artificial Sequence
  derived and/or modified CDS sequence (wt) from hemagglutinin__InfluenzaA__BAJ40057
augaaggcaauacuaguaguucugcuauacacauuugcaaccgcaaaugcagacacauuauguauagguuaucaugcgaacaauucaacagacacuguagacacaguacuagaaaggaauguaacaguaacacacucuguuaaccuucuagaagacaagcauaacgggaaacuaugcaaacuaagagggguagccccauugcauuuggguaaauguaacauugcuggcuggauccugggaaauccagagugugaaucacucuccacagcaagcucaugguccuacauuguggaaacaucuaguucagacaauggaacguguuacccaggagauuucaucgauuaugaggagcuaagagagcaauugagcucagugucaucauuugaaagguuugagauauuccccaagacaaguucauggcccaaucaugacucgaacaaagguguaacggcagcauguccucaugcuggagcaaaaagcuucuacaaaaauuuaauauggcuaguuaaaaaaggaaauucauacccaaagcucagcaaauccuacauuaaugauaaagggaaagaaguccucgugcuauggggcauucaccauccaucuacuagugcugaccaacaaagucucuaucagaaugcagauacauauguuuuuguggggacaucaagauacagcaagaaguucaagccggaaauagcaauaagacccaaagugagggaucaagaagggagaaugaacuauuacuggacacuaguagagccgggagacaaaauaacauucgaagcaacuggaaaucuagugguaccgagauaugcauucgcaauggaaagaaaugcuggaucugguauuaucauuucagauacaccaguccacgauugcaauacaacuugucagacacccaagggugcuauaaacaccagccucccauuucagaauauacauccgaucacaauuggaaaauguccaaaauauguaaaaagcacaaaauugagacuggccacaggauugaggaaugucccgucuauucaaucuagaggccuauuuggggccauugccgguuucauugaagggggguggacagggaugguagauggaugguacgguuaucaccaucaaaaugagcaggggucaggauaugcagccgaccugaagagcacacagaaugccauugacgagauuacuaacgaaguaaauucuguuauugaaaagaugaauacacaguucacagcaguagguaaagaguucaaccaccuggaaaaaagaauagagaauuuaaauaaaaaaguugaugaugguuuccuggacauuuggacuuacaaugccgaacuguugguucuauuggaaaaugaaagaacuuuggacuaccacgauucaaaugugaagaacuuauaugaaaagguaagaagccaguuaaaaaacaaugccaaggaaauuggaaacggcugcuuugaauuuuaccacaaaugcgauaacacgugcauggaaaguguaaaaaaugggacuuaugacuacccaaaauacucagaggaagcaaaauuaaacagagaagaaauagaugggguaaagcuggaaucaacaaggauuuaccagauuuuggcgaucuauucaacugucgccaguucauugguacugguagucucccugggggcaaucaguuucuggaugugcucuaaugggucucuacaguguagaauauguauuuaa

SEQ ID NO: 45810 - RNA, 1701 nt, Artificial Sequence; identical to SEQ ID NO: 45711
  derived and/or modified CDS sequence (wt) from hemagglutinin__InfluenzaA__BAJ40058

SEQ ID NO: 45811 - RNA, 1701 nt, Artificial Sequence; identical to SEQ ID NO: 45754
  derived and/or modified CDS sequence (wt) from hemagglutinin__InfluenzaA__BAJ40059

SEQ ID NO: 45812 - RNA, 1701 nt, Artificial Sequence; identical to SEQ ID NO: 35845
  derived and/or modified CDS sequence (wt) from hemagglutinin__InfluenzaA__BAJ40060

SEQ ID NO: 45813 - RNA, 1701 nt, Artificial Sequence
  derived and/or modified CDS sequence (wt) from hemagglutinin__InfluenzaA__BAJ40061
augaaggcaauacuaguaguucugcuauauacauuugcaaccgcaaaugcagacacauuauguauagguuaucaugcgaacaauucaacagacacuguagacacaguacuagaaaagaauguaacaguaacacacucuguuaaccuucuagaagacaagcauaacgggaaacuaugcaaacuaagagggguagccccauugcauuuggguaaauguaacauugcuggcuggauccugggaaauccagagugugaaucacucuccacagcaagcucaugguccuacauuguggaaacaucuaguucagacaauggaacguguuacccaggagauuucaucgauuaugaggagcuaagagagcaauugagcucagugucaucauuugaaagguuugagauauuccccaaggcaaguucauggcccaaucaugacucgaacaaagguguaacggcagcauguccucaugcuggagcaaaaagcuucuacaaaaauuuaauauggcuaguuaaaaaaggaaauucauacccaaagcucagcaaauccuacauuaaugauaaagggaaagaaguccucgugcuauggggcauucaccauccaucuacuagugcugaccaacaaagucucuaucagaaugcagaugcauauguuuuuguggggacaucaagauacagcaagaaguucaagccggaaauagcaauaagacccaaagugagggaucaagaagggagaaugaacuauuacuggacacuaguagagccgggagacaaaauaacauucgaagcaacuggaaaucuagugguaccgagauaugcauucgcaauggaaagaaaugcuggaucugguauuaucauuucagauacaccaguccacgauugcaauacaacuugucagacacccaagggugcuauaaacaccagccucccauuucagaauauacauccgaucacaauuggaaaauguccaaaauauguaaaaagcacaaaauugagacuggccacaggauugaggaaugucccgucuauucaaucuagaggccuauuuggggccauugccgguuucauugaagggggguggacagggaugguagauggaugguacgguuaucaccaucaaaaugagcaggggucaggauaugcagccgaccugaagagcacacagaaugccauugacaagauuacuaacaaaguaaauucuguuauugaaaagaugaauacacaguucacagcaguagguaaagaguucaaccaccuggaaaaaagaauagagaauuuaaauaaaaaaguugaugaugguuuccuggacauuuggacuuacaaugccgaacuguugguucuauuggaaaaugaaagaacuuuggacuaccacgauucaaaugugaagaacuuauaugaaaagguaagaagccaguuaaaaaacaaugccaaggaaauuggaaacggcugcuuugaauuuuaccacaaaugcgauaacacgugcauggaaagugucaaaaaugggacuuaugacuacccaaaauacucagaggaagcaaaauuaaacagagaagaaauagaugggguaaagcuggaaucaacaaggauuuaccagauuuuggcgaucuauucaacugucgccaguucauugguacugguagucucccugggggcaaucaguuucuggaugugcucuaaugggucucuacaguguagaauauguauuuaa

SEQ ID NO: 45814 - RNA, 1701 nt, Artificial Sequence
  derived and/or modified CDS sequence (wt) from hemagglutinin__InfluenzaA__BAJ40062
augaaggcaauacuaguaguuuugcuauauacauuugcaaccgcaaaugcagacacauuauguauagguuaucaugcgaacaauucaacagacacuguagacacaguacuagaaaagaauguaacaguaacacacucuguuaaccuucuagaagacaagcauaacgggaaacuaugcaaacuaagagggguagccccauugcauuuggguaaauguaacauugcuggcuggauccugggaaauccagagugugaaucacucuccacagcaagcucaugguccuacauuguggaaacaucuaguucagacaauggaacguguuacccaggagauuucauugauuaugaggagcuaagagagcaauugagcucagugucaucauuugaaagguuugagauauuccccaagacaaguucauggcccaaucaugacucgaacaaagguguaacggcagcauguccucaugcuggagcaaaaagcuucuacaaaaauuuaauauggcuaguuaaaaaaggaaauucauacccaaagcucagcaaauccuacauuaaugauaaagggaaagaaguccucgugcuauggggcauucaccauccaucuacuagugcugaccaacaaagucucuaucagaaugcagauacauauguuuuuguggggacaucaagauacagcaagaaguucaagccggaaauagcaauaagacccaaagugagggaucaagaagggagaaugaacuauuacuggacacuaguagagccgggagacaaaauaacauucgaagcaacuggaaaucuagugguaccgagauaugcauucgcaauggaaagaaaugcuggaucugguauuaucauuucagauacaccaguccacgauugcaauacaacuugucagacacccaagggugcuauaaacaccagccucccauuucagaauauacauccgaucacaauuggaaaauguccaaaauauguaaaaagcacaaaauugagacuggccacaggauugaggaaugucccgucuauucaaucuagaggccuauuuggggccauugccgguuucauugaagggggguggacagggaugguagauggaugguacgguuaucaccaucaaaaugagcaggggucaggauaugcagccgaccugaagagcacacagaaugccauugacgagauuacuaacaaaguaaauucuguuauugaaaagaugaauacacaguucacagcaguagguaaagaguucaaccaccuggaaaaaaaaauagagaauuuaaauaaaaaaguugaugaugguuuccuggacauuuggacuuacaaugccgaacuguugguucuauuggaaaaugaaagaacuuuggacuaccacgauucaaaugugaagaacuuauaugaaaagguaagaagccaguuaaaaaacaaugccaaggaaauuggaaacggcugcuuugaauuuuaccacaaaugcgauaacacgugcauggaaagugucaaaaaugggacuuaugacuacccaaaauacucagaggaagcaaaauuaaacagagaagaaauagaugggguaaagcuggaaucaacaaggauuuaccagauuuuggcgaucuauucaacugucgccaguucauugguacugguagucucccugggggcaaucaguuucuggaugugcucuaaugggucucuacaguguaaaauauguauuuaa

SEQ ID NO: 45815 - RNA, 1701 nt, Artificial Sequence
  derived and/or modified CDS sequence (wt) from hemagglutinin__InfluenzaA__BAJ40063
augaaggcaauacuaguaguucugcuauauacauuugcaaccgcaaaugcagacacauuauguauagguuaucaugcgaacaauucaacagacacuguagacacaguacuagaaaagaauguaacaguaacacacucuguuaaccuucuagaagacaagcauaacgggaaacuaugcaaacuaagagggguagccccauugcauuuggguaaauguaacauugcuggcuggauccugggaaauccagagugugaaucacucuccacagcaagcucaugguccuacauuguggaaacaucuaguucagacaauggaacguguuacccaggagauuucaucgauuaugaggagcuaagagagcaauugagcucagugucaucauuugaaagguuugagauauuccccaaggcaaguucauggcccaaucaugacucgaacaaagguguaacggcagcauguccucaugcuggagcaaaaagcuucuacaaaaauuuaauauggcuaguuaaaaaaggaaauucauacccaaagcucagcaaauccuacauuaaugauaaagggaaagaaguccucgugcuauggggcauucaccauccaucuacuagugcugaccaacaaagucucuaucagaaugcagaugcauauguuuuuguggggacaucaagauacagcaagaaguucaagccggaaauagcaauaagacccaaagugagggaucaagaagggagaaugaacuauuacuggacacuaguagagccgggagacaaaauaacauucgaagcaacuggaaaucuagugguaccgagauaugcauucgcaauggaaagaaaugcuggaucugguauuaucauuucagauacaccaguccacgauugcaauacaacuugucagacacccaagggugcuauaaacaccagccucccauuucagaauauacauccgaucacaauuggaaaauguccaaaauauguaaaaagcacaaaauugagacuggccacaggauugaggaaugucccgucuauucaaucuagaggccuauuuggggccauugccgguuucauugaaggaggguggacagggaugguagauggaugguacgguuaucaccaucaaaaugagcaggggucaggauaugcagccgaccugaagagcacacagaaugccauugacaagauuacuaacaaaguaaauucuguuauugaaaagaugaauacacaguucacagcaguagguaaagaguucaaccaccuggaaaaaagaauagagaauuuaaauaaaaaaguugaugaugguuuccuggacauuuggacuuacaaugccgaacuguugguucuauuggaaaaugaaagaacuuuggacuaccacgauucaaaugugaagaacuuauaugaaaagguaagaagccaguuaaaaaacaaugccaaggaaauuggaaacggcugcuuugaauuuuaccacaaaugcgauaacacgugcauggaaagugucaaaaaugggacuuaugacuacccaaaauacucagaggaagcaaaauuaaacagagaagaaauagaugggguaaagcuggaaucaacaaggauuuaccagauuuuggcgaucuauucaacugucgccaguucauugguacugguagucucccugggggcaaucaguuucuggaugugcucuaaugggucucuacaguguagaauauguauuuaa

SEQ ID NO: 45816 - RNA, 1701 nt, Artificial Sequence
  derived and/or modified CDS sequence (wt) from hemagglutinin__InfluenzaA__BAJ40064
augaaggcaauacuaguaguucugcuauauacauuugcaaccgcaaaugcagacacauuauguauagguuaucaugcgaacaauucgacagacacuguagacacaguacuagaaaagaauguaacaguaacacacucuguuaaccuucuagaagacaagcauaacgggaaacuaugcaaacuaagagggguagccccauugcauuuggguaaauguaacauugcuggcuggauccugggaaauccagagugugaaucacucuccacagcaagcucaugguccuacauuguggaaacaucuaguucagacaauggaacguguuacccaggagauuucaucgauuaugaggagcuaagagagcaauugagcucagugucaucauuugaaagguuugagauauuccccaagacaaguucauggcccaaucaugacucgaacaaagguguaacggcagcauguccucaugcuggagcaaaaagcuucuacaaaaauuuaauauggcuaguuaaaaaaggaaauucauacccaaagcucagcaaauccuacauuaaugauaaagggaaagaaguccucgugcuauggggcauucaccauccaucuacuagugcugaccaacaaagucucuaucagaaugcagauacauauguuuuuguggggacaucaagauacagcaagaaguucaagccggaaauagcaauaagacccaaagugagggaucaagaagggagaaugaacuauuacuggacacuaguagagccgggagacaaaauaacauucgaagcaacuggaaaucuagugguaccgagauaugcauucgcaauggaaagaaaugcuggaucugguauuaucauuucagauacaccaguccacgauugcaauacaacuugucagacacccaagggugcuauaaacaccagccucccauuucagaauauacauccgaucacaauuggaaaauguccaaaauauguaaaaagcacaaaauugagacuggccacaggauugaggaaugucccgucuauucaaucuagaggccuauuuggggccauugccgguuucauugaagggggguggacagggaugguagauggaugguacgguuaucaccaucaaaaugagcaggggucaggauaugcagccgaccugaagagcacacagaaugccauugacgagauuacuaacaaaguaaauucuguuauugaaaagaugaauacacaguucacagcaguagguaaagaguucaaccaccuggaaaaaagaauagagaauuuaaauaaaaaaguugaugaugguuuccuggacauuuggacuuacaaugccgaacuguugguucuauuggaaaaugaaagaacuuuggacuaccacgauucaaaugugaagaacuuauaugaaaagguaagaagccaguuaaaaaacaaugccaaggaaauuggaaacggcugcuuugaauuuuaccacaaaugcgauaacacgugcauggaaagugucaaaaaugggacuuaugacuacccaaaauacucagaggaagcaaaauuaaacagagaagaaauagaugggguaaagcuggaaucaacaaggauuuaccagauuuuggcgaucuauucaacugucgccaguucauugguacugguagucucccugggggcaaucaguuucuggaugugcucuaaugggucucuacaguguagaauauguauuuaa

SEQ ID NO: 45817 - RNA, 1707 nt, Artificial Sequence
  derived and/or modified CDS sequence (wt) from hemagglutinin__InfluenzaA__BAK23398
auggagaaaauagugcuucuucuugcaauagucagucuuguuaaaagugaucagauuugcauugguuaccaugcaaacaacucgacagagcagguugacacaauaauggaaaagaacgucacuguuacacacgcccaagacauacuggaaaagacacacaacgggaaacucugcgaucuagauggagugaagccucuaauuuuaagagauuguaguguagcuggguggcuccucgggaauccaaugugugacgaauuccucaaugugccggaauggucuuacauaguggagaagaucaauccagucaaugaccucuguuacccagggaauuucaacgacuaugaagaacugaaacaccuauugagcagaauaaaccauuuugagaaaauucagaucuuccccaaaaguucuuggucagaccaugaagccucaucaggggugagcucagcauguccauaccagggaagauccuccuuuuuuagaaaugugguauggcuugucaaaaaggacaaugcauacccaacaauaaagaaaaguuacaauaauaccaaccaagaagaccuuuugauacugugggggauucaccauccaaaugaugcggcagagcagacaaggcucuaucaaaacccaacuaccuauauuuccguugggacaucaacacuaaaccagagauugguaccaaaaauagcuacuagaucuaagguaaaugggcaaaguggaaggauugaguucuuuuggacaauuuuaaaaucgaaugauguaauaaacuuugagaguaauggaaauuucauugcuccagaaaaugcauacaaaauugucaagaaaggggacucaacaauuaugaaaagugaguuggaauaugguaacugcaacaccaagugucaaacuccaauaggggcgauaaacuccaguaugccauuccacaacauccacccucucaccaucggggaaugccccaaauaugugaaaucaaacagauuaguccuugcuacugggcucagaaauagcccucgaggagagagaagaagaaaaaagagaggacuauuuggagcuauagcaggcuuuauagagggaggauggcagggaaugguagacgguugguauggguaccaccauagcaacgagcaggggaguggguacgcugcagacaaagaauccacucaaaaggcaauagauggagucaccaauaaggucaacucgaucauugacaaaaugaacacucaguuugaggcuguuggaagggaauuuaauaacuuagaaaggagaauagaaaauuuaaauaagaagauggaagacggauuccuagaugucuggacuuauaaugcugaacuucugguucucauggaaaaugagagaacucuagacuuucaugacucaaaugucaagaaccuuuacgacaagguccgacuacagcuuagggauaaugcaaaggagcuugguaacgguuguuucgaguucuaucacagaugugauaaugaauguauggaaaguguaaaaaacggaacguaugacuacccgcaguauucagaagaagcaagauuaaagagagaggaaauaaguggaguaaaauuggaaucaauaggaacuuaccaaauacugucaauuuauucaacaguggcgagcucccuagcacuggcaaucaugauggcuggucuauuuuuauggaugugcuccaaugggucguuacaaugcagaauuugcauuuaa

SEQ ID NO: 45818 - RNA, 1707 nt, Artificial Sequence
  derived and/or modified CDS sequence (wt) from hemagglutinin__InfluenzaA__BAK23400
auggagaaaauagugcuucuucuugcaauagucagucuuguuaaaagugaucaaauuugcauugguuaccaugcaaacaacucgacagaacagguugacacaauaauggaaaagaacgucacuguuacacacgcccaagacauacuggaaaagacacacaacgggaagcuaugcgaucuaaauggagugaagccucuaauuuuaagagauuguaguguagcuggauggcuccucgggaacccaaugugugacgaauuccucaaugugccggaauggucuuacauaguggagaagaucaauccagccaaugaccucuguuacccaggggauuucaacgacuaugaagaacugaaacaccuauugagcagaauaaaccauuuugagaaaauucagaucauccccaaaaguucuuggucagaucaugaagcaucgucaggagugagcucagcauguccauaccagggaagauccuccuuuuuuagaaaugugguauggcuuaucaaaaaggacaaugcauacccaacaauaaaaagaaguuacaauaauaccaaccaagaagaucuuuugguacugugggggauucaccauccgaaugaugcggcagagcagacaaggcucuaucauaacccaacuaccuauauuuccguugggacaucaacacuaaaccagagauugguaccaaaaauagcuacuagaucuaagguaaaugggcaaaguggaaggauggaguucuuuuggacaauuuuaaaaccgaaugaugcaauaaacuuugagaguaauggaaauuucauugcuccagaaaaugcauacaaaauugucaagaaaggggacucaacaauuaugaaaagugaguuggaauaugguaacugcaacaccaagugucaaacuccaauaggggcgauaaacuccaguaugccauuccacaacauccacccucucaccaucggggaaugccccaaauaugugaaaucaagcagauuaguccuugcuacugggcucagaaauaguccucaaggaaagaguagaagaaaaaagagaggacuauuuggagcuauagcaggguuuauagagggaggauggcagggaaugguagaugguugguauggguaccaccauagcaacgagcaggggaguggguacgcugcagacaaagaauccacucaaagggcaauagauggagucaccaauaaggucaacucgaucauugacaaaaugaacacucaguuugaggcuguuggaagggaauuuaauaacuuagaaaggagaauagaaaauuuaaacaagaagauggaagacggauuccuagaugucuggacuuauaaugcugaacuucugguucucauggaaaaugagagaacucuagacuuucaugacucaaauguuaagaaucuuuacgacaagguccgacuacagcuuagggauaaugcaaaggagcuuggcaacgguuguuucgaguucuaucacagaugugauaaugaauguauggaaaguguaagaaacggaacguaugacuacccgcaguauucagaagaagcaagauuaaaaagagaggaaauaaguggaguaaaauuggaaucaauaggaauuuaccaaauacugucaauuuauucaacaguggcgagcucccuagcacuggcaaucaugguggcuggucuauuuuuauggaugugcuccaauggaucguuacaaugcagaauuugcauuuaa

SEQ ID NO: 45819 - RNA, 1707 nt, Artificial Sequence
  derived and/or modified CDS sequence (wt) from hemagglutinin__InfluenzaA__BAK23401
auggagaaaauagugcuucuucuugcaauagucagucuuguuaaaagugaucagauuugcauugguuaccaugcaaacaacucaacagagcagguugacacaauaauggaaaagaacgucacuguuacacacgcucaagacauacuggaaaagacacacaacgggaaacucugcgaucuagauggagugaagccucuaauuuuaagagauuguaguguagcuggauggcuccucgggaacccaaugugugacgaauuccucaaugugucggaauggucuuacauaguggagaagaucaauccagccaaugaccucuguuacccagggaauuucaacaacuaugaagaacugaaacaccuauugagcagaauaaaccguuuugagaaaauucagaucauccccaaaaguucuuggccagaucaugaagccucacuaggagugagcucagcauguccauaccagggaggacccuccuuuuauagaaaugugguauggcuuaucaaaaagaacaauacauacccaauaauaaagaaaaguuaccauaauaccaaucaagaagaucuuuuggugcugugggggauucaucauccaaaugaugaggaagagcagacaaggaucuauaaaaacccaacuaccuauauuuccguugggacaucaacacuaaaccagagauugguaccaaagauagccacuagaucuaagguaaacgggcaaaguggaaggguggaguucuuuuggacaauuuuaaaaucaaaugauacaauaaacuuugagaguaauggaaauuucauugcuccagaaaaugcauacaaaauugucaagaagggggacucaacaauuaugaaaagugaguuggaauaugguaacugcaacaccaagugucaaacuccaauaggggcgauaaacuccaguaugccauuccacaacauccacccucucaccaucggggaaugccccaaauaugugaaaucaaacagauuaguccuugcuacugggcucagaaauagcccucaaggagagagaagaagaaaaaagagaggacuauuuggagcuauagcagguuuuauagagggaggauggcagggaaugguagaugguugguauggguaccaccauagcaacgagcaggggaguggguacgcugcagacaaagaauccacucaaaaggcaauagauggagucaccaauaaggucaacucgaucauugacaaaaugaacauucaguuugaggcuguuggaagggaauuuaauaacuuggaaaggagaauagaaaauuuaaacaagaagauggaagacggguuccuagaugucuggacuuauaaugcugaacuucugguucucauggaaaaugagagaacucuagauuuucaugacucaaaugucaagaaccuuuaugacaaggugcgacuacagcuuagggauaaugcaaaggagcuugguaacgguuguuucgaguucuaucacagaugcgauaaugaauguauggaaaguguaagaaacggaacguaugacuacccgcaguauucagaagaagcaagauuaaaaagagaggaaauaaguggaguaaaauuggaaucaauaggaacuuaccaaauacuaucaauuuauucaacaguggcaaguucccuagcacuggcaaucaugguggcuggucuauuuuuauggaugugcuccaauggaucguuacaaugcagaauuugcauuuaa

SEQ ID NO: 45820 - RNA, 1707 nt, Artificial Sequence
  derived and/or modified CDS sequence (wt) from hemagglutinin__InfluenzaA__BAK23402
auggagaaaauagugcuucuucuugcaauagucagucuuguuaaaagugaucagauuugcauugguuaccaugcaaacaacucgacagagcagguugacacaauaauggaaaagaaugucacuguuacacacgcccaagacauacuggaaaagacacacaacgggaagcucugcgaucuagauggaguuaagccucuaauuuuaagagauuguaguguagcuggauggcuccucgggaacccaaugugugacgaauuccucaaugugccggaauggucuuacauaguggagaagaucaauccagccaaugaccucuguuacccagggaauuucaacgacuaugaagaacugaaacaccuauugagcagaauaaaucauuuugagaaaauucagaucauccccaaaaguucuuggucaaaucaugaagccucaucaggagugagcucagcauguccauaccagggaagauccuccuuuuuuagaaaugugguauggcuuaucaaaaaggacaaugcauacccaacaauaaagauaaguuacaauaauaccaaccaagaagaucuuuugguacugugggggauucaccauccaaaugaugcggcagagcagacaaggcucuaucaaaacccaacuaccuauauuuccguugggacaucaacauuaaaccagagauugguaccaaaaauagcuacuagaucuaagguaaacgggcaaaguggaaggauggaguucuuuuggacaauuuuaaaaucgaaugaugcaauaaacuuugagaguaauggaaauuucauugcuccagaaaaugcauacaaaauugucaagaaaggggacucaacaauuaugaaaagugaguuggaauaugguaacugcaacaccaagugucaaacuccaauaggggcgauaaacuccaguaugccauuccacaacacccacccucucaccaucggggaaugccccaaauaugugaaaucaaacagauuaguccuugcuacugggcucagaaauagcccucauggagagagaagaagaaaaaagagaggacuauuuggagcuauagcagguuuuauagagggaggauggcagggaaugguagaugguugguauggguaccaccauagcaacgagcaggggaguggguacgcugcagacaaggaauccacucaaaaggcaauagauggagucaccaauaaggucaacucgaucauugacaaaaugaacacucaguuugaggcuguuggaagggaauuuaauaacuuagaaaggagaauagaaaauuuaaacaagaagauggaagacggauuccuagaugucuggacuuauaaugcugaacuucugguucucauggaaaaugagagaacucuagacuuucaugacucaaaugucaagaaccuuuacgacaagguccgacuacagcuuagggauaaugcaaaggagcuugguaacgguuguuucgaguucuaucacagaugugauaaugaauguauggaaaguguaagaaacggaacguaugacuacccgcaguauucagaagaagcaagauuaaaaagagaggaaauaaguggaguaaaauuggaaucaauaggaacuuaccaaauacugucaauuuauucaacaguggcgagcucccuagcacuggcaaucaugguggcuggucuauuuuuauggaugugcuccaauggaucguuacaaugcagaauuugcauuuaa

SEQ ID NO: 45821 - RNA, 1707 nt, Artificial Sequence
  derived and/or modified CDS sequence (wt) from hemagglutinin__InfluenzaA__BAK23403
auggagaaaauagugcuucuucuugcaauagucagucuuguuaaaagugaucagauuugcauugguuaccaugcaaacaacucgacagagcagguugacacaauaauggaaaagaaugucacuguuacacacgcccaagacauacuggaaaagacacacaacgggaagcucugcgaucuagauggaguuaagccucuaauuuuaagagauuguaguguagcuggauggcuccucgggaacccaaugugugacgaauuccucaaugugccggaauggucuuacauaguggagaagaucaauccagccaaugaccucuguuacccagggaauuucaacgacuaugaagaacugaaacaccuauugagcagaauaaaucauuuugagaaaauucagaucauccccaaaaguucuuggucaaaucaugaagccucaucaggagugagcucagcauguccauaccagggaagauccuccuuuuuuagaaaugugguauggcuuaucaaaaaggacaaugcauacccaacaauaaagauaaguuacaauaauaccaaccaagaagaucuuuugguacugugggggauucaccauccaaaugaugcggcagagcagacaaggcucuaucaaaacccaacuaccuauauuuccguugggacaucaacauuaaaccagagauugguaccaaaaauagcuacuagaucuaagguaaacgggcaaaguggaaggauggaguucuuuuggacaauuuuaaaaucgaaugaugcaauaaacuuugagaguaauggaaauuucauugcuccagaaaaugcauacaaaauugucaagaaaggggacucaacaauuaugaaaagugaguuggaauaugguaacugcaacaccaagugucaaacuccaauaggggcgauaaacuccaguaugccauuccacaacauccacccucucaccaucggggaaugccccaaauaugugaaaucaaacagauuaguccuugcuacugggcucagaaauagcccucaaggagagagaagaagaaaaaagagaggacuauuuggagcuauagcagguuuuauagagggaggauggcagggaaugguagaugguugguauggguaccaccauagcaacgagcaggggaguggguacgcugcagacaaggaauccacucaaaaggcaauagauggagucaccaauaaggucaacucgaucauugacaaaaugaacacucaguuugaggcuguuggaagggaauuuaauaacuuagaaaggagaauagaaaauuuaaacaagaagauggaagacggauuccuagaugucuggacuuauaaugcugaacuucugguucucauggaaaaugagagaacucuagacuuucaugacucaaaugucaagaaccuuuacgacaagguccgacuacagcuuagggauaaugcaaaggagcuugguaacgguuguuucgaguucuaucacagaugugauaaugaauguauggaaaguguaagaaacggaacguaugacuacccgcaguauucagaagaagcaagauuaaaaagagaggaaauaaguggaguaaaauuggaaucaauaggaacuuaccaaauacugucaauuuauucaacaguggcgagcucccuagcacuggcaaucaugguggcuggucuauuuuuauggaugugcuccaauggaucguuacaaugcagaauuugcauuuaa

SEQ ID NO: 45822 - RNA, 1707 nt, Artificial Sequence
  derived and/or modified CDS sequence (wt) from hemagglutinin__InfluenzaA__BAK23404
auggagaaaauagugcuucuucuugcaauagucagucuuguuaaaagugaucagauuugcauugguuaccaugcaaacaacucgacagagcagguugacacaauaauggaaaagaacgucacuguuacacacgcccaagacauacuggaaaagacacacaacgggaaacucugcgaucuagauggagugaagccucuaauuuuaagagauuguaguguagcuggauggcuccucgggaacccaaugugugacgaauuccucaaugugccggaauggucuuacauaguggagaagaucaauccagccaaugaccucuguuacccagggaauuucaacgacuaugaagaacugaaacaccuauugagcagaauaaaccauuuugagaaaauucagaucauccccaaaaguucuuggucagaucaugaagccucaucaggagugagcucagcauguccauaccagggaagauccuccuuuuuuagaaaugugguauggcuuaucaaaaaggacaaugcauacccaacaauaaagagaaguuacaauaauaccaaccaagaagaucuuuugguacugugggggauucaccauccgaaugaugcggcagagcagacaaggcucuaucaaaacccaacuaccuauauuuccguugggacaucaacacuaaaccagagauugguaccaaaaauagcuacuagaucuaagguaaacgggcaaaguggaaggauggaguucuuuuggacaauuuuaaaaucgaaugaugcaauaaacuuugagaguaauggaaauuucauugcuccagaaaaugcauacaaaauugucaagaaaggggacucaacaauuaugaaaagugaguuggaauaugguaacugcaacaccaagugucaaacuccaauaggggcgauaaacuccaguaugccauuccacaacauccacccucucaccaucggggaaugccccaaauaugugaaaucaaacagauuaguccuugcuacugggcucagaaauagcccucaaggagagagaagaagaaaaaagagaggacuauuuggagcuauagcagguuuuauagagggaggauggcagggaaugguagaugguugguauggguaccaccauagcaacgagcaggggaguggguacgcugcagacaaagaauccacucaaaaggcaauagauggagucaccaauaaggucaacucgaucauugacaaaaugaacacucaguuugaggcuguuggaagggaauuuaauaacuuagaaaggagaauagaaaauuuaaacaagaagauggaagacggauuccuagaugucuggacuuauaaugcugaacuucugguucucauggaaaaugagagaacucuagacuuucaugacucaaaugucaagaaccuuuacgacaagguccggcuacagcuuagggauaaugcaaaggagcuugguaacgguuguuucgaguucuaucacagaugugauaaugaauguauggaaaguguaagaaacggaacguaugacuacccgcaguauucagaagaagcaagauuaaaaagagaggaaauaaguggaguaaaauuggaaucaauaggaacuuaccaaauacugucaauuuauucaacaguggcgagcucccuagcacuggcaaucaugguggcuggucuauuuuuauggaugugcuccaauggaucguuacaaugcagaauuugcauuuaa

SEQ ID NO: 45823 - RNA, 1707 nt, Artificial Sequence
  derived and/or modified CDS sequence (wt) from hemagglutinin__InfluenzaA__BAK23405
auggagaaaauagugcuucuucuugcaauagucagucuuguuaaaagugaucagauuugcauugguuaccaugcaaacaacucgacagagcagguugacacaauaauggaaaagaacgucacuguuacacacgcccaagacauacuggaaaagacacacaacgggaaacucugcgaucuagauggagugaagccucuaauuuuaagagauuguaguguagcuggauggcuccucgggaacccaaugugugacgaauuccucaaugugccggaauggucuuacauaguggagaagaucaauccagccaaugaccucuguuacccagggaauuucaacgacuaugaagaacugaaacaccuauugagcagaauaaaccauuuugagaaaauucagaucauccccaaaaguucuuggucagaucaugaagccucaucaggagugagcucagcauguccauaccagggaagauccuccuuuuuuagaaaugugguauggcuuaucaaaaaggacaaugcauacccaacaauaaagagaaguuacaauaauaccaaccaagaagaucuuuugguacugugggggauucaccauccgaaugaugcggcagagcagacaaggcucuaucaaaacccaacuaccuauauuuccguugggacaucaacacuaaaccagagauugguaccaaaaauagcuacuagaucuaagguaaacgggcaaaguggaaggauggaguucuuuuggacaauuuuaaaaucgaaugaugcaauaaacuuugagaguaauggaaauuucauugcuccagaaaaugcauacaaaauugucaagaaaggggacucaacaauuaugaaaagugaguuggaauaugguaacugcaacaccaagugucaaacuccaauaggggcgauaaacuccaguaugccauuccacaacauccacccucucaccaucggggaaugccccaaauaugugaaaucaaacagauuaguccuugcuacugggcucagaaauagcccucaaggagagagaagaagaaaaaagagaggacuauuuggagcuauagcagguuuuauagagggaggauggcagggaaugguagaugguugguauggguaccaccauagcaacgagcaggggaguggguacgcugcagacaaagaauccacucaaaaggcaauagauggagucaccaauaaggucaacucgaucauugacaaaaugaacacucaguuugaggcuguuggaagggaauuuaauaacuuagaaaggagaauagaaaauuuaaacaagaagauggaagacggauuccuagaugucuggacuuauaaugcugaacuucugguucucauggaaaaugagagaacucuagacuuucaugacucaaaugucaagaaccuuuacgacaagguccgacuacagcuuagggauaaugcaaaggagcuugguaacgguuguuucgaguucuaucacagaugugauaaugaauguauggaaaguguaagaaacggaacguaugacuacccgcaguauucagaagaagcaagauuaaaaagagaggaaauaaguggaguaaaauuggaaucaauaggaacuuaccaaauacugucaauuuauucaacaguggcgagcucccuagcacuggcaaucaugguggcuggucuauuuuuauggaugugcuccaauggaucguuacaaugcagaauuugcauuuaa

SEQ ID NO: 45824 - RNA, 1707 nt, Artificial Sequence
  derived and/or modified CDS sequence (wt) from hemagglutinin__InfluenzaA__BAK23406
auggagaaaauagugcuucuucuugcaauagucagucuuguuaaaagugaucagauuugcauugguuaccaugcaaacaacucgacagagcagguugacacaauaauggaaaagaacgucacuguuacacacgcccaagacauacuggaaaagacacacaacgggaaacucugcgaucuagauggagugaagccucuaauuuuaagagauuguaguguagcuggguggcuccucgggaacccaaugugugacgaauuccucaaugugccggaauggucuuacauaguggagaagaucaauccagucaaugaccucuguuacccagggaauuucaacgacuaugaagaacugaaacaccuauugagcagaauaaaccauuuugagaaaauucagaucuuccccaaaaguucuuggucagaccaugaagccucaucaggggugagcucagcauguccauaccagggaagauccuccuuuuuuagaaaugugguauggcuugucaaaaaggacaaugcauacccaacaauaaagaaaaguuacaauaauaccaaccaagaagaucuuuugauacugugggggauucaccauccaaaugaugcggcagagcagacaaggcucuaucaaaacccaacuaccuauauuuccguugggacaucaacacuaaaccagagauugguaccaaaaauagcuacuagaucuaagguaaacgggcaaaguggaaggauugaguucuuuuggacaauuuuaaaaucgaaugauguaauaaacuuugagaguaauggaaauuucauugcuccagaaaaugcauacaaaauugucaagaaaggggacucaacaauuaugaaaagugaguuggaauaugguaacugcaacaccaagugucaaacuccaauaggggcgauaaacuccaguaugccauuccacaacauccacccucucaccaucggggaaugccccaaauaugugaaaucaaacagauuaguccuugcuacugggcucagaaauagcccucaaggagagagaagaagaaaaaagagaggacuauuuggagcuauagcaggcuuuauagagggaggauggcagggaaugguagacgguugguauggguaccaccauagcaacgagcaggggaguggguacgcugcagacaaagaauccacucaaaaggcaauagauggagucaccaauaaggucaacucgaucauugacaaaaugaacacucaguuugaggcuguuggaagggaauuuaauaacuuagaaaggagaauagaaaauuuaaauaagaagauggaagacggauuccuagaugucuggacuuauaaugcugaacuucugguucucauggaaaaugagagaacucuagacuuucaugacucaaaugucaagaaccuuuacgacaagguccgacuacagcuuagggauaaugcaaaggagcuugguaacgguuguuucgaguucuaucacagaugugauaaugaauguauggaaaguguaaaaaacggaacguaugacuacccgcaguauucagaagaagcaagauuaaagagagaggaaauaaguggaguaaaauuggaaucaauaggaacuuaccaaauacugucaauuuauucaacaguggcgagcucccuagcacuggcaaucaugauggcuggucuauuuuuauggaugugcuccaaugggucguuacaaugcagaauuugcauuuaa

SEQ ID NO: 45825 - RNA, 1707 nt, Artificial Sequence
  derived and/or modified CDS sequence (wt) from hemagglutinin__InfluenzaA__BAK23407
auggagaaaauagugcuucuucuugcaauagucagucuuguuaaaaguggucagauuugcauugguuaccaugcaaacaacucaacagagcagguugacacaauaauggaaaagaacgucacuguuacacacgcucaagacauacuggaaaagacacacaacgggaaacucugcgaucuagauggagugaagccucuaauuuuaagagauuguaguguagcuggauggcuccucgggaacccaaugugugacgaauuccucaaugugucggaauggucuuacauaguggagaagaucaauccagccaaugaccucuguuacccagggaauuucaacaacuaugaagaacugaaacaccuauugagcagaauaaaccguuuugagaaaauucagaucauccccaaaaguucuuggccagaucaugaagccucauuaggagugagcgcagcauguccauaccagggaggacccuccuuuuauagaaaugugguauggcuuaucaaaaagaacaauacauacccaacaauagagaaaaguuaccauaauaccaaucaagaagaucuuuuggugcugugggggauucaccauccaaaugaugaggcagagcagacaaggaucuauaaaaacccaacuaccuauauuuccguugggacaucaacacuaaaccagagauugguaccaaagauagccacuagaucuaagguaaacgggcaaaguggaaggguggaguucuuuuggacaauuuuaaaaucaaaugauacaauaaacuuugagaguaauggaaauuucauugcuccagaaaaugcauacaaaauugucaagaaaggggacucaacaauuaugaaaagugaguuggaauaugguaacugcaacaccaggugucaaacuccaauaggggcgauaaacuccaguaugccauuccacaacauccacccucucaccaucggggaaugccccaaauaugugaaaucaaacagauuaguccuugcuacugggcucagaaauagcccucaaggagagagaagaagaaaaaagagaggacuauuuggagcuauagcagguuuuauagagggaggauggcagggaaugguagaugguugguauggguaccaccauagcaacgagcaggggaguggguacgcugcagacaaagaauccacucaaaaggcaauagauggagucaccaauaaggucaacucgaucauugacaaaaugaacacucaguuugaggcuguuggaagggaauuuaauaacuuggaaaggagaauagaaaauuuaaacaagaagauggaagacggguuccuagaugucuggacuuauaaugcugaacuucugguucucauggaaaaugagagaacucuagacuuucaugacucaaaugucaagaaccuuuacgacaaggugcgacuacagcuuagggauaaugcaaaggagcuugguaacgguuguuucgaguucuaucacagaugcgauaaugaauguauggaaaguguaagaaacggaacguaugacuacccgcaguauucagaagaagcaagauuaaaaagagaggaaauaaguggaguaaaauuggaaucaauaggaacuuaccaaauacuaucaauuuauucaacaguggcaaguucccuagcacuggcaaucaugguggcuggucuauuuuuauggaugugcuccaauggaucguuacaaugcagaauuugcauuuaa

SEQ ID NO: 45826 - RNA, 1707 nt, Artificial Sequence
  derived and/or modified CDS sequence (wt) from hemagglutinin__InfluenzaA__BAK23408
auggagaaaauagugcuucuucuugcaauagucagucuuguuaaaagugaucagauuugcauugguuaccaugcaaacaacucaacagagcaaguugacacaauaauggaaaagaacgucacuguuacacacgcucaagacauacuggaaaagacacacaacgggaaacucugcgaucuagauggagugaagccucuaauuuuaagagauuguaguguagcuggauggcuccucgggaacccaaugugugacgaauuccccaaugugucggaauggucuuacauaguggagaagaucaauccagccaaugaccucuguuacccagggaauuucaacaacuaugaagaacugaaacaccuauugagcagaauaaaccguuuugagaaaauucagaucauccccaaaaguucuuggccagaucaugaagccucauuaggagugagcucagcaugucaauaccagggaggacccuccuuuuauagaaaugugguauggcuuaucaaaaaggacaaugcauacccaacaauaaagaaaaguuaccauaauaccaauaaagaagaucuuuugguacugugggggauucaccauccaaauaaugaggaagagcagacaaagcucuaucaaaacccaacuaccuauauuuccguugggacaucaacacuaaaccagagauugguaccaaagauagcuacuagaucuaagguaaacgggcaaaguggaaggguggaguucuuuuggacaauuuuaaaaucgaaugaugcaauaaacuuugagaguaauggaaauuucauugcuccagaaaaugcauacaaaauugucaagaaaggggacucaacaauuaugaaaagugaguuggaauaugguaacuacaacaccaagugucaaacuccaauaggggcgauaaacuccaguaugccauuccacaacauccacccucucaccaucggggaaugccccaaauaugugaagucaaacagauuaguccuugcuacugggcucagaaauagcccucaaggagagagaagaagaaaaaagagaggacuauuuggagcuauagcagguuuuauagagggaggauggcagggaaugguagaugguugguauggguaccaccauagcaacgagcaggggaguggguacgcugcagacaaagaauccacucaaaaggcaauagauggagucaccaauaaagucaacucgaucauugacaaaaugaacacucaguuugaggcuguuggaaaggaauuuaauaacuuagaaaggagaauagaaaauuuaaacaagaagauggaagacggauuccuagaugucuggacuuauaaugcugaacuucugguucucauggaaaaugagagaacucuagacuuucaugacucaaaugucaagaaccuuuacgacaaggugcgacuacagcuuagggauaacgcaaaggagcuugguaacgguuguuucgaguucuaucacagaugugauaaugaauguauggaaaguguaagaaacggaacguaugacuacccgcaguauucugaagaagcaagauuaaaaagagaggaaauaaguggaguaaaguuggagucaauaggaacuuaccaaauacugucaauuuacucaacaguggcaaguucccuagcacuggcaaucaugguggcuggucuauuuuuauggaugugcuccaauggaucguuacaaugcagaauuugcauuuaa

SEQ ID NO: 45827 - RNA, 1707 nt, Artificial Sequence
  derived and/or modified CDS sequence (wt) from hemagglutinin__InfluenzaA__BAK23411
auggagaaaauagugcuucuucuugcaauagucagucuuguuaaaagugaucagauuugcauugguuaccaugcaaacaacucaacagagcagguugacacaauaauggaaaagaacgucacuguuacacacgcucaagacauacuggaaaagacacacaacgggaaacucugcgaucuagauggagugaagccucuaauuuuaagagauuguaguguagcuggauggcuccucgggaacccaaugugugacgaauuccucaaugugucggaauggucuuacauaguggagaagaucaauccagccaaugaccucuguuacccagggaauuucaacaacuaugaagaacugaaacaccuauugagcagaauaaaccguuuugagaaaauucagaucauccccaaaaguucuuggccagaucaugaagccucauuaggagugagcucagcaugucaauaccagggaggacccuccuuuuauagaaaugugguauggcuuaucaaaaaggacaaugcauacccaacaauaaagaaaaguuaccauaauaccaauaaagaagaucuuuugguacugugggggauucaccauccaaauaaugaggaagagcagacaaagcucuaucaaaacccaacuaccuauauuuccguugggacaucaacacuaaaccagagauugguaccaaagauagcuacuagaucuaagguaaacgggcaaaguggaaggguggaguucuuuuggacaauuuuaaaaucgaaugaugcaauaaacuuugagaguaauggaaauuucauugcuccagaaaaugcauacaaaauugucaagaaaggggacucaacaauuaugaaaagugaguuggaauaugguaacugcaacaccaagugucaaacuccaauaggggcgauaaacuccaguaugccauuccacaacauccacccucucaccaucggggaaugccccaaauaugugaagucaaacagauuaguccuugcuacugggcucagaaauagcccucaaggagagagaagaagaaaaaagagaggacuauuuggagcuauagcagguuuuauagagggaggauggcagggaaugguagaugguugguauggguaccaccauagcaacgagcaggggaguggguacgcugcagacaaagaauccacucaaaaggcaauagauggagucaccaauaaagucaacucgaucauugacaaaaugaacacucaguuugaggcuguuggaaaggaauuuaauaacuuagaaaggagaauagaaaauuuaaacaagaagauggaagacggauuccuagaugucuggacuuauaaugcugaacuucugguucucauggaaaaugagagaacucuagacuuucaugacucaaaugucaagaaccuuuacgacaaggugcgacuacagcuuagggauaacgcaaaggagcuugguaacgguuguuucgaguucuaucacagaugugauaaugaauguauggaaaguguaagaaacggaacguaugacuacccgcaguauucugaagaagcaagauuaaaaagagaggaaauaaguggaguaaaguuggagucaauaggaacuuaccaaauacugucaauuuacucaacaguggcaaguucccuagcacuggcaaucaugguggcuggucuauuuuuauggaugugcuccaauggaucguuacaaugcagaauuugcauuuaa

SEQ ID NO: 45828 - RNA, 1707 nt, Artificial Sequence
  derived and/or modified CDS sequence (wt) from hemagglutinin__InfluenzaA__BAK23412
auggagaaaauagugcuucuucuugcaauagucagucuuguuaaaagugaucagauuugcauugguuaccaugcaaacaacucaacagagcagguugacacaauaauggaaaagaacgucacuguuacacacgcucaagacauacuggaaaagacacacaaagggaaacucugcgaucuagauggagugaagccucuaauuuuaagagauuguaguguagcuggauggcuccucgggaacccaaugugugacgaauuccucaaugugucggaauggucuuacauaguggagaagaucaauccagccaaugaccucuguuacccagggaauuucaacaacuaugaagaacugaaacaccuauugagcagaauaaaccguuuugagaaaauucagaucauccccaaaaguucuuggccagaucaugaagccucauuaggagugagcucagcaugucaauaccagggaggacccuccuuuuauagaaaugugguauggcuuaucaaaaaggacaauacauacccaacaauaaagaaaaguuaccauaauaccaauaaagaagaucuuuugguacugugggggauucaccauccaaauaaugaggaagagcagacaaagcucuaucaaaacccaacuaccuauauuuccguugggacaucaacacuaaaccagagauugguaccaaagauagcuacuagaucuaagguaaacgggcaaaguggaaggguggaguucuuuuggacaauuuuaaaaucgaaugaugcaauaaacuuugagaguaauggaaauuucauugcuccagaaaaugcauacaaaauugucaagaaaggggacucaacaauuaugaaaagugaguuggaauaugguaacugcaacaccaagugucaaacuccaauaggggcgauaaacuccaguaugccauuccacaacauccacccucucaccaucggggaaugccccaaauaugugaagucaaacagauuaguccuugcuacugggcucagaaauagcccucaaggagagagaagaagaaaaaagagaggacuauuuggagcuauagcagguuuuauagagggaggauggcagggaaugguagaugguugguauggguaccaccauagcaacgagcaggggaguggguacgcugcagacaaagaauccacucaaaaggcaauagauggagucaccaauaaagucaacucgaucauugacaaaaugaacacucaguuugaggcuguuggaaaggaauuuaauaacuuagaaaggagaauagaaaauuuaaacaagaagauggaagacggauuccuagaugucuggacuuauaaugcugaacuucugguucucauggaaaaugagagaacucuagacuuucaugacucaaaugucaagaaccuuuacgacaaggugcgacuacagcuuagggauaacgcaaaggagcuugguaacgguuguuucgaguucuaucacagaugugauaaugaauguauggaaaguguaagaaacggaacguaugacuacccgcaguauucugaagaagcaagauuaaaaagagaggaaauaaguggaguaaaguuggagucaacaggaacuuaccaaauacugucaauuuacucaacaguggcaaguucccuagcacuggcaaucaugguggcuggucuauuuuuauggaugugcuccaauggaucguuacaaugcagaauuugcauuuaa

SEQ ID NO: 45829 - RNA, 1707 nt, Artificial Sequence
  derived and/or modified CDS sequence (wt) from hemagglutinin__InfluenzaA__BAK23413
auggagaaaauagugcuucuucuugcaauagucagucuuguuaaaagugaucagauuugcauugguuaccaugcaaacaacucaacagagcagguugacacaauaauggaaaagaacgucacuguuacacacgcucaagacauacuggaaaagacacacaacgggaaacucugcgaucuagauggagugaagccucuaauuuuaagagauuguaguguagcuggauggcuccucgggaacccaaugugugacgaauuccucaaugugucggaauggucuuacauaguggagaagaucaauccagccaaugaccucuguuacccagggaauuucaacaacuaugaagaacugaaacaccuauugagcagaauaaaccguuuugagaaaauucagaucauccccaaaaguucuuggccagaucaugaagccucauuaggagugagcucagcaugucaauaccagggaggacccuccuuuuauagaaaugugguauggcuuaucaaaaaggacaauacauacccaacaauaaagaaaaguuaccauaauaccaauaaagaagaucuuuugguacugugggggauucaccauccaaauaaugaggaagagcagacaaagcucuaucaaaacccaacuaccuauauuuccguugggacaucaacacuaaaccagagauugguaccaaagauagcuacuagaucuaagguaaacgggcaaaguggaaggguggaguucuuuuggacaauuuuaaaaucgaaugaugcaauaaacuuugagaguaauggaaauuucauugcuccagaaaaugcauacaaaauugucaagaaaggggacucaacaauuaugaaaagugaguuggaauaugguaacugcaacaccaagugucaaacuccaauaggggcgauaaacuccaguaugccauuccacaacauccacccucucaccaucggggaaugccccaaauaugugaagucaaacagauuaguccuugcuacugggcucagaaauagcccucaaggagagagaagaagaaaaaagagaggacuauuuggagcuauagcagguuuuauagagggaggauggcagggaaugguagaugguugguauggguaccaccauagcaacgagcaggggaguggguacgcugcagacaaagaauccacucaaaaggcaauagauggagucaccaauaaagucaacucgaucauugacaaaaugaacacucaguuugaggcuguuggaaaggaauuuaauaacuuagaaaggagaauagaaaauuuaaacaagaagauggaagacggauuccuagaugucuggacuuauaaugcugaacuucugguucucauggaaaaugagagaacucuagacuuucaugacucaaaugucaagaaccuuuacgacaaggugcgacuacagcuuagggauaacgcaaaggagcuugguaacgguuguuucgaguucuaucacagaugugauaaugaauguauggaaaguguaagaaacggaacguaugacuacccgcaguauucugaagaagcaagauuaaaaagagaggaaauaaguggaguaaaguuggagucaauaggaacuuaccaaauacugucaauuuacucaacaguggcaaguucccuagcacuggcaaucaugguggcuggucuauuuuuauggaugugcuccaauggaucguuacaaugcagaauuugcauuuaa

SEQ ID NO: 45830 - RNA, 1707 nt, Artificial Sequence; identical to SEQ ID NO: 45827
  derived and/or modified CDS sequence (wt) from hemagglutinin__InfluenzaA__BAK23414

SEQ ID NO: 45831 - RNA, 1698 nt, Artificial Sequence
  derived and/or modified CDS sequence (wt) from hemagglutinin__InfluenzaA__BAM65746
auggaaguaaaacuacugguccuguuaugcacauuuacagcuacauaugcagacacaauauguauaggcuaccaugccaacaacucaaccgauacuguugacacauuacccgagaagaaugugacagugacacacucugucaaccugcuugaggacacucacaaugggaaauuaugucuauuaaaaggaauagccccacuacaauuggguaauugcagcguugccggauggaucuuaggaaacccagaaugcgaauuacugauuuccagggaaucaugguccuacauuguagaaaaaccaaauccugagaauggaauauguuacccagggcauuucgccgacuaugaggaacugagggaacaacugaguucaguaucuucauuugagagauucgaaauauuccccaaagaaagcucauggcccaaccauaccgcaaccggaguaucagcaucaugcucccauaaugggaaaagcaguuuuuacaaaaacuugcuguggcugacggugaagaaugguuuguacccaaaccugagcaaguccuaugcaaacaacaaagagaaagaaguccuugugcuaugggguguucaucacccgacuaacauaggugaccaaagggcccucuaucauacagaaaaugcuuaugucucuguagugucuucacauuauagcagaagauucaccccagaaauagccaaaagacccaaaguaagagaucaagaaggaagaaucaacuacuacuggacucugcuugaacccggggauacaauaauauuugaggcaaauggaaaucuaauagcgccaagauaugcguucgcacugaguaggggcuuuggaucaggaaucaucaaaucaaaugcaccaauggaugaauguaaugcgaagugccaaacaccucagggagccauaaacagcagucuuccuuuccagaauguacacccagucacaauaggagaguguccaaaguaugucaggaguacaaaauuaaggaugguuacaggacuaaggaacaccccauccauucaaucuagagguuuguuuggagccauugccgguuucauugaagggggguggacuggaaugguagaugguugguaugguuaucaccaucaaaaugagcaaggaucuggcuaugcugcagaucaaaaaagcacacaaaaugccauuaaugggauuacaaacaaggugaauucuguaauugagaaaaugaacacucaauucacagcuguggacaaagaauucaacaaacuggaaagaaggauggaaaacuuuaauaaaaagguugaugauggguuuauagacauuuggacauauaaugcagaauuguugauucuacuggaaaaugaaaggacucuggauuuccaugacuccaaugugaagaaucuguaugagaaaguaaaaagccaauuaaagaauaaugccaaagaaauaggaaauggauguuuugaauucuaucacaaguguaacgaugaaugcauggagaguguaaaaaauggaacuuaugacuauccaaaauauuccgaagaaucaaaguuaaacagggagaaaauugauggagugaaauuggaaucaaugggagucuaucagauucuggcgaucuacucaacagucgccaguucuaugguucuuuuggucucccugggggcaaucagcuucuggauguguuccaaugggucuuugcaguguagaauaugcaucuag

SEQ ID NO: 45832 - RNA, 1701 nt, Artificial Sequence
  derived and/or modified CDS sequence (wt) from hemagglutinin__InfluenzaA__BAO79716
augaagacuaucauugcuuugagcuacauucuaugucugguuuucgcucaaaaacuuccuggaaaugacaauagcacggcaacgcugugccuugggcaccaugcaguaccaaacggaacgauagugaaaacaaucacgaaugaccgaauugaaguuacuaaugcuacugagcugguucagaauuccucaauaggugaaauaugcaacaguccucaucagauccuugauggagaaaacugcacacuaauagaugcucuauugggagacccucagugugauggcuuucaaaauaagaaaugggaccuuuuuguugaacgaagcaaagcauacagcaacuguuacccuuaugaugugccggauuaugccucccuuaggucacuaguugccucauccggcacacuggaguuuaacaaugaaagcuucaauugggcuggagucacucaaaacggaacaaguucugcuugcauaaggggaucuaauaguaguuucuuuaguagauuaaauugguugacccacuuaaacuucaaauacccagcauugaacgugacuaugccaaacaaugaacaauuugacaaauuguacauuugggggguccaccacccggguacggacaaggaccaaaucuuccuguaugcucaaucaucaggaagaaucacaguaucuaccaaaagaagccaacaagcuguaaucccgaauaucggaucuagacccagaauaaggaauaucccuagcagaauaagcaucuauuggacaauaguaaaaccgggagacauacuuuugauuaacagcacagggaaucuaauugcuccuagggguuacuucaaaauacgaagugggaaaagcucaauaaugaggucagaugcacccauuggcaaaugcaagucugaaugcaucacuccaaauggaagcauucccaaugacaaaccauuccaaaauguaaacaggaucacauacggggccugucccagauauguuaagcaaagcacucugaaauuggcaacaggaaugcgaaauguaccggagaaacaaacuagaggcauauuuggcgccauagcggguuucauagaaaaugguugggagggaaugauggaugguugguacgguuucaggcaucaaaauucugagggaagaggacaagcagcagaucucaaaagcacucaaucagcaaucgaucaaaucaaugggaagcugaaucgauugaucgggaaaaccaacgagaaauuccaucagauugaaaaagaauucucagaaguagaagggagaauucaggaccuugagaaauauguugaggacacaaaaauagaucucuggucauacaacgcggagcuucuuguugcccuggagaaccaacauacaauugaucuaacugacucagaaaugaacaaacuguuugaaaaaacaaagaagcaacugagggaaaaugcugaggauaugggcaaugguuguuucaaaauauaccacaaaugugacaaugccugcauaggaucaaucagaaauggaacuuaugaccacgauguauacagggaugaagcauuaaacaaccgguuccagaucaaggggguugagcugaagucaggguacaaagauuggauccuauggauuuccuuugccauaucauguuuuuugcuuuguguugcuuuguugggguucaucaugugggccugccaaaagggcaacauuaggugcaacauuugcauuuga

SEQ ID NO: 45833 - RNA, 1683 nt, Artificial Sequence
  derived and/or modified CDS sequence (wt) from hemagglutinin__InfluenzaA__CAB95856
auggaaacaauaucacuaauaacuauacuacuaguaguaacagcaagcaaugcagauaaaaucugcaucggccaccagucaacaaacuccacagaaacuguggacacgcuaacagaaaccaauguuccugugacacaugccaaagaauugcuccacacagagcauaauggaaugcugugugcaacaagccugggacauccccucauucuagacacaugcacuauugaaggacuagucuauggcaacccuucuugugaccugcuguugggaggaagagaaugguccuacaucgucgaaagaucaucagcuguaaauggaacguguuacccugggaauguagaaaaccuagaggaacucaggacacuuuuuaguuccgcuaguuccuaccaaagaauccaaaucuucccagacacaaccuggaaugugacuuacacuggaacaagcagagcauguucagguucauucuacaggaguaugagauggcugacucaaaagagcgguuuuuacccuguucaagacgcccaauacacaaauaacaggggaaagagcauucuuuucguguggggcauacaucacccacccaccuauaccgagcaaacaaauuuguacauaagaaacgacacaacaacaagcgugacaacagaagauuugaauaggaccuucaaaccagugauagggccaaggccccuugucaauggucugcagggaagaauugauuauuauuggucgguacuaaaaccaggccaaacauugcgaguacgauccaaugggaaucuaauugcuccaugguauggacacguucuuucaggagggagccauggaagaauccugaagacugauuuaaaaggugguaauuguguagugcaaugucagacugaaaaagguggcuuaaacaguacauugccauuccacaauaucaguaaauaugcauuuggaaccugccccaaauauguaagaguuaauagucucaaacuggcagucggucugaggaacgugccugcuagaucaaguagaggacuauuuggagccauagcuggauucauagaaggagguuggccaggacuagucgcuggcugguaugguuuccagcauucaaaugaucaagggguugguauggcugcagauagggauucaacucaaaaggcaauugauaaaauaacauccaaggugaauaauauagucgacaagaugaacaagcaauaugaaauaauugaucaugaauucagugagguugaaacuagacucaauaugaucaauaauaagauugaugaccaaauacaagacguaugggcauauaaugcagaauugcuaguacuacuugaaaaucaaaaaacacucgaugagcaugaugcgaacgugaacaaucuauauaacaaggugaagagggcacugggcuccaaugcuauggaagaugggaaaggcuguuucgagcuauaccauaaaugugaugaucagugcauggaaacaauucggaacgggaccuauaauaggagaaaguauagagaggaaucaagacuagaaaggcagaaaauagaggggguuaagcuggaaucugagggaacuuacaaaauccucaccauuuauucgacugucgccucaucucuugugcuugcaaugggguuugcugccuuccuguucugggccauguccaauggaucuugcagaugcaacauuuguauauaa

SEQ ID NO: 45834 - RNA, 1683 nt, Artificial Sequence
  derived and/or modified CDS sequence (wt) from hemagglutinin__InfluenzaA__CAB95857
auggaaacaauaucacuaauaacuauacuacuaguaguaacagcaagcaaugcagauaaaaucugcaucggccaccagucaacaaacuccacagaaacuguggacacgcuaacagaaaccaauguuccugugacacaugccaaagaauugcuccacacagagcacaauggaaugcugugugcaacaagucugggacauccccucauucuagacacaugcacuauugaaggauuagucuauggcaacccuucuugugaccugcuguuggaaggaagagaaugguccuacaucgucgaaagaucaucagcuguaaauggaacguguuacccugggaauguagaaaaccuagaggaacucaggacacuuuuuaguuccgcuaguuccuaccaaagaauccaaaucuucccagacacaaccuggaaugugacuuacacuggaacaagcagagcauguucagguucauucuacaggaguaugagauggcugacucaaaagagcgguuuuuacccuguucaagacgcccaauacacaaauaacaggggaaagagcauucuuuucguguggggcauacaucacccacccaccuauaccgaacaaacaaauuuguacauaagaaacgacacaacaacaagcgugacaacagaagauuugaauaggaccuucaaaccagugauagggccaaggccccuugucaauggucugcagggaagaauugauuauuauuggucgguacuaaaaccaggccaaacauugcgaguaagauccaaugggaaucuaauugcuccaugguauggacacguucuuucaggagggagccauggaagaauccugaagacugauuuaaaaagugguaauuguguagugcaaugucagacugaaaaagguggcuuaaacaguacauugccauuccacaauaucaguaaauaugcauuuggaaccugccccaaauauguaagaguuaauagucucaaacuggcagucggucugaggaacgugccugcuagaucaaguagaggacuauuuggagccauagcuggauucauagaaggagguuggccaggacuagucgcuggcugguaugguuuccagcauucaaaugaucaagggguugguauggcugcagauagggauucaacucaaaaggcaauugauaaaauaacauccaaggugaauaauauagucgacaagaugaacaagcaauaugaaauaauugaucaugaauucagugagguugaaacuagacucaauaugaucaauaauaagauugaugaccaaauacaagacguaugggcauauaaugcagaauugcuaguacuacuugaaaaucagaaaacacucgaugagcaugaugcgaacgugaacaaucuauauaacaaggugaagagggcacugggcuccaaugcuauggaagaugggaaaggcuguuucgagcuauaccauaaaugugaugaucagugcauggaaacaauucggaacgggaccuauaauaggagaaaguauagagaggaaucaagacuagaaaggcagaaaauagaggggguuaagcuggaaucugagggagcuuacaaaauccucaccauuuauucgacugucgccucaucucuugugcuugcaaugggguuugcugccuuccuguucugggccauguccaauggaucuugcagaugcaacauuuguauauaa

SEQ ID NO: 45835 - RNA, 1707 nt, Artificial Sequence
  derived and/or modified CDS sequence (wt) from hemagglutinin__InfluenzaA__CBW54815
auggagaaaauagugcuucuucuugcaauagucagucuuguuaaaagugaucagauuugcauugguuaccaugcaaacaacucaacagagcagguugacacaauaauggaaaagaacgucacuguuacacacgcucaagacauacuggaaaagacacacaacgggaaacucugcgaucuagauggagugaagccucuaauuuuaagagauuguaguguagcuggauggcuccucgggaacccaaugugugacgaauuccccaaugugucggaaugguccuacauaguggagaagaccaauccagccaaugaccucuguuacccagggaauuucgacaacuaugaagaacugaaacaccuauugagcagaauaaaccgguuugagaaaauucagaucauccccaaaaguucuuggccagaucaugaagccucauuaggagugagcucagcauguccauaccagggaggacccuccuuuuauagaaaugugguauggcuuaucaaaaagaacaauacauacccaacaauaaaggaaaguuaccauaauaccaaucaagaagaucuuuuggugcugugggggauccaccauccaaaugaugaggaagagcagacaagaaucuauaaaaacccaacuaccuauauuuccguugggacaucaacacuaaaccagagauugguaccaaagauagccacuagaucuaagguaaacgggcaaaguggaagaguggaguucuuuuggacaauuuuaaaaucaaaugauacaauaaacuuugagaguaauggaaauuucauugcuccagaaaaugcauacaaaauugucaagaaaggggacucaacaauuaugaaaagugaguuggaauaugguaacugcagcaccaaaugucaaacuccaauaggggcgauaaacuccaguaugccauuccacaacauccacccucucaccaucggggaaugccccaaauaugugaaaucaaacagauuaguccuugcuacugggcucagaaauagcccucaaggagagggaagaagaaaaaagagaggacuauuuggagcuauagcagguuuuauagagggaggauggcagggaaugguagaugguugguauggguaccaccauagcaacgagcaggggaguggguacgcugcagacaaggaauccacucaaaaggcaauagauggagucaccaauaaggucaacucaaucauugacaaaaugaauacucaguuugaggcuguugggagggaauuuaauaacuuggaaaagagaauagaaaauuuaaacaagaagauggaagacggguuccuagaugucuggacuuauaaugcugaacuucugguucucauggaaaaugagagaacucuagacuuucaugacucaaaugucaagaaccuuuacgacaaggugcgacuacagcuuagggacaaugcaaaggagcuugguaacgguuguuucgaguucuaucacagaugcgauaaugaauguauggaaaguguaagaaacggaacguaugacuacccgcaguauucagaagaagcaagauuaaaaagagaggaaauaaguggaguaaaauuggaaucaauaggaacuuaccaaauacuaucaauuuacucaacaguggcaaguucccuagcacuggcaaucaugguggcuggucuauuuuuauggaugugcuccaauggaucguuacaaugcagaauuugcauuuaa

SEQ ID NO: 45836 - RNA, 1707 nt, Artificial Sequence
  derived and/or modified CDS sequence (wt) from hemagglutinin__InfluenzaA__CBW54817
auggagaaaauagugcuucuucuugcaauagucagucuuguuaaaagugaucagauuugcauugguuaccaugcaaacaacucaacagagcagguugacacaauaauggaaaagaacgucacuguuacacacgcucaagacauacuggaaaagacacacaaugggaaacucugcgaucuagauggagugaagccucuaauuuuaagagauuguaguguagcuggauggcuccucgggaacccaaugugugacgaauuccccaaugugucggaaugguccuacauaguggagaagaucaauccagccaaugaccucuguuacccagggaauuucaacaacuaugaagaacugaaacaccuauugagcagaauaaaccguuuugagaaaauucagaucauccccaaaaguucuuggccagaucaugaagccucauuaggagugagcucagcauguccauaccagagaggacccuccuuuuauagaaaugugguauggcuuaucaaaaagaacgauacauacccaacaauaaaggaaaguuaccauaauaccaaucaagaagaucuuuuggugcugugggggauccaccauccaaaugaugaggaagagcagaaaaggaucuauaaaaacccaacuaccuauauuuccguugggacaucaacacuaaaccagagauugguaccaaagauagccacuagaucuaagguaaacgggcaaaguggaagaguggaguucuuuuggacaauuuuaaaaucaaaugauacaauaaacuuugagaguaauggaaauuucauugcuccagaaaaugcauacaaaauugucaagaaaggggacucaacaauuaugaaaagugaguuggaauaugguaacugcagcaccaagugucaaacuccaauaggggcgauaaacaccaguaugccauuccacaacauccacccucucaccaucggggaaugccccaaauaugugaaaucaaacagauuaguccuugcuacugggcuuagaaauagcccucaaggagagggaagaagaaaaaagagaggacuauuuggagcuauagcagguuuuauagagggaggauggcagggaaugguagaugguugguauggguaccaccauaguaacgagcaggggaguggguacgcugcagacaaagaauccacucaaaaggcaauagauggagucaccaauaaggucaacucgaucauugacaaaaugaauacucaguuugaggcuguugggagggaauuuaauaacuuggaaaagagaauagaaaauuuaaacaagaagauggaagacggguuccuagaugucuggacuuauaaugcugaacuucugguucucauggaaaaugagagaacucuagacuuucaugacucaaaugucaggaaccuuuacgacaaggugcgacuacagcuuagggacaaugcaaaggagcuugguaacgguuguuucgaguucuaucacagaugcgauaaugaauguauggaaaguguaagaaacggaacguaugacuacccgcaguauucagaagaagcaagauuaaaaagagaggaaauaaguggaguaaaauuggaaucaauaggaacuuaccaaauacuaucaauuuauucaacaguggcaaguucccuagcacuggcaaucaugguggcuggucuauuuuuauggaugugcuccaauggaucguuacaaugcagaauuugcauuuga

SEQ ID NO: 45837 - RNA, 1707 nt, Artificial Sequence
  derived and/or modified CDS sequence (wt) from hemagglutinin__InfluenzaA__CBW54818
auggagaaaauagugcuucuucuugcaauagucagucuuguuaaaagugaucagauuugcauugguuaccaugcaaacaacucaacagagcagguugacacaauaauggaaaagaacgucacuguuacacacgcucaagacauacuggaaaagacacacaacgggaaacucugcgaucuagauggagugaagccucuaauuuuaagagauuguaguguagcuggauggcuccucgggaacccaaugugugacgaauuccccaaugugucggaaugguccuacauaguggagaagaccaauccagccaaugaccucuguuacccagggaauuucaacaacuaugaagagcugaaacaccuauugagcagaauaaaccgguuugagaaaauuaagaucauccccaaaaguucuuggccagaucaugaagccucauuaggagugagcucagcauguccauaccagggaggacccuccuuuuauagaaaugugguauggcuuaucaaaaagaacaauacauacccaacaauaaaggaaaguuaccauaauaccaaucaagaagaucuuuuggugcugugggggauccaccauccaaaugaugaggaagagcagacaaggaucuauaaaaacccaacuaccuauauuuccguugggacaucaacacuaaaccagagauugguaccaaagauagccacuagaucuaagguaaacgggcagaguggaagaguggaguucuuuuggacaauuuuaaaaucaaaugauacaauaaacuuugagaguaauggaaauuucauugcuccagaaaaugcauacaaaauugucaagaaaggggacucaacaauuaugaaaagugaguuggaauaugguaacugcagcaccaagugucaaacuccaguaggggcgauaaacuccaguaugccauuccacaacauccacccucucaccaucggggaaugccccaaauaugugaaaucaaacagauuaguccuugcuacugggcucaggaauagcccucaaggagagggaagaagaaaaaagagaggacuauuuggagcuauagcagguuuuauagagggaggauggcagggaaugguagaugguugguauggguaccaccauagcaacgagcaggggaguggguacgcugcagacagagaauccacucaaaaggcaauagauggagucaccaauaaggucaacucaaucauugacaaaaugaauacucaguuugaggcuguuggaagggaauuuaauaacuuggaaaagagaauagaaaauuuaaacaagaagauggaagacggguuucuagaugucuggacuuauaaugcugaacuucugguucucauggaaaaugagagaacucuagacuuucaugacucaaaugucaagaaccuuuacgacaaggugcgacuacagcuuagggacaaugcaaaggagcuugguaacgguuguuucgaguucuaucacagaugcgauaaugaauguauggaaaguguaagaaacggaacguaugacuacccgcaguauucagaagaagcaagauuaaaaagagaggaaauaaguggaguaaaauuggaaucaauaggaacuuaccaaauacuaucaauuuauucaacaguggcaaguucccuagcacuggcaaucauaguggcuggucuacuuuuauggaugugcuccaauggaucguuacaaugcagaauuugcauuuaa

SEQ ID NO: 45838 - RNA, 1701 nt, Artificial Sequence
  derived and/or modified CDS sequence (wt) from hemagglutinin__InfluenzaA__CCG47908
augaagacugucauugcuuuaagcuacgucuuuugucuggguuuuggccaaggucuuccaggaaagggcaacaacacagcaacacugugccugggacaucaugcagugccaaauggaacacuagugaaaacaaucacagaugaucagaucgaaguaaccaaugcuacagaacugguucagaauuucucaauggguaaaauaugcaagaauccucaucgaauucuugauggggcaaauugcacacugauagacucucuauugggggacccucauugugaugguuuucaagaugagaaaugggaccuuuucauugaacgcagcaaggcuuucagcaacuguuacccuuaugaugugccggaguauaccucccuuaggucaauaauugccucgucaggcaccuuggaauuuaccaaugaagauuucaauuggacuggggucacccagaauggaggaagcagugcuugcaagagggggccuaacaacagcuuuuucaguaggcugaacuggcuguacaaaucggguaacacauauccgaugcuaaauguuacuaugccaaacagugaugauuuugacaaauuguacauuugggggguucaucauccgaguaccgauagagaacagaccaaccuguauauucaagcaucagggaaaauaauaguuucuacaaagagaagucaacaaaccauaaucccgaauaucgggucuagacccuggguaagggguuugucuaguaggauaagcaucuacuggacaauaguuaaaccaggggacauccugauaaucaacagcaauggaaaccuaauugcuccucgagguuacuucaaaauacagacugggaaaagcucaguaaugagaucagaugcaccuauugacaccugcaauucugaaugcauuacuccaaacggaagcauacccaaugacaaaccuuuucaaaacguaaacaggaucacauauggggcaugucccaaauacaucaagcaaaacacucugaaguuggcaacagggaugcggaauauaccagaaagacaaacuagagguauauucggugcaauagcaggguucauagagaaugguugggaaggaauggugaacgguugguacgguuucaggcaccaaaauucugagggcauaggacaagcagcagaucuuaaaaguacccaagcagcuaucaaccaaaucaaugggaaacugaauagaguaaucgagaagacgaacgagaaauuccaucaaaucgaaaaggaguucucagaaguagaaggaagaauccaagaccucgaaagauauguugaagauacuaagauagaucuuuggucuuacaacgcggaacuucuugucgcgcuagagaaucaacacacaauugaccugacugacucagaaaugaacaaacucuuugaaaaaacaagaaaacaacugagggaaaaugcugaggauaugggaaaugguugcuucaaaauauaccacaaaugugacaacucuugcauggagucaaucagaaauggaacuuacgaccauaacgaauacagagacgaagcaguaaacaaccgauuucagaucaaaaguguugagcugaagucaggauacaaagacuggauccuguggauuuccuuugccauaucaugcuuuuugcuuugugcuguuuggcugggauucauaauaugggccugccagaaaggcaacauuaggugcaacauuugcaucuga

SEQ ID NO: 45839 - RNA, 1701 nt, Artificial Sequence
  hemagglutinin__InfluenzaA_ _AAB39851
augaaggcaauacuauuagucuuguuauguacauuugcagccacaaaugcagacacacuauguauagguuaucaugcaaauaauucaacugacacuguugauacaguacuagaaaagaauguaacaguaacacacucuguuaaucuucuugaagacagacauaacgggaaacuauguaaacugggggggauagccccauugcacuuggguaaauguaacauugccgguaggcuuuugggaaacccagaaugugaauuacuacucacaguaagcucauggucuuacauuguggaaacaucgaaaucagacaaugggacauguuacccaggagauuucaucaauuaugaagagcugagagagcaguugagcucagugucaucauuugaaagauucgagauauuccccaagacaaguucguggcccaaucaugaaacaaacagaggugugacggcagcaugcccuuaugcuggagcaaacagcuucuacagaaauuuaauauggcuggugaaaaaagaaaauucauacccaaagcucagcaaauccuauguuaacaauaaagggaaggaaguccuugugcuauggggcauucaucauccaccuaccaguacugaucaacaaagucucuaccaaaaugcagaugccuauguuuuuguagggucaucaaaauauaacagaaaguucaagccagaaauagcagcaagacccaaggugagaggucaagcagggaggaugagcuauuacuggacacuaauagaaccuggagacacaauaacauuugaagcaacuggaaaucuagugguaccaagauaugcuuucgcaaugaauagagguucuggaucugguauuauaauuugggaugcaccaguucaugauuguaacacgaagugucaaacacccaagggugccauaaacaccagccucccauuucagaauauacauccagucacaauuggagaauguccaaaauaugucaaaagcacaaaauugagaauggcuacaggacuaaggaaugucccgucuauucaaucuagaggucuguuuggagccauugcugguuuuauugaggggggauggacaggaaugauagauggaugguaugguuaucaccaucagaaugaacagggaucaggauaugcagcggaccaaaggagcacacaaaaugccauugacgggaucacuaacaaaguaaauucuguuauugaaaagaugaacacgcaauucacggcaguggguaaagaauucaaccacuuggaaaaaagaauagagaauuuaaacaaaaagguugaugaugguuuucuggauauuuggacauacaaugcagaacuguugguucuauuggaaaaugaaagaacucuggauuuccacgacucgaauguaaagaaccuguaugagaaaguaagaagccagcuaaggaacaaugccaaagaaauuggaaauggcugcuuugaauucuaucacaaaugugaugauacaugcauggagagcgucaaaaaugggacuuaugauuacccaaaguacucagaagaaucaaagcuaaacagagaggagauagauggaguaaaguuggagucaacaagaauuuaccagauuuuggcgaucuauucaacugucgccaguucauugguacuguuggucucccugggggcaaucaguuuuuggaugugcucuaaugggucuuuacagugcagaauauguauuuaa

SEQ ID NO: 45840 - RNA, 1701 nt, Artificial Sequence
  derived and/or modified CDS sequence (wt) from hemagglutinin__InfluenzaA__AAA43178
augaagaccaucauugcuuugagcuacauuuucugucuggcucucggccaagaccuuccaggaaaugacaacagcacagcaacgcugugccugggacaucaugcggugccaaacggaacacuagugaaaacaaucacagaugaucagauugaagugacuaaugcuacugagcuaguucagagcuccucaacggggaaaauaugcaacaauccucaucgaauccuugauggaauagacugcacacugauagaugcucuauugggggacccucauugugauguuuuucaaaaugagacaugggaccuuuucguugaacgcagcaaagcuuucagcaacuguuacccuuaugaugugccagauuaugccucccuuaggucacuaguugccucgucaggcacucuggaguuuaucacugaggguuucacuuggacuggggucacucagaaugggggaagcaaugcuugcaaaaggggaccugguagcgguuuuuucaguagacugaacugguugaccaaaucaggaagcacauauccagugcugaacgugacuaugccaaacaaugacaauuuugacaaacuauacauuugggggauucaccacccgagcacgaaccaagaacaaaccagccuguauguucaagcaucagggagagucacagucucuaccaggagaagccagcaaacuauaaucccgaauaucggguccagacccuggguaaggggucugucuaguagaauaagcaucuauuggacaauaguuaagccgggagacguacugguaauuaauaguaaugggaaccuaaucgcuccucgggguuauuucaaaaugcgcacugggaaaagcucaauaaugaggucagaugcaccuauugauaccuguauuucugaaugcaucacuccaaauggaagcauucccaaugacaagcccuuucaaaacguaaacaagaucacauauggagcaugccccaaguauguuaagcaaaacacccugaaguuggcaacagggaugcggaauguaccagagaaacaaacuagaggccuauucggcgcaauagcagguuucauagaaaaugguugggagggaaugauagacgguugguacgguuucaggcaucaaaauucugagggcacaggacaagcagcagaucuuaaaagcacucaagcagccaucgaccaaaucaaugggaaauugaacaggguaaucgagaagacgaacgagaaauuccaucaaaucgaaaaggaauucucagaaguagaagggagaauucaggaccucgagaaauacguugaagacacuaaaauagaucucuggucuuacaaugcggagcuucuugucgcucuggagaaucaacauacaauugaccugacugacucggaaaugaacaagcuguuugaaaaaacaaggaggcaacugagggaaaaugcugaagagaugggcaaugguugcuucaaaauauaccacaaaugugacaacgcuugcauagagucaaucagaaaugguacuuaugaccaugauguauacagagacgaagcauuaaacaaccgguuucagaucaaagguguugaacugaagucuggauacaaagacuggauccuguggauuuccuuugccauaucaugcuuuuugcuuuguguuguuuugcugggguucaucaugugggccugccagagaggcaacauuaggugcaacauuugcauuuga

SEQ ID NO: 45841 - RNA, 1689 nt, Artificial Sequence
  derived and/or modified CDS sequence (wt) from hemagglutinin__InfluenzaA__AAA43185
auggccaucauuuaucucauucuccuguucacagcagugagaggggaccagauaugcauuggauaccaugccaauaauuccacagagaaggucgacacaaaucuagagcggaacgucacugugacucaugccaaggacauucuugagaagacccauaacggaaaguuaugcaaacuaaacggaaucccuccacuugaacuaggggacuguagcauugccggauggcuccuuggaaauccagaaugugauaggcuucuaagugugccagaaugguccuauauaauggagaaagaaaacccgagagacgguuuguguuauccaggcagcuucaaugauuaugaagaauugaaacaucuccucagcagcgugaaacauuucgagaaaguaaagauucugcccaaagauagauggacacagcauacaacaacuggagguucacgggccugcgcggugucugguaauccaucauuuuucaggaacauggucuggcugacaaaggaaggaucagauuauccgguugccaaaggaucguacaacaauacaagcggagaacaaaugcuaauaauuuggggggugcaccaucccauugaugagacagaacaaagaacauuguaccagaaugugggaaccuauguuuccguaggcacaucaacauugaacaaaaggucaaccccagaaauagcaacaaggccuaaagugaauggacaaggagguagaauggaauucucuuggacccucuuggauaugugggacaccauaaauuuugagaguacugguaaucuaauugcaccagaguauggauucaaaauaucgaaaagagguaguucagggaucaugaaaacagaaggaacacuugagaacugugagaccaaaugccaaacuccuuugggagcaauaaauacaacauugccuuuucacaauguccacccacugacaauaggugagugccccaaauauguaaaaucggagaaguuggucuuagcaacaggacuaaggaauguuccccagauugaaucaagaggauuguuuggggcaauagcugguuuuauagaaggaggauggcaaggaaugguugaugguugguauggauaccaucacagcaaugaccaaggaucaggguaugcagcagacaaagaauccacucaaaaggcauuugauggaaucaccaacaagguaaauucugugauugaaaagaugaacacccaauuugaagcuguugggaaggaauucgguaacuuagagagaagacuggagaacuugaacaaaaggauggaagacggguuucuagauguguggacauacaaugcugagcuucuaguucugauggaaaaugagaggacacuugacuuucaugauucuaaugucaagaaucuguaugauaaagucagaaugcagcugagagacaacgucaaagaacuaggaaauggauguuuugaauuuuaucacaaaugugaugaugaaugcaugaauagugugaaaaacgggacguaugauuaucccaaguaugaagaagagucuaaacuaaauagaaaugaaaucaaagggguaaaauugagcagcauggggguuuaucaaauccuugccauuuaugcuacaguagcagguucucugucacuggcaaucaugauggcugggaucucuuucuggaugugcuccaacgggucucugcagugcaggaucugcauauga

SEQ ID NO: 45842 - RNA, 1701 nt, Artificial Sequence
  derived and/or modified CDS sequence (wt) from hemagglutinin__InfluenzaA__AAA43187
augaagaccauuauugcuuugagccacauuuucugucugguucucggccaauaccuuccaggaaaugacaacagcacagcaacgcugugucugggacaucaugcagugccaaacggaacacuagugaaaacaaucacaaaugaucagauugaagugacuaaugcuacugagcuaguucagagcuccucaacggggaaaauaugcaacaauccucaucgaauccuugauggaauagacugcacacugauagaugcucuauugggggacccucauugugaugguuuucaaaaugagacaugggaccuuuucguugaacgcagcaaagcuuucagcaacuguuaccccuaugaugugccagauuaugccucccuuagaucacuaguugccucgucaggcacucuggaguuuaucacugaggguuucacuuggacuggggucacucagaaugggggaagcaaugcuugcaaaaggggaccugguagcgguuuuuucaguagacugaacugguugaccaaaucagaaagcacauauccagugcugaacgugacuaugccaaacaaugacaauuuugacaaacuauacauuuggggaguucaccacccgagcacgaaccaagaacaaaccagccuguauguucaagcaucagggagagucacagucucuaccaggagaagccagcaaacuauaaucccgaauaucgggucuagacccuggguaaggggucugucuaguagaauaagcaucuauuggacaauaguuaagcccggggacguacugguaauuaauaguaaugcgaaccuaaucgcuccucgggguuauuucaaaaugcgcacugggaaaagcucaauaaugaggucagaugcaccuauugauaccuguauuucugaaugcaucacuccaaauggaagcauucccaacgacaagcccuuucaaaacguaaacaagaucacauauggagcaugccccaaguauguuaagcaaaacacccugaaguuggcaacacggaugcggaauguaccagagaaacaaacuagaggccuauucggcgcaauagcagguuucauagaaaaugguugggagggaaugauagacgguugguacgguuucaggcaucaaaauucugagggcacaggacaagcagcagaucuuaaaagcacucaagcagccaucgaucaaaucaaugggaaauugaacaggguaaucgagaagacaaacgagaaauuccaucaaaucgaaaaggaauucucagaaguagaagggagaauucaggaccucgagaaauacguugaagacacuaaaauagaucucuggucuuacaaugcagagcuucuugucgcucuggagaaucaacauacaauugaucugacugacucggaaaugaacaagcuguuugaaaaaacaaggaggcaacugagggaaaaugcugaagacaugggcaaugguugcuucaaaauauacgacaaaugugacaacgcuugcauagagucaaucagaaaugggacuuaugaccaugauguauacagagacgaagcauuaaacaaccgguuucagaucaaagguguugaacugaagucuggauacaaagacuggauccuguggauuuccuuugccauaucauguuuuuugcuuuguguuguuuugcugggguucaucaugugggccugccagagaggcaacauuaggugcaacauuugcauuuga

SEQ ID NO: 45843 - RNA, 1698 nt, Artificial Sequence
  derived and/or modified CDS sequence (wt) from hemagglutinin__InfluenzaA__AAA43209
augaaggcaaaacuacugguccuguuauaugcauuuguagcuacagaugcagacacaauauguauaggcuaccaugcgaacaacucaaccgacacuguugacacaauauucgagaagaauguggcagugacacauucuguuaaccugcucgaagacagacacaacgggaaacuauguaaauuaaaaggaauagccccacuacaauuggggaaauguaacaucaccggauggcucuugggaaauccagaaugcgacucacugcuuccagcgagaucaugguccuacauuguagaaacaccaaacucugagaauggagcauguuauccaggagauuucaucgacuaugaggaacugagggagcaauugagcucaguaucaucauuagaaagauucgaaauauuucccaaggaaaguucauggcccaaccacacauucaacggaguaacaguaucaugcucccauaggggaaaaagcaguuuuuacagaaauuugcuauggcugacgaagaagggggauucauacccaaagcugaccaauuccuaugugaacaauaaagggaaagaaguccuuguacuaugggguguucaucacccguccagcagugaugagcaacagagucucuauaguaauggaaaugcuuaugucucuguagcgucuucaaauuauaacaggagauucaccccggaaauagcugcaaggcccaaaguaaaagaucaacaugggaggaugaacuauuacuggaccuugcuagaacccggagacacaauaauauuugaggcaacugguaaucuaauagcaccaugguaugcuuucgcacugaguagaggguuugaguccggcaucaucaccucaaacgcgucaaugcaugaguguaacacgaagugucaaacaccccagggaucuauaaacagcaaucucccuuuccagaauauacacccagucacaauaggagagugcccaaaauaugucaggaguaccaaauugaggaugguuacaggacuaagaaacaucccauccauucaauacagaggucuauuuggagccauugcugguuuuauugaggggggauggacuggaaugauagauggaugguaugguuaucaucaucagaaugaacagggaucaggcuaugcagcggaucaaaaaagcacacagaaugccauuaacgggauuacaaacaaggugaacucuguuaucgagaaaaugaacacucaauucacagcuguggguaaagaauucaacaacuuagaaaaaaggauggaaaauuuaaauaaaaaaguugaugauggguuucuggacauuuggacauauaaugcagaauuguuaguucuacuggaaaaugaaagaacuuuggauuuccaugacuuaaaugugaagaaucuguacgagaaaguaaaaagccaauuaaagaauaaugccaaagaaaucggaaauggguguuuugaguucuaccacaagugugacaaugaaugcauggaaaguguaagaaaugggacuuaugauuauccaaaauauucagaagaaucaaaguugaacagggaaaagauagauggagugaaauuggaaucaauggggguguaucagauucuggcgaucuacucaacugucgccaguucacuggugcuuuuggucucccugggggcaaucaguuucuggauguguucuaaugggucuuugcagugcagaauaugcaucuga

SEQ ID NO: 45844 - RNA, 1683 nt, Artificial Sequence
  derived and/or modified CDS sequence (wt) from hemagglutinin__InfluenzaA__AAC40998
augaacacucaaauccugauacucgcucuuguggcgaucaucccaacaaaugcagacaaaaucugccuugggcaucaugccgugucaaacggggcuaaaguaaacacauuaacugaaagaggaguggaagucguuaaugcaacugaaacgguggaacgaacaaauguccccaggaucugcucaaaagggaaaaggacaguugaccucggucaauguggacuucugggaacaaucacugggccaccccaaugugaccaauuccuagaauuuucagccgauuuaauuauugaaagacgggaaggaaaugaugucuguuauccugggaaauuugugaaugaagaagcucugaggcaaauucucagaaaaucaggcggaauugauaaggagacaaugggauucacauacagcggaauaagaacuaauggagcaaccagugcauguaggagaucaggaucuucauucuaugcugagaugaaauggcuucugucaaacacagacaacgcugcuuucccgcagaugacuaagucauacaaaaacauaaggaaagacccagcucugauaauauggggaauccaucauuccggaucaacugcagagcagaccaaguuauaugggaguggaaacaaacuaauaacagucgggaguuccaauuaucaacagucuuucguaccgaguccgggagcgagaccacaagugaauggccaaucuggaaggauugacuuucauuggcugaugcuaaaccccaaugacacagucacuuucaguuucaauggggcuuucauagcuccagaccgugcaaguuuucugagaggaaaguccaugggaauucagagugagguacagguugaugccaauugugaaggagauugcuaucauaguggagggacaauacuaaguaguuugccuuuucagaacaucaauagcagaacaguaggggaauguccgagguauguuaagcaagaaagucugcuauuggcaacagggaugaagaacguuccugagauuccaaaaggaagaggccuauuuggugccauagcggguuucauugaaaauggaugggaaggucugguugauggaugguauggcuucaggcaucaaaaugcacaaggggagggaacugcugcagauuacaagagcacccaaucggcaauugaucaaauaacagggaaauuaaaccgucuuauagagaaaacuaaucaacaauuugaguugauagacaaugaauucacugagguugaaaagcaaauuggcaaugugauaaauuggacuagagauuccuugacagaaaugugguccuauaaugcugaacucuugguagcaauggagaaucagcacacaaucgaucuggccgacucagaaaugaacaaacuauaugaacgagugaggagacaauugagagaaaaugcugaggaagauggcacugguugcuucgaaauauuccacaagugugaugaugacuguauggccagcauuaggaauaacaccuaugaucacagcaaguacagagaagaagcaauacaaaauagaauacagauugacccagucaaacuaagcagcggcuacaaagaugugauacuuugguuuagcuucggggcaucauguuucauacuucuggccauugcaaugggccuugucuucauaugugugaagaauggaaacaugcggugcacuauuuguauauaa

SEQ ID NO: 45845 - RNA, 1683 nt, Artificial Sequence
  derived and/or modified CDS sequence (wt) from hemagglutinin__InfluenzaA__AAC40999
augaacacucaaauccugauacucgcucuuguggcgaucaucccaacaaaugcagacaaaaucugccuugggcaucaugccgugucaaacgggaccaaaguaaacacauuaacugaaagaggaguggaagucguuaaugcaacugaaacgguggaacgaacaaacguccccaggaucugcucaaaagggaaaagaacaguugaccucggucaauguggacuucugggaacaaucacugggccaccccaaugugaccaauuccuagaauuuucagccgauuuaauuauugaaagacgagaaggagaugaugucuguuauccugggaaauuugugaaugaagaagcucugaggcaaauucucagggaaucaggcgggauugauaaggagacaaugggauucacauacagcggaauaagaacuaauggagcaaccagugcauguaggagaucaggaucuucauucuaugcugagaugaaauggcuucugucaaacacagacaaugcugccuucccgcagaugacuaagucauacaaaaacauaaggaaagacccagcucugauaauauggggaauccaucauucuggaucaacugcagagcagaccaaguuauaugggaguggaaacaaacuaauaacagucgggaguuccaauuaucaacagucuuuuguaccgauuccaggagcgagaccacaagugaauggccaaucuggaaggauugacuuucauuggcugaugcuaaaccccaaugacaccgucacuuucaguuucaauggggcuuucauagcuccagaccgugcgaguuuucugagaggaaaguccaugggaauucagagugagguacagguugaugccaauugugaaggagauugcuaucauaguggagggacaauacuaaauaauuugccuuuucagaauaucaauggcagagcaguagggaaauguccgagguauguuaagcaagaaagucugcuacuggcaacagggaugaagaacguuccugagauuccaaaaggaagaggccuauuuggugccauagcggguuucauugaaaauggaugggaaggucugguugauggaugguauggcuucaggcaucaaaaugcacaaggggagggaacugcugcagauuacaagagcacccaaucggcaauugaucaaauaacagggaaguuaaaccgucuuauagagaaaacuaaucaacaauuugaguugauagacaaugaauucacugagguugaaaagcaaauuggcaaugugauaaauuggaccagagauuccaugacagaggugugguccuauaaugcugaacucuugguagcaauggagaaucagcacacaaucgaucuggccgacucagaaaugaacaaacuauaugaacgaguaaggagacaauugagagagaaugcugaggaagauggcacugguugcuucgaaauauuccacaagugugaugacgacuguauggccagcauuaggaauaacaccuaugaucacagcaaguacagagaagaagcaauacaaaauagaauacagauugacccagucaaacugagcagcggcuacaaagaugugauacuuugguuuagcuucggggcaucauguuucauacuucuggccauugcaaugggccuugucuucauaugugugaagaauggaaacaugcggugcacuauuuguauauaa

SEQ ID NO: 45846 - RNA, 1698 nt, Artificial Sequence
  derived and/or modified CDS sequence (wt) from hemagglutinin__InfluenzaA__ACA28844
augaaaguaaaacuacugguccuguuaugcacauuuacagcuacauaugcagacacaauauguauaggcuaccaugcuaacaacucgaccgacacuguugacacaguacuugaaaagaaugugacagugacacacucugucaaccugcuugagaacagucacaauggaaaacuaugucuauuaaaaggaauagccccacuacaauuggguaauugcagcguugccggguggaucuuaggaaacccagaaugcgaauuacugauuuccaaggagucaugguccuacauuguagaaaaaccaaauccugagaauggaacauguuacccagggcauuucgcugacuaugaggaacugagggagcaauugaguucaguaucuucauuugagagguucgaaauauuccccaaagaaagcucauggcccaaccacaccguaaccggagugucagcaucaugcucccauaauggggaaagcaguuuuuacagaaauuugcuauggcugacggggaagaaugguuuguacccaaaccugagcaaguccuaugcaaacaacaaagaaaaagaaguccuuguacuaugggguguucaucacccgccaaacauaggugaccaaaaggcccucuaucauacagaaaaugcuuaugucucuguagugucuucacauuauagcagaaaauucaccccagaaauagccaaaagacccaaaguaagagaucaagaaggaagaaucaauuacuacuggacucugcuugaacccggggauacaauaauauuugaggcaaauggaaaucuaauagcgccaagauaugcuuucgcacugaguagaggcuuuggaucaggaaucaucaacucaaaugcaccaauggauaaaugugaugcgaagugccaaacaccucagggagcuauaaacagcagucuuccuuuccagaacguacacccagucacaauaggagaguguccaaaguaugucaggagugcaaaauuaaggaugguuacaggacuaaggaacaucccauccauucaauccagagguuuguuuggagccauugccgguuucauugaagggggguggacuggaaugguagaugguugguaugguuaucaucaucagaaugagcaaggaucuggcuaugcugcagaucaaaaaagcacacaaaaugccauuaaugggauuacaaacaaggugaauucuguaauugagaaaaugaacacucaauucacagcagugggcaaagaauucaacaaauuggaaagaaggauggaaaacuugaauaaaaaaguugaugauggguuuauagacauuuggacauauaaugcagaacuguugguucuacuggaaaaugaaaggacuuuggauuuccaugacuccaaugugaagaaucuguaugagaaaguaaaaagccaguuaaagaauaaugcuaaagaaauaggaaauggguguuuugaauucuaucacaaguguaacgaugaaugcauggagaguguaaagaauggaacuuaugacuauccaaaauauuccgaagaaucaaaguuaaacagggagaaaauugauggagugaaauuggaaucaaugggagucuaucagauucuggcgaucuacucaacagucgccaguucucugguucuuuuggucucccugggggcaaucagcuucuggauguguuccaaugggucuuuacaguguagaauaugcaucuaa

SEQ ID NO: 45847 - RNA, 1698 nt, Artificial Sequence; identical to SEQ ID NO: 39805
  derived and/or modified CDS sequence (wt) from hemagglutinin__InfluenzaA__ACA28844/m1

SEQ ID NO: 45848 - RNA, 1701 nt, Artificial Sequence; identical to SEQ ID NO: 41162
  derived and/or modified CDS sequence (wt) from hemagglutinin__InfluenzaA__ACV82259

SEQ ID NO: 45849 - RNA, 1701 nt, Artificial Sequence
  derived and/or modified CDS sequence (wt) from hemagglutinin__InfluenzaA__ACV82259/m1
augaaggcaauacugguaguucugcuauauacauuugcaaccgcaaaugcagacacauuauguauagguuaucaugcgaacaauucaacagacacuguagacacaguacuagaaaagaauguaacaguaacacacucuguuaaccuucuagaagacaagcauaacgggaaacuaugcaaacuaagagggguagccccauugcauuuggguaaauguaacauugcuggcuggauccugggaaauccagagugugaaucacucuccacagcaagcucaugguccuacauuguggaaacaccuaguucagacaauggaacguguuacccaggagauuucaucgauuaugaggagcuaagagagcaauugagcucagugucaucauuugaaagguuugagauauuccccaagacaaguucauggcccaaucaugacucggacaaagguguaacggcagcauguccucaugcuggagcaaagagcuucuacaaaaauuuaauauggcuaguuaaaaaaggaaauucauacccaaagcucagcaaauccuacauuaaugauaaagggaaagaaguccucgugcuauggggcauucaccauccaucuaccagugcugaccaacaaagucucuaucagaaugcagaugcauauguuuuuguggggucaucaagauacagcaagacguucaagccggaaauagcaauaagacccaaagugagggaucgagaagggagaaugaacuauuacuggacacugguagagccgggagacaaaauaacauucgaagcaacuggaaaucuagugguaccgagauaugcauucgcaauggaaagaaaugcuggaucugguauuaucauuucagauacaccaguccacgauugcaauacaacuugucaaacacccaagggugcuauaaacaccagccucccauuucagaauauacauccgaucacaauuggaaaauguccaaaauauguaaaaagcacaaaauugagacuggccacaggauugaggaauaucccgucuauucaaucuagaggccuauuuggggccauugccgguuucauugaagggggguggacagggaugguagauggaugguacgguuaucaccaucaaaaugagcaggggucaggauaugcagccgaccugaagagcacacagaaugccauugacgagauuacuaacaaaguaaauucuguuauugaaaagaugaauacacaguucacagcaguagguaaagaguucaaccaccuggaaaaaagaauagagaauuuaaauaaaaaaguugaugaugguuuccuggacauuuggacuuacaaugccgaacuguugguucuauuggaaaaugaaagaacuuuggacuaccacgauucaaaugugaagaacuuauaugaaaagguaagaagccagcuaaaaaacaaugccaaggaaauuggaaacggcugcuuugaauuuuaccacaaaugcgauaacacgugcauggaaagugucaaaaaugggacuuaugacuacccaaaauacucagaggaagcaaaauuaaacagagaagaaauagaugggguaaagcuggaaucaacaaggauuuaccagauuuuggcgaucuauucaacugucgccaguucauugguacugguagucucccugggggcaaucaguuucuggaugugcucuaaugggucucuacaguguagaauauguauuuaa

SEQ ID NO: 45850 - RNA, 1701 nt, Artificial Sequence
  derived and/or modified CDS sequence (wt) from hemagglutinin__InfluenzaA__ACV82259/m2
augaaggcaauacuaguaguucugcuauauacauuugcaaccgcaaaugcagacacauuauguauagguuaucaugcgaacaauucaacagacacuguagacacaguacuagaaaagaauguaacaguaacacacucuguuaaccuucuagaagacaagcauaacgggaaacuaugcaaacuaagagggguagccccauugcauuuggguaaauguaacauugcuggcuggauccugggaaauccagagugugaaucacucuccacagcaagcucaugguccuacauuguggaaacaccuaguucagacaauggaacguguuacccaggagauuucaucgauuaugaggagcuaagagagcaauugagcucagugucaucauuugaaagguuugagauauuccccaagacaaguucauggcccaaucaugacucggacaaagguguaacggcagcauguccucaugcuggagcaaagagcuucuacaaaaauuuaauauggcuaguuaaaaaaggaaauucauacccaaagcucagcaaauccuacauuaaugauaaagggaaagaaguccucgugcuauggggcauucaccauccaucuaccagugcugaccaacaaagucucuaucagaaugcagaugcauauguuuuuguggggucaucaagauacagcaagacguucaagccggaaauagcaauaagacccaaagugagggaucgagaagggagaaugaacuauuacuggacacugguagagccgggagacaaaauaacauucgaagcaacuggaaaucuagugguaccgagauaugcauucgcaauggaaagaaaugcuggaucugguauuaucauuucagauacaccaguccacgauugcaauacaacuugucaaacacccaagggugcuauaaacaccagccucccauuucagaauauacauccgaucacaauuggaaaauguccaaaauauguaaaaagcacaaaauugagacuggccacaggauugaggaauaucccgucuauucaaucuagaggccuauuuggggccauugccgguuucauugaagggggguggacagggaugguagauggaugguacgguuaucaccaucaaaaugagcaggggucaggauaugcagccgaccugaagagcacacagaaugccauugacgagauuacuaacaaaguaaauucuguuauugaaaagaugaauacacaguucacagcaguagguaaagaguucaaccaccuggaaaaaagaauagagaauuuaaauaaaaaaguugaugaugguuuccuggacauuuggacuuacaaugccgaacuguugguucuauuggaaaaugaaagaacuuuggacuaccacgauucaaaugugaagaacuuauaugaaaagguaagaagccagcuaaaaaacaaugccaaggaaauuggaaacggcugcuuugaauuuuaccacaaaugcgauaacacgugcauggaaagugucaaaaaugggacuuaugacuacccaaaauacucagaggaagcaaaauuaaacagagaagaaauagaugggguaaagcuggaaucaacaaggauuuaccagauuuuggcgaucuauucaacugucgccaguucauugguacugguagucucccugggggcaaucaguuucuggaugugcucuaaugggucucuacaguguagaauauguauuuaa

SEQ ID NO: 45851 - RNA, 1701 nt, Artificial Sequence; identical to SEQ ID NO: 34679
  derived and/or modified CDS sequence (wt) from hemagglutinin__InfluenzaA__ACP41953

SEQ ID NO: 45852 - RNA, 1701 nt, Artificial Sequence; identical to SEQ ID NO: 44253
  derived and/or modified CDS sequence (wt) from hemagglutinin__InfluenzaA__AFM72832

SEQ ID NO: 45853 - RNA, 1701 nt, Artificial Sequence
  derived and/or modified CDS sequence (wt) from hemagglutinin__InfluenzaA__EPI516528
augaaggcaauacuaguaguucugcuauauacauuugcaaccgcaaaugcagacacauuauguauagguuaucaugcgaacaauucaacagacacuguagacacaguacuagaaaagaauguaacaguaacacacucuguuaaccuucuagaagacaagcauaacgggaaacuaugcaaacuaagagggguagccccauugcauuuggguaaauguaacauugcuggcuggauccugggaaauccagagugugaaucacucuccacagcaagcucaugguccuacauuguggaaacaccuaguucagacaauggaacguguuacccaggagauuucaucgauuaugaggagcuaagagagcaauugagcucagugucaucauuugaaagguuugagauauuccccaagacaaguucauggcccaaucaugacucgaacaaagguguaacggcagcauguccucaugcuggagcaaaaagcuucuacaaaaauuuaauauggcuaguuaaaaaaggaaauucauacccaaagcucagcaaauccuacauuaaugauaaagggaaagaaguccucgugcuauggggcauucaccauccaucuacuagugcugaccaacaaagucucuaucagaaugcagaugcauauguuuuuguggggucaucaagauacagcaagaaguucaagccggaaauagcaauaagacccaaagugagggaucaagaagggagaaugaacuauuacuggacacuaguagagccgggagacaaaauaacauucgaagcaacuggaaaucuagugguaccgagauaugcauucgcaauggaaagaaaugcuggaucugguauuaucauuucagauacaccaguccacgauugcaauacaacuugucaaacacccaagggugcuauaaacaccagccucccauuucagaauauacauccgaucacaauuggaaaauguccaaaauauguaaaaagcacaaaauugagacuggccacaggauugaggaauaucccgucuauucaaucuagaggccuauuuggggccauugccgguuucauugaagggggguggacagggaugguagauggaugguacgguuaucaccaucaaaaugagcaggggucaggauaugcagccgaccugaagagcacacagaaugccauugacgagauuacuaacaaaguaaauucuguuauugaaaagaugaauacacaguucacagcaguagguaaagaguucaaccaccuggaaaaaagaauagagaauuuaaauaaaaaaguugaugaugguuuccuggacauuuggacuuacaaugccgaacuguugguucuauuggaaaaugaaagaacuuuggacuaccacgauucaaaugugaagaacuuauaugaaaagguaagaagccagcuaaaaaacaaugccaaggaaauuggaaacggcugcuuugaauuuuaccacaaaugcgauaacacgugcauggaaagugucaaaaaugggacuuaugacuacccaaaauacucagaggaagcaaaauuaaacagagaagaaauagaugggguaaagcuggaaucaacaaggauuuaccagauuuuggcgaucuauucaacugucgccaguucauugguacugguagucucccugggggcaaucaguuucuggaugugcucuaaugggucucuacacuguagaauauguguuuaa

SEQ ID NO: 45854 - RNA, 1701 nt, Artificial Sequence
  derived and/or modified CDS sequence (wt) from hemagglutinin__InfluenzaA__AGM53850
augaaggcaauacuaguaguucugcuauauacauuugcaaccgcaaaugcagacacauuauguauagguuaucaugcgaacaauucaacagacacuguagacacaguacuagaaaagaauguaacaguaacacacucuguuaaccuucuagaagacaagcauaacgggaaacuaugcaaacuaagagggguagccccauugcauuuggguaaauguaacauugcuggcuggauccugggaaauccagagugugaaucacucuccacagcaagcucaugguccuacauuguggaaacaccuaguucagacaauggaacguguuacccaggagauuucaucgauuaugaggagcuaagagagcaauugagcucagugucaucauuugaaagguuugagauauuccccaagacaaguucauggcccaaucaugacucgaacaaagguguaacggcagcauguccucaugcuggagcaaaaagcuucuacaaaaauuuaauauggcuaguuaaaaaaggaaauucauacccaaagcucagcaaauccuacauuaaugauaaagggaaagaaguccucgugcuauggggcauucaccauccaccuacuagugcugaccaacaaagucucuaucagaaugcagaugcauauguuuuuguggggucaucaagauacagcaagaaguucaagccggaaauagcaauaagacccaaagugagggaucaagaagggagaaugaacuauuacuggacacuaguagagccgggagacaaaauaacauucgaagcaacuggaaaucuagugguaccgagauaugcauucgcaauggaaagaaaugcuggaucugguauuaucauuucagauacaccaguccacgauugcaauacaacuugucaaacacccaagggugcuauaaacaccagccucccauuucagaauauacauccgaucacaauuggaaaauguccaaaauauguaaaaagcacaaaauugagacuggccacaggauugaggaauaucccgucuauucaaucuagaggccuauuuggggccauugccgguuucauugaagggggguggacagggaugguagauggaugguacgguuaucaccaucaaaaugagcaggggucaggauaugcagccgaccugaagagcacacagaaugccauugacgagauuacuaacaaaguaaauucuguuauugaaaagaugaauacacaguucacagcaguagguaaagaguucaaccaccuggaaaaaagaauagagaauuuaaauaaaaaaguugaugaugguuuccuggacauuuggacuuacaaugccgaacuguugguucuauuggaaaaugaaagaacuuuggacuaccacgauucaaaugugaagaacuuauaugaaaagguaagaagccagcuaaaaaacaaugccaaggaaauuggaaacggcugcuuugaauuuuaccacaaaugcgauaacacgugcauggaaagugucaaaaaugggacuuaugacuacccaaaauacucagaggaagcaaaauuaaacagagaagaaauagaugggguaaagcuggaaucaacaaggauuuaccagauuuuggcgaucuauucaacugucgccaguucauugguacugguagucucccugggggcaaucaguuucuggaugugcucuaaugggucucuacaguguagaauauguauuuaa

SEQ ID NO: 45855 - RNA, 1701 nt, Artificial Sequence
  derived and/or modified CDS sequence (wt) from hemagglutinin__InfluenzaA__EPI731463
augaaggcaauacuaguaguucugcuauauacauuugcaaccgcaaaugcagacacauuauguauagguuaucaugcgaacaauucaacagacacuguagacacaguacuagaaaagaauguaacaguaacacacucuguuaaccuucuagaagacaagcauaacgggaaacuaugcaaacuaagagggguagccccauugcauuuggguaaauguaacauugcuggcuggauccugggaaauccagagugugaaucacucuccacagcaagcucaugguccuacauuguggaaacaccuaguucagacaauggaacguguuacccaggagauuucaucgauuaugaggagcuaagagagcaauugagcucagugucaucauuugaaagguuugagauauuccccaauacaaguucauggcccaaucaugacucgaacaaagguguaacggcagcauguccucaugcuggagcaaaaagcuucuacaaaaauuuaauauggcuaguuaaaaaaggaaauucauacccaaagcucagcaaauccuacauuaaugauaaagggaaagaaguccucgugcuauggggcauucaccauccaucuacuagugcugaccaacaaagucucuaucagaaugcagaugcauauguuuuuguggggucaucaagauacagcaagaaguucaagccggaaauagcaauaagacccaaagugaggggucaagaagggagaaugaacuauuacuggacacuaguagagccgggagacaaaauaacauucgaagcaacuggaaaucuagugguaccgagauaugcauucgcaauggaaagaaaugcuggaucugguauuaucauuucagauacaccaguccacgauugcaauacaacuugucaaacacccaagggugcuauaaacaccagccucccauuucagaauauacauccgaucacaauuggaaaauguccaaaauauguaaaaagcacaaaauugagacuggccacaggauugaggaauaucccgucuauucaaucuagaggccuauuuggggccauugccgguuucauugaagggggguggacagggaugguagauggaugguacgguuaucaccaucaaaaugagcaggggucaggauaugcagccgaccugaagagcacacagaaugccauugacgagauuacuaacaaaguaaauucuguuauugaaaagaugaauacacaguucacagcaguagguaaagaguucaaccaccuggaaaaaagaauagagaauuuaaauaaaaaaguugaugaugguuuccuggacauuuggacuuacaaugccgaacuguugguucuauuggaaaaugaaagaacuuuggacuaccacgauucaaaugugaagaacuuauaugaaaagguaagaagccagcuaaaaaacaaugccaaggaaauuggaaacggcugcuuugaauuuuaccacaaaugcgauaacacgugcauggaaagugucaaaaaugggacuuaugacuacccaaaauacucagaggaagcaaaauuaaacagagaagaaauagaugggguaaagcuggaaucaacaaggauuuaccagauuuuggcgaucuauucaacugucgccaguucauugguacugguagucucccugggggcaaucaguuucuggaugugcucuaaugggucucuacaguguagaauauguauuuaa

SEQ ID NO: 45856 - RNA, 1701 nt, Artificial Sequence; identical to SEQ ID NO: 36510
  derived and/or modified CDS sequence (wt) from hemagglutinin__InfluenzaA__EPI696972

SEQ ID NO: 45857 - RNA, 1701 nt, Artificial Sequence
  derived and/or modified CDS sequence (wt) from hemagglutinin__InfluenzaA__EPI662594
augaaggcaauacuaguaguucugcuauauacauuuacaaccgcaaaugcagacacauuauguauagguuaucaugcgaacaauucaacagacacuguagacacaguacuagaaaagaauguaacaguaacacacucuguuaaccuucuggaagacaagcauaacggaaaacuaugcaaacuaagagggguagccccauugcauuuggguaaauguaacauugcuggcuggauccugggaaauccagagugugaaucacucuccacagcaaguucaugguccuacauuguggaaacaucuaauucagacaauggaacguguuacccaggagauuucaucaauuaugaggagcuaagagagcaauugagcucagugucaucauuugaaagguuugagauauuccccaagacaaguucauggcccaaucaugacucgaacaaagguguaacggcagcauguccucacgcuggagcaaaaagcuucuacaaaaacuugauauggcuaguuaaaaaaggaaauucauacccaaagcuuaaccaauccuacauuaaugauaaagggaaagaaguccucgugcuguggggcauucaccauccaucuacuacugcugaccaacaaagucucuaucagaaugcagaugcauauguuuuuguggggacaucaagauacagcaagaaguucaagccggaaauagcaacaagacccaaagugagggaucaagaagggagaaugaacuauuacuggacacuaguagagccgggagacaaaauaacauucgaagcaacuggaaaucuagugguaccgagauaugcauucacaauggaaagaaaugcuggaucugguauuaucauuucagauacaccaguccacgauugcaauacaacuugucagacacccgagggugcuauaaacaccagccucccauuucagaauauacauccgaucacaauuggaaaauguccaaaguauguaaaaagcacaaaauugagacuggccacaggauugaggaauguuccgucuauucaaucuagaggccuauucggggccauugccggcuucauugaagggggguggacagggaugguagauggaugguacgguuaucaccaucaaaaugagcaggggucaggauaugcagccgaccugaagagcacacaaaaugccauugacaagauuacuaacaaaguaaauucuguuauugaaaagaugaauacacaguucacagcaguggguaaagaguucaaccaccuggaaaaaagaauagagaaucuaaauaaaaaaguugaugaugguuuccuggacauuuggacuuacaaugccgaacuguugguucuauuggaaaaugaaagaacuuuggacuaucacgauucaaaugugaagaacuuguaugaaaaaguaagaaaccaguuaaaaaacaaugccaaggaaauuggaaacggcugcuuugaauuuuaccacaaaugcgauaacacgugcauggaaagugucaaaaaugggacuuaugacuacccaaaauacucagaggaagcaaaauuaaacagagaaaaaauagaugggguaaagcuggaaucaacaaggauuuaccagauuuuggcgaucuauucaacugucgccaguucauugguacugguagucucccugggggcaaucagcuucuggaugugcucuaaugggucucuacaguguagaauauguauuuaa

SEQ ID NO: 45858 - RNA, 1701 nt, Artificial Sequence
  derived and/or modified CDS sequence (wt) from hemagglutinin__InfluenzaA__EPI685579
augaaggcaauacuaguaguucugcuauauacauuuacaaccgcaaaugcagacacauuauguauagguuaucaugcgaacaauucaacagacacuguagacacaguacuagaaaagaauguaacaguaacacacucuguuaaccuucuggaagacaagcauaacggaaaacuaugcaaacuaagagggguagccccauugcauuuggguaaauguaacauugcuggcuggauccugggaaauccagagugugaaucacucuccacagcaaguucaugguccuacauuguggaaacaucuaauucagacaauggaacguguuacccaggagauuucaucaauuaugaggagcuaagagagcaauugagcucagugucaucauuugaaagguuugagauauuccccaagacaaguucauggcccaaucaugacucgaacaaagguguaacggcagcauguccucacgcuggagcaaaaagcuucuacaaaaacuugauauggcuaguuaaaaaaggaaauucauacccaaagcuuaaccaauccuacauuaaugauaaagggaaagaaguccucgugcuguggggcauucaccauccaucuacuacugcugaccaacaaagucucuaucagaaugcagaugcauauguuuuuguggggacaucaagauacagcaagaaguucaagccggaaauagcaacaagacccaaagugagggaucgagaagggagaaugaacuauuacuggacacuaguagagccgggagacaaaauaacauucgaagcaacuggaaaucuagugguaccgagauaugcauucacaauggaaagaaaugcuggaucugguauuaucauuucagauacaccaguccacgauugcaauacaacuugucagacacccgagggugcuauaaacaccagccucccauuucagaauauacauccgaucacaauuggaaaauguccaaaguauguaaaaagcacaaaauugagacuggccacaggauugaggaauguuccgucuauucaaucuagaggccuauucggggccauugccggcuucauugaagggggguggacagggaugguagauggaugguacgguuaucaccaucaaaaugagcaggggucaggauaugcagccgaccugaagagcacacaaaaugccauugacaagauuacuaacaaaguaaauucuguuauugaaaagaugaauacacaguucacagcaguggguaaagaguucaaccaccuggaaaaaagaauagagaaucuaaauaaaaaaguugaugaugguuuccuggacauuuggacuuacaaugccgaacuguugguucuauuggaaaaugaaagaacuuuggacuaucacgauucaaaugugaagaacuuguaugaaaaaguaagaaaccaguuaaaaaacaaugccaaggaaauuggaaacggcugcuuugaauuuuaccacaaaugcgauaacacgugcauggaaagugucaaaaaugggacuuaugacuacccaaaauacucagaggaagcaaaauuaaacagagaaaaaauagaugggguaaagcuggaaucaacaaggauuuaccagauuuuggcgaucuauucaacugucgccaguucauugguacugguagucucccugggggcaaucagcuucuggaugugcucuaaugggucucuacaguguagaauauguauuuaa

SEQ ID NO: 45859 - RNA, 1701 nt, Artificial Sequence
  derived and/or modified CDS sequence (wt) from hemagglutinin__InfluenzaA__EPI830230
augaaggcaauacuaguaguucugcuauauacauuuacaaccgcaaaugcagacacauuauguauagguuaucaugcgaacaauucaacagacacuguagacacaguacuagaaaagaauguaacaguaacacacucuguuaaccuucuggaagacaagcauaacggaaaacuaugcaaacuaagagggguagccccauugcauuuggguaaauguaacauugcuggcuggauccugggaaauccagagugugaaucacucuccacagcaaguucaugguccuacauuguggaaacaucuaauucagacaauggaacguguuacccaggagauuucaucaauuaugaggagcuaagagagcaauugagcucagugucaucauuugaaagguuugagauauuccccaagacaaguucauggcccaaucaugacucgaacaaagguguaacggcagcauguccucacgcuggagcaaaaagcuucuacaaaaacuugauauggcuaguuaaaaaaggaaauucauacccaaagcuuaaccaauccuacauuaaugauaaagggaaagaaguccucgugcuguggggcauucaccauccaucuacuacugcugaccaacaaagucucuaucagaaugcagaugcauauguuuuuguggggacaucaagauacagcaagauguucaagccggaaauagcaacaagacccaaagugagggaucgagaagggagaaugaacuauuacuggacacuaguagagccgggagacaaaauaacauucgaagcaacuggaaaucuagugguaccgagauaugcauucacaauggaaagaaaugcuggaucugguauuaucauuucagauacaccaguccacgauugcaauacaacuugucagacacccgagggugcuauaaacaccagccucccauuucagaauauacauccgaucacaauuggaaaauguccaaaguauguaaaaagcacaaaauugagacuggccacaggauugaggaauguuccgucuauucaaucuagaggccuauucggggccauugccggcuucauugaagggggguggacagggaugguagauggaugguacgguuaucaccaucaaaaugagcaggggucaggauaugcagccgaccugaagagcacacaaaaugccauugacaagauuacuaacaaaguaaauucuguuauugaaaagaugaauacacaguucacagcaguggguaaagaguucaaccaccuggaaaaaagaauagagaaucuaaauaaaaaaguugaugaugguuuccuggacauuuggacuuacaaugccgaacuguugguucuauuggaaaaugaaagaacuuuggacuaucacgauucaaaugugaagaacuuguaugaaaaaguaagaaaccaguuaaaaaacaaugccaaggaaauuggaaacggcugcuuugaauuuuaccacaaaugcgauaacacgugcauggaaagugucaaaaauggaacuuaugacuacccaaaauacucagaggaagcaaaauuaaacagagaaaaaauagaugggguaaagcuggaaucaacaaggauuuaccagauuuuggcgaucuauucaacugucgccaguucauugguacugguagucucccugggggcaaucagcuucuggaugugcucuaaugggucucuacaguguagaauauguauuuaa

SEQ ID NO: 45860 - RNA, 1701 nt, Artificial Sequence; identical to SEQ ID NO: 34676
  derived and/or modified CDS sequence (wt) from hemagglutinin__InfluenzaA__ACQ45338

SEQ ID NO: 45861 - RNA, 1701 nt, Artificial Sequence
  derived and/or modified CDS sequence (wt) from hemagglutinin__InfluenzaA__ACQ45338/m1
augaaggcaauacucguaguucugcuauauacauuugcaaccgcaaaugcagacacauuauguauagguuaucaugcgaacaauucaacagacacuguagacacaguacuagaaaagaauguaacaguaacacacucuguuaaccuucuagaagacaagcauaacgggaaacuaugcaaacuaagagggguagccccauugcauuuggguaaauguaacauugcuggcuggauccugggaaauccagagugugaaucacucuccacagcaagcucaugguccuacauuguggaaacaucuaguucagacaauggaacguguuacccaggagauuucaucgauuaugaggagcuaagagagcaauugagcucagugucaucauuugaaagguuugagauauuccccaagacaaguucauggcccaaucaugacucgaacaaagguguaacggcagcauguccucaugcuggagcaaagagcuucuacaaaaauuuaauauggcuaguuaagaaaggaaauucauacccaaagcucagcaaauccuacauuaaugauaaagggaaagaaguccucgugcuauggggcauucaccauccaucuaccagugcugaccaacaaagucucuaucagaaugcagaugcauauguuuuuguggggucaucaagauacagcaagaaguucaagccggaaauagcaauaagacccaaagugagggaucaagaagggagaaugaacuauuacuggacccuaguagagccgggagacaaaauaacauucgaagcaacuggaaaucuagugguaccgagauaugcauucgcaauggaaagaaaugcuggaucugguauuaucauuucagauacaccaguccacgauugcaauacaacuugucagacacccaagggugcuauaaacaccagccucccauuucagaauauacauccgaucacaauuggaaaauguccaaaauauguaaaaagcacaaaauugagacuggccacaggauugaggaaugucccgucuauucaaucuagaggccuauuuggggccauugccgguuucauugaaggcggguggacagggaugguagauggaugguacgguuaucaccaucaaaaugagcaggggucaggauaugcagccgaccucaagagcacacagaaugccauugacgagauuacuaacaaaguaaauucuguuauugaaaagaugaauacacaguucacagcaguagguaaagaguucaaccaccuggaaaagagaauagagaauuuaaauaagaaaguugaugaugguuuccuggacauuuggacuuacaaugccgaacuguugguucuauuggaaaaugaaagaacuuuggacuaccacgauucaaaugugaagaacuuauaugaaaagguaagaagccagcuaaagaacaaugccaaggaaauuggaaacggcugcuuugaauuuuaccacaaaugcgauaacacgugcauggaaagugucaaaaaugggacuuaugacuacccaaaauacucagaggaagcaaaauuaaacagagaagaaauagaugggguaaagcuggaaucaacaaggauuuaccagauuuuggcgaucuauucaacugucgccaguucauugguacugguagucucccugggggcaaucaguuucuggaugugcucuaaugggucucuacaguguagaauauguauuuaa

SEQ ID NO: 45862 - RNA, 1701 nt, Artificial Sequence
  derived and/or modified CDS sequence (wt) from hemagglutinin__InfluenzaA__ACQ45338/m2
augaaggcaauacugguaguucugcuauauacauuugcaaccgcaaaugcagacacauuauguauagguuaucaugcgaacaauucaacagacacuguagacacaguacuagaaaagaauguaacaguaacacacucuguuaaccuucuagaagacaagcauaacgggaaacuaugcaaacuaagagggguagccccauugcauuuggguaaauguaacauugcuggcuggauccugggaaauccagagugugaaucacucuccacagcaagcucaugguccuacauuguggaaacaucuaguucagacaauggaacguguuacccaggagauuucaucgauuaugaggagcuaagagagcaauugagcucagugucaucauuugaaagguuugagauauuccccaagacaaguucauggcccaaucaugacucgaacaaagguguaacggcagcauguccucaugcuggagcaaaaagcuucuacaaaaauuuaauauggcuaguuaaaaaaggaaauucauacccaaagcucagcaaauccuacauuaaugauaaagggaaagaaguccucgugcuauggggcauucaccauccaucuacuagugcugaccaacaaagucucuaucagaaugcagaugcauauguuuuuguggggucaucaagauacagcaagaaguucaagccggaaauagcaauaagacccaaagugagggaucaagaagggagaaugaacuauuacuggacacuaguagagccgggagacaaaauaacauucgaagcaacuggaaaucuagugguaccgagauaugcauucgcaauggaaagaaaugcuggaucugguauuaucauuucagauacaccaguccacgauugcaauacaacuugucagacacccaagggugcuauaaacaccagccucccauuucagaauauacauccgaucacaauuggaaaauguccaaaauauguaaaaagcacaaaauugagacuggccacaggauugaggaaugucccgucuauucaaucuagaggccuauuuggggccauugccgguuucauugaagggggguggacagggaugguagauggaugguacgguuaucaccaucaaaaugagcaggggucaggauaugcagccgaccugaagagcacacagaaugccauugacgagauuacuaacaaaguaaauucuguuauugaaaagaugaauacacaguucacagcaguagguaaagaguucaaccaccuggaaaaaagaauagagaauuuaaauaaaaaaguugaugaugguuuccuggacauuuggacuuacaaugccgaacuguugguucuauuggaaaaugaaagaacuuuggacuaccacgauucaaaugugaagaacuuauaugaaaagguaagaagccagcuaaaaaacaaugccaaggaaauuggaaacggcugcuuugaauuuuaccacaaaugcgauaacacgugcauggaaagugucaaaaaugggacuuaugacuacccaaaauacucagaggaagcaaaauuaaacagagaagaaauagaugggguaaagcuggaaucaacaaggauuuaccagauuuuggcgaucuauucaacugucgccaguucauugguacugguagucucccugggggcaaucaguuucuggaugugcucuaaugggucucuacaguguagaauauguauuuaa

SEQ ID NO: 45863 - RNA, 1701 nt, Artificial Sequence; identical to SEQ ID NO: 34331
  derived and/or modified CDS sequence (wt) from hemagglutinin__InfluenzaA__ACU79871

SEQ ID NO: 45864 - RNA, 1701 nt, Artificial Sequence
  derived and/or modified CDS sequence (wt) from hemagglutinin__InfluenzaA__ACU79871/m1
augaagaccaucauugcuuugagcuacauuuucugucuggcucucggccaagaccuuccaggaaaugacaacagcacagcaacgcugugccugggacaucaugcggugccaaacggaacacuagugaaaacaaucacagaugaucagauugaagugacuaaugcuacugagcuaguucagagcuccucaacggggaaaauaugcaacaauccucaucgaauccuugauggaauagacugcacacugauagaugcucuauugggggacccucauugugauguuuuucaaaaugagacaugggaccuuuucguugaacgcagcaaagcuuucagcaacuguuacccuuaugaugugccagauuaugccucccuuaggucacuaguugccucgucaggcacucuggaguuuaucacugaggguuucacuuggacuggggucacucagaaugggggaagcaaugcuugcaaaaggggaccugguagcgguuuuuucaguagacugaacugguugaccaaaucaggaagcacauauccagugcugaacgugacuaugccaaacaaugacaauuuugacaaacuauacauuugggggguucaccacccgagcacgaaccaagaacaaaccagccuguauguucaagcaucagggagagucacagucucuaccaggagaagccagcaaacuauaaucccgaauaucgaguccagacccuggguaaggggucagucuaguagaauaagcaucuauuggacaauaguuaagccgggagacguacugguaauuaauaguaaugggaaccuaaucgcuccucgggguuauuucaaaaugcgcacugggaaaagcucaauaaugaggucagaugcaccuauugauaccuguauuucugaaugcaucacuccaaauggaagcauucccaaugacaagcccuuucaaaacguaaacaagaucacauauggagcaugccccaaguauguuaagcaaaacacccugaaguuggcaacagggaugcggaauguaccagagaaacaaacuagaggccuauucggcgcaauagcagguuucauagaaaaugguugggagggaaugauagacgguugguacgguuucaggcaucaaaauucugagggcacaggacaagcagcagaucuuaaaagcacucaagcagccaucgaccaaaucaaugggaaagugaacaggauaaucgagaagacgaacgagaaauuccaucaaaucgaaaaggaauucucagaaguagaagggagaauucaggaccucgagaaauacguugaagacacuaaaauagaucucuggucuuacaaugcggagcuucuugucgcucuggagaaucaacauacaauugaccugacugacucggaaaugaacaagcuguuugaaaaaacaaggaggcaacugagggaaaaugcugaagacaugggcaaugguugcuucaaaauauaccacaaaugugacaacgcuugcauagagucaaucagaagugggacuuaugaccaugauguauacagagacgaagcauuaaacaaccgguuucagaucaaagguguugaacugaagucuggauacaaagacuggauccuguggauuuccuuugccauaucaugcuuuuugcuuuguguuguuuugcugggguucaucaugugggccugccagagaggcaacauuaggugcaacauuugcauuuga

SEQ ID NO: 45865 - RNA, 1701 nt, Artificial Sequence
  derived and/or modified CDS sequence (wt) from hemagglutinin__InfluenzaA__EPI643118
augaagacuaucauugcuuugagcuacauucuaugucugguuuucgcucaaaaaauuccuggaaaugacaauagcacggcaacgcugugccuugggcaccaugcaguaccaaacggaacgauagugaaaacaaucacgaaugaccgaauugaaguuacuaaugcuacugagcugguucagaauuccucaauaggugaaauaugcgacaguccucaucagauccuugauggagaaaacugcacacuaauagaugcucuauugggagacccucagugugauggcuuucaaaauaagaaaugggaccuuuuuguugaacgaagcaaagccuacagcaacuguuacccuuaugaugugccggauuaugccucccuuaggucacuaguugccucauccggcacacuggaguuuaacaaugaaagcuucaauuggacuggagucacucaaaacggaacaaguucugcuugcauaaggagaucuaguaguaguuucuuuaguagauuaaauugguugacccacuuaaacuacaaauacccagcauugaacgugacuaugccaaacaaugaacaauuugacaaauuguacauuugggggguucaccacccggguacggacaaggaccaaaucuucccguaugcucaaucaucaggaagaaucauaguaucuaccaaaagaagccaacaagcuguaaucccaaauaucggaucuagacccagaauaagggauaucccuagcagaauaagcaucuauuggacaauaguaaaaccgggagacauacuuuugauuaacagcacagggaaucuaauugcuccuagggguuacuucaaacuacgaagugggaaaagcucaauaaugagaucagaugcacccauuggcaaaugcaagucugaaugcaucacuccaaauggaagcauucccaaugacaaaccauuccaaaauguaaacaggaucacauacggggccugucccagauauguuaagcauagcacucugaaauuggcaacaggaaugcgaaauguaccagagaaacaaacuagaggcauauuuggcgcaauagcggguuucauagaaaaugguugggagggaaugguggaugguugguacgguuucaggcaucaaaauucugagggaagaggacaagcagcagaucucaaaagcacucaagcagcaaucgaucaaaucaaugggaagcugaaucgauugaucgggaaaaccaacgagaaauuccaucagauugaaaaagaauucucagaaguagaaggaagaauucaggaccuugagaaauauguugaggacacuaaaauagaucucuggucauacaacgcggagcuucuuguugcccuggagaaccaacauacaauugaucuaacugacucagaaaugaacaaacuguuugaaaaaacaaagaagcaacugagggaaaaugcugaggauaugggcaaugguuguuucaaaauauaccacaaaugugacaaugccugcauaggaucaauaagaaauggaacuuaugaccacaauguguacagggaugaagcauuaaacaaccgguuccagaucaagggaguugagcugaagucaggguacaaagauuggauccuauggauuuccuuugccauaucauguuuuuugcuuuguguugcuuuguugggguucaucaugugggccugccaaaagggcaacauuaggugcaacauuugcauuuga

SEQ ID NO: 45866 - RNA, 1701 nt, Artificial Sequence; identical to SEQ ID NO: 44453
  derived and/or modified CDS sequence (wt) from hemagglutinin__InfluenzaA__EPI675798

SEQ ID NO: 45867 - RNA, 1701 nt, Artificial Sequence
  derived and/or modified CDS sequence (wt) from hemagglutinin__InfluenzaA__EPI578430
augaagacuaucauugcuuugagcuacauucuaugucugguuuucgcucaaaaaauuccuggaaaugacaauagcacggcaacgcugugccuugggcaccaugcaguaccaaacggaacgauagugaaaacaaucacgaaugaccgaauugaaguuacuaaugcuacugagcugguucagaauuccucaauaggugaaauaugcgacaguccucaucagauccuugauggagaaaacugcacacuaauagaugcucuauugggagacccucagugugauggcuuucaaaauaagaaaugggaccuuuuuguugaacgaagcaaagccuacagcagcuguuacccuuaugaugugccggauuaugccucccuuaggucacuaguugccucauccggcacacuggaguuuaacaaugaaagcuucaauuggacuggagucacucaaaacggaacaaguucugcuugcauaaggagaucuaguaguaguuucuuuaguagauuaaauugguugacccacuuaaacuacaaauacccagcauugaacgugacuaugccaaacaaugaacaauuugacaaauuguacauuugggggguucaccacccggguacggacaaggaccaaaucuucccguaugcucaaucaucaggaagaaucacaguaucuaccaaaagaagccaacaagcuguaaucccaaauaucggaucuagacccagaauaagggauaucccuagcagaauaagcaucuauuggacaauaguaaaaccgggagacauacuuuugauuaacagcacagggaaucuaauugcuccuagggguuacuucaaaauacgaagugggaaaagcucaauaaugagaucagaugcacccauuggcaaaugcaagucugaaugcaucacuccaaauggaagcauucccaaugacaaaccauuccaaaauguaaacaggaucacauacggggccugucccagauauguuaagcauagcacucugaaauuggcaacaggaaugcgaaauguaccagagaaacaaacuagaggcauauuuggcgcaauagcggguuucauagaaaaugguugggagggaaugguggaugguugguacgguuucaggcaucaaaauucugagggaagaggacaagcagcagaucucaaaagcacucaagcagcaaucgaucaaaucaaugggaagcugaaucgauugaucgggaaaaccaacgagaaauuccaucagauugaaaaagaauucucagaaguagaaggaagaauucaggaccuugagaaauauguugaggacacuaaaauagaucucuggucauacaacgcggagcuucuuguugcccuggagaaccaacauacaauugaucuaacugacucagaaaugaacaaacuguuugaaaaaacaaagaagcaacugagggaaaaugcugaggauaugggcaaugguuguuucaaaauauaccacaaaugugacaaugccugcauaggaucaauaagaaauggaacuuaugaccacaauguguacagggaugaagcauuaaacaaccgguuccagaucaagggaguugagcugaagucaggguacaaagauuggauccuauggauuuccuuugccauaucauguuuuuugcuuuguguugcuuuguugggguucaucaugugggccugccaaaagggcaacauuaggugcaacauuugcauuuga

SEQ ID NO: 45868 - RNA, 1701 nt, Artificial Sequence
  derived and/or modified CDS sequence (wt) from hemagglutinin__InfluenzaA__EPI614406
augaagacuaucauugcuuugagcuacauucuaugucugguuuucgcucaaaaaauuccuggaaaugacaauagcacggcaacgcugugccuugggcaccaugcaguaccaaacggaacgauagugaaaacaaucacgaaugaccgaauugaaguuacuaaugcuacugagcugguucagaauuccucaauaggugaaauaugcgacaguccucaucagauccuugauggagaaaacugcacacuaauagaugcucuauugggagacccucagugugauggcuuucaaaauaagaaaugggaccuuuuuguugaacgaagcaaagccuacagcagcuguuacccuuaugaugugccggauuaugccucccuuaggucacuaguugccucauccggcacacuggaguuuaacaaugaaagcuucaauuggacuggagucacucaaaacggaacaaguucugcuugcauaaggagaucuaguaguaguuucuuuaguagauuaaauugguugacccacuuaaacuacaaauacccagcauugaacgugacuaugccaaacaaugaacaauuugacaaauuguacauuugggggguucaccacccggguacggacaaggaccaaaucuucccguaugcucaaucaucaggaagaaucacaguaucuaccaaaagaagccaacaagcuguaaucccaaauaucggaucuagacccagaauaaggaauaucccuagcagaauaagcaucuauuggacaauaguaaaaccgggagacauacuuuugauuaacagcacagggaaucuaauugcuccuagggguuacuucaaaauacgaagugggaaaagcucaauaaugagaucagaugcacccauuggcaaaugcaagucugaaugcaucacuccaaauggaagcauucccaaugacaaaccauuccaaaauguaaacaggaucacauacggggccugucccagauauguuaagcauagcacucugaaauuggcaacaggaaugcgaaauguaccagagaaacaaacuagaggcauauuuggcgcaauagcggguuucauagaaaaugguugggagggaaugguggaugguugguacgguuucaggcaucaaaauucugagggaagaggacaagcagcagaucucaaaagcacucaagcagcaaucgaucaaaucaaugggaagcugaaucgauugaucgggaaaaccaacgagaaauuccaucagauugaaaaagaauucucagaaguagaaggaagaauucaggaccuugagaaauauguugaggacacuaaaauagaucucuggucauacaacgcggagcuucuuguugcccuggagaaccaacauacaauugaucuaacugacucagaaaugaacaaacuguuugaaaaaacaaagaagcaacugagggaaaaugcugaggauaugggcaaugguuguuucaaaauauaccacaaaugugacaaugccugcauaggaucaauaagaaauggaacuuaugaccacaauguguacagggaugaagcauuaaacaaccgguuccagaucaagggaguugagcugaagucaggguacaaagauuggauccuauggauuuccuuugccauaucauguuuuuugcuuuguguugcuuuguugggguucaucaugugggccugccaaaagggcaacauuaggugcaacauuugcauuuga

SEQ ID NO: 45869 - RNA, 1695 nt, Artificial Sequence
  derived and/or modified CDS sequence (wt) from hemagglutinin__InfluenzaA__ACU65077/m1
auggagaaaauagugcuucuuuuugcaauagucagucuuguuaaaagugaucagauuugcauugguuaccaugcaaacaacucgacagagcagguugacacaauaauggaaaagaacguuacuguuacacaugcccaagacauacuggaaaagacacacaaugggaagcucugcgaucuagauggagugaagccucuaauuuugagagauuguaguguagcuggauggcuccucggaaacccaaugugugacgaauucaucaaugugccggaauggucuuacauaguggagaaggccaauccagucaaugaccucuguuacccaggggauuucaaugacuaugaagaauugaaacaccuauugagcagaauaaaccauuuugagaaaauucagaucauccccaaaaguucuugguccagucaugaagccucauugggggugagcucagcauguccauaccagggaaaguccuccuuuuucagaaaugugguauggcuuaucaaaaagaacaguacauacccaacaauaaagaggagcuacaauaauaccaaccaagaagaucuuuugguacugugggggauucaccauccuaaugaugcggcagagcagacaaagcucuaucaaaacccaaccaccuauauuuccguugggacaucaacacuaaaccagagauugguaccaagaauagcuacuagauccaaaguaaacgggcaaaguggaaggauggaguucuucuggacaauuuuaaaaccgaaugaugcaaucaacuucgagaguaauggaaauuucauugcuccagaauaugcauacaaaauugucaagaaaggggacucaacaauuaugaaaagugaauuggaauaugguaacugcaacaccaagugucaaacuccaaugggggcgauaaacucuagcaugccauuccacaauauacacccucucaccaucggggaaugccccaaauaugugaaaucaaacagauuaguccuugcgacugggcucagaaauagcccucaacgagagacgcgaggauuauuuggagcuauagcagguuuuauagagggaggauggcagggaaugguagaugguugguauggguaccaccauagcaacgagcaggggaguggguacgcugcagacaaagaauccacucaaaaggcaauagauggagucaccaauaaggucaacucgauuauugacaaaaugaacacucaguuugaggccguuggaagggaauuuaacaacuuagaaaggagaauagagaauuuaaacaagaagauggaagacggguuccuagaugucuggacuuauaaugcugaacuucuaguucucauggaaaacgagagaacucuagacuuucaugacucaaaugucaagaaccuuuacgacaagguccgacuacagcuuagggauaaugcaaaggagcuggguaacgguuguuucgaguucuaucauaaaugugauaaugaauguauggaaaguguaagaaacggaacguaugacuacccgcaguauucagaagaagcaagacuaaaaagagaggaaauaaguggaguaaaauuggaaucaauaggaauuuaccaaauauugucaauuuauucuacaguggcgagcucccuagcacuggcaaucaugguagcuggucuauccuuauggaugugcuccaaugggucguuacaaugcagaauuugcauuuaa

SEQ ID NO: 45870 - RNA, 1695 nt, Artificial Sequence
  derived and/or modified CDS sequence (wt) from hemagglutinin__InfluenzaA__ACU65077/m2
auggagaaaauagugcuucuuuuugcaauagucagucuuguuaaaagugaucagauuugcauugguuaccaugcaaacaacucgacagagcagguugacacaauaauggaaaagaacguuacuguuacacaugcccaagacauacuggaaaagacacacaaugggaagcucugcgaucuagauggagugaagccucuaauuuugagagauuguaguguagcuggauggcuccucggaaacccaaugugugacgaauuuaucaaugugccggaauggucuuacauaguggagaaggccaauccagucaaugaccucuguuacccaggggauuucaaugacuaugaagaauugaaacaccuauugagcagaauaaaccauuuugagaaaauucagaucauccccaaaaguucuugguccagucaugaagccucauugggggugagcucagcauguccauaccagggaaaguccuccuuuuucagaaaugugguauggcuuaucaaaaagaacaguacauacccaacaauaaagaggagcuacaauaauaccaaccaagaagaucuuuugguacugugggggauucaccauccuaaugaugcggcagagcagacaaagcucuaucaaaacccaaccaccuauauuuccguugggacaucaacacuaaaccagagauugguaccaagaauagcuacuagauccaaaguaaacgggcaaaguggaaggauggaguucuucuggacaauuuuaaaaccgaaugaugcaaucaacuucgagaguaauggaaauuucauugcuccagaauaugcauacaaaauugucaagaaaggggacucaacaauuaugaaaagugaauuggaauaugguaacugcaacaccaagugucaaacuccaaugggggcgauaaacucuagcaugccauuccacaauauacacccucucaccaucggggaaugccccaaauaugugaaaucaaacagauuaguccuugcgacugggcucagaaauagcccucaacgagagacgcgaggauuauuuggagcuauagcagguuuuauagagggaggauggcagggaaugguagaugguugguauggguaccaccauagcaacgagcaggggaguggguacgcugcagacaaagaauccacucaaaaggcaauagauggagucaccaauaaggucaacucgauuauugacaaaaugaacacucaguuugaggccguuggaagggaauuuaacaacuuagaaaggagaauagagaauuuaaacaagaagauggaagacggguuccuagaugucuggacuuauaaugcugaacuucuaguucucauggaaaacgagagaacucuagacuuucaugacucaaaugucaagaaccuuuacgacaagguccgacuacagcuuagggauaaugcaaaggagcuggguaacgguuguuucgaguucuaucauaaaugugauaaugaauguauggaaaguguaagaaacggaacguaugacuacccgcaguauucagaagaagcaagacuaaaaagagaggaaauaaguggaguaaaauuggaaucaauaggaauuuaccaaauauugucaauuuauucuacaguggcgagcucccuagcacuggcaaucaugguagcuggucuauccuuauggaugugcuccaaugggucguuacaaugcagaauuugcauuuaa

SEQ ID NO: 45871 - RNA, 1707 nt, Artificial Sequence
  derived and/or modified CDS sequence (wt) from hemagglutinin__InfluenzaA__ABP51976
auggagaaaauagugcuucuuuuugcaauagucagucuuguuaaaagugaucagauuugcauugguuaccaugcaaacaacucgacagagcagguugacacaauaauggaaaagaacguuacuguuacacaugcccaagacauacuggaaaagacacacaaugggaagcucugcgaucuagauggagugaagccucuaauuuugagagauuguaguguagcuggauggcuccucggaaacccaaugugugacgaauucaucaaugugccggaauggucuuacauaguggagaaggccaauccagucaaugaccucuguuacccaggggauuucaaugacuaugaagaauugaaacaccuauugagcagaauaaaccauuuugagaaaauucagaucauccccaaaaguucuugguccagucaugaagccucauugggggugagcucagcauguccauaccagggaaaguccuccuuuuucagaaaugugguauggcuuaucaaaaagaacaguacauacccaacaauaaagaggagcuacaauaauaccaaccaagaagaucuuuugguacugugggggauucaccauccuaaugaugcggcagagcagacaaagcucuaucaaaacccaaccaccuauauuuccguugggacaucuacacuaaaccagagauugguaccaagaauagcuacuagauccaaaguaaacgggcaaaguggaaggauggaguucuucuggacaauuuuaaaaccgaaugaugcaaucaacuucgagaguaauggaaauuucauugcuccagaauaugcauacaaaauugucaagaaaggggacucaacaauuaugaaaagugaauuggaauaugguaacugcaacaccaagugucaaacuccaaugggggcgauaaacucuagcaugccauuccacaauauacacccucucaccaucggggaaugccccaaauaugugaaaucaaacagauuaguccuugcgacugggcucagaaauagcccucaaagagagagaagaagaaaaaagagaggauuauuuggagcuauagcagguuuuauagagggaggauggcagggaaugguagaugguugguauggguaccaccauagcaacgagcaggggaguggguacgcugcagacaaagaauccacucaaaaggcaauagauggagucaccaauaaggucaacucgauuauugacaaaaugaacacucaguuugaggccguuggaagggaauuuaacaacuuagaaaggagaauagagaauuuaaacaagaagauggaagacggguuccuagaugucuggacuuauaaugcugaacuucuaguucucauggaaaacgagagaacucuagacuuucaugacucaaaugucaagaaccuuuacgacaagguccgacuacagcuuagggauaaugcaaaggagcuggguaacgguuguuucgaguucuaucauaaaugugauaaugaauguauggaaaguguaagaaacggaacguaugacuacccgcaguauucagaagaagcaagacuaaaaagagaggaaauaaguggaguaaaauuggaaucaauaggaauuuaccaaauauugucaauuuauucuacaguggcgagcucccuagcacuggcaaucaugguagcuggucuauccuuauggaugugcuccaaugggucguuacaaugcagaauuugcauuuaa

SEQ ID NO: 45872 - RNA, 1707 nt, Artificial Sequence
  derived and/or modified CDS sequence (wt) from hemagglutinin__InfluenzaA__ABP51976/m1
auggagaaaauagugcuucuuuuugcaauagucagucuuguuaaaagugaucagauuugcauugguuaccaugcaaacaacucgacagagcagguugacacaauaauggaaaagaacguuacuguuacacaugcccaagacauacuggaaaagacacacaaugggaagcucugcgaucuagauggagugaagccucuaauuuugagagauuguaguguagcuggauggcuccucggaaacccaaugugugacgaauuuaucaaugugccggaauggucuuacauaguggagaaggccaauccagucaaugaccucuguuacccaggggauuucaaugacuaugaagaauugaaacaccuauugagcagaauaaaccauuuugagaaaauucagaucauccccaaaaguucuugguccagucaugaagccucauugggggugagcucagcauguccauaccagggaaaguccuccuuuuucagaaaugugguauggcuuaucaaaaagaacaguacauacccaacaauaaagaggagcuacaauaauaccaaccaagaagaucuuuugguacugugggggauucaccauccuaaugaugcggcagagcagacaaagcucuaucaaaacccaaccaccuauauuuccguugggacaucuacacuaaaccagagauugguaccaagaauagcuacuagauccaaaguaaacgggcaaaguggaaggauggaguucuucuggacaauuuuaaaaccgaaugaugcaaucaacuucgagaguaauggaaauuucauugcuccagaauaugcauacaaaauugucaagaaaggggacucaacaauuaugaaaagugaauuggaauaugguaacugcaacaccaagugucaaacuccaaugggggcgauaaacucuagcaugccauuccacaauauacacccucucaccaucggggaaugccccaaauaugugaaaucaaacagauuaguccuugcgacugggcucagaaauagcccucaaagagagagaagaagaaaaaagagaggauuauuuggagcuauagcagguuuuauagagggaggauggcagggaaugguagaugguugguauggguaccaccauagcaacgagcaggggaguggguacgcugcagacaaagaauccacucaaaaggcaauagauggagucaccaauaaggucaacucgauuauugacaaaaugaacacucaguuugaggccguuggaagggaauuuaacaacuuagaaaggagaauagagaauuuaaacaagaagauggaagacggguuccuagaugucuggacuuauaaugcugaacuucuaguucucauggaaaacgagagaacucuagacuuucaugacucaaaugucaagaaccuuuacgacaagguccgacuacagcuuagggauaaugcaaaggagcuggguaacgguuguuucgaguucuaucauaaaugugauaaugaauguauggaaaguguaagaaacggaacguaugacuacccgcaguauucagaagaagcaagacuaaaaagagaggaaauaaguggaguaaaauuggaaucaauaggaauuuaccaaauauugucaauuuauucuacaguggcgagcucccuagcacuggcaaucaugguagcuggucuauccuuauggaugugcuccaaugggucguuacaaugcagaauuugcauuuaa

SEQ ID NO: 45873 - RNA, 1695 nt, Artificial Sequence
  derived and/or modified CDS sequence (wt) from hemagglutinin__InfluenzaA__ABW90125
auggagaaaauagugcuucuuuuugcaauagucagucuuguuaaaagugaucagauuugcauugguuaccaugcaaacaacucgacagagcagguugacacaauaauggaaaagaacguuacuguuacacaugcccaagacauacuggaaaagaaacacaacgggaagcucugcgaucuagauggagugaagccucuaauuuugagagauuguagcguagcuggauggcuccucggaaacccaaugugugacgaauucaucaaugugccggaauggucuuacauaguggagaaggccaauccagucaaugaccucuguuacccaggggauuucaaugacuaugaagaauugaaacaccuauugagcagaauaaaccauuuugagaaaauucagaucauccccaaaaguuauugguccagucaugaagccucauuaggggugagcucagcaugcccauaccagggaaaguccuccuuuuucagaaaugugguauggcuuaccaaaaagaacaguacauacccaacaauaaagaggagcuacaauaauaccaaccaagaagaucuuuugguacugugggggauucaccauccuaaugaugcggcagagcagacaaagcucuaucaaaacccaaccaccuauauuuccguugggacaucaacacuaaaccagagauugguaccaagaauagcuacuagauccaaaguaaacgggcaaaguggaaggauggaguucuucuggacaauuuuaaagccgaaugaugcaaucaacuucgagaguaauggaaauuucauugcuccagaauaugcauacaaaauugucaagaaaggggacucaacaauuaugaaaagugaauuggaauaugguaacugcaacaccaagugucaaacuccaaugggggcgauaaacucuagcaugccauuccacaauauacacccucucaccauuggggaaugccccaaauaugugaaaucaaacagauuaguccuugcgacugggcucagaaauagcccucaacgagagacgcgaggauuauuuggagcuauagcagguuuuauagagggaggauggcagggaaugguagaugguugguauggguaccaccauagcaaugagcaggggaguggguacgcugcagacaaagaauccacucaaaaggcaauagauggagucaccaauaaggucaacucgaucauugacaaaaugaacacucaguuugaggccguuggaagggaauuuaacaacuuagaaaggagaauagagaauuuaaacaagaagauggaagacggguuccuagaugucuggacuuauaaugcugaacuucugguucucauggaaaaugagagaacucuagacuuucaugacucaaaugucaagaaccuuuacgacaagguccgacuacagcuuagggauaaugcaaaggagcuggguaacgguuguuucgaguucuaucauaaaugugauaaugaauguauggaaaguguaagaaauggaacguaugacuacccgcaguauucagaagaagcgagacuaaaaagagaggaaauaaguggaguaaaauuggaaucaauaggaauuuaccaaauacugucaauuuauucuacaguggcgaguucccuagcacuggcaaucaugguagcuggucuauccuuauggaugugcuccaauggaucguuacaaugcagaauuugcauuuaa

SEQ ID NO: 45874 - RNA, 1695 nt, Artificial Sequence
  derived and/or modified CDS sequence (wt) from hemagglutinin__InfluenzaA__ABW90126
auggagaaaauagugcuucuuuuugcaauagucagucuuguuaaaagugaucagauuugcauugguuaccaugcaaacaacucgacagagcagguugacacaauaauggaaaagaacguuacuguuacacaugcccaagacauacuggaaaagaaacacaacgggaagcucugcgaucuagauggagugaagccucuaauuuugagagauuguagcguagcuggauggcuccucggaaacccaaugugugacgaauucaucaaugugccggaauggucuuacauaguggagaaggccaauccagucaaugaccucuguuacccaggggauuucaaugacuaugaagaauugaaacaccuauugagcagaauaaaccauuuugagaaaauucagaucauccccaaaaguucuugguccagucaugaagccucauuaggggugagcucagcaugcccauaccagggaaaguccuccuuuuucagaaaugugguauggcuuaucaaaaagaacaguacauacccaacaauaaaggggagcuacaauaauaccaaccaagaagaucuuuugguacugugggggauucaccauccuaaugaugcggcagagcagacaaagcucuaucaaaacccaaccaccuauauuuccguugggacaucaacacuaaaccagagauugguaccaagaauagcuacuagauccaaaguaaacgggcaaaguggaaggauggaguucuucuggacaauuuuaaagccgaaugaugcaaucaacuucgagaguaauggaaauuucauugcuccagaauaugcauacaaaauugucaagaaaggggacucaacaauuaugaaaagugaauuggaauaugguaacugcaacaccaagugucaaacuccaaugggggcgauaaacucuagcaugccauuccacaauauacacccucucaccauuggggaaugccccaaauaugugaaaucaaacagauuaguccuugcgacugggcucagaaauagcccucaacgagagacgcgaggauuauuuggagcuauagcagguuuuauagagggaggauggcagggaaugguagaugguugguauggguaccaccauagcaaugagcaggggaguggguacgcugcagacaaagaauccacucaaaaggcaauagauggagucaccaauaaggucaacucgaucauugacaaaaugaacacucaguuugaggccguuggaagggaauuuaacaacuuagaaaggagaauagagaauuuaaacaagaagauggaagacggguuccuagaugucuggacuuauaaugcugaacuucugguucucauggaaaaugagagaacucuagacuuucaugacucaaaugucaagaaccuuuacgacaagguccgacuacagcuuagggauaaugcaaaggagcuggguaacgguuguuucgaguucuaucauaaaugugauaaugaauguauggaaaguguaagaaauggaacguaugacuacccgcaguauucagaagaagcgagacuaaaaagagaggaaauaaguggaguaaaauuggaaucaauaggaauuuaccaaauacugucaauuuauucuacaguggcgaguucccuagcacuggcaaucaugguagcuggucuauccuuauggaugugcuccaauggaucguuacaaugcagaauuugcauuuaa

SEQ ID NO: 45875 - RNA, 1695 nt, Artificial Sequence
  derived and/or modified CDS sequence (wt) from hemagglutinin__InfluenzaA__ABW90127
auggagaaaauagugcuucuuuuugcaauagucagucuuguuaaaagugaucagauuugcauugguuaccaugcaaacaacucgacagagcagguugacacaauaauggaaaagaacguuacuguuacacaugcccaagacauacuggaaaagaaacacaacgggaagcucugcgaucuagauggagugaagccucuaauuuugagagauuguagcguagcuggauggcuccucggaaacccaaugugugacgaauucaucaaugugccggaauggucuuacauaguggagaaggccaauccagucaaugaccucuguuacccaggggauuucaaugacuaugaagaauugaaacaccuauugagcagaauaaaccauuuugagaaaauucagaucauccccaaaaguucuugguccagucaugaagccucauuaggggugagcucagcaugcccauaccagggagaguccuccuuuuucagaaaugugguauggcuuaucaaaaagaacaguacauacccaacaauaaagaggagcuacaauaauaccaaccaagaagaucuuuugguacugugggggauucaccauccuaaugaugcggcagagcagacaaagcucuaucaaaacccaaccaccuauauuuccguugggacaucaacacuaaaccagagauugguaccaagaauagcuacuagauccaaaguaaacgggcaaaguggaaggauggaguucuucuggacaauuuuaaagccgaaugaugcaaucaacuucgagaguaauggaaauuucauugcuccagaauaugcauacaaaauugucaagaaaggggacucaacaauuaugaaaagugaauuggaauaugguaacugcaacaccaagugucaaacuccaaugggggcgauaaacucuagcaugccauuccacaauauacacccucucaccauuggggaaugccccaaauaugugaaaucaaacagauuaguccuugcgacugggcucagaaauagcccucaacgagagacgcgaggauuauuuggagcuauagcagguuuuauagagggaggauggcagggaaugguagaugguugguauggguaccaccauagcaaugagcaggggaguggguacgcugcagacaaagaauccacucaaaaggcaauagauggagucaccaauaaggucaacucgaucauugacaaaaugaacacucaguuugaggccguuggaagggaauuuaacaacuuagaaaggagaauagagaauuuaaacaagaagauggaagacggguuccuagaugucuggacuuauaaugcugaacuucugguucucauggaaaaugagagaacucuagacuuucaugacucaaaugucaagaaccuuuacgacaagguccgacuacagcuuagggauaaugcaaaggagcuggguaacgguuguuucgaguucuaucauaaaugugauaaugaauguauggaaaguguaagaaauggaacguaugacuacccgcaguauucagaagaagcgagacuaaaaagagaggaaauaaguggaguaaaauuggaaucaauaggaauuuaccaaauacugucaauuuauucuacaguggcgaguucccuagcacuggcaaucaugguagcuggucuauccuuauggaugugcuccaauggaucguuacaaugcagaauuugcauuuaa

SEQ ID NO: 45876 - RNA, 1695 nt, Artificial Sequence
  derived and/or modified CDS sequence (wt) from hemagglutinin__InfluenzaA__ABW90128
auggagaaaauagugcuucuuuuugcaauagucagucuuguuaaaagugaucagauuugcauugguuaccaugcaaacaacucgacagagcagguugacacaauaauggaaaagaacguuacuguuacacaugcccaagacauacuggaaaagaaacacaacgggaagcucugcgaucuagauggagugaagccucuaauuuugagagauuguagcguagcuggauggcuccucggaaacccaaugugugacgaauucaucaaugugccggaauggucuuacauaguggagaaggccaauccagucaaugaccucuguuacccaggggauuucaaugacuaugaagaauugaaacaccuauugagcagaauaaaccauuuugagaaaauucagaucauccccaaaaguucuugguccagucaugaagccucauuaggggugagcucagcaugcccauaccagggaaaguccuccuuuuucagaaaugugguauggcuuaucgaaaagaacaguacauacccaacaauaaagaggagcuacaauaauaccaaccaagaagaucuuuugguacugugggggauucaccauccuaaugaugcggcagagcagacaaagcucuaucaaaacccaaccaccuauauuuccguugggacaucaacacuaaaccagagauugguaccaagaauagcuacuagauccaaaguaaacgggcaaaguggaaggauggaguucuucuggacaauuuuaaagccgaaugaugcaaucaacuucgagaguaauggaaauuucauugcuccagaauaugcauacaaaauugucaagaaaggggacucaacaauuaugaaaagugaauuggaauaugguaacugcaacaccaagugucaaacuccaaugggggcgauaaacucuagcaugccauuccacaauauacacccucucaccauuggggaaugccccaaauaugugaaaucaaacagauuaguccuugcgacugggcucagaaauagcccucaacgagagacgcgaggauuauuuggagcuauagcagguuuuauagagggaggauggcagggaaugguagaugguugguauggguaccaccauagcaaugagcaggggaguggguacgcugcagacaaagaauccacucaaaaggcaauagauggagucaccaauaaggucaacucgaucauugacaaaaugaacacucaguuugaggccguuggaagggaauuuaacaacuuagaaaggagaauagagaauuuaaacaagaagauggaagacggguuccuagaugucuggacuuauaaugcugaacuucugguucucauggaaaaugagagaacucuagacuuucaugacucaaaugucaagaaccuuuacgacaagguccgacuacagcuuagggauaaugcaaaggagcuggguaacgguuguuucgaguucuaucauaaaugugauaaugaauguauggaaaguguaagaaauggaacguaugacuacccgcaguauucagaagaagcgagacuaaaaagagaggaaauaaguggaguaaaauuggaaucaauaggaauuuaccaaauacugucaauuuauucuacaguggcgaguucccuagcacuggcaaucaugguagcuggucuauccuuauggaugugcuccaauggaucguuacaaugcagaauuugcauuuaa

SEQ ID NO: 45877 - RNA, 1695 nt, Artificial Sequence
  derived and/or modified CDS sequence (wt) from hemagglutinin__InfluenzaA__ABW90129
auggagaaaauagugcuucuuuuugcaauagucagucuuguuaaaagugaucagauuugcauugguuaccaugcaaacaacucgacagagcagguugacacaauaauggaaaagaacguuacuguuacacaugcccaagacauacuggaaaagaaacacaacgggaagcucugcgaucuagauggagugaagccucuaauuuugagagauuguagcguagcuggauggcuccucggaaacccaaugugugacgaauucaucaaugugccggaauggucuuacauaguggagaaggccaauccagucaaugaccucuguuacccaggggauuucaaugacuaugaagaauugaaacaccuauugagcagaauaaaccauuuugagaaaauucagaucauccccaaaaguucuugguccagucaugaagccucauuaggggugagcucagcaugcccauaccagggaaaguccuccuuuuucagaaaugugguauggcuuaucaaaaagaacagugcauacccaacaauaaagaggagcuacaauaauaccaaccaagaagaucuuuugguacugugggggauucaccauccuaaugaugcggcagagcagacagagcucuaucaaaacccaaccaccuauauuuccguugggacaucaacacuaaaccagagauugguaccaagaauagcuacuagauccaaaguaaacgggcaaaguggaaggauggaguucuucuggacaauuuuaaagccgaaugaugcaaucaacuucgagaguaauggaaauuucauugcuccagaauaugcauacaaaauugucaagaaaggggacucaacaauuaugaaaagugaauuggaauaugguaacugcaacaccaagugucaaacuccaaugggggcgauaaacucuagcaugccauuccacaauauacacccucucaccauuggggaaugccccaaauaugugaaaucaaacagauuaguccuugcgacugggcucagaaauagcccucaacgagagacgcgaggauuauuuggagcuauagcagguuuuauagagggaggauggcagggaaugguagaugguugguauggguaccaccauagcaaugagcaggggaguggguacgcugcagacaaagaauccacucaaaaggcaauagauggagucaccaauaaggucaacucgaucauugacaaaaugaacacucaguuugaggccguuggaagggaauuuaacaacuuagaaaggagaauagagaauuuaaacaagaagauggaagacggguuccuagaugucuggacuuauaaugcugaacuucugguucucauggaaaaugagagaacucuagacuuucaugacucaaaugucaagaaccuuuacgacaagguccgacuacagcuuagggauaaugcaaaggagcuggguaacgguuguuucgaguucuaucauaaaugugauaaugaauguauggaaaguguaagaaauggaacguaugacuacccgcaguauucagaagaagcgagacuaaaaagagaggaaauaaguggaguaaaauuggaaucaauaggaauuuaccaaauacugucaauuuauucuacaguggcgaguucccuagcacuggcaaucaugguagcuggucuauccuuauggaugugcuccaauggaucguuacaaugcagaauuugcauuuaa

SEQ ID NO: 45878 - RNA, 1695 nt, Artificial Sequence
  derived and/or modified CDS sequence (wt) from hemagglutinin__InfluenzaA__ABW90130
auggagaaaauagugcuucuuuuugcaauagucagucuuguuaaaagugaucagauuugcauugguuaccaugcaaacaacucgacagagcagguugacacaauaauggaaaagaacguuacuguuacacaugcccaagacauacuggaaaagaaacacaacgggaagcucugcgaucuagauggagugaagccucuaauuuugagagauuguagcguagcuggauggcuccucggaaacccaaugugugacgaauucaucaaugugccggaauggucuuacauaguggagaaggccaauccagucaaugaccucuguuacccaggggauuucaaugacuaugaagaauugaaacaccuauugagcagaauaaaccauuuugagaaaauucagaucauccccaaaaguucuugguccagucaugaagccucauuaggggugagcucagcaugcccauaccagggaaaguucuccuuuuucagaaaugugguauggcuuaucaaaaagaacaguacauacccaacaauaaagaggagcuacaauaauaccaaccaagaagaucuuuugguacugugggggauucaccauccuaaugaugcggcagagcagacaaagcucuaucaaaacccaaccaccuauauuuccguugggacaucaacacuaaaccagagauugguaccaagaauagcuacuagauccaaaguaaacgggcaaaguggaaggauggaguucuucuggacaauuuuaaagccgaaugaugcaaucaacuucgagaguaauggaaauuucauugcuccagaauaugcauacaaaauugucaagaaaggggacucaacaauuaugaaaagugaauuggaauaugguaacugcaacaccaagugucaaacuccaaugggggcgauaaacucuagcaugccauuccacaauauacacccucucaccauuggggaaugccccaaauaugugaaaucaaacagauuaguccuugcgacugggcucagaaauagcccucaacgagagacgcgaggauuauuuggagcuauagcagguuuuauagagggaggauggcagggaaugguagaugguugguauggguaccaccauagcaaugagcaggggaguggguacgcugcagacaaagaauccacucaaaaggcaauagauggagucaccaauaaggucaacucgaucauugacaaaaugaacacucaguuugaggccguuggaagggaauuuaacaacuuagaaaggagaauagagaauuuaaacaagaagauggaagacggguuccuagaugucuggacuuauaaugcugaacuucugguucucauggaaaaugagagaacucuagacuuucaugacucaaaugucaagaaccuuuacgacaagguccgacuacagcuuagggauaaugcaaaggagcuggguaacgguuguuucgaguucuaucauaaaugugauaaugaauguauggaaaguguaagaaauggaacguaugacuacccgcaguauucagaagaagcgagacuaaaaagagaggaaauaaguggaguaaaauuggaaucaauaggaauuuaccaaauacugucaauuuauucuacaguggcgaguucccuagcacuggcaaucaugguagcuggucuauccuuauggaugugcuccaauggaucguuacaaugcagaauuugcauuuaa

SEQ ID NO: 45879 - RNA, 1695 nt, Artificial Sequence
  derived and/or modified CDS sequence (wt) from hemagglutinin__InfluenzaA__ABW90132
auggagaaaauagugcuucuuuuugcaauagucagucuuguuaaaagugaucagauuugcauugguuaccaugcaaacaacucgacagagcagguugacacaauaauggaaaagaacguuacuguuacacaugcccaagacauacuggaaaagaaacacaacgggaagcucugcgaucuagauggagugaagccucuaauuuugagagauuguagcguagcuggauggcuccucggaaacccaaugugugacgaauucaucaaugugccggaauggucuuacauaguggagaaggccaauccagucaaugaccucuguuacccaggggauuucaaugacuaugaagaauugaaacaccuauugagcagaauaaaccauuuugagaaaauucagaucauccccaaaaguucuugguccagucaugaagccucauuaggggugagcucagcaugcccauaccagggaaaguccuccuuuuucagaaaugugguauggcuuaucaaaaagaacaguacauacccaacaauaaagaggagcuacaauaauaccaaccaagaagaucuuuugguacugugggggauucaccauccuaauaaugcggcagagcagacagagcucuaucaaaacccaaccaccuauauuuccguugggacaucaacacuaaaccagagauugguaccaagaauagcuacuagauccaaaguaaacgggcaaaguggaaggauggaguucuucuggacaauuuuaaagccgaaugaugcaaucaacuucgagaguaauggaaauuucauugcuccagaauaugcauacaaaauugucaagaaaggggacucaacaauuaugaaaagugaauuggaauaugguaacugcaacaccaagugucaaacuccaaugggggcgauaaacucuagcaugccauuccacaauauacacccucucaccauuggggaaugccccaaauaugugaaaucaaacagauuaguccuugcgacugggcucagaaauagcccucaacgagagacgcgaggauuauuuggagcuauagcagguuuuauagagggaggauggcagggaaugguagaugguugguauggguaccaccauagcaaugagcaggggaguggguacgcugcagacaaagaauccacucaaaaggcaauagauggagucaccaauaaggucaacucgaucauugacaaaaugaacacucaguuugaggccguuggaagggaauuuaacaacuuagaaaggagaauagagaauuuaaacaagaagauggaagacggguuccuagaugucuggacuuauaaugcugaacuucugguucucauggaaaaugagagaacucuagacuuucaugacucaaaugucaagaaccuuuacgacaagguccgacuacagcuuagggauaaugcaaaggagcuggguaacgguuguuucgaguucuaucauaaaugugauaaugaauguauggaaaguguaagaaauggaacguaugacuacccgcaguauucagaagaagcgagacuaaaaagagaggaaauaaguggaguaaaauuggaaucaauaggaauuuaccaaauacugucaauuuauucuacaguggcgaguucccuagcacuggcaaucaugguagcuggucuauccuuauggaugugcuccaauggaucguuacaaugcagaauuugcauuuaa

SEQ ID NO: 45880 - RNA, 1695 nt, Artificial Sequence
  derived and/or modified CDS sequence (wt) from hemagglutinin__InfluenzaA__ABW90133
auggagaaaauagugcuucuuuuugcaauagucagucuuguuaaaagugaucagauuugcauugguuaccaugcaaacaacucgacagagcagguugacacaauaauggaaaagaacguuacuguuacacaugcccaagacauacuggaaaagaaacacaacgggaagcucugcgaucuagauggagugaagccucuaauuuugagagauuguagcguagcuggauggcuccucggaaacccaaugugugacgaauucaucaaugugccggaauggucuuacauaguggagaaggccaauccagucaaugaccucuguuacccaggggauuucaaugacuaugaagaauugaaacaccuauugagcagaauaaaccauuuugagaaaauucagaucauccccaaaaguucuugguccagucaugaagccucauuaggggugagcucagcaugcccauaccagggaaagcccuccuuuuucagaaaugugguauggcuuaucaaaaagaacaguacauacccaacaauaaagaggagcuacaauaauaccaaccaagaagaucuuuugguacugugggggauucaccauccuaaugaugcggcagagcagacaaagcucuaucaaaacccaaccaccuauauuuccguugggacaucaacacuaaaccagagauugguaccaagaauagcuacuagauccaaaguaaacgggcaaaguggaaggauggaguucuucuggacaauuuuaaagccgaaugaugcaaucaacuucgagaguaauggaaauuucauugcuccagaauaugcauacaaaauugucaagaaaggggacucaacaauuaugaaaagugaauuggaauaugguaacugcaacaccaagugucaaacuccaaugggggcgauaaacucuagcaugccauuccacaauauacacccucucaccauuggggaaugccccaaauaugugaaaucaaacagauuaguccuugcgacugggcucagaaauagcccucaacgagagacgcgaggauuauuuggagcuauagcagguuuuauagagggaggauggcagggaaugguagaugguugguauggguaccaccauagcaaugagcaggggaguggguacgcugcagacaaagaauccacucaaaaggcaauagauggagucaccaauaaggucaacucgaucauugacaaaaugaacacucaguuugaggccguuggaagggaauuuaacaacuuagaaaggagaauagagaauuuaaacaagaagauggaagacggguuccuagaugucuggacuuauaaugcugaacuucugguucucauggaaaaugagagaacucuagacuuucaugacucaaaugucaagaaccuuuacgacaagguccgacuacagcuuagggauaaugcaaaggagcuggguaacgguuguuucgaguucuaucauaaaugugauaaugaauguauggaaaguguaagaaauggaacguaugacuacccgcaguauucagaagaagcgagacuaaaaagagaggaaauaaguggaguaaaauuggaaucaauaggaauuuaccaaauacugucaauuuauucuacaguggcgaguucccuagcacuggcaaucaugguagcuggucuauccuuauggaugugcuccaauggaucguuacaaugcagaauuugcauuuaa

SEQ ID NO: 45881 - RNA, 1695 nt, Artificial Sequence
  derived and/or modified CDS sequence (wt) from hemagglutinin__InfluenzaA__ABW90134
auggagaaaauagugcuucuuuuugcaauagucagucuuguuaaaagugaucagauuugcauugguuaccaugcaaacaacucgacagagcagguugacacaauaauggaaaagaacguuacuguuacacaugcccaagacauacuggaaaagaaacacaacgggaagcucugcgaucuagauggagugaagccucuaauuuugagagauuguagcguagcuggauggcuccucggaaacccaaugugugacgaauucaucaaugugccggaauggucuuacauaguggagaaggccaauccagucaaugaccucuguuacccaggggauuucaaugacuaugaagaauugaaacaccuauugagcagaauaaaccauuuugagaaaauucagaucauccccaaaaguucuugguccagucaugaagccucauuaggggugagcucagcaugcccauaccaggaaaaguccuccuuuuucagaaaugugguauggcuuaucaaaaagaacaguacauacccaacaauaaagaggagcuacaauaauaccaaccaagaagaucuuuugguacugugggggauucaccauccuaaugaugcggcagagcagacaaagcucuaucaaaacccaaccaccuauauuuccguugggacaucaacacuaaaccagagauugguaccaagaauagcuacuagauccaaaguaaacgggcaaaguggaaggauggaguucuucuggacaauuuuaaagccgaaugaugcaaucaacuucgagaguaauggaaauuucauugcuccagaauaugcauacaaaauugucaagaaaggggacucaacaauuaugaaaagugaauuggaauaugguaacugcaacaccaagugucaaacuccaaugggggcgauaaacucuagcaugccauuccacaauauacacccucucaccauuggggaaugccccaaauaugugaaaucaaacagauuaguccuugcgacugggcucagaaauagcccucaacgagagacgcgaggauuauuuggagcuauagcagguuuuauagagggaggauggcagggaaugguagaugguugguauggguaccaccauagcaaugagcaggggaguggguacgcugcagacaaagaauccacucaaaaggcaauagauggagucaccaauaaggucaacucgaucauugacaaaaugaacacucaguuugaggccguuggaagggaauuuaacaacuuagaaaggagaauagagaauuuaaacaagaagauggaagacggguuccuagaugucuggacuuauaaugcugaacuucugguucucauggaaaaugagagaacucuagacuuucaugacucaaaugucaagaaccuuuacgacaagguccgacuacagcuuagggauaaugcaaaggagcuggguaacgguuguuucgaguucuaucauaaaugugauaaugaauguauggaaaguguaagaaauggaacguaugacuacccgcaguauucagaagaagcgagacuaaaaagagaggaaauaaguggaguaaaauuggaaucaauaggaauuuaccaaauacugucaauuuauucuacaguggcgaguucccuagcacuggcaaucaugguagcuggucuauccuuauggaugugcuccaauggaucguuacaaugcagaauuugcauuuaa

SEQ ID NO: 45882 - RNA, 1695 nt, Artificial Sequence
  derived and/or modified CDS sequence (wt) from hemagglutinin__InfluenzaA__ABW90135
auggagaaaauagugcuucuuuuugcaauagucagucuuguuaaaagugaucagauuugcauugguuaccaugcaaacaacucgacagagcagguugacacaauaauggaaaagaacguuacuguuacacaugcccaagacauacuggaaaagaaacacaacgggaagcucugcgaucuagauggagugaagccucuaauuuugagagauuguagcguagcuggauggcuccucggaaacccaaugugugacgaauucaucaaugugccggaauggucuuacauaguggagaaggccaauccagucaaugaccucuguuacccaggggauuucaaugacuaugaagaauugaaacaccuauugagcagaauaaaccauuuugagaaaauucagaucauccccaaaaguucuugguccagucaugaagccucauuaggggugagcucagcaugcccauaccagggaaaguccuccuuuuucagaaaugugguauggcuuaucaacaagaacaguacauacccaacaauaaagaggagcuacaauaauaccaaccaagaagaucuuuugguacugugggggauucaccauccuaaugaugcggcagagcagacaaagcucuaucaaaacccaaccaccuauauuuccguugggacaucaacacuaaaccagagauugguaccaagaauagcuacuagauccaaaguaaacgggcaaaguggaaggauggaguucuucuggacaauuuuaaagccgaaugaugcaaucaacuucgagaguaauggaaauuucauugcuccagaauaugcauacaaaauugucaagaaaggggacucaacaauuaugaaaagugaauuggaauaugguaacugcaacaccaagugucaaacuccaaugggggcgauaaacucuagcaugccauuccacaauauacacccucucaccauuggggaaugccccaaauaugugaaaucaaacagauuaguccuugcgacugggcucagaaauagcccucaacgagagacgcgaggauuauuuggagcuauagcagguuuuauagagggaggauggcagggaaugguagaugguugguauggguaccaccauagcaaugagcaggggaguggguacgcugcagacaaagaauccacucaaaaggcaauagauggagucaccaauaaggucaacucgaucauugacaaaaugaacacucaguuugaggccguuggaagggaauuuaacaacuuagaaaggagaauagagaauuuaaacaagaagauggaagacggguuccuagaugucuggacuuauaaugcugaacuucugguucucauggaaaaugagagaacucuagacuuucaugacucaaaugucaagaaccuuuacgacaagguccgacuacagcuuagggauaaugcaaaggagcuggguaacgguuguuucgaguucuaucauaaaugugauaaugaauguauggaaaguguaagaaauggaacguaugacuacccgcaguauucagaagaagcgagacuaaaaagagaggaaauaaguggaguaaaauuggaaucaauaggaauuuaccaaauacugucaauuuauucuacaguggcgaguucccuagcacuggcaaucaugguagcuggucuauccuuauggaugugcuccaauggaucguuacaaugcagaauuugcauuuaa

SEQ ID NO: 45883 - RNA, 1695 nt, Artificial Sequence
  derived and/or modified CDS sequence (wt) from hemagglutinin__InfluenzaA__HB649491
auggagaagaucgugcugcuguucgccaucgugagccuggugaagagcgaucagaucugcaucggauaccacgccaauaauagcacagagcagguggauacaaucauggagaagaaugugacagugacacacgcccaggauauccuggagaagaaacacaauggaaagcugugcgaucuggauggagugaagccucugauccugagagauugcagcguggccggauggcugcugggaaauccuaugugcgaugaguucaucaaugugccugaguggagcuacaucguggagaaggccaauccugugaaugaucugugcuacccuggagauuucaaugauuacgaggagcugaagcaccugcugagcagaaucaaucacuucgagaagauccagaucaucccuaagagcagcuggagcagccacgaggccagccugggagugagcagcgccugcccuuaccagggcaagagcagcuucuucagaaaugugguguggcugaucaagaagaauagcacauacccuacaaucaagagaagcuacaauaauacaaaucaggaggaucugcuggugcuguggggaauccaccacccuaaugaugccgccgagcagacaaagcuguaccagaauccuacaacauacaucagcgugggaacaagcacacugaaucagagacuggugccuagaaucgccacaagaagcaaggugaauggacagagcggaagaauggaguucuucuggacaauccugaagccuaaugaugccaucaauuucgagagcaauggaaauuucaucgcuccugaguacgccuacaagaucgugaagaagggagauagcacaaucaugaagagcgagcuggaguacggaaauugcaauacaaagugccagacaccuaugggagccaucaauagcagcaugccuuuccacaauauccacccucugacaaucggagagugcccuaaguacgugaagagcaauagacuggugcuggccacaggacugagaaauagcccucagagagagacgagaggacuguucggagccaucgccggauucaucgagggaggauggcagggaaugguggauggaugguacggauaccaccacagcaaugagcagggaagcggauacgccgccgauaaggagagcacacagaaggccaucgauggagugacaaauaaggugaauagcaucaucgauaagaugaauacacaguucgaggccgugggaagagaguucaauaaucuggagagaagaaucgagaaucugaauaagaagauggaggauggauuccuggauguguggacauacaaugccgagcugcuggugcugauggagaaugagagaacacuggauuuccacgauagcaaugugaagaaucuguacgauaaggugagacugcagcugagagauaaugccaaggagcugggaaauggaugcuucgaguucuaccacaagugcgauaaugagugcauggagagcgugagaaauggaacauacgauuacccucaguacagcgaggaggccagacugaagagagaggagaucagcggagugaagcuggagagcaucggaaucuaccagauccugagcaucuacagcacaguggccagcagccuggcccuggccaucaugguggccggacugagccuguggaugugcagcaauggaagccugcagugcagaaucugcaucuga

SEQ ID NO: 45884 - RNA, 1683 nt, Artificial Sequence; identical to SEQ ID NO: 42000
  derived and/or modified CDS sequence (wt) from hemagglutinin__InfluenzaA__EPI439507

SEQ ID NO: 45885 - RNA, 1701 nt, Artificial Sequence
  derived and/or modified CDS sequence (wt) from hemagglutinin__InfluenzaA__EPI482777
augaaagcaauacuaguaguccugcuauauacauuuacaaccgcaaaugccgacacauuauguauagguuaucaugcaaacaauucaacugacaccguagacacaguacuagaaaagaauguaacaguaacacacucugucaaccuucuagaaaacaggcauaaugggaaacuauguaaacuaagagggguagcuccauugcauuuggguaaauguaacauugcuggcuggcuucugggaaauccagagugugaaucacucuccacagcaagcucaugguccuacauuguggaaacaucuaauucagacaaugggacguguuacccaggagauuucaucaauuaugaggagcuaagagagcaguugagcucagugucaucauuugaaagauuugagauauuccccaagacaaguucauggcccaaucaugacacgaacagaggugugacggcagcauguccucaugcuggggcaaacagcuucuacagaaauuuaguauggcuaguaaaaaagggaaauucauacccaaagaucaacaaauccuacauuaacaauaaagagaaggaaguucucgugcuaugggccauucaccauccaucuaccagugccgaccaacaaagucucuaccaaaaugcagaugccuauguguuuguggggucaucaagauacagcaggaaguucgagccagaaauagcaacaagaccuaaggugagagaccaagcagggagaaugaacuauuacuggacacuaguagagccuggugacaagauaacauucgaagcaacuggaaaucuaguggcaccgagauaugccuucgcauugaaaagaaauucuggaucugguauuaucauuucagauacaucaguccacgauugugauacgacuugucagacacccaauggugcuauaaacaccagccucccauuucaaaauauacauccagucacaauuggagaauguccaaaauauguaaaaaguacuaaacugagaauggccacagguuuaaggaauaucccgucuauccaaucuagaggccuguuuggugccauugcuggcuuuaucgaaggggguuggacaggaaugauagauggaugguacgguuaucaccaucaaaaugagcagggaucaggauaugcagccgaccugaagagcacacagaaugccauugacgggaucacuaacaagguaaacucuguuauugaaaagaugaacacacaauucacggcaguagguaaagaauucagccacuuggaaagaagaauagagaauuuaaauaaaaaaguagaugaugguuuucuagauauuuggacuuacaaugccgaacuauugguucuauuggaaaaugaaagaacuuuggauuaccacgacucaaaugugaaaaacuuguaugaaaaaguaagaagccaacuaaaaaacaaugccaaggaaauuggaaauggcugcuuugaauuuuaccacaaaugugaugacaugugcauggaaagcgucaaaaauggaacuuaugauuacccuaaauacucagaggaagcaaaacuaaacagagaagaaauagaugggguaaaguuggaaucaacaaggauuuaccaaauuuuggcuaucuauucaacggucgccaguucauugguacugguagucucccugggggcaaucaguuucuggaugugcucuaaugggucgcuacagugcagaauauguauuuaa

SEQ ID NO: 45886 - RNA, 1701 nt, Artificial Sequence; identical to SEQ ID NO: 39144
  derived and/or modified CDS sequence (wt) from hemagglutinin__InfluenzaA__EPI745532

SEQ ID NO: 45887 - RNA, 1701 nt, Artificial Sequence
  derived and/or modified CDS sequence (wt) from hemagglutinin__InfluenzaA__EPI278594
augaaggcaauacuaguaguucugcuauauacauuugcaaccgcaaaugcagacacauuauguauagguuaucaugcgaacaauucaacagacacuguagacacaguacuagaaaagaauguaacaguaacacacucuguuaaccuucuagaagacaagcauaacgggaaauuaugcaaacuaagagggguagccccauugcauuuggguaaauguaacauugcuggcuggauccugggaaauccagagugugaaucacucuccacagcaagcucaugguccuacauuguggaaacaucuaguucagacaauggaacguguuacccaggagauuucaucgauuaugaggagcuaagagaacaauugagcucagugucaucauuugaaagguuugagauauuccccaagacaaguucauggcccgaucaugaaucgaacaaagguguaacggcagcauguccucaugcuggagcaaaaagcuucuacaaaaauuuaauauggcuaguuaaaaaaggaaauucauacccaaagcucagcaaauccuacauuaaugauaaagggaaagaaguccucgugcuauggggcauucaccauccaucuacuagugcugaccaacaaagucucuaucagaaugcagaugcauauguuuuuguggggacaucaagauacagcaagaaguucaagccggaaauagcaauaagacccaaagugagggaucaagaagggagaaugaacuauuacuggacacuaguagagccgggagacaaaauaacauucgaagcaacuggaaaucuagugguaccgagauaugcauucgcaauggaaagaaaugcuggaucugguauuaucauuucagauacaccaguccacgauugcaauacaacuugucagacacccaagggugcuauaaacaccagccucccauuucagaauauacauccgaucacaauuggaaaauguccaaaauauguaaaaagcacaaaauugagacuggccacaggauugaggaaugucccgucuauucaaucuagaggccuauuuggggccauugccgguuucauugaagggggguggacagggaugguagauggaugguacgguuaucaccaucaaaaugagcaggggucaggauaugcagccgaccugaagagcacacagaaugccauugacaagauuacuaacaaaguaaauucuguuauugaaaagaugaauacacaguucacagcaguagguaaagaguucaaccaccuggaaaaaagaauagagaauuuaaauaaaaaaguugaugaugguuuccuggacauuuggacuuacaaugccgaacuguugguucuauuggaaaaugaaagaacuuuggacuaccacgauucaaaugugaagaacuuauaugaaaagguaagaagccaguuaaaaaacaaugccaaggaaauuggaaacggcugcuuugaauuuuaccacaaaugcgauaacacgugcauggaaagugucaaaaaugggacuuaugacuacccaaaauacucagaggaagcaaaauuaaacagagaagaaauagaugggguaaagcuggaaucaacaaggauuuaccagauuuuggcgaucuauucaacugucgccaguucauugguacugguagucucccugggggcaaucaguuucuggaugugcucuaaugggucucuacaguguagaauauguauuuaa

SEQ ID NO: 45888 - RNA, 1701 nt, Artificial Sequence
  derived and/or modified CDS sequence (wt) from hemagglutinin__InfluenzaA__AEE69009
augaaggcaauacuaguaguucugcuauauacauuugcaaccgcaaaugcagacacauuauguauagguuaucaugcgaacaauucaacagacacuguagacacaguacuagaaaagaauguaacaguaacacacucuguuaaccuucuagaagacaagcauaacgggaaacuaugcaaacuaagagggguagccccauugcauuuggguaaauguaacauugcuggcuggauccugggaaauccagagugugaaucacucuccacagcaagcucaugguccuacauuguggaaacaccuaguucagacaauggaacguguuacccaggagauuucaucgauuaugaggagcuaagagagcaauugagcucagugucaucauuugaaagguuugagauauuccccaagacaaguucauggcccaaucaugacucgaacaaagguguaacggcagcauguccucaugcuggagcaaaaagcuucuacaaaaauuuaauauggcuaguuaaaaaaggaaauucauacccaaagcucagcaaauccuacauuaaugauaaagggaaagaaguccucgugcuauggggcauucaccauccaccuacuagugcugaccaacaaagucucuaucagaaugcagauacauauguuuuuguggggucaucaagauacagcaagaaguucaagccggaaauagcaauaagacccaaagugagggaucaagaagggagaaugaacuauuacuggacacuaguagagccgggagacaaaauaacauucgaagcaacuggaaaucuagugguaccgagauaugcauucgcaauggaaagaaaugcuggaucugguauuaucauuucagauacaccaguccacgauugcaauacaacuugucaaacacccaagggugcuauaaacaccagccucccauuucagaauauacauccgaucacaauuggaaaauguccaaaauauguaaaaagcacaaaauugagacuggccacaggauugaggaauaucccgucuauucaaucuagaggccuauuuggggccauugccgguuucauugaagggggguggacagggaugguagauggaugguacgguuaucaccaucaaaaugagcaggggucaggauaugcagccgaccugaagagcacacagaaugccauugacgagauuacuaacaaaguaaauucuguuauugaaaagaugaauacacaguucacagcaguagguaaagaguucaaccaccuggaaaaaagaauagagaauuuaaauaaaaaaguugaugaugguuuccuggacauuuggacuuacaaugccgaacuguugguucuauuggaaaaugaaagaacuuuggacuaccacgauucaaaugugaagaacuuauaugaaaagguaagaagccagcuaaaaaacaaugccaaggaaauuggaaacggcugcuuugaauuuuaccacaaaugcgauaacacgugcauggaaagugucaaaaaugggacuuaugacuacccaaaauacucagaggaagcaaaauuaaacagagaagaaauagaugggguaaagcuggaaucaacaaggauuuaccagauuuuggcgaucuauucaacugucgccaguucauugguacugguagucucccugggggcaaucaguuucuggaugugcucuaaugggucucuacaguguagaauauguauuuaa

SEQ ID NO: 45889 - RNA, 1701 nt, Artificial Sequence; identical to SEQ ID NO: 34963
  derived and/or modified CDS sequence (wt) from hemagglutinin__InfluenzaA__GQ280797

SEQ ID NO: 45890 - RNA, 1701 nt, Artificial Sequence; identical to SEQ ID NO: 34696
  derived and/or modified CDS sequence (wt) from hemagglutinin__InfluenzaA__EPI178457

SEQ ID NO: 45891 - RNA, 1701 nt, Artificial Sequence; identical to SEQ ID NO: 34696
  derived and/or modified CDS sequence (wt) from hemagglutinin__InfluenzaA__EPI176470

SEQ ID NO: 45892 - RNA, 1701 nt, Artificial Sequence
  derived and/or modified CDS sequence (wt) from hemagglutinin__InfluenzaA__EPI280341
augaaggcaauacuaguaguucugcuacauacauuugcaaccgcaaaugcagacacauuauguauagguuaucaugcgaacaauucaacagacacuguagacacaguacuagaaaagaauguaacaguaacacacucuguuaaccuucuagaagacaagcauaacgggaaauuaugcaaacuaagagggguagccccauugcauuuggguaaauguaacauugcuggcuggauccugggaaauccagagugugaaucacucuccacagcaagcucaugguccuacauuguggaaacaucuaguucagacaauggaacguguuacccaggaaauuucaucgauuaugaggagcuaagagaacaauugagcucagugucaucauuugaaagguuugagauauuccccaagacaaguucauggcccgaucaugacucgaacaaagguguaacggcagcauguccucaugcuggagcaaaaagcuucuacaaaaauuuaauauggcuaguuaaaaaaggaaauucauacccaacgcucagcaaauccuacauuaaugauaaagggaaagaaguccucgugcuauggggcauucaccauccaucuacuagugcugaccaacaaagucucuaucagaaugcagaugcauauguuuuuguggggacaucaagauacagcaagaaguucaagccggaaauagcaauaagacccaaagugaggaaucaagaagggagaaugaacuauuacuggacacuaguagagccgggagacaaaauaacauucgaagcaacuggaaaucuaguggcaccgagauaugcauucgcaauggaaagaaaugcuggaucugguauuaucauuucagauacaccaguccacgauugcaauacaacuugucagacacccaagggugcuauaaacaccagccucccauuucagaauauacauccgaucacaauuggaaaauguccaaaauauguaaaaagcacaaaauugagacuggccacaggauugaggaaugucccgucuauucaaucuagaggccuauuuggggccauugccgguuucauugaagggggguggacagggaugguagauggaugguacgguuaucaccaucaaaaugagcaggggucuggauaugcagccgaccugaagagcacacagaaugccauugacaagauuacuaacaaaguaaauucuguuauugaaaagaugaauacacaguucacagcaguagguaaagaguucaaccaccuggaaaaaagaauagagaauuuaaauaaaaaaguugaugaugguuuccuggacauuuggacuuacaaugccgaacuguugguucuauuggaaaaugaaagaacuuuggacuaccacgauucaaaugugaagaacuuauaugaaaagguaagaagccaguuaaaaaacaaugccaaggaaauuggaaacggcugcuuugaauuuuaccacaaaugcgauaacacgugcauggaaagugucaaaaaugggacuuaugacuacccaaaauacucagaggaagcaaaauuaaacagagaagaaauagaugggguaaagcuggaaucaacaaggauuuaccagauuuuggcgaucuauucaacugucgccaguucauugguacugguagucucccugggggcaaucaguuucuggaugugcucuaaugggucucuacaguguagaauauguauuuaa

SEQ ID NO: 45893 - RNA, 1701 nt, Artificial Sequence
  derived and/or modified CDS sequence (wt) from hemagglutinin__InfluenzaA__EPI240319
augaaggcaauacuaguaguucugcuauauacauuugcaaccgcaaaugcagacacauuauguauagguuaucaugcgaacaauucaacagacacuguagacacaguacuagaaaagaauguaacaguaacacacucuguuaacauucuagaagacaagcauaacgggaaacuaugcaaacuaagagggguagccccauugcauuuggguaaauguaacauugcuggcuggauccugggaaauccagagugugaaucacucuccacagcaagcucaugguccuacauuguggaaacaucuaguucagacaauggaacguguuacccaggagauuucaucgauuaugaggagcuaagagagcaauugagcucagugucaucauuugaaagguuugagauauuccccaagacaaguucauggcccaaucaugacucgaacaaagguguaacggcagcauguccucaugcuggagcaaaaagcuucuacaaaaauuuaauauggcuaguuaaaaaaggaaauucauacccaaagcucagcaaauccuacauuaaugauaaagggaaagaaguccucgugcuauggggcauucaccauccaucuacuagugcugaccaacaaagucucuaucagaaugcagaugcauauguuuuuguggggucaucaagauacagcaagaaguucaagccggaaauagcaauaagacccaaagugagggaucgagaagggagaaugaacuauuacuggacacuaguagagccgggagacaaaauaacauucgaagcaacuggaaaucuagugguaccgagauaugcauucgcaauggaaagaaaugcuggaucugguauuaucauuucagauacaccaguccacgauugcaauacaacuugucagacacccaagggugcuauaaacaccagccucccauuucagaauauacauccgaucacaauuggaaaauguccaaaauauguaaaaagcacaaaauugagacuggccacaggauugaggaaugucccgucuauucaaucuagaggccuauuuggggccauugccgguuucauugaagggggguggacagggaugguagauggaugguacgguuaucaccaucaaaaugagcaggggucaggauaugcagccgaccugaagagcacacagaaugccauugacgagauuacuaacaaaguaaauucuguuauugaaaagaugaauacacaguucacagcaguagguaaagaguucaaccaccuggaaaaaagaauagagaauuuaaauaaaaaaguugaugaugguuuccuggacauuuggacuuacaaugccgaacuguugguucuauuggaaaaugaaagaacuuuggacuaccacgauucaaaugugaagaacuuauaugaaaagguaagaagccagcuaaaaaacaaugccaaggaaauuggaaacggcugcuuugaauuuuaccacaaaugcgauaacacgugcauggaaagugucaaaaaugggacuuaugacuacccaaaauacucagaggaagcaaaauuaaacagagaagaaauagaugggguaaagcuggaaucaacaaggauuuaccagauuuuggcgaucuauucaacugucgccaguucauugguacugguagucucccugggggcaaucaguuucuggaugugcucuaaugggucucuacaguguagaauauguauuuaa

SEQ ID NO: 45894 - RNA, 1701 nt, Artificial Sequence; identical to SEQ ID NO: 34898
  derived and/or modified CDS sequence (wt) from hemagglutinin__InfluenzaA__EPI183134

SEQ ID NO: 45895 - RNA, 1701 nt, Artificial Sequence
  derived and/or modified CDS sequence (wt) from hemagglutinin__InfluenzaA__EPI368693
augaaggcaauacuaguaguucugcuauauacauuugcaaccgcaaaugcagacacauuauguauagguuaucaugcgaacaauucaacagacacuguagacacaguacuagaaaagaauguaacaguaacacacucuguuaacauucuagaagacaagcauaacgggaaacuaugcaaacuaagagggguagccccauugcauuuggguaaauguaacauugcuggcuggauccugggaaauccagagugugaaucacucuccacagcaagcucaugguccuacauuguggaaacaucuaguucagacaauggaacguguuacccaggagauuucaucgauuaugaggagcuaagagagcaauugagcucagugucaucauuugaaagguuugagauauuccccaagacaaguucauggcccaaucaugacucgaacaaagguguaacggcaucauguccucaugcuggagcaaaaagcuucuacaaaaauuuaauauggcuaguuaaaaaaggaaauucauacccaaagcucagcaaauccuacauuaaugauaaagggaaagaaguccucgugcuauggggcauucaccauccaucuacuagugcugaccaacaaagucucuaucagaaugcagaugcauauguuuuuguggggucaucaagauacagcaagaaguucaagccggaaauagcaauaagacccaaagugaggggucaagaagggagaaugaacuauuacuggacacuaguagagccgggagacaaaauaacauucgaagcaacuggaaaucuagugguaccgagauaugcauucgcaauggaaagaaaugcuggaucugguauuaucauuucagauacaccaguccacgauugcaauacaacuugucagacacccaagggugcuauaaacaccagccucccauuucagaauauacauccgaucacaauuggaaaauguccaaaauauguaaaaagcacaaaauugagacuggccacaggauugaggaaugucccgucuauucaaucuagaggccuauuuggggccauugccgguuucauugaagggggguggacagggaugguagauggaugguacgguuaucaccaucaaaaugagcaggggucaggauaugcagccgaccugaagagcacacagaaugccauugacgagauuacuaacaaaguaaauucuguuauugaaaagaugaauacacaguucacagcaguagguaaagaguucaaccaccuggaaaaaagaauagagaauuuaaauaaaaaaguugaugaugguuuccuggacauuuggacuuacaaugccgaacuguugguucuauuggaaaaugaaagaacuuuggacuaccacgauucaaaugugaagaacuuauaugaaaagguaagaagccagcuaaaaaacaaugccaaggaaauuggaaacggcugcuuugaauuuuaccacaaaugcgauaacacgugcauggaaagugucaaaaaugggacuuaugacuacccaaaauacucagaggaagcaaaauuaaacagagaagaaauagaugggguaaagcuggaaucaacaaggauuuaccagauuuuggcgaucuauucaacugucgccaguucauugguacugguagucucccugggggcaaucaguuucuggaugugcucuaaugggucucuacaguguagaauauguauuuaa

SEQ ID NO: 45896 - RNA, 1701 nt, Artificial Sequence
  derived and/or modified CDS sequence (wt) from hemagglutinin__InfluenzaA__EPI291788
augaaggcaauacuaguaguccugcuauauacauuuacaaccgcaaaugccgacacauuauguauagguuaucaugcgaacaauucaacugacaccguagacacaguacuagaaaagaauguaacaguaacacacucugucaaccuucuagaaaacaggcauaaugggaaacuauguaaacuaagagggguagcuccauugcauuuggguaaauguaacauugcuggcuggcuccugggaaauccagagugugaaucacucuccacagcaagcucaugguccuacauuguggaaacaucuaauucagacaaugggacguguuacccaggagauuucaucaauuaugaggagcuaagagagcaguugagcucagugucaucauuugaaagauuugagauauuccccaagacaaguucauggcccaaucaugacacgaacagaggugugacggcagcauguccucaugcugggacaaacagcuucuacagaaauuuaauauggcuggucaaaaaaggaaauucauacccaaagaucaacaaauccuacauuaacaauaaagagaaggaaguucucgugcuaugggccauucaccauccaucuaccagugccgaccaacaaagucucuaccaaaaugcagaugccuauguuuuuguggggucaucaagauacagcaggaaguucgagccagaaauagcaacaagacccaaggugagggaccaagcagggagaaugaacuauuacuggacacuaguagagccuggagacaagauaacauucgaagcaacuggaaaucuagugguaccgagauaugccuucgcauugaaaagaaauucuggaucugguauuaucauuucagauacaucaguccacgauugugauacgacuugucagacacccaauggugcuauaaacaccagccucccauuucaaaauauacauccagucacaauuggagaauguccaaaauauguaaaaaguacuaaacugagaauggccacaggauuaaggaauaucccgucuauucaaucuagaggccuguuuggggccauugcuggcuuuauugaagggggcuggacaggaaugauagauggaugguacgguuaucaccaucaaaaugagcagggaucaggauaugcagccgaccugaagagcacacagaaugccauugacgggaucacuaacaagguaaauucuguuauugaaaagaugaacacacaauucacagcaguagguaaagaguucagccacuuggaaagaagaauagagaauuuaaauaaaaagguugaugaugguuuucuagauauuuggacuuacaaugccgaacuguugguucuauuggaaaaugaaagaacuuuggauuaccacgacucaaaugugaaaaacuuauaugaaaaaguaagaagccaacuaaaaaacaaugccaaggaaauuggaaauggcugcuuugaauuuuaccacaaaugugaugacacgugcauggaaagcgucaaaaaugggacuuaugauuacccaaaauacucagaggaagcaaaacuaaacagagaggaaauagaugggguaaaguuggaaucaacaaggauuuaccaaauuuuggcgaucuauucaacggucgccaguucauugguacugguagucucccugggggcaaucaguuucuggaugugcucuaaugggucgcuacagugcagaauauguauuuaa

SEQ ID NO: 45897 - RNA, 1701 nt, Artificial Sequence
  derived and/or modified CDS sequence (wt) from hemagglutinin__InfluenzaA__EPI482788
augaaggcaauacuaguaguccugcuauauacauuuacaaccgcaaaugccgacacauuauguauagguuaucaugcgaacaauucaacugacaccguagacacaguacuagaaaagaauguaacaguaacacacucugucaaccuucuagaaaacaggcauaaugggaaacuauguaaacuaagagggguagcuccauugcauuuggguaaauguaacauugcuggcuggcuccugggaaauccagagugugaaucacucuccacagcaagcucaugguccuacauuguggaaacaucuaauucagacaaugggacguguuacccaggagauuucaucaauuaugaggagcuaagagagcaguugagcucagugucaucauuugaaagauuugagauauuccccaagacaaguucauggcccaaucaugacacgaacagaggugugacggcagcauguccucaugcugggacaaacagcuucuacagaaauuuaauauggcuggucaaaaaaggaaauucauacccaaagaucaacaaauccuacauuaacaauaaagagaaggaaguucucgugcuaugggccauucaccauccaucuaccagugccgaccaacaaaguaucuaccaaaaugcagaugccuauguuuuuguggggucaucaagauacagcaggaaguucgagccagaaauagcaacaagacccaaggugagggaccaagcagggagaaugaacuauuacuggacacuaguagagccuggagacaagauaacauucgaagcaacuggaaaucuagugguaccgagauaugccuucgcauugaaaagaaauucuggaucugguauuaucauuucagauacaucaguccacgauugugauacgacuugucagacacccaauggugcuauaaacaccagccucccauuucaaaauauacauccagucacaauuggagaauguccaaaauauguaaaaaguacuaaacugagaauggccacaggauuaaggaauaucccgucuauucaaucuagaggccuguuuggggccauugcuggcuuuauugaagggggcuggacaggaaugauagauggaugguacgguuaucaccaucaaaaugagcagggaucaggauaugcagccgaccugaagagcacacagaaugccauugacgggaucacuaacaagguaaauucuguuauugaaaagaugaacacacaauucacagcaguagguaaagaguucagccacuuggaaagaagaauagagaauuuaaauaaaaagguugaugaugguuuucuagauauuuggacuuacaaugccgaacuguugguucuauuggaaaaugaaagaacuuuggauuaccacgacucaaaugugaaaaacuuauaugaaaaaguaagaagccaacuaaaaaacaaugccaaggaaauuggaaauggcugcuuugaauuuuaccacaaaugugaugacacgugcauggaaagcgucaaaaaugggacuuaugauuacccaaaauacucagaggaagcaaaacuaaacagagaggaaauagaugggguaaaguuggaaucaacaaggauuuaccaaauuuuggcgaucuauucaacggucgccaguucauugguacugguagucucccugggggcaaucaguuucuggaugugcucuaaugggucgcuacagugcagaauauguauuuaa

SEQ ID NO: 45898 - RNA, 1701 nt, Artificial Sequence
  derived and/or modified CDS sequence (wt) from hemagglutinin__InfluenzaA__EPI178946/m1
augaaggcaauaauaguagucuugcuauauacauuugcaacugcagaugcugacacauuauguauaggcuaucaugcaaauaauucaacugacacuguugacacaguacuagaaaagaauguaacaguaacacacucuguuaaccuucuagaaaacaagcaugacgggaaacuauguaaacuaagagggguagccccauugcauuuggguaaauguaacauugcuggauggcucuugggaaacccagagugugaaucacuauucacagcaagcucaugguccuacauaguggaaacgccuaauucagacaaugggacauguuacccaggagauuucaucaauuaugaggagcuaagagagcauuugagcucugugucaucauuugaaagguuugagauauuccccaaggcuaauucauggcccaaccaugauacgaauaaggggguaacggcagcauguccuuaugcuggagcaaacagcuuuuacagaaauuuaauauggcuaguaaaaaaaggaaauucauacccaaagcucagcaaauccuacauuaacaauaagaagaaggaaguccuugugauauggggcauccaccauccaccuaccaguacugaccaacaaacucucuaccagaaugcagaugccuauguuuuugugggaucaucaaaauacagcaaaagauucaagccagaaauagcagcaagacccaaggugaggaaucaagcaggaagaaugaacuauuacuggacacuaauagaaccuggagacacaauaacauucgaagcaacuggaaaucuagugguaccaagauaugccuucgcaaugaaaagaggcucuggaucugguauuaucguuucagaugcaccaguccacgauuguaauacgacuugucaaacacccaaaggugcuauaaacaccagccuuccauuucagaauauacauccagucacaauuggagaauguccaaaauaugucaaaagcacaaaauugaggauggcuacaggacuaagaaauaucccgucuauucaaucaagaggccuauuuggggccauugcuggcuuccuugaagggggguggacaggaaugauagauggaugguacgguuaccaccaucaaaaugagcagggaucaggauaugcagccgaccaaaagagcacacagaaugccauugacgggaucacuaacaaaguaaauucuauuauugaaaagaugaacacacaauucacagcaguggguaaagaauucaaccaauuggaaaaaagaauagagaguuuaaacaauaaggucgaugauggguuccuagauauuuggacuuacaaugccgaaaugcugguucuauuggaaaaugaaagaacucuggauuaucacgauucaaaugugaagaaccuauaugaaaaaguaagaagccagcuaaaaaacaaugccaaagaaauuggaaauggcugcuuugaauuuuaccacaaaugcgauaacacgugcauggagagugucaaaaaugggacuuaugauuacccaaaauacucagaagaagcaaagcuaaauagagaggagauagaugggguaaagcuggaaucagcaaggauuuaccagauuuuggcgaucuauucaacugucgccagcucauugguacuguuagucucucugggggcagucaguuucuggaugugcuccaaugggucuuuacagugcagaauauguaucuaa

SEQ ID NO: 45899 - RNA, 1701 nt, Artificial Sequence
  derived and/or modified CDS sequence (wt) from hemagglutinin__InfluenzaA__EPI482791/m2
augaaggcaauaauaguagucuugcuauauacauuugcaacugcagaugcugacacauuauguauaggcuaucaugcaaauaauucaacugacacuguugacacaguacuagaaaagaauguaacaguaacacacucuguuaaccuucuagaaaacaagcaugacgggaaacuauguaaacuaagagggguagccccauugcauuuggguaaauguaacauugcuggauggcucuugggaaacccagagugugaaucacuauucacagcaagcucaugguccuacauaguggaaacgccuaauucagacaaugggacauguuacccaggagauuucaucaauuaugaggagcuaagagagcauuugagcucugugucaucauuugaaagguuugagauauuccccaaggcuaauucauggcccaaccaugagacgaauaaggggguaacggcagcauguccuuaugcuggagcaaacagcuuuuacagaaauuuaauauggcuaguaaaaaaaggaaauucauacccaaagcucagcaaauccuacauuaacaauaagaagaaggaaguccuugugauauggggcauccaccauccaccuaccaguacugaccaacaaacucucuaccagaaugcagaugccuauguuuuugugggaucaucaaaauacagcaaaagauucaagccagaaauagcagcaagacccaaggugaggaaucaagcaggaagaaugaacuauuacuggacacuaauagaaccuggagacacaauaacauucgaagcaacuggaaaucuagugguaccaagauaugccuucgcaaugaaaagaggcucuggaucugguauuaucguuucagaugcaccaguccacgauuguaauacgacuugucaaacacccaaaggugcuauaaacaccagccuuccauuucagaauauacauccagucacaauuggagaauguccaaaauaugucaaaagcacaaaauugaggauggcuacaggacuaagaaauaucccgucuauucaaucaagaggccuauuuggggccauugcuggcuuccuugaagggggguggacaggaaugauagauggaugguacgguuaccaccaucaaaaugagcagggaucaggauaugcagccgaccaaaagagcacacagaaugccauugacgggaucacuaacaaaguaaauucuauuauugaaaagaugaacacacaauucacagcaguggguaaagaauucaaccaauuggaaaaaagaauagagaguuuaaacaauaaggucgaugauggguuccuagauauuuggacuuacaaugccgaaaugcugguucuauuggaaaaugaaagaacucuggauuaucacgauucaaaugugaagaaccuauaugaaaaaguaagaagccagcuaaaaaacaaugccaaagaaauuggaaauggcugcuuugaauuuuaccacaaaugcgauaacacgugcauggagagugucaaaaaugggacuuaugauuacccaaaauacucagaagaagcaaagcuaaauagagaggagauagaugggguaaagcuggaaucagcaaggauuuaccagauuuuggcgaucuauucaacugucgccagcucauugguacuguuagucucucugggggcagucaguuucuggaugugcuccaaugggucuuuacagugcagaauauguaucuaa

SEQ ID NO: 45900 - RNA, 1701 nt, Artificial Sequence
  derived and/or modified CDS sequence (wt) from hemagglutinin__InfluenzaA__EPI291799
augaaggcaauacuaguaguccugcuauauacauuuacaaccgcaaaugccgacacauuauguauagguuaucaugcgaacaauucaacugacaccguagacacaguacuagaaaagaauguaacaguaacacacucugucaaccuucuagaaaacaggcauaaugggaaacuauguaaacuaagagggguagcuccauugcauuuggguaaauguaacauugcuggcuggcuccugggaaauccagagugugaaucacucuccacagcaagcucaugguccuacauuguggaaacaucuaauucagacaaugggacguguuacccaggagauuucaucaauuaugaggagcuaagagagcaguugagcucagugucaucauuugaaagauuugagauauuccccaagacaaguucauggcccaaucaugacacgaacagaggugugacggcagcauguccucaugcugggacaaacagcuucuacagaaauuuaauauggcugguaaaaaagggaaauucauacccaaagaucaacaaauccuacauuaacaauaaagagaaggaaguucucgugcuaugggccauucaccauccaucuaccagugccgaccaacaaagucucuaccaaaaugcagaugccuauguuuuuguggggucaucaagauacagcaggaaguucgagccagaaauagcaacaagacccaaggugagggaccaagcagggagaaugaacuauuacuggacacuaguagagccuggagacaagauaacauucgaagcaacuggaaaucuagugguaccgagauaugccuucgcauugaaaagaacuucuggaucugguauuaucauuucagauacaucaguccacgauugugauacgacuugucagacacccaauggugcuauaaacaccagccucccauuucaaaauauacauccagucacaauuggagaauguccaaaauauguaaaaaguacuaaacugagaauggccacaggauuaaggaauaucccgucuauucaaucuagaggccuguuuggggccauugcuggcuuuaucgaagggggcuggacaggaaugauagauggaugguacgguuaucaccaucaaaaugagcagggaucaggauaugcagccgaccugaagagcacacagaaugccauugacgggaucacuaacaagguaaauucuguuauugaaaagaugaacacacaauucacagcaguagguaaagaguucagccacuuggaaagaagaauagagaauuuaaauaaaaagguugaugaugguuuucuagauauuuggacuuacaaugccgaacuguugguucuauuggaaaaugaaagaacuuuggauuaccacgacucaaaugugaaaaacuuauaugaaaaaguaagaagccaacuaaaaaacaaugccaaggaaauuggaaauggcugcuuugaauuuuaccacaaaugugaugacacgugcauggaaagcgucaaaaauggaacuuaugauuacccuaaauacucagaggaagcaaaacuaaacagagaggaaauagaugggguaaaguuggaaucaacaaggauuuaccaaauuuuggcgaucuauucaacggucgccaguucauugguacugguagucucccugggggcaaucaguuucuggaugugcucuaaugggucgcuacagugcagaauauguauuuaa

SEQ ID NO: 45901 - RNA, 1701 nt, Artificial Sequence
  derived and/or modified CDS sequence (wt) from hemagglutinin__InfluenzaA__EPI482799
augaaggcaauacuaguaguccugcuauauacauuuacaaccgcaaaugccgacacauuauguauagguuaucaugcgaacaauucaacugacaccguagacacaguacuagaaaagaauguaacaguaacacacucugucaaccuucuagaaaacaggcauaaugggaaacuauguaaacuaagagggguagcuccauugcauuuggguaaauguaacauugcuggcuggcuccugggaaauccagagugugaaucacucuccacagcaagcucaugguccuacauuguggaaacaucuaauucagacaaugggacguguuacccaggagauuucaucaauuaugaggagcuaagagagcaguugagcucagugucaucauuugaaagauuugagauauuccccaagacaaguucauggcccaaucaugaaacgaacagaggugugacggcagcauguccucaugcugggacaaacagcuucuacagaaauuuaauauggcugguaaaaaagggaaauucauacccaaagaucaacaaauccuacauuaacaauaaagagaaggaaguucucgugcuaugggccauucaccauccaucuaccagugccgaccaacaaagucucuaccaaaaugcagaugccuauguuuuuguggggucaucaagauacagcaggaaguucgagccagaaauagcaacaagacccaaggugagggaccaagcagggagaaugaacuauuacuggacacuaguagagccuggagacaagauaacauucgaagcaacuggaaaucuagugguaccgagauaugccuucgcauugaaaagaacuucuggaucugguauuaucauuucagauacaucaguccacgauugugauacgacuugucagacacccaauggugcuauaaacaccagccucccauuucaaaauauacauccagucacaauuggagaauguccaaaauauguaaaaaguacuaaacugagaauggccacaggauuaaggaauaucccgucuauucaaucuagaggccuguuuggggccauugcuggcuuuaucgaagggggcuggacaggaaugauagauggaugguacgguuaucaccaucaaaaugagcagggaucaggauaugcagccgaccugaagagcacacagaaugccauugacgggaucacuaacaagguaaauucuguuauugaaaagaugaacacacaauucacagcaguagguaaagaguucagccacuuggaaagaagaauagagaauuuaaauaaaaagguugaugaugguuuucuagauauuuggacuuacaaugccgaacuguugguucuauuggaaaaugaaagaacuuuggauuaccacgacucaaaugugaaaaacuuauaugaaaaaguaagaagccaacuaaaaaacaaugccaaggaaauuggaaauggcugcuuugaauuuuaccacaaaugugaugacacgugcauggaaagcgucaaaaauggaacuuaugauuacccuaaauacucagaggaagcaaaacuaaacagagaggaaauagaugggguaaaguuggaaucaacaaggauuuaccaaauuuuggcgaucuauucaacggucgccaguucauugguacugguagucucccugggggcaaucaguuucuggaugugcucuaaugggucgcuacagugcagaauauguauuuaa

SEQ ID NO: 45902 - RNA, 1701 nt, Artificial Sequence
  derived and/or modified CDS sequence (wt) from hemagglutinin__InfluenzaA__EPI291807
augaaggcaauaauaguagucuugcuauauacauuugcaacugcagaugcugacacauuauguauaggcuaucaugcaaauaauucaacugacacuguugacacaguacuagaaaagaauguaacaguaacacacucuguuaaccuucuagaaaacaagcaugacgggaaacuauguaaacuaagagggguagccccauugcauuuggguaaauguaacauugcuggauggcucuugggaaacccagagugugaaucacuauucgcagcaagcucaugguccuacauaguggaaacgccuaauucagacaaugggacauguuacccaggagauuucaucaauuaugaggagcuaagagagcauuugagcucugugucaucauuugaaagguuugagauauuccccaaggcaaauucauggcccaaucaugauacgaauaagggggugacggcagcauguccuuaugcuggagcaaacagcuuuuacagaaauuuaauauggcuaguaaaaaaaggaaauucauacccaaagcucagcaaauccuacauuaacaauaagaagaaggaaguccucgugauauggggcauccaccauccaccuaccaguacugaccaacaaacucucuaccagaaugcagaugccuauguuuuugugggaucaucaaaauacagcaaaagauucaaaccagaaauagcagcaagacccaaggugagggaucaagcaggaaggauggauuauuacuggacacuaauagaaccuggagacacaauaacauucgaagcaacuggaaaucuagugguaccaagauaugccuucgcaaugaaaagaggcucuggaucugguauuaucguuucagaugcaccaguccacgacuguaauacgacuugucaaacacccaaaggugcuauaaacaccagccuuccauuucagaauauacauccagucacaaucggggaauguccaaaauaugucaaaagcacaaaauugaggauggcuacaggauuaagaaauaucccgucuauucaaucaagaggccuauuuggggccauugcuggauucauugaagggggguggacaggaaugauagauggaugguacgguuaccaccaucaaaaugagcaggggucaggauaugcagccgaccaaaagagcacacagaaugccauugacgggaucacuaacaaaguaaauucuauuauugaaaagaugaacacacaauucacagcaguggguaaagaauucagccaauuggaaaaaagaauagagaguuuaaacaauaagguugaugauggguuccuagauauuuggacuuacaaugccgaacugcugguucuauuggaaaaugaaagaacucuggauuaucacgauucaaaugugaagaaccuauaugaaaaaguaagaagccagcuaaaaaacaaugccaaagaaauuggaaauggcugcuuugaauuuuaccacaaaugcgauaacacgugcauggagagugucaaaaaugggacuuaugauuacccaaaauacucagaagaagcaaagcuaaauagagaggagauagaugggguaaagcuggaaucagcaaggauuuaccagauuuuggcgaucuauucaacugucgccagcucauugguacuguuagucucucugggggcagucagcuucuggaugugcuccaaugggucuuuacagugcagaauauguaucuaa

SEQ ID NO: 45903 - RNA, 1701 nt, Artificial Sequence
  derived and/or modified CDS sequence (wt) from hemagglutinin__InfluenzaA__EPI638970
augaaggcaauacuaguaguccugcuauauacauuuacaaccgcaaaugccgacacauuauguauagguuaucaugcaaacaauucaacugacaccguagacacaguacuagaaaagaauguaacaguaacacacucugucaaccuucuagaaaacaggcauaaugggaaacuaugcaaacuaagagggguagcuccauugcacuuggguaaauguaacauugcuggauggauucugggaaauccagagugugaaucacucuccacagcaagcucaugguccuacauuguggaaacaucuaauucagaaaaugggacguguuacccaggagauuucauaaauuaugaggagcuaagagagcaguugagcucagugucaucauuugaaagauuugagauauuccccaagacaaguucauggcccaaucaugacacgaacaaaggugugacggcagcauguccucauucugggacaaacagcuucuacagaaauuuaguauggcuaguacaaaagggaaauucauacccaaaaaucaacaaauccuacauuaacaauaaagagaaugaaguucucgugcuaugggccauucaccauccaucuaccagugccgaccaacagagucucuacaaaaaugcagaugccuauguguuuguggggucaucaagauacagcaggaaguucgagccagaaauagcaacaagaccuaaagugagagaccaagcagggagaaugaauuauuacuggacacuaguagagccuggagacaagauaacauucgaagcaacuggaaaucuaguggcaccgagauaugccuucacauugaaaagaaauucuggaucugguauuaucauuucagauacaucaguccacgauugugauacaacuugucagacacccaauggugcuauaaacaccagccucccauuucaaaauauacauccagucacaauuggagaauguccaaaauauguaaaaaguacuaaacugagaauggccacagguuuaaggaauaucccgucuauucaaucuagaggccuguuuggugccauugcuggcuuuauugaaggggguuggacaggaaugauagauggaugguacgguuaucaccaucaaaaugagcagggaucaggauaugcagccgaccugaagagcacacaaaaugccauugaugggaucacuaacaaggugaacucuguuauugaaaagaugaacacccaauucacggcaguagguaaagaguucagccacuuggaaagaagaauagagaauuuaaauaaaaagguugaugaugguuuucuagauauuuggacuuacaaugccgaacuguugguucuauuggaaaaugaacgaacuuuggauuaccacgacucaaaugugaaaaacuuauaugaaaaaguaagaagccaacuaaaaaacaaugccaaggaaauugggaauggcugcuuugaauuuuaccacaaaugugaugacaugugcauggaaagcgucaaaaauggaacuuaugauuacccuaaauacucagaggaagcaaaacuaaacagagaggaaauagaugggguaaaguuggaaucaacaaagauuuaccaaauuuuggcgaucuauucaacggucgccaguucauugguacugguagucucccugggggcaaucaguuucuggaugugcucuaaugggucgcuacagugcagaauauguauuuaa

SEQ ID NO: 45904 - RNA, 1701 nt, Artificial Sequence
  derived and/or modified CDS sequence (wt) from hemagglutinin__InfluenzaA__ABI19015
augaaggcaauaauaguaguuuugcuauauacauuugcaacugcagaugcugacacauuauguauaggcuaucaugcaaauaauucaacugacacuguugacacaguacuagaaaagaauguaacaguaacacacucuguuaaccuucuagaaaacaagcaugacgggaaacuauguaaacuaagagggauagccccauugcauuuggguaaauguaacauugcuggauggaucuugggaaacccagagugugaaucacuauucacaacaagcucauggucauacauaguggaaacgccuaauucagacaaugggacauguuacccaggagauuucaucaauuaugaggagcuaagagagcauuugagcucugugucaucauuugaaagguuugagauauuccccaaggcaaauucauggcccuaucaugauacgaauaaaggggugacggcagcauguccuuaugcuggagcaaacagcuuuuacagaaauuuaauauggcuaguaaaaaaaggaaauucauacccaaagcucaguaaauccuacauuaacaauaagaagaaagaaguccucgugauauggggcauccaccauccaccuaccaguacugaccaacaaacucucuaccagaaugcagaugcuuauguuuuugugggaucaucaaaauacagcaagagauucaagccagaaauagcagcaagacccaaggugagggaucaagcaggaaggauggacuauuacuggacacuaauagaaccuggagacacaauaacauucgaagcaacuggaaaucuagugguaccaagauaugccuucacaaugaaaagaggcucuggaucugguauuaucguuucagacgcaccaguccacgauuguaauacgacuugucaaacacccaaaggugcuauaaacaccagccuuccauuucagaauauacauccagucacaauuggagaauguccaaaauaugucaaaagcacaaaauugaggauggcuacaggauuaagaaauaucccgucuauucaaucaagaggccuauuuggggccauugcuggcuucauugaagggggguggacaggaaugauagauggaugguacgguuaucaccaucaaaaugagcagggaucaggauaugcagccgaccaaaagagcacacagaaugccauugacgggaucacuaacaaaguaaauucuauuauugaaaagaugaacacacaauucacagcaguggguaaagaauucagccaauuggaaaaaagaauagagaguuuaaacaauaagguugacgaugguuuucuagauauuuggacuuacaaugccgaacugcugguucuauuggaaaaugaaagaacucuggauuaucacgauucaaaugugaagaaccuauaugaaaaaguaagaagccagcuaaaaaacaaugccaaagaaauuggaaauggcugcuuugaauuuuaccacaaaugugaugacacgugcauggagagugucaaaaaugggacuuaugauuacccaaaauacucagaagaagcaaagcuaaauagacaggagauagaugggguaaagcuggaaucagcaaggauuuaccagauuuuggcgaucuauucaacugucgccagcucauugguacuguuagucucucuaggggcagucaguuucuggaugugcuccaaugggucuuuacagugcagaauauguaucuag

SEQ ID NO: 45905 - RNA, 1701 nt, Artificial Sequence
  derived and/or modified CDS sequence (wt) from hemagglutinin__InfluenzaA__EPI687790
augaaggcaauacuaguaguucugcuauauacauuuacaaccgcaaaugcagacacauuauguauagguuaucaugcaaacaauucaacagacacuguagacacaguacuagaaaagaauguaacaguaacacacucuguuaaccuucuggaagacaagcauaacggaaaacuaugcaaacuaggagggguagccccauugcauuuggguaaauguaacauugcuggcuggauccugggaaauccagagugugaaucacucuccacagcaaguucaugguccuacauuguggaaacaucuaauucagacaauggaacguguuacccaggagauuucaucaauuaugaggagcuaagagagcaauugagcucagugucaucauuugaaagguuugagauauuccccaagacaaguucauggcccaaucaugauucgaacaaagguguaacggcagcauguccucacgcuggagcaaaaagcuucuacaaaaacuugauauggcuaguuaaaaaaggaaauucauacccaaagcucaaccaauccuacauuaaugauaaagggaaagaaguccucgugcuguggggcauucaccauccaucuacuacugcugaccaacaaagucucuaucagaaugcagaugcauauguuuuuguggggacaucaagauacagcaagaaguucaagccggaaauagcaacaagacccaaagugagggaucaagaagggagaaugaacuauuacuggacacuaguagagccgggagacaaaauaacauucgaagcaacuggaaaucuagugguaccgagauaugcauucacaauggaaagaaaugcuggaucugguauuaucauuucagauacaccaguccacgauugcaauacaacuugucagacacccgagggugcuauaaacaccagccucccauuucagaauauacauccgaucacaauuggaaaauguccaaaguauguaaaaagcacaaaauugagacuggccacaggauugaggaaugucccgucuauucaaucuagaggccuauucggggccauugccggcuucauugaagggggguggacagggaugguagauggaugguacgguuaucaccaucaaaaugagcaggggucaggauaugcagccgaccugaagagcacacaaaaugccauugacaagauuacuaacaaaguaaauucuguuauugaaaagaugaauacacaguucacagcaguggguaaagaguucaaccaccuggaaaaaagaauagagaaucuaaauaaaaaaguugaugaugguuuccuggacauuuggacuuacaaugccgaacuguugguucuauuggaaaaugaaagaacuuuggacuaucacgauucaaaugugaagaacuuguaugaaaaaguaagaaaccaguuaaaaaacaaugccaaggaaauuggaaacggcugcuuugaauuuuaccacaaaugcgauaacacgugcauggaaagugucaaaaaugggacuuaugacuacccaaaauacucagaggaagcaaaauuaaacagagaaaaaauagaugggguaaagcuggaaucaacaaggauuuaccagauuuuggcgaucuauucaacugucgccaguucauugguacugguagucucccugggggcaaucagcuucuggaugugcucuaaugggucucuacaguguagaauauguauuuaa

SEQ ID NO: 45906 - RNA, 1701 nt, Artificial Sequence
  derived and/or modified CDS sequence (wt) from hemagglutinin__InfluenzaA__EPI841265
augaaggcaauacuaguaguucugcuauauacauuuacaaccgcaaaugcagacacauuauguauagguuaucaugcaaacaauucaacagacacuguagacacaguacuagaaaagaauguaacaguaacacacucuguuaaccuucuggaagacaagcauaacggaaaacuaugcaaacuaggagggguagccccauugcauuuggguaaauguaacauugcuggcuggauccugggaaauccagagugugaaucacucuccacagcaaguucaugguccuacauuguggaaacaucuaauucagacaauggaacguguuacccaggagauuucaucaauuaugaggagcuaagagagcaauugagcucagugucaucauuugaaagguuugagauauuccccaagacaaguucauggcccaaucaugauucgaacaaagguguaacggcagcauguccucacgcuggagcaaaaagcuucuacaaaaacuugauauggcuaguuaaaaaaggaaauucauacccaaagcucaaccaauccuacauuaaugauaaagggaaagaaguccucgugcuguggggcauucaccauccaucuacuacugcugaccaacaaaguaucuaucagaaugcagaugcauauguuuuuguggggacaucaagauacagcaagaaguucaagccggaaauagcaacaagacccaaagugagggaucaagaagggagaauuaacuauuacuggacacuaguagagccgggagacaaaauaacauucgaagcaacuggaaaucuagugguaccgagauaugcauucacaauggaaagaaaugcuggaucugguauuaucauuucgaauacaccaguccacgauugcaauacaacuugucagacacccgagggugcuauaaacaccagccucccauuucagaauauacauccgaucacaauuggaaaauguccaaaguauguaaaaagcacaaaauugagacuggccacaggauugaggaaugucccgucuauucaaucuagaggccuauucggggccauugccggcuucauugaagggggguggacagggaugguagauggaugguacgguuaucaccaucaaaaugagcaggggucaggauaugcagccgaccugaagagcacacaaaaugccauugacaagauuacuaacaaaguaaauucuguuauugaaaagaugaauacacaguucacagcaguggguaaagaguucaaccaccuggaaaaaagaauagagaaucuaaauaaaaaaguugaugaugguuuccuggacauuuggacuuacaaugccgaacuguugguucuauuggaaaaugaaagaacuuuggacuaucacgauucaaaugugaagaacuuguaugaaaaaguaagaaaccaguuaaaaaacaaugccaaggaaauuggaaacggcugcuuugaauuuuaccacaaaugcgauaacacgugcauggaaagugucaaaaaugggacuuaugacuacccaaaauacucagaggaagcaaaauuaaacagagaaaaaauagaugggguaaagcuggaaucaacaaggauuuaccagauuuuggcgaucuauucaacugucgccaguucauugguacugguagucucccugggggcaaucagcuucuggaugugcucuaaugggucucuacaguguagaauauguauuuaa

SEQ ID NO: 45907 - RNA, 1701 nt, Artificial Sequence
  derived and/or modified CDS sequence (wt) from hemagglutinin__InfluenzaA__EPI291846
augaaggcaauaauaguagucuugcuauauacauuugcaacugcagaugcugacacauuauguauaggcuaucaugcaaauaauucaacugacacuguugacacgguacuagaaaagaauguaacaguaacacacucuguuaaccuucuagaaaacaagcaugacggaaaacuauguaaccuaaaagggguagccccauugcauuuggguaaauguaacauugcuggauggcucuugggaaacccagagugugaaucacuauucacagcaagcucaugguccuacauaguggaaacgccuaauucagacaaugggacauguuacccaggagauuucaucaauuaugaggagcuaagagagcauuugagcucugugucaucauuugaaagguuugagauauuccccaagguuaauucauggcccaaccaugauacaaauaagggggugacggcagcaugcccuuaugcuggagcaaacagcuuuuacagaaauuuaauauggcuaguaaaaaaaggaaauucauacccaaagcucagcaaaucuuacauuaacaacaagaagaaggaaguccucgugauauggggcauucaccauccacccaccagcacugaucaacaaacucucuaccagaaugcagaugccuauguuuuugugggaucaucaaaauacagcaaaagauucgagccagaaauagcagcaagacccaaggugaggaaucaagcaggaagaaugaacuauuacuggacacuaauagaaccuggagacacaauaacauucgaagcaacuggaaaucuagugguaccaagauaugccuucgcaaugagaagaggcucuggaucugguauuauuguuucagaugcaccaguccacgauuguaauacgacuugucaaacacccaaaggugcuauaaacaccagccuuccauuucagaauauacauccagucacaauuggagaauguccaaaauaugucaaaagcacaaaauugaggauggcuacaggauuaagaaauaucccgucuauucaaucaagaggccuauuuggggccauugcuggcuuccuugaagggggguggacaggaaugauagauggaugguacgguuaccaccaucaaaaugagcagggaucaggauaugcagccgaccaaaagagcacacagaacgccauugacgggaucacuaacaaaguaaauucuauuauugaaaagaugaacacacaauucacagcaguggguaaagaauucagccaauuggaaaaaagaauagagaguuuaaacaauaaggucgaugauggguuccuagacauuuggacuuacaaugccgaaaugcugguucuauuggaaaaugaaagaacucuggauuaucacgauucaaaugugaagaaccuauaugaaaaaguaagaagccagcuaaaaaacaaugccaaagaaauuggaaauggcugcuuugaauuuuaccacaaaugcgauaacacgugcauggagagugucagaaaugggacuuaugauuacccaaaauacucagaagaagcaaagcuaaauagagaggagauagaugggguaaagcuggaaucagcaaggauuuaccagauuuuggcgaucuauucaacugucgccagcucauugguacuguuagucucucugggggcagucaguuucuggaugugcuccaaugggucuuuacagugcaggauauguaucuaa

SEQ ID NO: 45908 - RNA, 1695 nt, Artificial Sequence
  derived and/or modified CDS sequence (wt) from hemagglutinin__InfluenzaA__EPI558121
augaaggcaauacuaguaguccugcuauauacauuuacaaccgcaaaugccgacacauuauguauagguuaucaugcaaacaauucaacugacacuguagacacaguacuagaaaagaauguaacaguaacacacucugucaaccuucuagaaaacaggcauaaugggaaacuauguaaacuaagagggguagcuccauugcauuuggguaaauguaacauugcuggcuggcuucugggaaauccagagugugaaucacucuccacagcaagcucaugguccuacauuguggaaacaucuaauucagacaaugggacguguuacccaggagauuucaucaauuaugaagagcuaagagagcaguugagcucagugucaucauuugaaagauucgagauauucccccagacaaguucauggcccaaucaugacacgaacagaggugugacggcagcauguccucaugcugggacgaacagcuucuacagaaauuuaguauggcuaguaaaaaaggggaauucauacucaaagaucaacaaauccuacauuaacaauaaagagaaggaaguucucgugcuaugggccauucaccauccaucuaccagugccgaccaacaaagucucuaccaaaaugcagaugccuauguguuuguggggucaucaagauacagcaggaaguucgagccagaaauagcaacaagaccuaaggugagagaccaagcagggagaaugaacuauuacuggacacuaguagagccuggagacaagauaacauucgaagcuacuggaaaucuaguggcaccgagauaugccuucgcauugaaaagaaauucuggauccgguauuaucauuucagauacaucaguccacgauugugauacgacuugucagacacccaauggugcuauaaacaccagccucccauuucaaaauauacauccagucacaauuggagaauguccaaaauauguaaaaaguacuaaacugagaauggccacagguuuaaggaauaucccgucuauccaaucuagaggccuguuuggugccauugcuggcuuuaucgaaggggguuggacaggaaugauagauggaugguacgguuaucaccaucaaaaugagcagggaucaggauaugcagccgaccugaagagcacacagaaugccauugacgggaucacuaacaagguaaacucuguuauugaaaagaugaacacacaauucacggcaguagguaaagaguucagccacuuggaaagaagaauagagaauuuaaauaaaaaaguagaugaugguuuucuagauauuuggacuuacaaugccgaacuguugguucuauuggaaaaugaaagaacuuuggauuaccacgacucaaaugugaaaaacuuauaugaaaaaguaagaagccaacuaaaaaacaaugccaaagaaauugguaauggcuguuuugaauuuuaccacaaaugugaugacaugugcauggaaagcgucaaaaauggaacuuaugauuacccuaaauacucagaggaagcaaaacuaaacagagaggaaauagaugggguaaaguuggaaucaacaaggauuuaccaaauuuuggcgaucuauucaacggucgccaguucauugguacugguagucucccugggggcaaucaguuucuggaugugcucuaaugggucgcuacagugcagaauauaa

SEQ ID NO: 45909 - RNA, 1701 nt, Artificial Sequence
  derived and/or modified CDS sequence (wt) from hemagglutinin__InfluenzaA__EPI564139
augaagacuaucauugccuugagcuacauucuaugucugguuuucgcucaaaaaaucccuggaaaugacaauagcacggcaacgcugugccuugggcaccaugcaguaccaaacggaacgauagugaaaacaaucacaaaugaccgaauugaaguuacuaaugcuacugagcugguucagaauuccucaauaggugaaauaugcgacaguccucaucagauccuugauggagaaaacugcacacuaauagaugcucuauugggagacccucagugugauggcuuucaaaauaagaaaugggaccuuuuuguugaacgaagcaaagccuacagcaacuguuacccuuaugaugugccggauuaugccucccuuaggucacuaguugccucauccggcacacuggaguuuaacaaugaaagcuucaauuggacuggagucacucaaaacggaacaaguucugcuugcauaaggagaucuaguaguaguuucuuuaguagauuaaauugguugacccacuuaaacuacacauacccagcauugaacgugacuaugccaaacaaugaacaauuugacaaauuguacauuugggggguucaccacccggguacggacaaggaccaaaucuuccuguaugcucaaucaucaggaagaaucacaguaucuaccaaaagaagccaacaagcuguaaucccaaauaucggaucuagacccagaauaagggauaucccuagcagaauaagcaucuauuggacaauaguaaaaccgggagacauacuuuugauuaacagcacagggaaucuaauugcuccuagggguuacuucaaaauacgaagugggaaaagcucaauaaugagaucagaugcacccauuggcaaaugcaagucugaaugcaucacuccaaauggaagcauucccaaugacaaaccauuccaaaauguaaacaggaucacauacggggccugucccagauauguuaagcauagcacucugaaauuggcaacaggaaugcgaaauguaccagagaaacaaacuagaggcauauuuggcgcaauagcggguuucauagaaaaugguugggagggaaugguggaugguugguacgguuucaggcaucaaaauucugagggaagaggacaagcagcagaucucaaaagcacucaagcagcaaucgaucaaaucaaugggaagcugaaucgauugaucgggaaaaccaacgagaaauuccaucagauugaaaaagaauucucagaaguagaaggaagaauucaggaccuugagaaauauguugaggacacuaaaauagaucucuggucauacaacgcggagcuucuuguugcccuggagaaccaacauacaauugaucuaacugacucagaaaugaacaaacuguuugaaaaaacaaagaagcaacugagggaaaaugcugaggauaugggaaaugguuguuucaaaauauaccacaaaugugacaaugccugcauaggaucaauaagaaauggaacuuaugaccacaauguguacagggaugaagcauuaaacaaccgguuccagaucaagggaguugagcugaagucaggguacaaagauuggauccuauggauuuccuuugccauaucauguuuuuugcuuuguguugcuuuguugggguucaucaugugggccugccaaaagggcaacauuaggugcaacauuugcauuuga

SEQ ID NO: 45910 - RNA, 1701 nt, Artificial Sequence
  derived and/or modified CDS sequence (wt) from hemagglutinin__InfluenzaA__EPI786706
augaaggcaauacuaguaguucugcuauauacauuuacaaccgcaaaugcagacacauuauguauagguuaucaugcgaacaauucaacagacacuguagacacaguacuagaaaagaauguaacaguaacacacucuguuaaucuucuggaagacaagcauaacggaaaacuaugcaaacuaagagggguagccccauugcauuuggguaaauguaacauugcuggcuggauccugggaaauccagagugugaaucacucuccacagcaaguucaugguccuacauuguggaaacaucuaauucagacaauggaacguguuacccaggagauuucaucaauuaugaggagcuaagagagcaauugaguucagugucaucauuugaaagguuugaaauauuccccaagacaaguucauggcccaaucaugacucgaacaaagguguaacggcagcauguccucacgcuggagcaaaaagcuucuacaaaaacuugauauggcuaguuaaaaaaggaaauucauacccaaagcucaaccaauccuacauuaaugauaaagggaaagaaguccucgugcuguggggcauucaccauccaucuacuacugcugaccaacaaagucucuaucagaaugcagaugcauauguuuuuguggggacaucaagauacagcaagaaguucaagccggaaauagcaacaagacccaaagugagggaucaagaagggagaaugaacuauuacuggacacuaguagagccgggagacaaaauaacauucgaagcaacuggaaaucuagugguaccgagauaugcauucacaauggaaagaaaugcuggaucugguauuaucauuucagauacaccaguccacgauugcaauacaacuugucagacacccgagggugcuauaaacaccagccucccauuucagaauauacauccgaucacaauugggaaauguccaaaguauguaaaaagcacaaaauugagacuggccacaggauuaaggaaugucccgucuauucaaucuagaggccuauucggggccauugccggcuucauugaagggggguggacagggaugguagauggaugguacgguuaucaccaucaaaaugagcaggggucaggauaugcagccgaccugaagagcacacaaaaugccauugacaagaucacuaacaaaguaaauucuguuauugaaaagaugaauacacaguucacagcaguggguaaagaguucaaccaccuggaaaaaagaauagagaaucuaaauaaaaaaguugaugaugguuuccuagacauuuggacuuacaaugccgaacuguugguucuauuggaaaaugaaagaacuuuggacuaucacgauucaaaugugaagaacuuguaugaaaaaguaagaaaccaguuaaaaaacaaugccaaggaaauuggaaacggcugcuuugaauuuuaccacaaaugcgauaacacgugcauggaaagugucaaaaaugggacuuaugacuacccaaaauacucagaggaagcaaaauuaaacagagaaaaaauagaugggguaaagcuggaaucaacaaggaucuaccagauuuuggcgaucuauucaacugucgccaguucauugguacugguagucucccugggggcaaucagcuucuggaugugcucuaaugggucucuacaguguagaauauguauuuaa

SEQ ID NO: 45911 - RNA, 1701 nt, Artificial Sequence
  derived and/or modified CDS sequence (wt) from hemagglutinin__InfluenzaA__EPI395313
augaaggcaauacuaauaguccugcuauauacauuuacaaccgcaaaugccgacacauuauguauagguuaucaugcaaacaauucaacugacaccguagacacaguacuagaaaagaauguaacaguaacacacucugucaaccuucuagaaaacaggcauaaugggaaacuauguaaacuaagagggguagcuccauugcauuuggguaaauguaacauugcuggcuggcuucugggaaauccagagugugaaucacucuccacagcaagcucaugguccuacauuguggaaacaucuaauucagacaaugggacguguuacccaggagauuucaucaauuaugaggagcuaagagagcaguugagcucagugucaucauuugaaagauuugagauauuccccaagacaaguucauggcccaaucaugacacgaacagaggugugacggcagcauguccucaugcugggacaaaaagcuucuacaaaaauuuaauauggauagcaaaaaagggaaauucauacccaaagaucaacaaauccuacauuaacaauaaagagaaggaaguucucgugcuaugggccauucaccauccaucuaccagugcugaccaacaaagucucuaccaaaaugcagaugccuauguguuuguggggucaucaagauacagcaggaaguucgagccagaaauagcaacaagacccaaggugagagaccaagcagggagaaugaacuauuacuggacacuaguagagccuggagacaagauaacauucgaagcaacuggaaaucuaguggcaccgagauaugccuucgcauugaaaagaaauucuggaucugguauuaucauuucagauacaucaguccacgauugugauacgacuugucagacacccaauggugcuauaaacaccagccucccauuucaaaauauacauccagucacaauuggagaauguccaaaauauguaaaaaguacuaaacugagaauggccacaggauuaaggaauaucccgucuauucaaucuagaggccuguuuggugccauugcuggcuuuaucgaagggggcuggacaggaaugauagauggaugguacgguuaucaccaucaaaaugagcagggaucaggauaugcagccgaccugaagagcacacagaaugccauugacgggaucacuaacaagguaaacucuguuauugaaaagaugaacacacaauucacggcaguagguaaagaguucagccacuuggaaagaagaauagagaauuuaaauaaaaagguugaugaugguuuucuagauauuuggacuuacaaugccgaacuguugguucuauuggaaaaugaaagaacuuuggauuaccacgacucaaaugugaaaaacuuauaugaaaaaguaagaagccaacuaaaaaacaaugccaaggaaauuggaaauggcugcuuugaauuuuaccacaaaugugaugacaugugcauggaaagugucaaaaauggaacuuaugauuacccuaaauacucagaggaagcaaaacuaaacagagagguaauagaugggguaaaguuggaaucaacaaggauuuaccaaauuuuggcgaucuaugcaacggucgccaguucauugguacugguagucucccugggggcaaucaguuuuuggaugugcucuaaugggucgcuacagugcagaauauguauuuaa

SEQ ID NO: 45912 - RNA, 1701 nt, Artificial Sequence
  derived and/or modified CDS sequence (wt) from hemagglutinin__InfluenzaA__EPI291696
augaaggcaauacuauuagucuugcuauauacauucacagccgcaaaugcagacacauuauguauagguuaucaugcaaauaauucaacugacacuguugauacgguacuagaaaagaauguaacaguuacacacucuguuaaucuucuagaaaacagacauaacggaaagcuauguaaacuaagggggguacccccauugcauuuggguaaauguaacauugcuggauggcuccugggaaacccagaaugugaauuacuauucacagcaagcucauggucuuacauuguggaaacaucuaacucagacaaugggacauguuacccaggagauuucaucaauuaugaagagcuaagagagcaguugagcucagugucaucauuugaaagguuugagauauuccccaaggcaaguucauggcccgaucaugaaacgaacagaggugugacggcagcauguccuuaugcuggagcaaacagcuucuacagaaauuuaauauggcugguaaaaaaaggaaauucauacccaaaacucagcaaauccuauguuaacaauaaggagaaggaaguccucgugcuauggggcauucaccauccaccuaccaguacugaccaacaaagucucuaccagaaugcagaugccuauguuuuuguggggucaucaaaguacaacaagaaauucaagccagagauggcggcaagacccaaggugagaggucaagcagggagaaugaacuauuacuggacacuaguugcgccuggagacacaauaacauucgaagcaacuggaaaucuaguggugccaagauaugccuucgcaaugaaaagagguucuggaucugguauuaucauuucagauacaccaguccacgauuguaauacgacuugucaaacacccaaaggugcuauaaacaccagccucccauuucagaauauacauccagucacaauuggagaauguccaaaauaugucaaaaguacaaaauugagaauggcuacaggauuaaggaauaucccgucuauucaaucuagaggucuguuuggagccauugcuggcuuuauugaggggggauggacaggaaugauagauggaugguacgguuaucaccaucaaaaugagcagggaucaggauaugcagcugaccgaaagagcacacagaaugccauugacgggaucacuaacaaaguaaacucuguuauugaaaagaugaacacacaauucacagcaguggguaaagaauucaaccaccuggaaaaaagaauagagaauuuaaacaaaaagguugaugaugguuuucuggauguuuggacuuacaaugccgaacuguugguucuauuggaaaaugaaagaacuuuggauuaccaugacucaaaugugaagaaccuauaugagaaaguaagaagccagcuaaaaaacaaugccaaggaaauuggaaauggcugcuuugaauuuuaccacaaaugugaugacacgugcauggagagcgucaaaaaugggacuuaugauuacccaaaauacucagaagaaucaaaacuaaacagagaggaaauagaugggguaaagcuggaaucaacaaggauuuaccagauuuuggcgaucuauucaacugucgccaguucauugguacugucagucucccugggggcaaucaguuucuggaugugcuccaaugggucuuuacagugcagaauauguauuuaa

SEQ ID NO: 45913 - RNA, 1701 nt, Artificial Sequence; identical to SEQ ID NO: 41843
  derived and/or modified CDS sequence (wt) from hemagglutinin__InfluenzaA__ACU80014

SEQ ID NO: 45914 - RNA, 1701 nt, Artificial Sequence; identical to SEQ ID NO: 34681
  derived and/or modified CDS sequence (wt) from hemagglutinin__InfluenzaA__EPI177400

SEQ ID NO: 45915 - RNA, 1701 nt, Artificial Sequence
  derived and/or modified CDS sequence (wt) from hemagglutinin__InfluenzaA__ACT36512
augaaggcaauacuaguaguucugcuauauacauuugcaaccgcaaaugcagacacauuauguauagguuaucaugcgaacaauucaacagacacuguagacacaguacuagaaaagaauguaacaguaacacacucuguuaaccuucuagaagacaagcauaacgggaaacuaugcaaacuaagagggguagccccauugcauuuggguaaauguaacauugcuggcuggauccugggaaauccagagugugaaucacucuccacagcaagcucaugguccuacauuguggaaacaucuaguucagacaauggaacguguuacccaggagauuucaucgauuaugaggagcuaagagagcaauugagcucagugucaucauuugaaagguuugagauauuccccaagacaaguucauggcccaaucaugacucgaacaaagguguaacggcagcauguccucaugcuggagcaaaaagcuucuacaaaaauuuaauauggcuaguuaaaaaaggaaauucauacccaaagcucagcaaauccuacauuaaugauaaagggaaagaaguccucgugcuauggggcauucaccauccaucuacuagugcugaccaacaaagucucuaucagaaugcagaugcauauguuuuuguggggucgucaagauacagcaagaaguucaagccggaaauagcaauaagacccaaagugaggggucaagaagggagaaugaacuauuacuggacacuaguagagccgggagacaaaauaacauucgaagcaacuggaaaucuagugguaccgagauaugcauucgcaauggaaagaaaugcuggaucugguauuaucauuucagauacaccaguccacgauugcaauacaacuugucagacacccaagggugcuauaaacaccagccucccauuucagaauauacauccgaucacaauuggaaaauguccaaaauauguaaaaagcacaaaauugagacuggccacaggauugaggaaugucccgucuauucaaucuagaggccuauuuggggccauugccgguuucauugaagggggguggacagggaugguagauggaugguacgguuaucaccaucaaaaugagcaggggucaggauaugcagccgaccugaagagcacacagaaugccauugacgaaauuacuaacaaaguaaauucuguuauugaaaagaugaauacacaguucacagcaguagguaaagaguucaaccaccuggaaaaaagaauagagaauuuaaauaaaaaaguugaugaugguuuccuggacauuuggacuuacaaugccgaacuguugguucuauuggaaaaugaaagaacuuuggacuaccacgauucaaaugugaagaacuuauaugaaaagguaagaagccagcuaaaaaacaaugccaaggaaauuggaaacggcugcuuugaauuuuaccacaaaugcgauaacacgugcauggaaagugucaaaaaugggacuuaugacuacccaaaauacucagaggaagcaaaauuaaacagagaagaaauagaugggguaaaacuggaaucaacaaggauuuaccagauuuuggcgaucuauucaacugucgccaguucauugguacugguagucucccugggggcaaucaguuucuggaugugcucuaaugggucucuacaguguagaauauguauuuaa

SEQ ID NO: 45916 - RNA, 1704 nt, Artificial Sequence
  derived and/or modified CDS sequence (wt) from hemagglutinin__InfluenzaA__AJE30344
auggagaaaauagugcuucuucuugcagugauuagccuuguuaaaagugaucagauuugcauugguuaccaugcaaacaacucaacaaagcagguugacacgauaauggagaaaaacgucacuguuacacaugcccaagacauacuggaaaagacacacaacgggaagcucugcgaucuuaauggagugaagccccugauucuaaaggauuguagcguagcuggguggcuccuuggaaauccaaugugcgacgaguucaucaggguaccggaauggucuuacaucguggagagggcuaacccagccaacgaccucuguuacccagggacccucaaugacuaugaggaacugaaacaccuauugagcagaauaaaucauuuugagaaaaaucugaucauccccaggaguucuuggcccaaucaugaaacaucauuaggggugagcgcagcauguccauaccagggagcauccucauuuuucagaaaugugguauggcucaucaaaaagaacgaugcauacccgacaauaaagauaagcuacaauaauaccaaucgggaagaucuuuugauacugugggggauucaucauuccaacaaugcagcagagcagacaaaucucuauaaaaacccagacacuuauguuuccguugggacaucaacauuaaaccagagauuggugccaaaaauagcuacuagaucccaaguaaacgggcagaguggaagaauggauuucuucuggacaauuuuaaaaccgaaugaugcaauccacuuugagaguaauggaaauuucauugcuccagaauaugcauacaaaauugucaagaaaggggacucaacaauuaugaaaagugaaauggaguauggccacugcaacaccaaaugucaaacuccaauaggggcgauaaacucuagcaugccauuccacaauauacacccucucaccaucggggaaugccccaaauacgugaagucaaacaaauuaguccuugcgacugggcucagaaauaguccucuaagagaaagaagaagaaaaagaggacuauuuggagcuauagcaggguuuauagagggaggauggcagggaaugguagacgguugguauggguaucaucauagcaaugagcaggggaguggguacgcugcagacaaagaaucaacccaaaaggcaauagauggaguuaccaauaaggucaacucaaucauugacaaaaugaacacucaauuugaggccguuggaagggaauuuaauaacuuagaaaggagaauagagaauuuaaacaagaaaauggaagacggauuccuagaugucuggacuuauaaugcugaacuuuuaguucucauggaaaaugagagaacucuagauuuccaugacucaaaugucaagaaccuuuacgacaaaguccgacuacagcuuagggauaaugcaaaggagcuggguaaugguuguuucgaguucuaucacaaaugugauaacgaauguauggagagcguaagaaaugggacguaugacuacccuaaguauucagaagaagcaauauuaaaaagagaagaaauaagcggagugaaauuagaaucaauaggaacuuaccagauacugucaauuuauucaacaguggcgaguucccuagcacuggcaaucauaguggcuggucuaucuuuauggaugugcucuaaugggucguuacaaugcagaauuugcaucuaa

SEQ ID NO: 45917 - RNA, 1701 nt, Artificial Sequence; identical to SEQ ID NO: 45896
  derived and/or modified CDS sequence (wt) from hemagglutinin__InfluenzaA__EPI178948

SEQ ID NO: 45918 - RNA, 1701 nt, Artificial Sequence; identical to SEQ ID NO: 45896
  derived and/or modified CDS sequence (wt) from hemagglutinin__InfluenzaA__EPI178949

SEQ ID NO: 45919 - RNA, 1701 nt, Artificial Sequence
  derived and/or modified CDS sequence (wt) from hemagglutinin__InfluenzaA__EPI590132
augaaggcaauacuaauaguccugcuauauacauuuacaaccgcaaaugccgacaaaauauguauagguuaucaugcgaacaauucaacugacaccguagacacaguacuagaaaagaauguaacaguaacacacucugucaaccuucuagaaaacaagcauaauggaaaacuauguaaacuaagagggguagcuccauugcauuuggguaaauguaacauugcuggcuggcuccugggaaauccagagugugaaucacucgccacagcaagcucaugguccuacauuguugaaacuucuaguucgaacaaugggacguguuacccaggagauuucaucaauuaugaagagcuaagagaacaguuaagcucagugucaucauuugaaaaauuugagauauuccccaagacgaguucauggcccaaucaugaaacaaacaaagguguaacggcagcauguccacaugcugggacaaacagcuucuacaaaaauuuaauauggcuggucaaaaaagagaauucauacccaaagaucaacauauccuacacuaacaauagagggaaggaaguucucguguuaugggccauucaccauccaccuaccagcaccgaucaacaaagucucuaccaaaaugcaaauuccuauguuuuuguggggucaucaagauacagcaggaaguucgagccagaaauagcaacaagacccaaggugaggggccaagcagggagaaugaacuauuacuggacauuaguagagccuggagacaagauaacauucgaagcaacuggaaauuuggugguaccgagauaugccuucgcauugaaaagaaauucuggaucugguauuaucauuucagagacaccaguccacgauugugauacgacuugucagacacccaauggugcuauuaacaccagccucccauuucagaauauacauccagucacaauuggggaaugcccaaaauauguaaaaaguacuaaauugagaauggccacaggauugaggaacaucccguccauucaaucuagaggccuguuuggggccauugccggcuuuauugaagggggcuggacaggaaugauagaugggugguacgguuaucaccaucaaaaugagcaaggaucaggauaugcagccgaccugaagagcacacagaaugccauugacgggaucacuaauaagguaaauucuguuauugaaaagaugaauacacaauucacagcaguagguaaagaguucagccacuuggaaagaagaauagagaauuuaaauaaaaagguugaugauggguuuauagauauuuggacuuacaaugccgaacuguugguucuguuggaaaaugaaagaacuuuggauuaccacgacucaaaugugaaaaccuuauaugaaaaaguaagaagccaacuaaaaaacaaugccaaggaaauuggaaacggcugcuuugaauuuuaccacaaaugugaugacacgugcauggagagcgucaaaaauggaacuuaugauuacccaaaauacucagaggaagcaaaacuaaacagagaggaaauagaugggauaaaguuggaaucaacaaggauuuaccaaauuuuggcgaucuauucaacugucgccaguucauugguacugguagucucccugggggcaaucaguuucuggaugugcucuaaugggucgcuacagugcagaguauguauuuaa

SEQ ID NO: 45920 - RNA, 1701 nt, Artificial Sequence; identical to SEQ ID NO: 33748
  derived and/or modified CDS sequence (wt) from hemagglutinin__InfluenzaA__ABU80400

SEQ ID NO: 45921 - RNA, 1698 nt, Artificial Sequence
  derived and/or modified CDS sequence (wt) from hemagglutinin__InfluenzaA__ABO21709
augaaggcaaaccuacugguccuguuaugugcacuugcagcugcagaugcagacacaauauguauaggcuaccaugcgaacaauucaaccgacacuguugacacaguacucgagaagaaugugacagugacacacucuguuaaccugcucgaagacagccacaacggaaaacuauguagauuaaaaggaauagccccacuacaauuggggaaauguaacaucgccggauggcucuugggaaacccagaaugcgacccacugcuuccagugagaucaugguccuacauuguagaaacaccaaacucugagaauggaauauguuauccaggagauuucaucgacuaugaggagcugagggagcaauugagcucagugucaucauucgaaagauucgaaauauuucccaaagaaagcucauggcccaaccacaacacaaacggaguaacggcagcaugcucccaugaggggaaaagcaguuuuuacagaaauuugcuauggcugacggagaaggagggcucauacccaaagcugaaaaauucuuaugugaacaaaaaagggaaagaaguccuuguacugugggguauucaucacccgccuaacaguaaggaacaacagaaucucuaucagaaugaaaaugcuuaugucucuguagugacuucaaauuauaacaggagauuuaccccggaaauagcagaaagacccaaaguaagagaucaagcugggaggaugaacuauuacuggaccuugcuaaaacccggagacacaauaauauuugaggcaaauggaaaucuaauagcaccaauguaugcuuucgcacugaguagaggcuuuggguccggcaucaucaccucaaacgcaucaaugcaugaguguaacacgaagugucaaacaccccugggagcuauaaacagcagucucccuuaccagaauauacacccagucacaauaggagagugcccaaaauacgucaggagugccaaauugaggaugguuacaggacuaaggaacaauccguccauucaauccagaggucuauuuggagccauugccgguuuuauugaagggggauggacuggaaugauagauggaugguaugguuaucaucaucagaaugaacagggaucaggcuaugcagcggaucaaaaaagcacacaaaaugccauuaacgggauuacaaacaaggugaacacuguuaucgagaaaaugaacauucaauucacagcuguggguaaagaauucaacaaauuagaaaaaaggauggaaaauuuaaauaaaaaaguugaugauggauuucuggacauuuggacauauaaugcagaauuguuaguucuacuggaaaaugaaaggacucuggauuuccaugacucaaaugugaagaaucuguaugagaaaguaaaaagccaauuaaagaauaaugccaaagaaaucggaaauggauguuuugaguucuaccacaagugugacaaugaaugcauggaaaguguaagaaaugggacuuaugauuaucccaaauauucagaagagucaaaguugaacagggaaaagguagauggagugaaauuggaaucaauggggaucuaucagauucuggcgaucuacucaacugucgccaguucacuggugcuuuuggucucccugggggcaaucaguuucuggauguguucuaauggaucuuugcagugcagaauaugcaucuga

SEQ ID NO: 45922 - RNA, 1701 nt, Artificial Sequence
  derived and/or modified CDS sequence (wt) from hemagglutinin__InfluenzaA__CAZ65588
augaaggcaauacuaguaguucugcuauauacauuugcaaccgcaaaugcagacacauuauguauagguuaucaugcgaacaauucaacagacacuguagacacaguacuagaaaagaauguaacaguaacacacucuguuaaccuucuagaagacaagcauaacgggaaacuaugcaaacuaagagggguagccccauugcauuuggguaaauguaacauugcuggcuggauccugggaaauccagagugugaaucacucuccacagcaagcucaugguccuacauuguggaaacaucuaguucagacaauggaacguguuacccaggagauuucaucgauuaugaggagcuaagagagcaauugagcucagugucaucauuugaaagguuugagauauuccccaagacaaguucauggcccaaucaugacucgaacaaagguguaacggcagcauguccucaugcuggagcaaaaagcuucuacaaaaauuuaauauggcuaguuaaaaaaggaaauucauacccaaagcucagcaaauccuacauuaaugauaaagggaaagaaguccucgugcuauggggcauucaccauccaucuacuagugcugaccaacaaagucucuaucagaaugcagaugcauauguuuuuguggggucaucaagauacagcaagaaguucaagccggaaauagcaauaagacccaaagugagggaucaagaagggagaaugaacuauuacuggacacuaguagaaccgggagacaaaauaacauucgaagcaacuggaaaucuagugguaccgagauaugcauucgcaauggaaagaaaugcuggaucugguauuaucauuucagauacaccaguccacgauugcaauacaacuugucagacacccaagggugcuauaaacaccagccucccauuucagaauauacauccgaucacaauuggaaaauguccaaaauauguaaaaagcacaaaauugagacuggccacaggauugaggaaugucccgucuauucaaucuagaggccuauuuggggccauugccgguuucauugaagggggguggacagggaugguagauggaugguacgguuaucaccaucaaaaugagcaggggucaggauaugcagccgaccugaagagcacacagaaugccauugacgagauuacuaacaaaguaaauucuguuauugaaaagaugaauacacaguucacagcaguagguaaagaguucaaccaccuggaaaaaagaauagagaauuuaaauaaaaaaguugaugaugguuuccuggacauuuggacuuacaaugccgaacuguugguucuauuggaaaaugaaagaacuuuggacuaccacgauucaaaugugaagaacuuauaugaaaagguaagaagccagcuaaaaaacaaugccaaggaaauuggaaacggcugcuuugaauuuuaccacaaaugcgauaacacgugcauggaaagugucaaaaaugggacuuaugacuacccaaaauacucagaggaagcaaaauuaaacagagaagaaauagaugggguaaagcuggaaucaacaaggauuuaccagauuuuggcgaucuauucaacugucgccaguucauugguacugguagucucccugggggcaaucaguuucuggaugugcucuaaugggucucuacaguguagaauauguauuuaa

SEQ ID NO: 45923 - RNA, 1701 nt, Artificial Sequence
  derived and/or modified CDS sequence (wt) from hemagglutinin__InfluenzaA__EPI697744
augaaggcaauacuaguaguucugcuauauacauuuacaaccgcaaaugcagacacauuauguauagguuaucaugcgaacaauucaacagacacuguagacacaguacuagaaaagaauguaacaguaacacacucuguuaaucuucuggaagacaagcauaacggaaaacuaugcaaacuaagagggguagccccauugcauuuggguaaauguaacauugcuggcuggauccugggaaauccagagugugaaucacucuccacagcaaguucaugguccuacauuguggaaacaucuaauucagacaauggaacguguuacccaggagauuucaucaauuaugaggagcuaagagagcaauugagcucagugucaucauuugaaagguuugaaauauuccccaagacaaguucauggcccaaucaugacucgaacaaagguguaacggcagcauguccucacgcuggagcaaaaagcuucuacaaaaacuugauauggcuaguuaaaaaaggaaauucauacccaaagcucaaccaauccuacauuaaugauaaagggaaagaaguccucgugcuguggggcauucaccauccaucuacuacugcugaccaacaaagucucuaucagaaugcagaugcauauguuuuuguggggacaucaagauacagcaagaaguucaagccggaaauagcaacaagacccaaagugagggaucaagaagggagaaugaacuauuacuggacacuaguagagccgggagacaaaauaacauucgaagcaacuggaaaucuagugguaccgagguaugcauucacaauggaaagaaaugcuggaucugguauuaucauuucagauacaccaguccacgauugcaauacaacuugucagacacccgagggugcuauaaacaccagccucccauuucagaauauacauccgaucacaauugggaaauguccaaaguauguaaaaagcacaaaauugagacuggccacaggauugaggaaugucccgucuauucaaucuagaggccuauucggggccauugccggcuucauugaagggggguggacagggaugguagauggaugguacgguuaucaccaucaaaaugagcaggggucaggauaugcagccgaccugaagagcacacaaaaugccauugacaagauuacuaacaaaguaaauucuguuauugaaaagaugaauacacaguucacagcaguggguaaagaguucaaccaccuggaaaaaagaauagagaaucuaaauaaaaaaguugaugaugguuuccuggacauuuggacuuacaaugccgaacuguugguucuauuggaaaaugaaagaacuuuggacuaucacgauucaaaugugaagaacuuguaugaaaaaguaagaaaccaguuaaaaaacaaugccaaggaaauuggaaacggcugcuuugaauuuuaccacaaaugcgauaacacgugcauggaaagugucaaaaaugggacuuaugacuacccaaaauacucagaggaagcaaaauuaaacagagaaaaaauagaugggguaaagcuggaaucaacaaggaucuaccagauuuuggcgaucuauucaacugucgccaguucauugguacugguagucucccugggggcaaucagcuucuggaugugcucuaaugggucucuacaguguagaauauguauuuaa

SEQ ID NO: 45924 - RNA, 1701 nt, Artificial Sequence
  derived and/or modified CDS sequence (wt) from hemagglutinin__InfluenzaA__EPI768525
augaaggcaauacuaguaguucuguuauauacauuuacaaccgcaaaugcagacacauuauguauagguuaucaugcgaacaauucaacagacacuguagacacaguacuagaaaagaauguaacaguaacacacucuguuaaucuucuggaagacaagcauaacggaaaacuaugcaaacuaagagggguagccccauugcauuuggguaaauguaacauugcuggcuggauccugggaaauccagagugugaaucacucuccacagcaaguucaugguccuacauuguggaaacaucuaauucagacaauggaacguguuacccaggagauuucaucaauuaugaggagcuaagagagcaauugagcucagugucaucauuugaaagguuugaaauauuccccaagacaaguucauggcccaaucaugacucgaacaaagguguaacggcagcauguccucacgcuggagcaaaaagcuucuacaaaaacuugauauggcuaguuaaaaaaggaaauucauacccaaagcucaaccaauccuacauuaaugauaaagggaaagaaguccucgugcuguggggcauucaccauccaucuacuacugcugaccaacaaagucucuaucagaaugcagaugcauauguuuuuguggggacaucaagauacagcaagaaguucaagccggaaauagcaacaagacccaaagugagggaucgagaagggagaaugaacuauuacuggacacuaguagagccgggagacaaaauaacauucgaagcaacuggaaaucuagugguaccgagguaugcauucacaauggaaagaaaugcuggaucugguauuaucauuucagauacaccaguccacgauugcaauacaacuugucagacacccgagggugcuauaaacaccagccucccauuucagaauauacauccgaucacaauugggaaauguccaaaguauguaaaaagcacaaaauugagacuggccacaggauugaggaaugucccgucuauucaaucuagaggccuauucggggccauugccggcuucauugaagggggguggacagggaugguagauggaugguacgguuaucaccaucaaaaugagcaggggucaggauaugcagccgaccugaagagcacacaaaaugccauugacaagauuacuaacaaaguaaauucuguuauugaaaagaugaauacacaguucacagcaguggguaaagaguucaaccaccuggaaaaaagaauagagaaucuaaauaaaaaaguugaugaugguuuccuggacauuuggacuuacaaugccgaacuguugguucuauuggaaaaugaaagaacuuuggacuaucacgauucaaaugugaagaacuuguaugaaaaaguaagaaaccaguuaaaaaacaaugccaaggaaauuggaaacggcugcuuugaauuuuaccacaaaugcgauaacacgugcauggaaagugucaaaaaugggacuuaugacuacccaaaauacucagaggaagcaaaauuaaacagagaaaaaauagaugggguaaagcuggaaucaacaaggaucuaccagauuuuggcgaucuauucaacugucgccaguucauugguacugguagucucccugggggcaaucagcuucuggaugugcucuaaugggucucuacaguguagaauauguauuuaa

SEQ ID NO: 45925 - RNA, 1701 nt, Artificial Sequence
  derived and/or modified CDS sequence (wt) from hemagglutinin__InfluenzaA__EPI726930
augaaggcaauacuaguaguucugcuauauacauuuacaacugcaaaugcagacacauuauguauagguuaucaugcgaacaauucaacagacacuguagacacaguacuagaaaagaauguaacaguaacacacucuguuaaucuucuggaagacaagcauaacggaaaacuaugcaaacuaagagggguagccccauugcauuuggguaaauguaacauugcuggcuggauccugggaaauccagagugugaaucacucuccacagcaaguucaugguccuacauuguggaaacaucuaauucagacaauggaacguguuacccaggagauuucaucaauuaugaggagcuaagagagcaauugagcucagugucaucauuugaaagguuugaaauauuccccaaggcaaguucauggcccaaucaugacucgaacaaagguguaacggcagcauguccucacgcuggagcaaaaagcuucuacaaaaacuugauauggcuaguuaaaaaaggaaauucauacccaaagcucaaccaauccuacauuaaugauaaagggaaagaaguccucgugcuguggggcauucaccauccaucuacuacugcugaccaacaaagucucuaucagaaugcagaugcauauguuuuuguggggacaucaagauauagcaagaaguucaagccggaaauagcaacaagacccaaagugagggaucaagaagggagaaugaacuauuacuggacacuaguagagccgggagacaaaauaacauucgaagcaacuggaaaucuagugguaccgagauaugcauucacaauggaaagaaaugcuggaucugguauuaucauuucagauacaccaguccacgauugcaauacaacuugucagacacccgagggugcuauaaacaccagccucccauuucagaauauacauccgaucacaauugggaaauguccaaaguauguaaaaagcacaaaauuaagacuggccacaggauugaggaaugucccgucuauucaaucuagaggccuauucggggccauugccggcuucauugaagggggguggacagggaugguagauggaugguacgguuaucaccaucaaaaugagcaggggucaggauaugcagccgaccugaagagcacacaaaaugccauugacaagauuacuaacaaaguaaauucuguuauugaaaagaugaauacacaguucacagcaguggguaaagaguucaaccaccuggaaaaaagaauagagaaucuaaauaaaaaaguugaugaugguuuccuggacauuuggacuuacaaugccgaacuguugguucuauuggaaaaugaaagaacuuuggacuaucacgauucaaaugugaagaacuuguaugaaaaaguaagaaaccaguuaaaaaacaaugccaaggaaauuggaaacggcugcuuugaauuuuaccacaaaugcgauaacacgugcauggaaagugucaaaaaugggacuuaugacuacccaaaauacucagaggaagcaaaauuaaacagagaaaaaauagaugggguaaagcuggaaucaacaaggaucuaccagauuuuggcgaucuauucaacugucgccaguucauugguacugguagucucccugggggcaaucagcuucuggaugugcucuaaugggucucuacaguguagaauauguauuuaa

SEQ ID NO: 45926 - RNA, 1701 nt, Artificial Sequence
  derived and/or modified CDS sequence (wt) from hemagglutinin__InfluenzaA__EPI813817
augaaggcaauacuaguaguucugcuauauacauuuacaacugcaaaugcagacacauuauguauagguuaucaugcgaacaauucaacagacacuguagacacaguacuagaaaagaauguaacaguaacacacucuguuaaucuucuggaagacaagcauaacggaaaacuaugcaaacuaagagggguagccccauugcauuuggguaaauguaacauugcuggcuggauccugggaaauccagagugugaaucacucuccacagcaaguucaugguccuacauuguggaaacaucuaauucagacaauggaacguguuacccaggagauuucaucaauuaugaggagcuaagagagcaauugagcucagugucaucauuugaaagguuugaaauauuccccaaggcaaguucauggcccaaucaugacucgaacaaagguguaacggcagcauguccucacgcuggagcaaaaagcuucuacaaaaacuugauauggcuaguuaaaaaaggaaauucauacccaaagcucaaccaauccuacauuaaugauaaagggaaagaaguccucgugcuguggggcauucaccauccaucuacuacugcugaccaacaaagucucuaucagaaugcagaugcauauguuuuuguggggacaucaagauauagcaagaaguucaagccggaaauagcaacaagacccaaagugagggaucaagaagcgagaaugaacuauuacuggacacuaguagagccgggagacaaaauaacauucgaagcaacuggaaaucuagugguaccgagauaugcauucacaauggaaagaaaugcuggaucugguauuaucauuucagauacaccaguccacgauugcaauacaacuugucagacacccgagggugcuauaaacaccagccucccauuucagaauauacauccgaucacaauugggaaauguccaaaguauguaaaaagcacaaaauuaagacuggccacaggauugaggaaugucccgucuauucaaucuagaggccuauucggggccauugccggcuucauugaagggggguggacagggaugguagauggaugguacgguuaucaccaucaaaaugagcaggggucaggauaugcagccgaccugaagagcacacaaaaugccauugacaagauuacuaacaaaguaaauucuguuauugaaaagaugaauacacaguucacagcaguggguaaagaguucaaccaccuggaaaaaagaauagagaaucuaaauaaaaaaguugaugaugguuuccuggacauuuggacuuacaaugccgaacuguugguucuauuggaaaaugaaagaacuuuggacuaucacgauucaaaugugaagaacuuguaugaaaaaguaagaaaccaguuaaaaaacaaugccaaggaaauuggaaacggcugcuuugaauuuuaccacaaaugcgauaacacgugcauggaaagugucaaaaaugggacuuaugacuacccaaaauacucagaggaagcaaaauuaaacagagaaaaaauagaugggguaaagcuggaaucaacaaggaucuaccagauuuuggcgaucuauucaacugucgccaguucauugguacugguagucucccugggggcaaucagcuucuggaugugcucuaaugggucucuacaguguagaauauguauuuaa

SEQ ID NO: 45927 - RNA, 1701 nt, Artificial Sequence
  derived and/or modified CDS sequence (wt) from hemagglutinin__InfluenzaA__EPI466626
augaaggcaauacuaguaguucugcuauauacauuugcaaccgcaaaugcagacacauuauguauagguuaucaugcgaacaauucaacagacacuguagacacaguacuagaaaagaauguaacaguaacacacucuguuaaccuucuagaagacaagcauaacgggaaacuaugcaaacuaagagggguagccccauugcauuuggguaaauguaacauugcuggcuggauccugggaaauccagagugugaaucacucuccacagcaaguucaugguccuacauuguggaaacaucuaguucagacaauggaacguguuacccaggagauuucaucaauuaugaggagcuaagagagcaauugagcucagugucaucauuugaaagguuugagauauuccccaagacaaguucauggcccaaucaugacucgaacaaagguguaacggcagcauguccucacgcuggagcaaaaagcuucuacaaaaauuuaauauggcuaguuaaaaaaggaaauucauacccaaagcucagccaauccuacauuaaugauaaagggaaagaaguccucgugcuguggggcauucaccauccaucuacuacugcugaccaacaaagucucuaucagaaugcagaugcauauguuuuuguggggacaucaagauacagcaagaaguucaagccggaaauagcaauaagacccaaagugagggaucaagaagggagaaugaacuauuacuggacacuaguagagccgggagacaaaauaacauucgaagcaacuggaaaucuagugguaccgagauaugcauucacaauggaaagaaaugcuggaucugguauuaucauuucagauacaccaguccacgauugcaauacaacuugucagacacccgagggugcuauaaacaccagccucccauuucagaauauacauccgaucacaauuggaaaauguccaaaguauguaaaaagcacaaaauugagacuggccacaggauugaggaaugucccgucuauucaaucuagaggccuauucggggccauugccggcuucauugaagggggguggacagggaugguagauggaugguacgguuaucaccaucaaaaugagcaggggucaggauaugcagccgaccugaagagcacacaaaaugccauugacaagauuacuaacaaaguaaauucuguuauugaaaagaugaauacacaguucacagcaguggguaaagaguucaaccaccuggaaaagagaauagagaauuuaaauaaaaaaguugaugauggauuccuggacauuuggacuuacaaugccgaacuguugguucuauuggaaaaugaaagaacuuuggacuaccacgauucaaaugugaagaacuuguaugaaaagguaagaaaccaguuaaaaaacaaugccaaggaaauuggaaacggcugcuuugaauuuuaccacaaaugcgauaacacgugcauggaaagugucaaaaaugggacuuaugacuacccgaaauacucagaggaagcaaaauuaaacagagaaaaaauagaugggguaaagcuggaaucaacaaggauuuaccagauuuuggcgaucuauucaacugucgccaguucagugguacugguagucucccugggggcaaucagcuucuggaugugcucuaaugggucucuacaguguagaauauguauuuaa

SEQ ID NO: 45928 - RNA, 1701 nt, Artificial Sequence
  derived and/or modified CDS sequence (wt) from hemagglutinin__InfluenzaA__EPI541966
augaaggcaauacuaguaguucugcuauauacauuugcaaccgcaaaugcagacacauuauguauagguuaucaugcgaacaauucaacagacacuguagacacaguacuagaaaagaauguaacaguaacacacucuguuaaccuucuagaagacaagcauaacgggaaacuaugcaaacuaagagggguagccccauugcauuuggguaaauguaacauugcuggcuggauccugggaaauccagagugugaaucacucuccacagcaaguucaugguccuacauuguggaaacaucuaguucagacaauggaacguguuacccaggagauuucaucaauuaugaggagcuaagagagcaauugagcucagugucaucauuugaaagguuugagauauuccccaagacaaguucauggcccaaucaugaaucgaacaaagguguaacggcagcauguccucacgcuggagcaaaaagcuucuacaaaaauuuaauauggcuaguuaaaaaaggaaauucauacccaaagcucagccaauccuacauuaaugauaaagggaaagaaguccucgugcuguggggcauucaccauccaucuacuacugcugaccaacaaagucucuaucagaaugcagaugcauauguuuuuguggggacaucaagauacagcaagaaguucaagccggaaauagcaauaagacccaaagugagggaucaagaagggagaaugaacuauuacuggacacuaguagagccgggagacaaaauaacauucgaagcaacuggaaaucuagugguaccgagauaugcauucacaauggaaagaaaugcuggaucugguauuaucauuucagauacaccaguccacgauugcaauacaacuugucagacacccgagggugcuauaaacaccagccucccauuucagaauauacauccgaucacaauuggaaaauguccaaaguauguaaaaagcacaaaauugagacuggccacaggauugaggaaugucccgucuauucaaucuagaggccuauucggggccauugccggcuucauugaagggggguggacagggaugguagauggaugguacgguuaucaccaucaaaaugagcaggggucaggauaugcagccgaccugaagagcacacaaaaugccauugacaagauuacuaacaaaguaaauucuguuauugaaaagaugaauacacaguucacagcaguggguaaagaguucaaccaccuggaaaagagaauagagaauuuaaauaaaaaaguugaugauggauuccuggacauuuggacuuacaaugccgaacuguugguucuauuggaaaaugaaagaacuuuggacuaccacgauucaaaugugaagaacuuguaugaaaagguaagaaaccaguuaaaaaacaaugccaaggaaauuggaaacggcugcuuugaauuuuaccacaaaugcgauaacacgugcauggaaagugucaaaaaugggacuuaugacuacccgaaauacucagaggaagcaaaauuaaacagagaaaaaauagaugggguaaagcuggaaucaacaaggauuuaccagauuuuggcgaucuauucaacugucgccaguucagugguacugguagucucccugggggcaaucagcuucuggaugugcucuaaugggucucuacaguguagaauauguauuuaa

SEQ ID NO: 45929 - RNA, 1701 nt, Artificial Sequence
  derived and/or modified CDS sequence (wt) from hemagglutinin__InfluenzaA__EPI652003
augaaggcaauacuaguaguucugcuauauacauuugcaaccgcaaaugcagacacauuauguauagguuaucaugcgaacaauucaacagacacuguagacacaguacuagaaaagaauguaacaguaacacacucuguuaaccuucuagaagacaagcauaacgggaaacuaugcaaacuaagagggguagccccauugcauuuggguaaauguaacauugcuggcuggauccugggaaauccagagugugaaucacucuccacagcaaguucaugguccuacauuguggaaacaucuaguucagacaauggaacguguuacccaggagauuucaucaauuaugaggagcuaagagagcaauugagcucagugucaucauuugaaagguuugagauauuccccaagacaaguucauggcccaaucaugaaucgaacaaagguguaacggcagcauguccucacgcuggagcaaaaagcuucuacaaaaauuuaauauggcuaguuaaaaaaggaaauucauacccaaagcucagccaauccuacauuaaugauaaagggaaagaaguccucgugcuguggggcauucaccauccaccuacuacugcugaccaacaaagucucuaucagaaugcagaugcauauguuuuuguggggacaucaagauacagcaagaaguucaagccggaaauagcaauaagacccaaagugagggaucaagaagggagaaugaacuauuacuggacacuaguagagccgggagacaaaauaacauucgaagcaacuggaaaucuagugguaccgagauaugcauucacaauggaaagaaaugcuggaucugguauuaucauuucagauacaccaguccacgauugcaauacaacuugucagacacccgagggugcuauaaacaccagccucccauuucagaauauacauccgaucacaauuggaaaauguccaaaguauguaaaaagcacaaaauugagacuggccacaggauugaggaaugucccgucuauucaaucuagaggccuauucggggccauugccggcuucauugaagggggguggacagggaugguagauggaugguacgguuaucaccaucaaaaugagcaggggucaggauaugcagccgaccugaagagcacacaaaaugccauugacaagauuacuaacaaaguaaauucuguuauugaaaagaugaauacacaguucacagcaguggguaaagaguucaaccaccuggaaaagagaauagagaauuuaaauaaaaaaguugaugauggauuccuggacauuuggacuuacaaugccgaacuguugguucuauuggaaaaugaaagaacuuuggacuaccacgauucaaaugugaagaacuuguaugaaaagguaagaaaccaguuaaaaaacaaugccaaggaaauuggaaacggcugcuuugaauuuuaccacaaaugcgauaacacgugcauggaaagugucaaaaaugggacuuaugacuacccgaaauacucagaggaagcaaaauuaaacagagaaaaaauagaugggguaaagcuggaaucaacaaggauuuaccagauuuuggcgaucuauucaacugucgccaguucagugguacugguagucucccugggggcaaucagcuucuggaugugcucuaaugggucucuacaguguagaauauguauuuaa

SEQ ID NO: 45930 - RNA, 1701 nt, Artificial Sequence
  derived and/or modified CDS sequence (wt) from hemagglutinin__InfluenzaA__EPI291877
augaaagcaauaauaguagucuugcuauauacauuugcaacugcagaugcugacacauuauguauaggcuaucaugcaaauaauucaacugacacuguugacacaguacuagaaaagaauguaacaguaacacacucuguuaacauucuagaaaacaagcaugacgggaaacuauguaaacuaagagggguagccccauugcauuuggguaaauguaacauugcuggauggcucuugggaaacccagagugugaaucacuauucgcagcaagcucauggucauacauaguggaaacgccuaauucagacaaugggacauguuacccaggagauuucaucaauuaugaggagcuaagagagcauuugagcucugugucaucauuugaaagguuugagauauuccccaaggcaaauucauggccuaaucaugauacgaauaagggggugacggcagcauguccuuaugcuggagcaaacagcuuuuacagaaauuuaauauggcuaguaaaaaaaggaaauucauacccaaagcucagcaaauccuacauuaacaauaagaagaaggaaguccucgugauauggggcauccaccauccaccuaccaguauugaccaacaaacucucuaccagaaugcagaugccuauguuuuugugggaucaucaaaauacagcaaaagauucaaaccagaaauagcagcaagacccaaggugagggaucaagcaggaaggauggauuauuacuggacacuaauagaaccuggagacacaauaacauucgaagcaacuggaaaucuagugguaccaagauaugccuucgcaaugaaaagaggcucuggaucugguauuaucguuucagaugcaccaguccacgacuguaauacgacuugucaaacacccaaaggugcuauaaacaccagccuuccauuucagaauauacauccagucacaauuggggaauguccaaaauaugucaaaagcacaaaauugaggauggcuacaggauuaagaaauaucccgucuauucaaucaagaggccuauuuggggccauugcuggauucauugaagggggguggacaggaaugauagauggaugguacgguuaccaccaucaaaaugagcaggggucaggauaugcagccgaccaaaagagcacacagaaugccauugacgggaucacuaacaaaguaaauucuauuauugaaaagaugaacacacaauucacagcaguggguaaagaauucagccaauuggaaaaaagaauagagaguuuaaacaauaagguugaugauggauuccuagauauuuggacuuacaaugccgaacugcugguucuauuggaaaaugaaagaacucuggauuaucacgauucaaaugugaagaaccuauaugaaaaaguaagaagccagcuaaaaaacaaugccaaagaaauuggaaauggcugcuuugaauuuuaccacaaaugcgauaacacgugcauggagagugucaaaaaugggacuuaugauuacccaaaauacucagaagaagcaaagcuaaauagagaggagauagaugggauaaagcuggaaucagcaaggauuuaccagauuuuggcgaucuauucaacugucgccagcucauugguacuguuagucucucugggggcagucagcuucuggaugugcuccaaugggucuuuacagugcagaauauguaucuaa

SEQ ID NO: 45931 - RNA, 1701 nt, Artificial Sequence
  derived and/or modified CDS sequence (wt) from hemagglutinin__InfluenzaA__ABR29595
augaaggcaauacuauuagucuugcuauauacauuuacagccgcaaaugcagacacauuauguauagguuaccaugcaaauaauucaacugacacuguugauacaguacuagaaaagaauguaacaguaacacacucuguuaaccuucuagaagacagacauaacggaaaacuauguaaacuaaggggaguagccccauugcauuuggguaaauguaacauugcuggauggcuccugggaaacccagaaugugaauuacuauucacagcaagcucauggucuuacauuguggaaacaucuaacucagacaaugggacauguuacccaggagauuucaucaauuaugaagagcuaagagagcaguugagcucagugucaucauuugaaagauuugagauauuccccaaggcaaguucauggcccaaucaugaaacgaacagaggugugacggcagcaugcccuuaugcuggagcaaacagcuucuacagaaauuuaauauggcugguaaaaaaaggaaauucauacccaaagcucagcaaauccuauguuaacaauaaggagaaggaaguccucgugcuauggggcauucaccauccaccuaccaguacugaccaacaaagucucuaccagaaugcagaugccuauguuuuuguggggucaucaaaauacaacaagaaauucaagccagaaauagcaacaagacccaaggugagaggucaagcagggagaaugaacuauuacuggacacuaguagagccuggagacacaauaacauucgaagcaacuggaaaucuagugguaccaagauaugccuucgcaaugaaaagagguucuggaucugguauuaucauuucagauacaccaguccacgauuguaauacgacuugucaaacacccaaaggugcuauaaacaccagccucccauuucagaauauacauccagucacaauuggagaauguccaaaauaugucaaaagcacaaaauugagaauggcuacaggacuaaggaauaucccgucuauucaaucuagaggucuguuuggagccauugcuggcuuuauugaggggggauggacaggaaugauagauggaugguacgguuaucaccaucaaaaugagcagggaucaggauaugcagcugaccgaaagagcacacagaaugccauugacgggaucacuaacaaaguaaacucuguuauugaaaagaugaacacacaauucacagcaguggguaaagaauucaaccaccuggaaaaaagaauagagaauuuaaacaaaaagguugaugaugguuuucuggauguuuggacuuacaaugccgaacuguugguucuauuggaaaaugaaagaacuuuggauuaccaugacucaaaugugaagaaccuauaugagaaaguaagaagccagcuaaaaaacaaugccaaggaaauuggaaauggcugcuuugaauuuuaccacaaaugugaugacacgugcauggagagcgucaaaaaugggacuuaugauuacccaaaauacucagaagaaucaaaacuaaacagagaggaaauagaugggguaaagcuggaaucaacaaggauuuaccagauuuuggcgaucuauucaacugucgccaguucauugguacuguuagucucccugggggcaaucagcuucuggaugugcuccaaugggucuuuacagugcagaauauguauuuaa

SEQ ID NO: 45932 - RNA, 1701 nt, Artificial Sequence
  derived and/or modified CDS sequence (wt) from hemagglutinin__InfluenzaA__EPI291885
augaaggcaauaauaguagucuugcuacauacauuugcaacugcagaugcugacacauuauguauaggcuaucaugcaaauaauucaacugacacuguugacacgguacuagaaaagaauguaacaguaacacacucuguuaaccuucuagaaaccaagcaugacggaaaacuauguaaccuaaaagggguagccccauugcauuuggguaaauguaacauugcuggauggcucuugggaaacccagagugugaaucacuauucacagcaagcucaugguccuacauaguggaaacgccuaauucagacaaugggacauguuacccaggaaauuucaucaauuaugaggagcuaagagagcauuugagcucugugucgucauuugaaagguuugagauauuccccaaggcaaauucauggcccaaccaugauacgaauaagggggugacggcagcaugcccuuaugcuggggcaaacagcuuuuacagaaauuuaauauggcuaguaaaaaaaggaaauucauacccaaagcucagcaaauccuacauuaacaacaagaagaaggaaguccucgugauauggggcauccaccauccacccaccagcacugaucaacaaacucucuaccagaaugcagaugccuauguuuuugugggaucaucaaaauacagcaaaagauucgagccagaaauagcagcaagacccaaggugaggaaucaagcaggaagaaugaacuauuacuggacacuaauagaaccuggagacacaauaacauucgaagcaacuggaaaucuagugguaccaagauaugccuucgcaaugagaagaggcucuggaucugguauuaucguuucagaugcaccaguccacgauuguaauacgacuugucaaacacccaaaggugcuauaaacaccagccuuccauuucagaauauacauccagucacaauuggagaauguccaaaauaugucaaaagcacaaaauugaggauggcuacaggauuaagaaauaucccgucuauucaaucaagaggccuauuuggggccauugcuggcuuccuugaagggggguggacaggaaugauagauggaugguacgguuaccaccaucaaaaugagcagggaucaggauaugcagccgaccaaaagagcacacagaacgccauugacgggaucacuaacaaaguaaauucuauuauugaaaagaugaacacacaauucacagcaguggguaaagaauucagccaauuggaaaaaagaauagagaguuuaaacaauaaggucgaugauggguuccuagacauuuggacuuacaaugccgaaaugcugguucuauuggaaaaugaaagaacucuggauuaucacgauucaaaugugaagaaccuauaugaaaaaguaagaagccagcuaaaaaacaaugccaaagaaauuggaaauggcugcuuugaauuuuaccacaaaugcgauaacacgugcauggagagugucaaaaaugggacuuaugauuacccaaaauacucagaagaagcaaagcuaaauagagaggagauagaugggguaaagcuggaaucagcaagaauuuaccagauuuuggcgaucuauucaacugucgccagcucauugguacuguuagucucucugggggcagucaguuucuggaugugcuccaaugggucuuuacagugcagaauauguaucuaa

SEQ ID NO: 45933 - RNA, 1701 nt, Artificial Sequence; identical to SEQ ID NO: 34668
  derived and/or modified CDS sequence (wt) from hemagglutinin__InfluenzaA__EPI176515

SEQ ID NO: 45934 - RNA, 1701 nt, Artificial Sequence; identical to SEQ ID NO: 35124
  derived and/or modified CDS sequence (wt) from hemagglutinin__InfluenzaA__EPI189182

SEQ ID NO: 45935 - RNA, 1701 nt, Artificial Sequence
  derived and/or modified CDS sequence (wt) from hemagglutinin__InfluenzaA__EPI180574
augaaggcaauacuaguaguucugcuauauacauuugcaaccgcaaaugcagacacauuauguauagguuaucaugcgaacaauucaacagacacuguagacacaguacuagaaaagaauguaacaguaacacacucuguuaaccuucuagaagacaagcauaacgggaaacuaugcaaacuaagagggguagccccauugcauuuggguaaauguaacauugcuggcuggauccugggaaauccagagugugaaucacucuccacagcaagcucaugguccuacauuguggaaacaucuaguucagacaauggaacguguuacccaggagauuucaucgauuaugaggagcuaagagagcaauugagcucagugucaucauuugaaagguuugagauauuccccaagacaaguucauggcccaaucaugacucgaacaaagguguaacggcagcauguccucaugcuggagcaaaaagcuucuacaaaaauuuaauauggcuaguuaaaaaaggaaauucauacccaaagcucagcaaauccuacauuaaugauaaagggaaagaaguccucgugcuauggggcauucaccauccaucuacuagugcugaccaacaaagucucuaucagaaugcagaugcauauguuuuuguggggucgucaagauacagcaagaaguucaagccggaaauagcaauaagacccaaagugagggaucgagaagggagaaugaacuauuacuggacacuaguagagccgggagacaaaauaacauucgaagcaacuggaaaucuagugguaccgagauaugcauucgcaauggaaagaaaugcuggaucugguauuaucauuucagauacaccaguccacgauugcaauacaacuugucagacacccaagggugcuauaaacaccagccucccauuucagaauauacauccgaucacaauuggaaaauguccaaaauauguaaaaagcacaaaauugagacuggccacaggauugaggaaugucccgucuauucaaucuagaggccuauuuggggccauugccgguuucauugaagggggguggacagggaugguagauggaugguacgguuaucaccaucaaaaugagcaggggucaggauaugcagccgaccugaagagcacacagaaugccauugacgaaauuacuaacaaaguaaauucuguuauugaaaagaugaauacacaguucacagcaguagguaaagaguucaaccaccuggaaaaaagaauagagaauuuaaauaaaaaaguugaugaugguuuccuggacauuuggacuuacaaugccgaacuguugguucuauuggaaaaugaaagaacuuuggacuaccacgauucaaaugugaagaacuuauaugaaaagguaagaagccagcuaaaaaacaaugccaaggaaauuggaaacggcugcuuugaauuuuaccacaaaugcgauaacacgugcauggaaagugucaaaaaugggacuuaugacuacccaaaauacucagaggaagcaaaauuaaacagagaagaaauagaugggguaaaacuggaaucaacaaggauuuaccagauuuuggcgaucuauucaacugucgccaguucauugguacugguagucucccugggggcaaucaguuucuggaugugcucuaaugggucucuacaguguagaauauguauuuaa

SEQ ID NO: 45936 - RNA, 1701 nt, Artificial Sequence
  derived and/or modified CDS sequence (wt) from hemagglutinin__InfluenzaA__EPI377499
augaagacuaucauugcuuugagcuacauucuaugucugguuuucgcucaaaaacuuccuggaaaugacaauagcacggcaacgcugugccuugggcaccaugcaguaccaaacggaacgauagugaaaacaaucacgaaugaccgaauugaaguuacuaaugcuacugaacugguucagaauuccucaauaggugaaauaugcgacaguccucaucagauccuugauggagaaaacugcacacuaauagaugcucuauugggagacccucagugugauggcuuccaaaauaagaaaugggaccuuuuuguugaacgaagcaaagccuacagcaacuguuacccuuaugaugugccggauuaugccucccuuaggucacuaguugccucauccggcacacuggaguuuaacaaugaaagcuucaauuggaauggagucacucaaaacggaacaaguucugcuugcauaaggagaucuaauaauaguuucuuuaguagauuaaauugguugacccacuuaaacuucaaauacccagcauugaacgugacuaugccaaacaaugaacaauuugacaaauuguacauuugggggguucaccacccggguacggacaaggaccaaaucuuccuguaugcucaaccaucaggaagaaucacaguaucuaccaaaagaagccaacaagcuguaaucccgaauaucggaucuagacccagaauaaggaauaucccuagcagaauaagcaucuauuggacaauaguaaaaccgggagacauacuuuugauuaacagcacagggaaucuaauugcuccuagggguuacuucaaaauacgaagugggaaaagcucaauaaugagaucagaugcacccauuggcaaaugcaagucugaaugcaucacuccaaauggaagcauucccaaugacaaaccauuccaaaauguaaacaggaucacauacggggccugucccagauauguuaagcaaagcacucugaaauuggcaacaggaaugcggaauguaccagagaaacaaacuagaggcauauuuggcgcaauagcggguuucauagaaaaugguugggagggaaugguggaugguugguacgguuucaggcaucaaaauucugagggaagaggacaagcagcagaucucaaaagcacucaagcagcaaucgaucaaaucaaugggaagcugaaucgauugaucgggaaaaccaacgagaaauuccaucagauugaaaaagaauucucagaaguagaagggagaauucaggaccuugagaaauauguugaggacacuaaaauagaucucuggucauacaacgcggagcuucuuguugcccuggagaaccaacauacaauugaucuaacugacucagaaaugaacaaacuguuugaaaaaacaaagaagcaacugagggaaaaugcugaggauaugggcaaugguuguuucaaaauauaccacaaaugugacaaugccugcauaggaucaaucagaaauggaacuuaugaccacgauguauacagagaugaagcauuaaacaaccgguuccagaucaagggaguugagcugaagucaggguacaaagauuggauccuauggauuuccuuugccauaucauguuuuuugcuuuguguugcuuuguugggguucaucaugugggccugccaaaagggcaacauuaggugcaacauuugcauuuga

SEQ ID NO: 45937 - RNA, 1701 nt, Artificial Sequence
  derived and/or modified CDS sequence (wt) from hemagglutinin__InfluenzaA__EPI346916
augaaggcaauacuaguaguccugcuauauacauuuacaacugcaacugccgacacauuauguauagguuaucaugcgaacaauucaacugacaccguagacacaguacuagaaaagaauguaacaguaacacacucugucaaccuucuagaaaacaggcauaaugggaaacuauguaaacuaagagggguagcuccauugcauuuggguaaauguaacauugcuggauggcuccugggaaauccagagugugaaucacucuccacagcaagcucaugguccuacauuguggaaacauccaauucagacaaugggacguguuacccaggagauuucaucaauuaugaggagcuaagagagcaguugagcucagugucaucguuugaaagauuugagauauuccccaagacaaguucauggcccaaucaugacacgaacagaggugugacggcagcauguccucaugauggaacaaacagcuucuacagaaauuuaauauggcuaguaaaaaagggaaauucauacccaaagaucaacaaauccuacauuaacaauaaagagaaagaaauucucgugcuaugggccauucaccauccaucuaccagugccgaccaacaaagucucuaccaaaaugcagaugccuauguuuuugugggaucaucaagauacagcaggaaguucgagccagaaguagcaacaagacccaaggugagggaccaagcagggagaaugaacuauuacuggacacuaguagaaccuggagacaagauaacauuugaagcaacuggaaaucuagugguaccgagauaugcuuucgcauugaaaagaaauucuggaucugguaucaucauuucagauacaucaguccacgauugugauacgaauugucagacacccaauggugcuauaaacaccagccucccauuucaaaauauacauccagucacaauuggagaauguccaaaauauguaaaaaguacuaaacugagaauggccacaggauuaagaaauaucccgucuauccaaucuagaggccuguuuggggccauugcuggcuuuaucgaagggggcuggacaggaaugauagauggaugguacgguuaucaccaucaaaaugagcagggaucaggauaugcagccgaccugaagagcacacagaaugccauugacgggaucacuaacaagguaaauucuguuauugaaaagaugaacacacaauucacagcaguagguaaagaguucagccacuuggaaagaagaauagagaauuuaaauaaaaagguugaugaugguuuucuagauauuuggacuuacaaugccgaacuguugguucuauuagaaaaugaaagaacuuuggauuaccacgacucaaaugugaaaaacuuauaugaaaaagugagaagccagcugaaaaacaaugccaaggaaauuggaaauggcugcuuugaauuuuaccacaaaugugaugacaugugcauggaaagcgucaaaaauggaacuuaugauuacccuaaauacucagaggaagcaaaacuaaacagagaggaaauagauggggugaaguuggaaucaacaaggauuuaccaaauuuuggcgaucuauucaacggucgccaguucauugguacuaguagucucccugggggcaaucaguuucuggaugugcucuaaugggucgcuacagugcagaauauguauuuaa

SEQ ID NO: 45938 - RNA, 1689 nt, Artificial Sequence; identical to SEQ ID NO: 35295
  derived and/or modified CDS sequence (wt) from hemagglutinin__InfluenzaA__ACV49600

SEQ ID NO: 45939 - RNA, 1701 nt, Artificial Sequence; identical to SEQ ID NO: 34412
  derived and/or modified CDS sequence (wt) from hemagglutinin__InfluenzaA__BAF48361

SEQ ID NO: 45940 - RNA, 1701 nt, Artificial Sequence
  derived and/or modified CDS sequence (wt) from hemagglutinin__InfluenzaA__EPI507594
augaagacuaucauugcuuugagcuacauucuaugucugguuuucgcucaaaaacuuccuggaaaugacaauagcacggcaacgcugugccuugggcaccaugcaguaccaaacggaacgauagugaaaacaaucacgaaugaccgaauugaaguuacuaaugcuacugagcugguucagaauuccucaauaggugaaauaugcgacaguccucaucagauccuugauggagaaaacugcacacuaauagaugcucuauugggagacccucagugugauggcuuucaaaauaagaaaugggaccuuuuuguugaacgaagcaaagccuacagcaacuguuacccuuaugaugugccggauuaugccucccuuaggucacuaguugccucauccggcacacuggaguuuaacaaugaaagcuucaauugggcuggagucacucaaaacggaacaaguucugcuugcaaaaggggaucuaauaguaguuucuuuaguagauuaaauugguugacccacuuaaacuucaaauacccagcauugaacgugacuaugccaaacaaugaacaauuugacaaauuguacauuugggggguucaccacccgguuacggacaaggaccaaaucuuccuguaugcucaaucaucaggaagaaucacaguaucuaccaaaagaagccaacaagcuguaaucccgaauaucggauuuagacccagaauaaggaauaucccuagcagaauaagcaucuauuggacaauaguaaaaccgggagacauacuuuugauuaacagcacagggaaucuaauugcuccuagggguuacuucaaaauacgaagugggaaaagcucaauaaugagaucagaugcacccauuggcaaaugcaagucugaaugcaucacuccaaauggaagcauucccaaugacaaaccauuccaaaauguaaacaggaucacauacggggccugucccagauauguuaagcaaagcacacugaaauuggcaacaggaaugcgaaauguaccagagaaacaaacuagaggcauauuuggcgcaauagcggguuucauagaaaaugguugggagggaaugguggaugguugguacgguuucaggcaucaaaauuuugagggaagaggacaagcagcagaucucaaaagcacucaagcagcaaucgaucaaaucaaugggaagcugaaucgauugaucgggaaaaccaacgagaaauuccaucagauugaaaaagaauucucagaaguagaagggagaauucaggaccuugagaaauauguugaggacacaaaaauagaucucuggucauacaacgcggagcuucuuguugcccuggagaaccaacauacaauugaucuaacugacucagaaaugaacaaacuguuugaaaaaacaaagaagcaacugagggaaaaugcugaggauaugggcaaugguuguuucaaaauauaccacaaaugugacaaugccugcauaggaucaaucagaaauggaacuuaugaccacgauguauacagggaugaagcauuaaacaaccgguuccagaucaagggaguugagcugaagucaggguacaaagauuggauccuauggauuuccuuugccauaucauguuuuuugcuuuguguugcuuuguugggguucaucaugugggccugccaaaagggcaacauuaggugcaacauuugcauuuga

SEQ ID NO: 45941 - RNA, 1701 nt, Artificial Sequence
  derived and/or modified CDS sequence (wt) from hemagglutinin__InfluenzaA__EPI461953
augaagacuaucauugcuuugagcuacauucuaugucugguuuucgcucaaaaacuuccuggaaaugacaauagcacggcaacgcugugccuugggcaccaugcaguaccaaacggaacgauagugaaaacaaucacgaaugaccgaauugaaguuacuaaugcuacugagcugguucagaauuccucaauaggugaaauaugcgacaguccucaucagauccuugauggagaaaacugcacacuaauagaugcucuauugggagacccucagugugauggcuuucaaaauaagaaaugggaccuuuuuguugaacgaagcaaagccuacagcaacuguuacccuuaugaugugccggauuaugccucccuuaggucacuaguugccucauccggcacacuggaguuuaacaaugaaagcuucaauugggcuggagucacucaaaacggaacaaguucugcuugcauaaggggaucuaauaguaguuucuuuaguagauuaaauugguugacccacuuaaacuucaaauacccagcauugaacgugacuaugccaaacaaugaacaauuugacaaauuguacauuugggggguucaccacccggguacggacaaggaccaaaucuuccuguaugcucaaucaucaggaagaaucacaguaucuaccaaaagaagccaacaagcuguaaucccgaauaucggaucuagacccagaauaaggaauaucccuagcagaauaagcaucuauuggacaauaguaaaaccgggagacauacuuuugauuaacagcacagggaaucuaauugcuccuagggguuacuucaaaauacgaagugggaaaagcucaauaaugagaucagaugcacccauuggcaaaugcaagucugaaugcaucacuccaaauggaagcauucccaaugacaaaccauuccaaaauguaaacaggaucacauacggggccugucccagauauguuaagcaaagcacacugaaauuggcaacaggaaugcgaaauguaccagagaaacaaacuagaggcauauuuggcgcaauagcggguuucauagaaaaugguugggagggaaugguggaugguugguacgguuucaggcaucaaaauuuugagggaagaggacaagcagcagaucucaaaagcacucaagcagcaaucgaucaaaucaaugggaagcugaaucgauugaucgggaaaaccaacgagaaauuccaucagauugaaaaagaauucucagaaguagaagggagaauucaggaccuugagaaauauguugaggacacaaaaauagaucucuggucauacaacgcggagcuucuuguugcccuggagaaccaacauacaauugaucuaacugacucagaaaugaacaaacuguuugaaaaaacaaagaagcaacugagggaaaaugcugaggauaugggcaaugguuguuucaaaauauaccacaaaugugacaaugccugcauaggaucaaucagaaauggaacuuaugaccacgauguauacagggaugaagcauuaaacaaccgguuccagaucaagggaguugagcugaagucaggguacaaagauuggauccuauggauuuccuuugccauaucauguuuuuugcuuuguguugcuuuguugggguucaucaugugggccugccaaaagggcaacauuaggugcaacauuugcauuuga

SEQ ID NO: 45942 - RNA, 1701 nt, Artificial Sequence
  derived and/or modified CDS sequence (wt) from hemagglutinin__InfluenzaA__EPI461953/m1
augaagacuaucauugcuuugagcuacauucuaugucugguuuucgcucaaaaacuuccuggaaaugacaauagcacggcaacgcugugccuugggcaccaugcaguaccaaacggaacgauagugaaaacaaucacgaaugaccgaauugaaguuacuaaugcuacugagcugguucagaauuccucaauaggugaaauaugcgacaguccucaucagauccuugauggagaaaacugcacacuaauagaugcucuauugggagacccucagugugauggcuuucaaaauaagaaaugggaccuuuuuguugaacgaagcaaagccuacagcaacuguuacccuuaugaugugccggauuaugccucccuuaggucacuaguugccucauccggcacacuggaguuuaacaaugaaagcuucaauugggcuggagucacucaaaacggaacaaguucugcuugcaaaaggggaucuaauaguaguuucuuuaguagauuaaauugguugacccacuuaaacuucaaauacccagcauugaacgugacuaugccaaacaaugaacaauuugacaaauuguacauuugggggguucaccacccgguuacggacaaggaccaaaucuuccuguaugcucaaucaucaggaagaaucacaguaucuaccaaaagaagccaacaagcuguaaucccgaauaucggauauagacccagaauaaggaauaucccuagcagaauaagcaucuauuggacaauaguaaaaccgggagacauacuuuugauuaacagcacagggaaucuaauugcuccuagggguuacuucaaaauacgaagugggaaaagcucaauaaugagaucagaugcacccauuggcaaaugcaagucugaaugcaucacuccaaauggaagcauucccaaugacaaaccauuccaaaauguaaacaggaucacauacggggccugucccagauauguuaagcaaagcacacugaaauuggcaacaggaaugcgaaauguaccagagaaacaaacuagaggcauauuuggcgcaauagcggguuucauagaaaaugguugggagggaaugguggaugguugguacgguuucaggcaucaaaauuuugagggaagaggacaagcagcagaucucaaaagcacucaagcagcaaucgaucaaaucaaugggaagcugaaucgauugaucgggaaaaccaacgagaaauuccaucagauugaaaaagaauucucagaaguagaagggagaauucaggaccuugagaaauauguugaggacacaaaaauagaucucuggucauacaacgcggagcuucuuguugcccuggagaaccaacauacaauugaucuaacugacucagaaaugaacaaacuguuugaaaaaacaaagaagcaacugagggaaaaugcugaggauaugggcaaugguuguuucaaaauauaccacaaaugugacaaugccugcauaggaucaaucagaaauggaacuuaugaccacgauguauacagggaugaagcauuaaacaaccgguuccagaucaagggaguugagcugaagucaggguacaaagauuggauccuauggauuuccuuugccauaucauguuuuuugcuuuguguugcuuuguugggguucaucaugugggccugccaaaagggcaacauuaggugcaacauuugcauuuga

SEQ ID NO: 45943 - RNA, 1701 nt, Artificial Sequence
  derived and/or modified CDS sequence (wt) from hemagglutinin__InfluenzaA__EPI668105
augaagacuaucauugcuuugagcuacauucuaugucugguuuucgcucaaaaaauuccuggaaaugacaauagcacggcaacgcugugccuugggcaccaugcaguaccaaacggaacgauagugaaaacaaucacaaaugaccgaauugaaguuacuaaugcuacugaguugguucagaauuccucaauaggugaaauaugcgacaguccucaucagauccuugauggagaaaacugcacacuaauagaugcucuauugggagacccucagugugauggcuuucaaaauaagaaaugggaccuuuuuguugaacgaagcaaagccuacagcaacuguuacccuuaugaugugccggauuaugccucccuuaggucacuaguugccucauccggcacacuggaguuuaacaaugaaagcuucaauuggacuggagucacucaaaacggaacaaguucugcuugcauaaggggaucuaguaguaguuucuuuaguagauuaaauugguugacccacuuaaacuacaaauacccagcauugaacgugacuaugccaaacaaugaacaauuugacaaauuguacauuugggggguucaccacccggguacggacaaggaccaaaucuucccguaugcucaaucaucaggaagaaucacaguaucuaccaaaagaagccaacaagcuguaaucccaaauaucggaucuagacccagaauaagggguaucccuagcagaauaagcaucuauuggacaauaguaaaaccgggagacauacuuuugauuaacagcacagggaaucuaauugcuccuagggguuacuucaaaauacgaagugggaaaagcucaauaaugagaucagaugcacccauuggcaaaugcaagucugaaugcaucacuccaaauggaagcauucccaaugacaaaccauuccaaaauguaaacaggaucacauacggggccugucccagauauguuaagcauagcacucugaaauuggcaacaggaaugcgaaauguaccagagaaacaaacuagaggcauauuuggcgcaauagcggguuucauagaaaaugguugggagggaaugguggaugguugguacgguuucaggcaucaaaauucugagggaagaggacaagcagcagaucucaaaagcacucaagcagcaaucgaucaaaucaaugggaagcugaaucgguugaucgggaaaaccaacgagaaauuccaucagauugaaaaagaauucucagaaguagaaggaagaauucaggaccuugagaaauauguugaggacacuaaaauagaucucuggucauacaacgcggagcuucuuguugcccuggagaaccaacauacaauugaucuaacugacucagaaaugaacaaacuguuugaaaaaacaaagaagcaacugagggaaaaugcugaggauaugggaaaugguuguuucaaaauauaccacaaaugugacaaugccugcauaggaucaauaagaaauggaacuuaugaccacaauguguacagggaugaagcauuaaacaaccgguuccagaucaagggaguugagcugaagucaggguacaaagauuggauccuauggauuuccuuugccauaucauguuuuuugcuuuguguugcuuuguugggguucaucaugugggccugccaaaaaggcaacauuaggugcaacauuugcauuuga

SEQ ID NO: 45944 - RNA, 1701 nt, Artificial Sequence
  derived and/or modified CDS sequence (wt) from hemagglutinin__InfluenzaA__EPI578446
augaagacuaucauugcuuugagcuacauucuaugucugguuuucgcucaaaaaauuccuggaaaugacaauagcacggcaacgcugugccuugggcaccaugcaguaccaaacggaacgauagugaaaacaaucacaaaugaccgaauugaaguuacuaaugcuacugaguugguucagaauuccucaauaggugaaauaugcgacaguccucaucagauccuugauggagaaaacugcacacuaauagaugcucuauugggagacccucagugugauggcuuucaaaauaagaaaugggaccuuuuuguugaacgaagcaaagccuacagcaacuguuacccuuaugaugugccggauuaugccucccuuaggucacuaguugccucauccggcacacuggaguuuaacaaugaaagcuucaauuggacuggagucacucaaaacggaacaaguucugcuugcauaaggagaucuaguaguaguuucuuuaguagauuaaauugguugacccacuuaaacuacaaauacccagcauugaacgugacuaugccaaacaaugaacaauuugacaaauuguacauuugggggguucaccacccggguacggacaaggaccaaaucuucccguaugcucaaucaucaggaagaaucacaguaucuaccaaaagaagccaacaagcuguaaucccaaauaucggaucuagacccagaauaagggguaucccuagcagaauaagcaucuauuggacaauaguaaaaccgggagacauacuuuugauuaacagcacagggaaucuaauugcuccuagggguuacuucaaaauacgaagugggaaaagcucaauaaugagaucagaugcacccauuggcaaaugcaagucugaaugcaucacuccaaauggaagcauucccaaugacaaaccauuccaaaauguaaacaggaucacauacggggccugucccagauauguuaagcauagcacucugaaauuggcaacaggaaugcgaaauguaccagagaaacaaacuagaggcauauuuggcgcaauagcggguuucauagaaaaugguugggagggaaugguggaugguugguacgguuucaggcaucaaaauucugagggaagaggacaagcagcagaucucaaaagcacucaagcagcaaucgaucaaaucaaugggaagcugaaucgguugaucgggaaaaccaacgagaaauuccaucagauugaaaaagaauucucagaaguagaaggaagaauucaggaccuugagaaauauguugaggacacuaaaauagaucucuggucauacaacgcggagcuucuuguugcccuggagaaccaacauacaauugaucuaacugacucagaaaugaacaaacuguuugaaaaaacaaagaagcaacugagggaaaaugcugaggauaugggaaaugguuguuucaaaauauaccacaaaugugacaaugccugcauaggaucaauaagaaauggaacuuaugaccacaauguguacagggaugaagcauuaaacaaccgguuccagaucaagggaguugagcugaagucaggguacaaagauuggauccuauggauuuccuuugccauaucauguuuuuugcuuuguguugcuuuguugggguucaucaugugggccugccaaaaaggcaacauuaggugcaacauuugcauuuga

SEQ ID NO: 45945 - RNA, 1701 nt, Artificial Sequence
  derived and/or modified CDS sequence (wt) from hemagglutinin__InfluenzaA__EPI551882
augaagacuaucauugcuuugagcuacauucuaugucugguuuucgcucaaaaaauuccuggaaaugacaauagcacggcaacgcugugccuugggcaccaugcaguaccaaacggaacgauagugaaaacaaucacaaaugaccgaauugaaguuacuaaugcuacugaguugguucagaauuccucaauaggugaaauaugcgacaguccucaucagauccuugauggagaaaacugcacacuaauagaugcucuauugggagacccucagugugauggcuuucaaaauaagaaaugggaccuuuuuguugaacgaagcaaagccuacagcaacuguuacccuuaugaugugccggauuaugccucccuuaggucacuaguugccucauccggcacacuggaguuuaacaaugaaagcuucaauuggacuggagucacucaaaacggaacaaguucugcuugcauaaggagaucuaguaguaguuucuuuaguagauuaaauugguugacccacuuaaacuacacauacccagcauugaacgugacuaugccaaacaaugaacaauuugacaaauuguacauuugggggguucaccacccggguacggacaaggaccaaaucuuccuguaugcucaaucaucaggaagaaucacaguaucuaccaaaagaagccaacaagcuguaaucccaaauaucggaucuagacccagaauaagggauaucccuagcagaauaagcaucuauuggacaauaguaaaaccgggagacauacuuuugauuaacagcacagggaaucuaauugcuccuagggguuacuucaaaauacgaagugggaaaagcucaauaaugagaucagaugcgcccauuggcaaaugcaagucugaaugcaucacuccaaauggaagcauucccaaugacaaaccauuccaaaauguaaacaggaucacauacggggccugucccagauauguuaagcauagcacucugaaauuggcaacaggaaugcgaaauguaccagagaaacaaacuagaggcauauuuggcgcaauagcggguuucauagaaaaugguugggagggaaugguggaugguugguacgguuucaggcaucaaaauucugagggaagaggacaagcagcagaucucaaaagcacucaagcagcaaucgaucaaaucaaugggaagcugaaucgguugaucgggaaaaccaacgagaaauuccaucagauugaaaaagaauucucagaaguagaaggaagaauucaggaccuugagaaauauguugaggacacuaaaauagaucucuggucauauaacgcggagcuucuuguugcccuggagaaccaacauacaauugaucuaacugacucagaaaugaacaaacuguuugaaaaaacaaagaagcaacugagggaaaaugcugaggauaugggaaaugguuguuucaaaauauaccacaaaugugacaaugccugcauaggaucaauaagaaauggaacuuaugaccacaauguguacagggaugaagcauuaaacaaccgguuccagaucaagggaguugagcugaagucaggguacaaagauuggauccuauggauuuccuuugccauaucauguuuuuugcuuuguguugcuuuguugggguucaucaugugggccugccaaaagggcaacauuaggugcaacauuugcauuuga

SEQ ID NO: 45946 - RNA, 1701 nt, Artificial Sequence
  derived and/or modified CDS sequence (wt) from hemagglutinin__InfluenzaA__EPI344389
augaagacuaucauugcuuuuagcugcauuuuaugucugauuuucgcucaaaaacuucccggaagugacaacagcauggcaacgcugugccugggacaccaugcagugccaaacggaacauuagugaaaacaaucacggaugaccaaauugaagugacuaaugcuacugagcugguccagaguuccucaacaggcagaauaugcaacaguccucaccaaauccuugaugggaaaaauugcacacugauagaugcucuauugggggacccucauugugaugaccuccaaaacaaggaaugggaccuuuuuguugaacgaagcacagccuacagcaacuguuacccuuauuaugugccagauuaugccacccuuaggucacuaguugccucaucuggcaaccuggaauuuacccaagaaagcuucaauuggacuggaguugcucaagacggaucaagcuaugccugcagaaggggaucuguuaacaguuucuuuaguagauugaauugguuguauaacuugaauuacaaguauccagagcagaacguaacuaugccaaacaaugacaaauuugacaaauuguacauuugggggguucaccacccggguacggacaaggaccaaaccaaucuauauguccaagcaucagggagaguuauagucucuaccaaaagaagccaacaaacuguaaucccgaauaucgggucuagacccuggguaaggggugucuccagcauaauaagcaucuauuggacgauaguaaaaccgggagacauacuuuugauuaacagcacagggaaucuaauugccccucgggguuacuucaaaauacaaagugggaaaagcucaauaaugagaucagaugcacacauugaugaaugcaauucugaaugcauuacuccaaauggaagcauucccaaugacaaaccuuuucaaaauguaaacaagaucacauauggagccugucccagauauguuaagcaaaacacccugaaauuggcaacaggaaugcggaauguaccagagaaacaaacuagaggcauauucggcgcaauugcagguuucauagaaaaugguugggagggaaugguagacgguugguacgguuucaggcaucagaauucugaaggcacaggacaagcagcagaucuuaaaagcacucaagcagcaaucaaccaaaucaccgggaaacuaaauagaguaaucaagaaaacgaacgagaaauuccaucaaaucgaaaaagaauucucagaaguagaagggagaauucaggaccuagagaaauacguugaagacaccaaaauagaucucuggucuuacaacgcugagcuucuuguugcccuggagaaccaacauacaauugauuuaaccgacucagagaugagcaaacuguucgaaagaacaagaaggcaacugcgggaaaaugcugaggacaugggcaaugguugcuucaaaauauaccacaaaugugacaaugccugcauaggaucaaucagaaauggaacuuaugaccaugauauauacagaaacgaggcauuaaacaaucgguuccagaucaaagguguucagcuaaagucaggauacaaagauuggauccuauggauuuccuuugccauaucaugcuuuuugcuuuguguuguucugcugggguucauuaugugggccugccaaaaaggcaacauuaggugcaacauuugcauuuga

SEQ ID NO: 45947 - RNA, 1701 nt, Artificial Sequence
  derived and/or modified CDS sequence (wt) from hemagglutinin__InfluenzaA__EPI348782
augaagacuaucauugcuuuuagcugcauuuuaugucugauuuucgcucaaaaacuucccggaagugacaacagcauggcaacgcugugccugggacaccaugcagugccaaacggaacauuagugaaaacaaucacggaugaccaaauugaagugacuaaugcuacugagcugguccagaguuccucaacaggcagaauaugcaacaguccucaccaaauccuugaugggaaaaauugcacacugauagaugcucuauugggggacccucauugugaugaccuccaaaacaaggaaugggaccuuuuuguugaacgaagcacagccuacagcaacuguuacccuuauuaugugccagauuaugccacccuuaggucacuaguugccucaucuggcaaccuggaauuuacccaagaaagcuucaauuggacuggaguugcucaagacggaucaagcuaugccugcagaaggggaucuguuaacaguuucuuuaguagauugaauugguuguauaaauugaauuacaaguauccagagcagaacguaacuaugccaaacaaugacaaauuugacaaauuguacauuugggggguucaccacccggguacggacaaggaccaaaccaauauauauguccaagcaucagggagaguuauagucucuaccaaaagaagccaacaaacuguaaucccgaauaucgggucuagacccuggguaaggggugucuccagcauaauaagcaucuauuggacgauaguaaaaccgggagacauacuuuugauuaacagcacagggaaucuaauugccccucgggguuacuucaaaauacaaagugggaaaagcucaauaaugagaucagaugcacacauugaugaaugcaauucugaaugcauuacuccaaauggaagcauucccaaugacaaaccuuuucaaaauguaaacaagaucacauauggagccugucccagauauguuaagcaaaacacccugaaauuggcaacaggaaugcggaauguaccagagaaacaaacuagaggcauauucggcgcaauugcagguuucauagaaaaugguugggagggaaugguagacgguugguacgguuucaggcaucagaauucugaaggcacaggacaagcagcagaucuuaaaagcacucaagcagcaaucaaccaaaucaccgggaaacuaaauagaguaaucaagaaaacgaacgagaaauuccaucaaaucgaaaaagaauucucagaaguagaagggagaauucaggaccuagagaaauacguugaagacaccaaaauagaucucuggucuuacaacgcugagcuucuuguugcccuggagaaccaacauacaauugauuuaaccgacucagagaugagcaaacuguucgaaagaacaagaaggcaacugcgggaaaaugcugaggacaugggcaaugguugcuucaaaauauaccacaaaugugacaaugccugcauaggaucaaucagaaauggaacuuaugaccaugauauauacagaaacgaggcauuaaacaaucgguuccagaucaaagguguucagcuaaagucaggauacaaagauuggauccuauggauuuccuuugccauaucaugcuuuuugcuuuguguuguucugcugggguucauuaugugggccugccaaaaaggcaacauuaggugcaacauuugcauuuga

SEQ ID NO: 45948 - RNA, 1701 nt, Artificial Sequence
  derived and/or modified CDS sequence (wt) from hemagglutinin__InfluenzaA__EPI642513
augaagacuaucauugcuuuuagcugcauucuaugucugauuuuugcucaaaaacuucccggaagugacaaaagcauggcaacgcugugccugggacaccaugcagugccaaacggaacauuagugaaaacaaucacggaugaccaaauugaagugacuaaugcuacugagcugguccagaguuccucaacaaguagaauaugcaacaguccucaccaaauccuugaugggaaaaacugcacacugauagaugcucuauugggggacccucauugugaugacuuccaaaacaagaaaugggaccuuuuuguugaacgaagcacagccuacagcaacuguuacccuuauuaugugccagauuaugccacccuuaggucacuaauugccucaucuggcaaccuggaauuuacccaagaaagcuucaauuggacuggaguugcucaagacggaucaagcuaugccugcagaagggguucuguuaacaguuucuuuaguagauugaauugguuguauaacuugaauuacaaguauccagaacagaacguaacuaugccaaacaaugacaaauuugacaaauuguacauuugggggguucaccacccggguacggacaaggaccaaaccaaccuauauguccaagcaucagggagaguuauagucucuaccaaaagaagccaacaaacuguaaucccgaauaucgggucuagacccuggguaaggggugucuccagcauaauaagcaucuauuggacgauaguaaaaccgggagacauacuuuugauuaacagcacagggaaucuaauugccccucgggguuacuucaaaauacaaagugggaaaagcucaauaaugagaucagaugcacacauugaugaaugcaauucugaaugcauuacuccaaauggaagcauucccaaugacaaaccuuuucaaaauguaaacaagaucacauauggagccugucccagauauguuaagcaaaacacccugaaguuggcaacaggaaugcggaauguaccagagaaacaaacuagaggcauauucggcgcaauugcagguuucauagaaaaugguugggagggaaugguagacgguugguacgguuucaggcaucagaauucugaaggcacaggacaagcagcagaucuuaaaagcacucaagcggcaaucaaccaaaucaccgggaaacuaaauagaguaaucaagaaaacgaacgagaaauuccaucaaaucgaaaaagaauucucagaaguagaagggagaauucaggaccuagagaaauacguugaagacacuaaaauagaucucuggucuuacaaugcugagcuucuuguugcccuggagaaccaacauacaauugauuuaaccgacucagagaugagcaaacuguucgaaagaacaagaaggcaacugcgggaaaaugcugaggacaugggcaaugguugcuuuaaaauauaccacaaaugugacaacgccugcauaggaucaaucagaaauggaacuuaugaccaugauauauacagaaacgaggcauuaaacaaucgguuucagaucaaagguguucagcuaaagucaggauacaaagauuggauccuauggauuuccuuugccauaucauguuuuuugcuuuguguuguucugcugggguucauuaugugggccugccaaaaaggcaacauuaggugcaacauuugcauuuaa

SEQ ID NO: 45949 - RNA, 1701 nt, Artificial Sequence
  derived and/or modified CDS sequence (wt) from hemagglutinin__InfluenzaA__EPI293965
augaagacuaucauugcuuuuagcugcauuuuaugucugauuuucgcucaaaaacuucccggaagugacaacagcauggcaacgcugugccugggacaccaugcagugccaaacggaacauuagugaaaacaaucacggaugaccaaauugaagugacuaaugcuacugagcugguccagaguuccucaacagguagaauaugcaacaguccucaccaaauccuugaugggaaaaauugcacacugauagaugcucuauugggagacccucauugugaugacuuccaaaacaaggaaugggaccuuuuuguugaacgaagcacagccuacagcaacuguuacccuuauuaugugccggauuaugccacccuuaggucacuaguugccucauccggcaaccuggaauuuacccaagaaagcuucaauuggacuggaguugcucaagacggaucaagcuaugccugcagaaggggaucuguuaacaguuucuuuaguagauugaauugguuguauaauuugaauuacaaguauccagagcagaacguaacuaugccaaacaaugacaaauuugacaaauuguacauuugggggguucaccacccggguacggacaaggaccaaaccaaccuauauguccaagcaucagggagaguuauagucucuaccaaaagaagccaacaaacuguaaucccgaauaucgggucuagacccuggguaaggggugucuccagcauaauaagcaucuauuggacgauaguaaaaccgggagacauacuuuugauuaacagcacagggaaucuaauugccccucgggguuacuucaaaauacaaagugggaaaagcucaauaaugagaucagaugcacacauugaugaaugcaauucugaaugcauuacuccaaauggaagcauucccaaugacaaaccuuuucaaaauguaaacaagaucacauauggagccugucccagauauguuaagcaaaacacccugaaauuggcaacaggaaugcggaauguaccagagaaacaaacuagaggcauauucggcgcaauugcagguuucauagaaaaugguugggagggaaugguagacgguugguacgguuucaggcaucagaauucugaaggcacaggacaagcagcagaucuuaaaagcacucaagcagcaaucaaccaaaucaccgggaaacuaaauagaguaaucaagaaaacgaacgagaaauuccaucaaaucgaaaaagaauucucagaaguagaagggagaauucaggaccuagagaaauacguugaagacacuaaaauagaucucuggucuuacaacgcggagcuucuuguugcccuggagaaccaacauacaauugauuuaaccgacucagagaugagcaaacuguucgaaagaacaagaaggcaacugcgggaaaaugcugaggacaugggcaaugguugcuucaaaauauaccacaaaugugacaaugccugcauaggaucaaucagaaauggaacuuaugaccaugauauauacagaaacgaggcauuaaacaaucgguuccagaucaaagguguucagcuaaagucaggauacaaagauuggauccuauggauuuccuuugccauaucaugcuuuuugcuuuguguuguucugcugggguucauuaugugggccugccaaaaaggcaacauuaggugcaacauuugcauuuga

SEQ ID NO: 45950 - RNA, 1701 nt, Artificial Sequence
  derived and/or modified CDS sequence (wt) from hemagglutinin__InfluenzaA__EPI465400
augaagacuaucauugcuuuuagcugcauuuuaugucugauuuucgcucaaaaacuucccggaagugacaacagcauggcaacgcugugccugggacaccaugcagugccaaacggaacauuagugaaaacaaucacggaugaccaaauugaagugacuaaugcuacugagcugguccagaguuccucaacagguagaauaugcaacaguccucaccaaauccuugaugggaaaaauugcacacugauagaugcucuauugggagacccucauugugaugacuuccaaaacaaggaaugggaccuuuuuguugaacgaagcacagccuacagcaacuguuacccuuauuaugugccggauuaugccacccuuaggucacuaguugccucauccggcaaccuggaauuuacccaagaaagcuucaauuggacuggaguugcucaagacggaucaagcuaugccugcagaaggggaucuguuaacaguuucuuuaguagauugaauugguuguauaauuugaauuacaaguauccagagcagaacguaacuaugccaaacaaugacaaauuugacaaauuguacauuugggggguucaccacccggguacggacaaggaccaaaccaaacuauauguccaagcaucagggagaguuauagucucuaccaaaagaagccaacaaacuguaaucccgaauaucgggucuagacccuggguaaggggugucuccagcauaauaagcaucuauuggacgauaguaaaaccgggagacauacuuuugauuaacagcacagggaaucuaauugccccucgggguuacuucaaaauacaaagugggaaaagcucaauaaugagaucagaugcacacauugaugaaugcaauucugaaugcauuacuccaaauggaagcauucccaaugacaaaccuuuucaaaauguaaacaagaucacauauggagccugucccagauauguuaagcaaaacacccugaaauuggcaacaggaaugcggaauguaccagagaaacaaacuagaggcauauucggcgcaauugcagguuucauagaaaaugguugggagggaaugguagacgguugguacgguuucaggcaucagaauucugaaggcacaggacaagcagcagaucuuaaaagcacucaagcagcaaucaaccaaaucaccgggaaacuaaauagaguaaucaagaaaacgaacgagaaauuccaucaaaucgaaaaagaauucucagaaguagaagggagaauucaggaccuagagaaauacguugaagacacuaaaauagaucucuggucuuacaacgcggagcuucuuguugcccuggagaaccaacauacaauugauuuaaccgacucagagaugagcaaacuguucgaaagaacaagaaggcaacugcgggaaaaugcugaggacaugggcaaugguugcuucaaaauauaccacaaaugugacaaugccugcauaggaucaaucagaaauggaacuuaugaccaugauauauacagaaacgaggcauuaaacaaucgguuccagaucaaagguguucagcuaaagucaggauacaaagauuggauccuauggauuuccuuugccauaucaugcuuuuugcuuuguguuguucugcugggguucauuaugugggccugccaaaaaggcaacauuaggugcaacauuugcauuuga

SEQ ID NO: 45951 - RNA, 1701 nt, Artificial Sequence
  derived and/or modified CDS sequence (wt) from hemagglutinin__InfluenzaA__EPI328898
augaagacuaucauugcuuuuagcugcauuuuaugucugauuuucgcucaaaaacuucccggaagugacaacagcauggcaacgcugugccugggacaccaugcagugccaaacggaacauuagugaaaacaaucacggaugaccaaauugaagugacuaaugcuacugagcugguccagaguuccucaacagguagaauaugcaacaguccucaccaaauccuugaugggaaaaauugcacacugauagaugcucuauugggagacccucauugugaugacuuccaaaacaaggaaugggaccuuuuuguugaacgaagcacagccuacagcaacuguuacccuuauuaugugccggauuaugccacccuuaggucacuaguugccucauccggcaaccuggaauuuacccaagaaagcuucaauuggacuggaguugcucaagacggaucaagcuaugccugcagaaggggaucuguuaacaguuucuuuaguagauugaauugguuguauaauuugaauuacaaguauccagagcagaacguaacuaugccaaacaaugacaaauuugacaaauuguacauuugggggguucaccacccggguacggacaaggaccaaaccaaaauauauguccaagcaucagggagaguuauagucucuaccaaaagaagccaacaaacuguaaucccgaauaucgggucuagacccuggguaaggggugucuccagcauaauaagcaucuauuggacgauaguaaaaccgggagacauacuuuugauuaacagcacagggaaucuaauugccccucgggguuacuucaaaauacaaagugggaaaagcucaauaaugagaucagaugcacacauugaugaaugcaauucugaaugcauuacuccaaauggaagcauucccaaugacaaaccuuuucaaaauguaaacaagaucacauauggagccugucccagauauguuaagcaaaacacccugaaauuggcaacaggaaugcggaauguaccagagaaacaaacuagaggcauauucggcgcaauugcagguuucauagaaaaugguugggagggaaugguagacgguugguacgguuucaggcaucagaauucugaaggcacaggacaagcagcagaucuuaaaagcacucaagcagcaaucaaccaaaucaccgggaaacuaaauagaguaaucaagaaaacgaacgagaaauuccaccaaaucgaaaaagaauucucagaaguagaagggagaauucaggaccuagagaaauacguugaagacacuaaaauagaucucuggucuuacaacgcggagcuucuuguugcccuggagaaccaacauacaauugauuuaaccgacucagagaugagcaaacuguucgaaagaacaagaaggcaacugcgggaaaaugcugaggacaugggcaaugguugcuucaaaauauaccacaaaugugacaaugccugcauaggaucaaucagaaauggaacuuaugaccaugauauauacagaaacgaggcauuaaacaaucgguuccagaucaaagguguucagcuaaagucaggauacaaagauuggauccuauggauuuccuuugccauaucaugcuuuuugcuuuguguuguucugcugggguucauuaugugggccugccaaaaaggcaacauuaggugcaacauuugcauuuga

SEQ ID NO: 45952 - RNA, 1701 nt, Artificial Sequence
  derived and/or modified CDS sequence (wt) from hemagglutinin__InfluenzaA__EPI328900
augaagacuaucauugcuuuuagcugcauuuuaugucugauuuucgcucaaaaacuucccggaagugacaacagcauggcaacgcugugccugggacaccaugcagugccaaacggaacauuagugaaaacaaucacggaugaccaaauugaagugacuaaugcuacugagcugguccagaguuccucaacagguagaauaugcaacaguccucaccaaauccuugaugggaaaaauugcacacugauagaugcucuauugggagacccucauugugaugacuuccaaaacaaggaaugggaccuuuuuguugaacgaagcacagccuacagcaacuguuacccuuauuaugugccggauuaugccacccuuaggucacuaguugccucauccggcaaccuggaauuuacccaagaaagcuucaauuggacuggaguugcucaagacggaucaagcuaugccugcagaaggggaucuguuaacaguuucuuuaguagauugaauugguuguauaauuugaauuacaaguauccagagcagaacguaacuaugccaaacaaugacaaauuugacaaauuguacauuugggggguucaccacccggguacggacaaggaccaaaccaaaauauauguccaagcaucagggagaguuauagucucuaccaaaagaagccaacaaacuguaaucccgaauaucgggucuagacccuggguaaggggugucuccagcauaauaagcaucuauuggacgauaguaaaaccgggagacauacuuuugauuaacagcacagggaaucuaauugccccucgggguuacuucaaaauacaaagugggaaaagcucaauaaugagaucagaugcacacauugaugaaugcaauucugaaugcauuacuccaaauggaagcauucccaaugacaaaccuuuucaaaauguaaacaagaucacauauggagccugucccagauauguuaagcaaaacacccugaaauuggcaacaggaaugcggaauguaccagagaaacaaacuagaggcauauucggcgcaauugcagguuucauagaaaaugguugggagggaaugguagacgguugguacgguuucaggcaucagaauucugaaggcacaggacaagcagcagaucuuaaaagcacucaagcagcaaucaaccaaaucaccgggaaacuaaauagaguaaucaagaaaacgaacgagaaauuccaucaaaucgaaaaagaauucucagaaguagaagggagaauucaggaccuagagaaauacguugaagacacuaaaauagaucucuggucuuacaacgcggagcuucuuguugcccuggagaaccaacauacaauugauuuaaccgacucagagaugagcaaacuguucgaaagaacaagaaggcaacugcgggaaaaugcugaggacaugggcaaugguugcuucaaaauauaccacaaaugugacaaugccugcauaggaucaaucagaaauggaacuuaugaccaugauauauacagaaacgaggcauuaaacaaucgguuccagaucaaagguguucagcuaaagucaggauacaaagauuggauccuauggauuuccuuugccauaucaugcuuuuugcuuuguguuguucugcugggguucauuaugugggccugccaaaaaggcaacauuaggugcaacauuugcauuuga

SEQ ID NO: 45953 - RNA, 1701 nt, Artificial Sequence
  derived and/or modified CDS sequence (wt) from hemagglutinin__InfluenzaA__EPI574644
augaagacuaucauugcuuugagcuacauucuaugucugguuuucgcucaaaaacuuccuggaaaugacaauagcacggcaacgcugugccuugggcaccaugcaguaccaaacggaacgauagugaaaacaaucacgaaugaccgaauugaaguuacuaaugcuacugagcugguucagaauuccucaauaggugaaauaugcgacaguccucaucagauccuugauggaaaaaacugcacacuaauagaugcucuauugggagacccucagugugauggcuuucaaaauaagagaugggaccuuuuuguugaacgaagcaaagccuacagcaacuguuacccuuaugaugugccggauuaugccucccuuaggucacuaguugccucauccggcacacuggaguuuaacgaugaaagcuucaauugggcuggagucacucaaaacggaacaaguucugcuugcauaaggggaucuaauaguaguuucuuuaguagauuaaauugguugacccacucaaacuucaaauacccagcauugaacgugacuaugccaaacaaugaacaauuugacaaauuguacauuugggggguucaccacccggguacagacaaggaccaaaucuuccuguaugcucacucaucaggaagaaucacaguaucuaccaaaagaagccaacaagcuguaaucccgaauaucggaucuagacccagaauaaggaauaucccuagcagaauaagcaucuauuggacaauaguaaaaccgggagacauacuuuugauuaacagcacagggaaucuaauugcuccuagggguuacuucaaaauacaaagugggaaaagcucaauaaugagaucagaugcacccauuggcaaaugcaagucugaaugcaucacuccaaauggaagcauucccaaugacaagccauuccaaaauguaaacaggaucacauacggggccugucccagauauguuaagcaaagcacucugaaauuggcaacaggaaugcgaaauguaccagagaaacaaacuagaggcauauuuggcgcaauagcggguuucauagaaaaugguugggagggaaugaaggaugguugguacgguuucaggcaucaaaauucugagggaagaggacaagcagcagaucucaaaagcacucaagcagcaaucgaucaaaucaaugggaagcugaaucgauugaucgggaaaaccaacgagaaauuccaucagauugaaaaagaauucucagaaguagaagggagaauucaggaccuugagaaauauguugaggacacaaaaauagaucucuggucauacaacgcggagcuucuuguugcccuggagaaccaacauacaauugaucuaacugacucagaaaugaacaaacuguuugagaaaacaaagaagcaacugagggaaaaugcugaggauaugggcaaugguuguuucaaaauauaccacaaaugugacaaugccugcauaggaucaaucagaaauggaacuuaugaccacgauguauacagggaugaagcuuuaaacaaccgguuccagaucaagggaguugagcugaagucaggguacaaagauuggauccuauggauuuccuuugccauaucauguuuuuugcuuuguguugcuuuguugggguucaucaugugggccugccaaaagggcaacauuaggugcaacauuugcauuuga

SEQ ID NO: 45954 - RNA, 1701 nt, Artificial Sequence
  derived and/or modified CDS sequence (wt) from hemagglutinin__InfluenzaA__EPI563212
augaagacuaucauugcuuugagcuacauucuaugucugguuuucgcucaaaaaauuccuggaaaugacaauaacacggcaacgcugugccuugggcaccaugcaguaccaaacggaacgauagugaaaacaaucacaaaugaccgaauugaaguuacuaaugcuacugagcugguucagaauuccucaauaggugaaauaugcgacaguccucaucagauccuugauggagaaaacugcacacuaauagaugcucuauugggagacccucagugugauggcuuucaaaauaagaaaugggaccuuuuuguugaacgaagcaaagccuacagcaacuguuacccuuaugaugugccggauuaugccucccuuaggucacuaguugccucauccggcacacuggaguuuaacaaugaaagcuucaauuggacuggagucacucaaaacggaacaaguucugcuugcauaaggagaucuaguaguaguuucuuuaguagauuaaauugguugacccacuuaaacuacaaauacccagcauugaacgugacuaugccaaacaaugaacaauuugacaaauuguacauuugggggguucaccacccggguacggacaaggaccaaaucuucccguaugcucaaucaucaggaagaaucacaguaucuaccaaaagaagccaacaagcuguaaucccaaauaucggaucuagacccagaauaagggguaucccuagcagaauaagcaucuauuggacaauaguaaaaccgggagacauacuuuugauuaacagcacagggaaucuaauugcuccuagggguuacuucaaaauacgaagugggaaaagcucaauaaugagaucagaugcacccauuggcaaaugcaagucugaaugcaucacuccaaauggaagcauucccaaugacaaaccauuccaaaauguaaacaggaucacauacggggccugucccagauauguuaagcauagcacucugaaauuggcaacaggaaugcgaaauguaccagagaaacaaacuagaggcauauuuggcgcaauagcggguuucauagaaaaugguugggagggaaugguggaugguugguacgguuucaggcaucaaaauucugagggaagaggacaagcagcagaucucaaaagcacucaagcagcaaucgaucaaaucaaugggaagcugaaucgauugaucgggaaaaccaacgagaaauuccaucagauugaaaaagaauucucagaaguagaaggaagaauucaggaccuugagaaauauguugaggacacuaaaauagaucucuggucauacaacgcggagcuucuuguugcccuggagaaccaacauacaauugaucuaacugacucagaaaugaacaaacuguuugaaaaaacaaagaagcaacugagggaaaaugcugaggauaugggaaaugguuguuucaaaauauaccacaaaugugacaaugccugcauaggaucaauaagaaauggaacuuaugaccacaauguguacagggaugaagcauuaaacaaccgguuccagaucaagggaguugagcugaagucaggguacaaagauuggauccuauggauuuccuuugccauaucauguuuuuugcuuuguguugcuuuguugggguucaucaugugggccugccaaaagggcaacauuaggugcaacauuugcauuuga

SEQ ID NO: 45955 - RNA, 1701 nt, Artificial Sequence; identical to SEQ ID NO: 45954
  derived and/or modified CDS sequence (wt) from hemagglutinin__InfluenzaA__EPI553999

SEQ ID NO: 45956 - RNA, 1701 nt, Artificial Sequence
  derived and/or modified CDS sequence (wt) from hemagglutinin__InfluenzaA__EPI551570
augaagacuaucauugcuuugagcuacauucuaugucugguuuucgcucaaaaaauuccuggaaaugacaauaacacggcaacgcugugccuugggcaccaugcaguaccaaacggaacgauagugaaaacaaucacaaaugaccgaauugaaguuacuaaugcuacugagcugguucagaauuccucaauaggugaaauaugcgacaguccucaucagauccuugauggagaaaacugcacacuaauagaugcucuauugggagacccucagugugauggcuuucaaaauaagaaaugggaccuuuuuguugaacgaagcaaagccuacagcaacuguuacccuuaugaugugccggauuaugccucccuuaggucacuaguugccucauccggcacacuggaguuuaacaaugaaagcuucaauuggacuggagucacucaaaacggaacaaguucugcuugcauaaggagaucuaguaguaguuucuuuaguagauuaaauugguugacccacuuaaacuacacauacccagcauugaaugugacuaugccaaacaaugaacaauuugacaaauuguacauuugggggguucaccacccggguacggacaaggaccaaaucuuccuguaugcucaaucaucaggaagaaucacaguaucuaccaaaagaagccaacaagcuguaaucccaaauaucggaucuagacccagaauaagggauaucccuagcagaauaagcaucuauuggacaauaguaaaaccgggagacauacuuuugauuaacagcacagggaaucuaauugcuccuagggguuacuucaaaauacgaagugggaaaagcucaauaaugagaucagaugcacccauuggcaaaugcaagucugaaugcaucacuccaaauggaagcauucccaaugacaaaccauuccaaaauguaaacaggaucacauacggggccugucccagauauguuaagcauagcacucugaaauuggcaacaggaaugcgaaauguaccagagaaacaaacuagaggcauauuuggcgcaauagcggguuucauagaaaaugguugggagggaaugguggaugguugguacgguuucaggcaucaaaauucugagggaagaggacaagcagcagaucucaaaagcacucaagcagcaaucgaucaaaucaaugggaagcugaaucgauugaucgggaaaaccaacgagaaauuccaucagauugaaaaagaauucucagaaguagaaggaagaauucaggaccuugagaaauauguugaggacacuaaaauagaucucuggucauacaacgcggagcuucuuguugcccuggagaaccaacauacaauugaucuaacugacucagaaaugaacaaacuguuugaaaaaacaaagaagcaacugagggaaaaugcugaggauaugggaaaugguuguuucaaaauauaccacaaaugugacaaugccugcauaggaucaauaagaaauggaacuuaugaccacaauguguacagggaugaagcauuaaacaaccgguuccagaucaagggaguugagcugaagucaggguacaaagauuggauccuauggauuuccuuugccauaucauguuuuuugcuuuguguugcuuuguugggguucaucaugugggccugccaaaagggcaacauuaggugcaacauuugcauuuga

SEQ ID NO: 45957 - RNA, 1701 nt, Artificial Sequence
  derived and/or modified CDS sequence (wt) from hemagglutinin__InfluenzaA__EPI629738
augaagacuaucauugcuuugagcuacauucuaugucugguuuucgcucaaaaaauuccuggaaaugacaauaacacggcaacgcugugccuugggcaccaugcaguaccaaacggaacgauagugaaaacaaucacaaaugaccgaauugaaguuacuaaugcuacugagcugguucagaauuccucaauaggugaaauaugcgacaguccucaucagauccuugauggagaaaacugcacacuaauagaugcucuauugggagacccucagugugauggcuuucaaaauaagaaaugggaccuuuuuguugaacgaagcaaagccuacagcaacuguuacccuuaugaugugccggauuaugccucccuuaggucacuaguugccucauccggcacacuggaguuuaacaaugaaagcuucaauuggacuggagucacucaaaacggaacaaguucugcuugcauaaggagaucuaguaguaguuucuuuaguagauuaaauugguugacccacuuaaacuacaaauacccagcauugaacgugacuaugccaaacaaugaacaauuugacaaauuguacauuugggggguucaccacccggguacggacaaggaccaaaucuucccguaugcucaaucaucaggaagaaucauaguaucuaccaaaagaagccaacaagcuguaaucccaaauaucggaucuagacccagaauaagggauaucccuagcagaauaagcaucuauuggacaauaguaaaaccgggagacauacuuuugauuaacagcacagggaaucuaauugcuccuagggguuacuucaaaauacgaagugggaaaagcucaauaaugagaucagaugcacccauuggcaaaugcaagucugaaugcaucacuccaaauggaagcauucccaaugacaaaccauuccaaaauguaaacaggaucacauacggggccugucccagauauguuaagcauagcacucugaaauuggcaacaggaaugcgaaauguaccagagaaacaaacuagaggcauauuuggcgcaauagcggguuucauagaaaaugguugggagggaaugguggaugguugguacgguuucaggcaucaaaauucugagggaagaggacaagcagcagaucucaaaagcacucaagcagcaaucgaucaaaucaaugggaagcugaaucgauugaucgggaaaaccaacgagaaauuccaucagauugaaaaagaauucucagaaguagaaggaagaauucaggaccuugagaaauauguugaggacacuaaaauagaucucuggucauacaacgcggagcuucuuguugcccuggagaaccaacauacaauugaucuaacugacucagaaaugaacaaacuguuugaaaaaacaaagaagcaacugagggaaaaugcugaggauaugggaaaugguuguuucaaaauauaccacaaaugugacaaugccugcauaggaucaauaagaaauggaacuuaugaccacaauguguacagggaugaagcauuaaacaaccgguuccagaucaagggaguugagcugaagucaggguacaaagauuggauccuauggauuuccuuugccauaucauguuuuuugcuuuguguugcuuuguugggguucaucaugugggccugccaaaagggcaacauuaggugcaacauuugcauuuga

SEQ ID NO: 45958 - RNA, 1701 nt, Artificial Sequence
  derived and/or modified CDS sequence (wt) from hemagglutinin__InfluenzaA__EPI631887
augaagacuaucauugcuuugagcuacauucuaugucugguuuucgcucaaaaaauuccuggaaaugacaauaacacggcaacgcugugccuugggcaccaugcaguaccaaacggaacgauagugaaaacaaucacaaaugaccgaauugaaguuacuaaugcuacugagcugguucagaauuccucaauaggugaaauaugcgacaguccucaucagauccuugauggagaaaacugcacacuaauagaugcucuauugggagacccucagugugauggcuuucaaaauaagaaaugggaccuuuuuguugaacgaagcaaagccuacagcaacuguuacccuuaugaugugccggauuaugccucccuuaggucacuaguugccucauccggcacacuggaguuuaacaaugaaagcuucaauuggacuggagucacucaaaacggaacaaguucugcuugcauaaggagaucuaguaguaguuucuuuaguagauuaaauugguugacccacuuaaacuacaaauacccagcauugaacgugacuaugccaaacaaugaacaauuugacaaauuguacauuugggggguucaccacccggguacggacaaggaccaaaucuucccguaugcucaaucaucaggaagaaucauaguaucuaccaaaagaagccaacaagcuguaaucccaaauaucggaucuagacccagaauaagggauagcccuagcagaauaagcaucuauuggacaauaguaaaaccgggagacauacuuuugauuaacagcacagggaaucuaauugcuccuagggguuacuucaaaauacgaagugggaaaagcucaauaaugagaucagaugcacccauuggcaaaugcaagucugaaugcaucacuccaaauggaagcauucccaaugacaaaccauuccaaaauguaaacaggaucacauacggggccugucccagauauguuaagcauagcacucugaaauuggcaacaggaaugcgaaauguaccagagaaacaaacuagaggcauauuuggcgcaauagcggguuucauagaaaaugguugggagggaaugguggaugguugguacgguuucaggcaucaaaauucugagggaagaggacaagcagcagaucucaaaagcacucaagcagcaaucgaucaaaucaaugggaagcugaaucgauugaucgggaaaaccaacgagaaauuccaucagauugaaaaagaauucucagaaguagaaggaagaauucaggaccuugagaaauauguugaggacacuaaaauagaucucuggucauacaacgcggagcuucuuguugcccuggagaaccaacauacaauugaucuaacugacucagaaaugaacaaacuguuugaaaaaacaaagaagcaacugagggaaaaugcugaggauaugggaaaugguuguuucaaaauauaccacaaaugugacaaugccugcauaggaucaauaagaaauggaacuuaugaccacaauguguacagggaugaagcauuaaacaaccgguuccagaucaagggaguugagcugaagucaggguacaaagauuggauccuauggauuuccuuugccauaucauguuuuuugcuuuguguugcuuuguugggguucaucaugugggccugccaaaagggcaacauuaggugcaacauuugcauuuga

SEQ ID NO: 45959 - RNA, 1701 nt, Artificial Sequence
  derived and/or modified CDS sequence (wt) from hemagglutinin__InfluenzaA__EPI577026
augaagacuaucauugcuuugagcuacauucuaugucugguuuucgcucaaaaaauuccuggaaaugacaauaacacggcaacgcugugccuugggcaccaugcaguaccaaacggaacgauagugaaaacaaucacaaaugaccgaauugaaguuacuaaugcuacugagcugguucagaauuccucaauaggugaaauaugcgacaguccucaucagauccuugauggagaaaacugcacacuaauagaugcucuauugggagacccucagugugauggcuuucaaaauaagaaaugggaccuuuuuguugaacgaagcaaagccuacagcaacuguuacccuuaugaugugccggauuaugccucccuuaggucacuaguugccucauccggcacacuggaguuuaacaaugaaagcuucaauuggacuggagucacucaaaacggaacaaguucugcuugcauaaggagaucuaguaguaguuucuuuaguagauuaaauugguugacccacuuaaacuacaaauacccagcauugaacgugacuaugccaaacaaugaacaauuugacaaauuguacauuugggggguucaccacccggguacggacaaggaccaaaucuucccguaugcucaaucaucaggaagaaucacaguaucuaccaaaagaagccaacaagcuguaaucccaaauaucggaucuagacccagaauaagggguaucccuagcagaauaagcaucuauuggacaauaguaaaaccgggagacauacuuuugauuaacagcacagggaaucuaauugcuccuagggguuacuucaaaauacgaagugggaaaagcucaauaaugagaucagaugcacccauuggcaaaugcaagucugaaugcaucacuccaaauggaagcauucccaaugacaaaccauuccaaaauguaaacaggaucacauacggggccugucccagauauguuaagcauagcacucugaaauuggcaacaggaaugcgaaauguaccagagaaacaaacuagaggcauauuuggcgcaauagcggguuucauagaaaaugguugggagggaaugguggaugguugguacgguuucaggcaucaaaauucugagggaagaggacaagcagcagaucucaaaagcacucaagcagcaaucgaucaaaucaaugggaagcugaaucgauugaucgggaaaaccaacgagaaauuccaucagauugaaaaagaauucucagaaguagaaggaagaauucaggaccuugagaaauauguugaggacacuaaaauagaucucuggucauacaacgcggagcuucuuguugcccuggagaaccaacauacaauugaucuaacugacucagaaaugaacaaacuguuugaaaaaacaaagaagcaacugagggaaaaugcugaggauaugggaaaugguuguuucaaaauauaccacaaaugugacaaugccugcauagaaucaauaagaaauggaacuuaugaccacaauguguacagggaugaagcauuaaacaaccgguuccagaucaagggaguugagcugaagucaggguacaaagauuggauccuauggauuuccuuugccauaucauguuuuuugcuuuguguugcuuuguugggguucaucaugugggccugccaaaagggcaacauuaggugcaacauuugcauuuga

SEQ ID NO: 45960 - RNA, 1701 nt, Artificial Sequence; identical to SEQ ID NO: 42059
  derived and/or modified CDS sequence (wt) from hemagglutinin__InfluenzaA__EPI404927

SEQ ID NO: 45961 - RNA, 1701 nt, Artificial Sequence
  derived and/or modified CDS sequence (wt) from hemagglutinin__InfluenzaA__EPI489319
augaagacuaucauugcuuugagcuacauucuaugucugguuuucgcucaaaaacuuccuggaaaugacaauagcacggcaacgcugugccuugggcaccaugcaguaccaaacggaacgauagugaaaacaaucacgaaugaccgaauugaaguuacuaaugcuacugagcugguucagaauuccucaauaggugaaauaugcgacaguccucaucagauccuugauggagaaaacugcacacuaauagaugcucuauugggagacccucagugugauggcuuucaaaauaagaaaugggaccuuuuuguugaacgaagcaaagccuacagcaacuguuacccuuaugaugugccggauuaugccucccuuaggucacuaguugccucauccggcacacuggaguuuaacaaugaaagcuucaauugggcuggagucacucaaaacggaacaaguucugcuugcaaaaggggaucuaauaguaguuucuuuaguagauuaaauugguugacccacuuaaacuucaaauacccagcauugaacgugacuaugccaaacaaugagcaauuugacaaauuguacauuugggggguucaccacccggguacggacaaggaccaaaucuucccguaugcucaaucaucaggaagaaucacaguaucuaccaaaagaagccaacaagcuguaaucccgaauaucggaucuagacccagaauaaggaauaucccuagcagaauaagcaucuauuggacaauaguaaaaccgggagacauacuuuugauuaacagcacagggaaucuaauugcuccuagggguuacuucaaaauacgaagugggaaaagcucaauaaugagaucagaugcacccauuggcaaaugcaaaucugaauguaucacuccaaauggaagcauucccaaugacaaaccauuccaaaauguaaacaggaucacauacggggccugucccagauauguuaagcaaagcacucugaaauuggcaacaggaaugcgaaauguaccagagaaacaaacuagaggcauauuuggcgcaauagcggguuucauagaaaaugguugggagggaaugguggaugguugguacgguuucaggcaucaaaauucugagggaagaggacaagcagcagaucucaaaagcacucaagcagcaaucgaucaaaucaaugggaagcugaaucgauugaucgggaaaaccaacgagaaauuccaucagauugaaaaagaauucucagaaguagaagggagaauucaggaccuugagaaauauguugaggacacaaaaauagaucucuggucauacaacgcggagcuucuuguugcccuggagaaccaacauacaauugaucuaacugacucagaaaugaacaaacuguuugaaaaaacaaagaagcaacugagggaaaaugcugaggauaugggcaaugguuguuucaaaauauaccacaaaugugacaaugccugcauaggaucaaucagaaauggaacuuaugaccacgauguauacagggaugaagcauuaaacaaccgguuccagaucaagggaguugagcugaagucaggguacaaagauuggauccuauggauuuccuuugccauaucauguuuuuugcuuuguguugcuuuguugggguucaucaugugggccugccaaaagggcaacauuaggugcaacauuugcauuuga

SEQ ID NO: 45962 - RNA, 1701 nt, Artificial Sequence; identical to SEQ ID NO: 44439
  derived and/or modified CDS sequence (wt) from hemagglutinin__InfluenzaA__EPI530647

SEQ ID NO: 45963 - RNA, 1701 nt, Artificial Sequence
  derived and/or modified CDS sequence (wt) from hemagglutinin__InfluenzaA__EPI541083
augaagacuaucauugcuuugagcuacauucuaugucugguuuucgcucaaaaaauuccuggaaaugacaauagcacggcaacgcugugccuugggcaccaugcaguaccaaacggaacgauagugaaaacaaucacaaaugaccgaauugaaguuacuaaugcuacugaguugguucagaauuccucaauaggugaaauaugcgacaguccucaucagauccuugauggagaaaacugcacacuaauagaugcucuauugggagacccucagugugauggcuuucaaaauaagaaaugggaccuuuuuguugaacgaagcaaagccuacagcaacuguuacccuuaugaugugccggauuaugccucccuuaggucacuaguugccucauccggcacacuggaguuuaacaaugaaagcuucaauuggacuggagucacucaaaacggaacaaguucugcuugcauaaggagaucuaguaguaguuucuuuaguagauuaaauugguugacccacuuaaacuacacauacccagcauugaacgugacuaugccaaacaaugaacaauuugacaaauuguacauuugggggguucaccacccggguacggacaaggaccaaaucuuccuguaugcucaaucaucaggaagaaucacaguaucuaccaaaagaagccaacaagcuguaaucccaaauaucggaucuagacccagaauaagggauaucccuagcagaauaagcaucuauuggacaauaguaaaaccgggagacauacuuuugauuaacagcacagggaaucuaauugcuccuagggguuacuucaaaauacgaagugggaaaagcucaauaaugagaucagaugcacccauuggcaaaugcaagucugaaugcaucacuccaaauggaagcauuccuaaugacaaaccauuccaaaauguaaacaggaucacauacggggccugucccagauauguuaagcauagcacucugaaauuggcaacaggaaugcgaaauguaccagagaaacaaacuagaggcauauuuggcgcaauagcggguuucauagaaaaugguugggagggaaugguggaugguugguacgguuucaggcaucaaaauucugagggaagaggacaagcagcagaucucaaaagcacucaagcagcaaucgaucaaaucaaugggaagcugaaucgguugaucgggaaaaccaacgagaaauuccaucagauugaaaaagaauucucagaaguagaaggaagaauucaggaccuugagaaauauguugaggacacuaaaauagaucucuggucauacaacgcggagcuucuuguugcccuggagaaccaacauacaauugaucuaacugacucagaaaugaacaaacuguuugaaaaaacaaagaagcaacugagggaaaaugcugaggauaugggaaaugguuguuucaaaauauaccacaaaugugacaaugccugcauaggaucaauaagaaauggaacuuaugaccacaauguguacagggaugaagcauuaaacaaccgguuccagaucaagggaguugagcugaagucaggguacaaagauuggauucuauggauuuccuuugccauaucauguuuuuugcuuuguguugcuuuguugggguucaucaugugggccugccaaaagggcaacauuaggugcaacauuugcauuuga

SEQ ID NO: 45964 - RNA, 1701 nt, Artificial Sequence
  derived and/or modified CDS sequence (wt) from hemagglutinin__InfluenzaA__EPI684315
augaagacuaucauugcuuugagcuacauucuaugucugguuuucgcucaaaaaauuccuggaaaugacaauagcacggcaacgcugugccuugggcaccaugcaguaccaaacggaacgauagugaaaacaaucacaaaugaccgaauugaaguuacuaaugcuacugaguugguucagaauuccucaauaggugaaauaugcgacaguccucaucagauccuugauggagaaaacugcacacuaauagaugcucuauugggagacccucagugugauggcuuucaaaauaagaaaugggaccuuuuuguugaacgaagcaaagccuacagcaacuguuacccuuaugaugugccggauuaugccucccuuaggucacuaguugccucauccggcacacuggaguuuaacaaugaaagcuucaauuggacuggagucacucaaaacggaacaaguucugcuugcauaaggagaucuaguaguaguuucuuuaguagauuaaauugguugacccacuuaaacuacaaauacccagcauugaacgugacuaugccaaacaaugaacaauuugacaaauuguacauuugggggguucaccacccggguacggacaaggaccaaaucuucccguaugcucaaucaucaggaagaaucauaguaucuaccaaaagaagccaacaagcuguaaucccaaauaucggaucuagacccagaauaagggauaucccuagcagaauaagcaucuauuggacaauaguaaaaccgggagacauacuuuugauuaacagcacagggaaucuaauugcuccuagggguuacuucaaaauacgaagugggaaaagcucaauaaugagaucagaugcacccauuggcaaaugcaagucugaaugcaucacuccaaauggaagcauucccaaugacaaaccauuccaaaauguaaacaggaucacauacggggccugucccagauauguuaagcauagcacucugaaauuggcaacaggaaugcgaaauguaccagagaaacaaacuagaggcauauuuggcgcaauagcggguuucauagaaaaugguugggagggaaugguggaugguugguacgguuucaggcaucaaaauucugagggaagaggacaagcagcagaucucaaaagcacucaagcagcaaucgaucaaaucaaugggaagcugaaucgguugaucgggaaaaccaacgagaaauuccaucagauugaaaaagaauucucagaaguagaaggaagaauucaggaccuugagaaauauguugaggacacuaaaauagaucucuggucauacaacgcggagcuucuuguugcccuggagaaccaacauacaauugaucuaacugacucagaaaugaacaaacuguuugaaaaaacaaagaagcaacugagggaaaaugcugaggauaugggaaaugguuguuucaaaauauaccacaaaugugacaaugccugcauaggaucaauaagaaauggaacuuaugaccacaauguguacagggaugaagcauuaaacaaccgguuccagaucaagggaguugagcugaagucaggguacaaagauuggauucuauggauuuccuuugccauaucauguuuuuugcuuuguguugcuuuguugggguucaucaugugggccugccaaaagggcaacauuaggugcaacauuugcauuuga

SEQ ID NO: 45965 - RNA, 1701 nt, Artificial Sequence
  derived and/or modified CDS sequence (wt) from hemagglutinin__InfluenzaA__EPI614462
augaagacuaucauugcuuugagcuacauucuaugucugguuuucgcucaaaaacuuccuggaaaugacaauagcacggcaacgcugugccuugggcaccaugcaguaccaaacggaacgauagugaaaacaaucacgaaugaccgaauugaaguuacuaaugcuacugagcugguucagaauuccucaauaggugaaauaugcgacaguccucaucagauccuugauggagaaaacugcacacuaauagaugcucuauugggagacccucagugugauggcuuucaaaauaagaaaugggaccuuuuuguugaacgaagcaaagccuacagcaacuguuacccuuaugaugugccggauuaugccucccuuaggucacuaguugccucauccggcacacuggaguuuaacaaugaaagcuucaauugggcuggagucacucaaaacggaacaaguucuucuugcauaaggggaucuaauaguaguuucuuuaguagauuaaauugguugacccacuuaaacuccaaauacccagcauuaaacgugacuaugccaaacaaugaacaauuugacaaauuguacauuugggggguucaccacccggguacggacaaggaccaaaucuuccuguaugcacaaucaucaggaagaaucacaguaucuaccagaagaagccaacaagcuguaaucccgaauaucggaucuagacccagaauaagggauaucccuagcagaauaagcaucuauuggacaauaguaaaaccgggagacauacuuuugauuaacagcacagggaaucuaauugcuccuagggguuacuucaaaauacgaagugggaaaagcucaauuaugagaucagaugcacccauuggcaaaugcaagucugaaugcaucacuccaaauggaagcauucccaaugacaaaccauuccaaaauguaaacaggaucacauacggggccugucccagauauguuaagcaaagcacucugaaauuggcaacaggaaugcgaaauguaccagagagacaaacuagaggcauauuuggcgcaauagcggguuucauagaaaaugguugggagggaaugguggaugguugguacggcuucaggcaucaaaauucugagggaagaggacaagcagcagaucucaaaagcacucaagcagcaaucgaucaaaucaaugggaagcugaaucgauugaucgggaaaaccaacgagaaauuccaucagauugaaaaagaauucucagaaguagaagggagaauucaggaccuugagaaauauguugaggacacaaaaauagaucucuggucauacaacgcggagcuucuuguugcccuggagaaccaacauacaauugaucuaacugacucagaaaugaacaaacuguuugaaaaaacaaagaagcaacugagggaaaaugcugaggauaugggcaaugguuguuucaaaauauaccacaaaugugacaaugccugcauaggaucaaucagaaauggaacuuaugaccacgauguauacagggaugaagcauuaaacaaccgguuccagaucaagggaguugagcugaagucaggguacaaagauuggauccuauggauuuccuuugccauaucauguuuuuugcuuuguguugcuuuguugggguucaucaugugggccugccaaaagggcaacauuaggugcaacauuugcauuuga

SEQ ID NO: 45966 - RNA, 1701 nt, Artificial Sequence
  derived and/or modified CDS sequence (wt) from hemagglutinin__InfluenzaA__EPI541465
augaagacuaucauugcuuugagcuacauucuaugucugguuuucgcucaaaaacuuccuggaaaugacaauagcacggcaacgcugugccuugggcaccaugcaguaccaaacggaacgauagugaaaacaaucacgaaugaccgaauugaaguuacuaaugcuacugagcugguucagaauuccucaauaggugaaauaugcgacaguccucaucagauccuugauggagaaaacugcacacuaauagaugcucuauugggagacccucagugugauggcuuucaaaauaagaaaugggaccuuuuuguugaacgaagcaaagccuacagcaacuguuacccuuaugaugugccggauuaugccucccuuaggucacuaguugccucauccggcacacuggaguuuaacaaugaaagcuucaauugggcuggagucacucaaaacggaacaaguucuucuugcauaaggggaucuaauaauaguuucuuuaguagauuaaauugguugacccacuuaaacuccaaauacccagcauuaaacgugacuaugccaaacaaugaacaauuugacaaauuguacauuugggggguucaccacccggguacggacaaggaccaaaucuuccuguaugcacaaucaucaggaagaaucacaguaucuaccagaagaagccaacaagcuguaaucccgaauaucggaucuagacccagaauaagggguaucccuagcagaauaagcaucuauuggacaauaguaaaaccgggagacauacuuuugauuaacagcacagggaaucuaauugcuccuagggguuacuucaaaauacgaagugggaaaagcucaauuaugagaucagaugcacccauuggcaaaugcaagucugaaugcaucacuccaaauggaagcauucccaaugacaaaccauuccaaaauguaaacaggaucacauacggggccugucccagauauguuaagcaaagcacucugaaauuggcaacaggaaugcgaaauguaccagagagacaaacuagaggcauauuuggcgcaauagcggguuucauagaaaaugguugggagggaaugguggaugguugguacggcuucaggcaucaaaauucugagggaagaggacaagcagcagaucucaaaagcacucaagcagcaaucgaucaaaucaaugggaagcugaaucgauugaucgggaaaaccaacgagaaauuccaucagauugaaaaagaauucucagaaguagaagggagaauucaggaccuugagaaauauguugaggacacaaaaauagaucucuggucauacaacgcggagcuucuuguugcccuggagaaccaacauacaauugaucuaacugacucagaaaugaacaaacuguuugaaaaaacaaagaagcaacugagggaaaaugcugaggauaugggcaaugguuguuucaaaauauaccacaaaugugacaaugccugcauaggaucaaucagaaauggaacuuaugaccacgauguauacagggaugaagcauuaaacaaccgguuccagaucaagggaguugagcugaagucaggguacaaagauuggauccuauggauuuccuuugccauaucauguuuuuugcuuuguguugcuuuguugggguucaucaugugggccugccaaaagggcaacauuaggugcaacauuugcauuuga

SEQ ID NO: 45967 - RNA, 1701 nt, Artificial Sequence
  derived and/or modified CDS sequence (wt) from hemagglutinin__InfluenzaA__EPI696967
augaagacuaucauugcuuugagcuacauucuaugucugguuuucgcucaaaaacuuccuggaaaugacaauagcacggcaacgcugugccuugggcaccaugcaguaccaaacggaacgauagugaaaacaaucacgaaugaccgaauugaaguuacuaaugcuacugagcugguucagaauuccucaauaggugaaauaugcgacaguccucaucagauccuugauggagaaaacugcacacuaauagaugcucuauugggagacccucagugugauggcuuucaaaauaagaaaugggaccuuuuuguugaacgaagcaaagccuacagcaacuguuacccuuaugaugugccggauuaugccucccuuaggucacuaguugccucauccggcacacuggaguuuaacaaugaaagcuucaauugggcuggagucacucaaaacggaacaaguucuucuugcauaaggggaucuaauaguaguuucuuuaguagauuaaauugguugacccgcuuaaacuccaaauacccagcauuaaacgugacuaugccaaacaaugaacaauuugacaaauuguacauuugggggguucaccacccggagacggacaaggaccaaaucuuccuguaugcacaaucaucaggaagaaucacaguaucuaccagaagaagccaacaagcuguaaucccgaauaucggaucuagacccagaauaagggguaucccuagcagaauaagcaucuauuggacaauaguaaaaccgggagacauacuuuugauuaacagcacagggaaucuaauugcuccuagggguuacuucaaaauacgaagugggaaaagcucaauuaugagaucagaugcacccauuggcaaaugcaagucugaaugcaucacuccaaauggaagcauucccaaugacaaaccauuccaaaauguaaacaggaucacauacggggccugucccagauauguuaagcaaagcacucugaaauuggcaacaggaaugcgaaauguaccagagagacaaacuagaggcauauuuggcgcaauagcggguuucauagaaaaugguugggagggaaugguggaugguugguacggcuucaggcaucaaaauucugagggaagaggacaagcagcagaucucaaaagcacucaagcagcaaucgaucaaaucaaugggaagcugaaucgauugaucgggaaaaccaacgagaaauuccaucagauugaaaaagaauucucagaaguagaagggagaauucaggaccuugagaaauauguugaggacacaaaaauagaucucuggucauacaacgcggagcuucuuguugcccuggagaaccaacauacaauugaucuaacugacucagaaaugaacaaacuguuugaaaaaacaaagaagcaacugagggaaaaugcugaggauaugggcaaugguuguuucaaaauauaccacaaaugugacaaugccugcauaggaucaaucagaaauggaacuuaugaccacgauguauacagggaugaagcauuaaacaaccgguuccagaucaagggaguugagcugaagucaggguacaaagauuggauccuauggauuuccuuugccauaucauguuuuuugcuuuguguugcuuuguugggguucaucaugugggccugccaaaagggcaacauuaggugcaacauuugcauuuga

SEQ ID NO: 45968 - RNA, 1701 nt, Artificial Sequence
  derived and/or modified CDS sequence (wt) from hemagglutinin__InfluenzaA__EPI674597
augaagacuaucauugcuuugagcuacauucuaugucugguuuucgcucaaaaacuuccuggaaaugacaauagcacggcaacgcugugccuugggcaccaugcaguaccaaacggaacgauagugaaaacaaucacgaaugaccgaauugaaguuacuaaugcuacugagcugguucagaauuccucaauaggugaaauaugcgacaguccucaucagauccuugauggagaaaacugcacacuaauagaugcucuauugggagacccucagugugauggcuuucaaaauaagaaaugggaccuuuuuguugaacgaagcaaagccuacagcaacuguuacccuuaugaugugccggauuaugccucccuuaggucacuaguugccucauccggcacacuggaguuuaacaaugaaagcuucaauugggcuggagucacucaaaacggaacaaguucuucuugcauaaggggaucuaauaauaguuucuuuaguagauuaaauugguugacccacuuaaacuccaaauacccagcauuaaacgugacuaugccaaacaaugaacaauuugacaaauuguacauuugggggguucaccacccgguuacggacaaggaccaaaucuuccuguaugcacaaucaucaggaagaaucacaguaucuaccagaagaagccaacaagcuguaaucccgaauaucggaucuagacccagaauaagggguaucccuagcagaauaagcaucuauuggacaauaguaaaaccgggagacauacuuuugauuaacagcacagggaaucuaauugcuccuagggguuacuucaaaauacgaagugggaaaagcucaauuaugagaucagaugcacccauuggcaaaugcaagucugaaugcaucacuccaaauggaagcauucccaaugacaaaccauuccaaaauguaaacaggaucacauacggggccugucccagauauguuaagcaaagcacucugaaauuggcaacaggaaugcgaaauguaccagagagacaaacuagaggcauauuuggcgcaauagcggguuucauagaaaaugguugggagggaaugguggaugguugguacggcuucaggcaucaaaauucugagggaagaggacaagcagcagaucucaaaagcacucaagcagcaaucgaucaaaucaaugggaagcugaaucgauugaucgggaaaaccaacgagaaauuccaucagauugaaaaagaauucucagaaguagaagggagaauucaggaccuugagaaauauguugaggacacaaaaauagaucucuggucauacaacgcggagcuucuuguugcccuggagaaccaacauacaauugaucuaacugacucagaaaugaacaaacuguuugaaaaaacaaagaagcaacugagggaaaaugcugaggauaugggcaaugguuguuucaaaauauaccacaaaugugacaaugccugcauaggaucaaucagaaauggaacuuaugaccacgauguauacagggaugaagcauuaaacaaccgguuccagaucaagggaguugagcugaagucaggguacaaagauuggauccuauggauuuccuuugccauaucauguuuuuugcuuuguguugcuuuguugggguucaucaugugggccugccaaaagggcaacauuaggugcaacauuugcauuuga

SEQ ID NO: 45969 - RNA, 1701 nt, Artificial Sequence
  derived and/or modified CDS sequence (wt) from hemagglutinin__InfluenzaA__EPI530677
augaagacuaucauugcuuugagcuacauucuaugucugguuuucgcucaaaaacuuccuggaaaugacaauagcacggcaacgcugugccuugggcaccaugcaguaccaaacggaacgauagugaaaacaaucacgaaugaccgaauugaaguuacuaaugcuacugagcugguucagaauuccucaauaggugaaauaugcgacaguccucaucagauccuugauggagaaaacugcacacuaauagaugcucuauugggagacccucagugugauggcuuucaaaauaagaaaugggaccuuuuuguugaacgaagcaaagccuacagcaacuguuacccuuaugaugugccggauuaugccucccuuaggucacuaguugccucauccggcacacuggaguuuaacaaugaaagcuucaauugggcuggagucacucaaaacggaacaaguucuucuugcauaaggggaucuaauaguaguuucuuuaguagauuaaauugguugacccacuuaaacuccaaauacccagcauuaaacgugacuaugccaaacaaugaacaauuugacaaauuguacauuugggggguucaccacccggguacggacaaggaccaaaucuuccuguaugcacaaucaucaggaagaaucacaguaucuaccaaaagaagccaacaagcuguaaucccgaauaucggaucuagacccagaauaagggauaucccuagcagaauaagcaucuauuggacaauaguaaaaccgggagacauacuuuugauuaacagcacagggaaucuaauugcuccuagggguuacuucaaaauacgaagugggaaaagcucaauaaugagaucagaugcacccauuggcaaaugcaagucugaaugcaucacuccaaauggaagcauucccaaugacaaaccauuccaaaauguaaacaggaucacauacggggccugucccagauauguuaagcaaagcacucugaaauuggcaacaggaaugcgaaauguaccagagaaacaaacuagaggcauauuuggcgcaauagcggguuucauagaaaaugguugggagggaaugguggaugguugguacggcuucaggcaucaaaauucugagggaagaggacaagcagcagaucucaaaagcacucaagcagcaaucgaucaaaucaaugggaagcugaaucgauugaucgggaaaaccaacgagaaauuccaucagauugaaaaagaauucucagaaguagaagggagaauucaggaccuugagaaauauguugaggacacaaaaauagaucucuggucauacaacgcggagcuucuuguugcccuggagaaccaacauacaauugaucuaacugacucagaaaugaacaaacuguuugaaaaaacaaagaagcaacugagggaaaaugcugaggauaugggcaaugguuguuucaaaauauaccacaaaugugacaaugccugcauaggaucaaucagaaauggaacuuaugaccacgauguauacagggaugaagcauuaaacaaccgguuccagaucaaaggaguugagcugaagucaggguacaaagauuggauccuauggauuuccuuugccauaucauguuuuuugcuuuguguugcuuuguugggguucaucaugugggccugccaaaagggcaacauuaggugcaacauuugcauuuga

SEQ ID NO: 45970 - RNA, 1701 nt, Artificial Sequence
  derived and/or modified CDS sequence (wt) from hemagglutinin__InfluenzaA__EPI530679
augaagacuaucauugcuuugagcuacauucuaugucugguuuucgcucaaaaacuuccuggaaaugacaauagcacggcaacgcugugccuugggcaccaugcaguaccaaacggaacgauagugaaaacaaucacgaaugaccgaauugaaguuacuaaugcuacugagcugguucagaauuccucaauaggugaaauaugcgacaguccucaucagauccuugauggagaaaacugcacacuaauagaugcucuauugggagacccucagugugauggcuuucaaaauaagaaaugggaccuuuuuguugaacgaagcaaagccuacagcaacuguuacccuuaugaugugccggauuaugccucccuuaggucacuaguugccucauccggcacacuggaguuuaacaaugaaagcuucaauugggcuggagucacucaaaacggaacaaguucuucuugcauaaggggaucuaauaguaguuucuuuaguagauuaaauugguugacccacuuaaacuucaaauacccagcauuaaacgugacuaugccaaacaaugaacaauuugacaaauuguacauuugggggguucaccacccggguacggacaaggaccaaaucuuccuguaugcacaaucaucaggaagaaucacaguaucuaccaaaagaagccaacaagcuguaaucccgaauaucggaucuagacccagaauaagggauaucccuagcagaauaagcaucuauuggacaauaguaaaaccgggagacauacuuuugauuaacagcacagggaaucuaauugcuccuagggguuacuucaaaauacgaagugggaaaagcucaauaaugagaucagaugcacccauuggcaaaugcaagucugaaugcaucacuccaaauggaagcauucccaaugacaaaccauuccaaaauguaaacaggaucacauacggggccugucccagauauguuaagcaaagcacucugaaauuggcaacaggaaugcgaaauguaccagagaaacaaacuagaggcauauuuggcgcaauagcggguuucauagaaaaugguugggagggaaugguggaugguugguacggcuucaggcaucaaaauucugagggaagaggacaagcagcagaucucaaaagcacucaagcagcaaucgaucaaaucaaugggaagcugaaucgauugaucgggaaaaccaacgagaaauuccaucagauugaaaaagaauucucagaaguagaagggagaauucaggaccuugagaaauauguugaggacacaaaaauagaucucuggucauacaacgcggagcuucuuguugcccuggagaaccaacauacaauugaucuaacugacucagaaaugaacaaacuguuugaaaaaacaaagaagcaacugagggaaaaugcugaggauaugggcaaugguuguuucaaaauauaccacaaaugugacaaugccugcauaggaucaaucagaaauggaacuuaugaccacgauguauacagggaugaagcauuaaacaaccgguuccagaucaaaggaguugagcugaagucaggguacaaagauuggauccuauggauuuccuuugccauaucauguuuuuugcuuuguguugcuuuguugggguucaucaugugggccugccaaaagggcaacauuaggugcaacauuugcauuuga

SEQ ID NO: 45971 - RNA, 1701 nt, Artificial Sequence; identical to SEQ ID NO: 32034
  derived and/or modified CDS sequence (wt) from hemagglutinin__InfluenzaA__AAG01785

SEQ ID NO: 45972 - RNA, 1701 nt, Artificial Sequence
  derived and/or modified CDS sequence (wt) from hemagglutinin__InfluenzaA__EPI814528
augaagacuaucauugcuuugagcuacauucuaugucugguuuucgcucaaaaacuuccuggaaaugacaauagcacggcaacgcugugccuugggcaccaugcaguaccaaacggaacgauagugaaaacaaucacgaaugaccgaauugaaguuacuaaugcuacugagcugguucagaauuccucaauaggugaaauaugcgacaguccucaucagauccuugauggagaaaacugcacacuaauagaugcucuauugggagacccucagugugauggcuuucaaaauaagaaaugggaccuuuuuguugaacgaagcaaagccuacagcaacuguuacccuuaugaugugccggauuaugccucccuuaggucacuaguugccucauccggcacacuggaguuuaacaaugaaagcuucaauugggcuggagucacucaaaacggaacaaguucuucuugcauaaggggaucuaauaguaguuucuuuaguagauuaaauugguugacccacuuaaacuccaaauacccagcauuaaacgugacuaugccaaacaaugaacaauuugacaaauuguacauuugggggguucaccacccggguacggacaaggaccaaaucuuccuguaugcacaaucaucaggaagaaucacaguaucuaccaaaagaagccaacaagcuguaaucccgaauaucggaucuagacccagaauaagggauaucccuagcagaauaagcaucuauuggacaauaguaaaaccgggagacauacuuuugauuaacagcacagggaaucuaauugcuccuagggguuacuucaaaauacgaagugggaaaagcucaauaaugagaucagaugcacccauuggcaaaugcaagucugaaugcaucacuccaaauggaagcauucccaaugacaaaccauuccaaaauguaaacaggaucacauacggggccugucccagauauguuaagcaaagcacucuaaaauuggcaacaggaaugcgaaauguaccagagagacaaacuagaggcauauuuggcgcaauagcggguuucauagaaaaugguugggagggaaugguggaugguugguacggcuucaggcaucaaaauucugagggaagaggacaagcagcagaucucaaaagcacucaagcagcaaucgaucaaaucaaugggaagcugaaucgauugaucgggaaaaccaacgagaaauuccaucagauugaaaaagaauucucagaaguagaagggagaauucaggaccuugagaaauauguugaggacacaaaaauagaucucuggucauacaacgcggagcuucuuguugcccuggagaaccaacauacaauugaucuaacugacucagaaaugaacaaacuguuugaaaaaacaaagaagcaacugagggaaaaugcugaggauaugggcaaugguuguuucaaaauauaccacaaaugugacaaugccugcauaggaucaaucagaaauggaacuuaugaccacgauguauacagggaugaagcauuaaacaaccgguuccagaucaagggaguugagcugaagucaggguacaaagauuggauccuauggauuuccuuugccauaucauguuuuuugcuuuguguugcuuuguugggguucaucaugugggccugccaaaagggcaacauuaggugcaacauuugcauuuga

SEQ ID NO: 45973 - RNA, 1701 nt, Artificial Sequence
  derived and/or modified CDS sequence (wt) from hemagglutinin__InfluenzaA__EPI674736
augaagacuaucauugcuuugagcuacauucuaugucugguuuucgcucaaaaacuuccuggaaaugacaauagcacggcaacgcugugccuugggcaccaugcaguaccaaacggaacgauagugaaaacaaucacgaaugaccgaauugaaguuacuaaugcuacugagcugguucagaauuccucaauaggugaaauaugcgacaguccucaucagauccuugauggagaaaacugcacacuaauagaugcucuauugggagacccucagugugauggcuuucaaaauaagaaaugggaccuuuuuguugaacgaagcaaagccuacagcaacuguuacccuuaugaugugccggauuaugccucccuuaggucacuaguugccucauccggcacacuggaguuuaacaaugaaagcuucaauugggcuggagucacucaaaacggaacaaguucuucuugcagaaggggaucuaauaguaguuucuuuaguagauuaaauugguugacccacuuaaacuccaaauacccagcauuaaacgugacuaugccaaacaaugaacaauuugacaaauuguacauuugggggguucaccacccgguuacggacaaggaccaaaucuuccuguaugcacaaucaucaggaagaaucacaguaucuaccaaaagaagccaacaagcuguaaucccgaauaucggaucuagacccagaauaagggauaucccuagcagaauaagcaucuauuggacaauaguaaaaccgggagacauacuuuugauuaacagcacagggaaucuaauugcuccuagggguuacuucaaaauacgaagugggaaaagcucaauaaugagaucagaugcacccauuggcaaaugcaagucugaaugcaucacuccaaauggaagcauucccaaugacaaaccauuccaaaauguaaacaggaucacauacggggccugucccagauauguuaagcaaagcacucugaaauuggcaacaggaaugcgaaauguaccagagagacaaacuagaggcauauuuggcgcaauagcggguuucauagaaaaugguugggagggaaugguggaugguugguacggcuucaggcaucaaaauucugagggaagaggacaagcagcagaucucaaaagcacucaagcagcaaucgaucaaaucaaugggaagcugaaucgauugaucgggaaaaccaacgagaaauuccaucagauugaaaaagaauucucagaaguagaagggagaauucaggaccuugagaaauauguugaggacacaaaaauagaucucuggucauacaacgcggagcuucuuguugcccuggagaaccaacauacaauugaucuaacugacucagaaaugaacaaacuguuugaaaaaacaaagaagcaacugagggaaaaugcugaggauaugggcaaugguuguuucaaaauauaccacaaaugugacaaugccugcauaggaucaaucagaaauggaacuuaugaccacgauguauacagggaugaagcauuaaacaaccgguuccagaucaagggaguugagcugaagucaggguacaaagauuggauccuauggauuuccuuugccauaucauguuuuuugcuuuguguugcuuuguugggguucaucaugugggccugccaaaagggcaacauuaggugcaacauuugcauuuga

SEQ ID NO: 45974 - RNA, 1701 nt, Artificial Sequence; identical to SEQ ID NO: 44439
  derived and/or modified CDS sequence (wt) from hemagglutinin__InfluenzaA__EPI614444

SEQ ID NO: 45975 - RNA, 1701 nt, Artificial Sequence
  derived and/or modified CDS sequence (wt) from hemagglutinin__InfluenzaA__EPI551814
augaagacuaucauugcuuugagcuacauucuaugucugguuuucgcucaaaaacuuccuggaaaugacaauagcacggcaacgcugugccuugggcaccaugcaguaccaaacggaacgauagugaaaacaaucacgaaugaccgaauugaaguuacuaaugcuacugagcugguucagaauuccucaauaggugaaauaugcgacaguccucaucagauccuugauggagaaaacugcacacuaauagaugcucuauugggagacccucagugugauggcuuucaaaauaagaaaugggaccuuuuuguugaacgaagcaaagccuacagcaacuguuacccuuaugaugugccggauuaugccucccuuaggucacuaguugccucauccggcacacuggaguuuaacaaugaaagcuucaauugggcuggagucacucaaaacggaacaaguucuucuugcagaaggggaucuaauaguaguuucuuuaguagauuaaauugguugacccgcuuaaacuccaaauacccagcauuaaacgugacuaugccaaacaaugaacaauuugacaaauuguacauuugggggguucaccacccgguuacggacaaggaccaaaucuuccuguaugcacaaucaucaggaagaaucacaguaucuaccaaaagaagccaacaagcuguaaucccgaauaucggaucuagacccagaauaagggauaucccuagcagaauaagcaucuauuggacaauaguaaaaccgggagacauacuuuugauuaacagcacagggaaucuaauugcuccuagggguuacuucaaaauacgaagugggaaaagcucaauaaugagaucagaugcacccauuggcaaaugcaagucugaaugcaucacuccaaauggaagcauucccaaugacaaaccauuccaaaauguaaacaggaucacauacggggccugucccagauauguuaagcaaagcacucugaaauuggcaacaggaaugcgaaauguaccagagagacaaacuagaggcauauuuggcgcaauagcggguuucauagaaaaugguugggagggaaugguggaugguugguacggcuucaggcaucaaaauucugagggaagaggacaagcagcagaucucaaaagcacucaagcagcaaucgaucaaaucaaugggaagcugaaucgauugaucgggaaaaccaacgagaaauuccaucagauugaaaaagaauucucagaaguagaagggagaauucaggaccuugagaaauauguugaggacacaaaaauagaucucuggucauacaacgcggagcuucuuguugcccuggagaaccaacauacaauugaucuaacugacucagaaaugaacaaacuguuugaaaaaacaaagaagcaacugagggaaaaugcugaggauaugggcaaugguuguuucaaaauauaccacaaaugugacaaugccugcauaggaucaaucagaaauggaacuuaugaccacgauguauacagggaugaagcauuaaacaaccgguuccagaucaagggaguugagcugaagucaggguacaaagauuggauccuauggauuuccuuugccauaucauguuuuuugcuuuguguugcuuuguugggguucaucaugugggccugccaaaagggcaacauuaggugcaacauuugcauuuga

SEQ ID NO: 45976 - RNA, 1701 nt, Artificial Sequence
  derived and/or modified CDS sequence (wt) from hemagglutinin__InfluenzaA__EPI696955
augaagacuaucauugcuuugagcuacauucuaugucugguuuucgcucaaaaacuuccuggaaaugacaauagcacggcaacgcugugccuugggcaccaugcaguaccaaacggaacgauagugaaaacaaucacgaaugaccgaauugaaguuacuaaugcuacugagcugguucagaauuccucaauaggugaaauaugcgacaguccucaucagauccuugauggagaaaacugcacacuaauagaugcucuauugggagacccucagugugauggcuuucaaaauaagaaaugggaccuuuuuguugaacgaagcaaagccuacagcaacuguuacccuuaugaugugccggauuaugccucccuuaggucacuaguugccucauccggcacacuggaguuuaacaaugaaagcuucaauugggcuggagucacucaaaacggaacaaguucuucuugcagaaggggaucuaauaguaguuucuuuaguagauuaaauugguugacccacuuaaacuccaaauacccagcauuaaacgugacuaugccaaacaaugaacaauuugacaaauuguacauuugggggguucaccacccgguuacggacaaggaccaaaucuuccuguaugcacaaucaucaggaagaaucacaguaucuaccaaaagaagccaacaagcuguaaucccgaauaucggauauagacccagaauaagggauaucccuagcagaauaagcaucuauuggacaauaguaaaaccgggagacauacuuuugauuaacagcacagggaaucuaauugcuccuagggguuacuucaaaauacgaagugggaaaagcucaauaaugagaucagaugcacccauuggcaaaugcaagucugaaugcaucacuccaaauggaagcauucccaaugacaaaccauuccaaaauguaaacaggaucacauacggggccugucccagauauguuaagcaaagcacucugaaauuggcaacaggaaugcgaaauguaccagagagacaaacuagaggcauauuuggcgcaauagcggguuucauagaaaaugguugggagggaaugguggaugguugguacggcuucaggcaucaaaauucugagggaagaggacaagcagcagaucucaaaagcacucaagcagcaaucgaucaaaucaaugggaagcugaaucgauugaucgggaaaaccaacgagaaauuccaucagauugaaaaagaauucucagaaguagaagggagaauucaggaccuugagaaauauguugaggacacaaaaauagaucucuggucauacaacgcggagcuucuuguugcccuggagaaccaacauacaauugaucuaacugacucagaaaugaacaaacuguuugaaaaaacaaagaagcaacugagggaaaaugcugaggauaugggcaaugguuguuucaaaauauaccacaaaugugacaaugccugcauaggaucaaucagaaauggaacuuaugaccacgauguauacagggaugaagcauuaaacaaccgguuccagaucaagggaguugagcugaagucaggguacaaagauuggauccuauggauuuccuuugccauaucauguuuuuugcuuuguguugcuuuguugggguucaucaugugggccugccaaaagggcaacauuaggugcaacauuugcauuuga

SEQ ID NO: 45977 - RNA, 1701 nt, Artificial Sequence
  derived and/or modified CDS sequence (wt) from hemagglutinin__InfluenzaA__EPI740790
augaagacuaucauugcuuugagcuacauucuaugucugguuuucgcucaaaaacuuccuggaaaugacaauagcacggcaacgcugugccuugggcaccaugcaguaccaaacggaacgauagugaaaacaaucacgaaugaccgaauugaaguuacuaaugcuacugagcugguucagaauuccucaauaggugaaauaugcgacaguccucaucagauccuugauggagaaaacugcacacuaauagaugcucuauugggagacccucagugugauggcuuucaaaauaagaaaugggaccuuuuuguugaacgaagcaaagccuacagcaacuguuacccuuaugaugugccggauuaugccucccuuaggucacuaguugccucauccggcacacuggaguuuaacaaugaaagcuucaauugggcuggagucacucaaaacggaacaaguucuucuugcagaaggggaucuaauaguaguuucuuuaguagauuaaauugguugacccacuuaaacuccaaauacccagcauuaaacgugacuaugccaaacaaugaacaauuugacaaauuguacauuugggggguucaccacccgguuacggacaaggaccaaaucuuccuguaugcacaaucaucaggaagaaucacaguaucuaccaaaagaagccaacaagcuguaaucccgaauaucggauuuagacccagaauaagggauaucccuagcagaauaagcaucuauuggacaauaguaaaaccgggagacauacuuuugauuaacagcacagggaaucuaauugcuccuagggguuacuucaaaauacgaagugggaaaagcucaauaaugagaucagaugcacccauuggcaaaugcaagucugaaugcaucacuccaaauggaagcauucccaaugacaaaccauuccaaaauguaaacaggaucacauacggggccugucccagauauguuaagcaaagcacucugaaauuggcaacaggaaugcgaaauguaccagagagacaaacuagaggcauauuuggcgcaauagcggguuucauagaaaaugguugggagggaaugguggaugguugguacggcuucaggcaucaaaauucugagggaagaggacaagcagcagaucucaaaagcacucaagcagcaaucgaucaaaucaaugggaagcugaaucgauugaucgggaaaaccaacgagaaauuccaucagauugaaaaagaauucucagaaguagaagggagaauucaggaccuugagaaauauguugaggacacaaaaauagaucucuggucauacaacgcggagcuucuuguugcccuggagaaccaacauacaauugaucuaacugacucagaaaugaacaaacuguuugaaaaaacaaagaagcaacugagggaaaaugcugaggauaugggcaaugguuguuucaaaauauaccacaaaugugacaaugccugcauaggaucaaucagaaauggaacuuaugaccacgauguauacagggaugaagcauuaaacaaccgguuccagaucaagggaguugagcugaagucaggguacaaagauuggauccuauggauuuccuuugccauaucauguuuuuugcuuuguguugcuuuguugggguucaucaugugggccugccaaaagggcaacauuaggugcaacauuugcauuuga

SEQ ID NO: 45978 - RNA, 1701 nt, Artificial Sequence; identical to SEQ ID NO: 45936
  derived and/or modified CDS sequence (wt) from hemagglutinin__InfluenzaA__EPI377499

SEQ ID NO: 45979 - RNA, 1701 nt, Artificial Sequence
  derived and/or modified CDS sequence (wt) from hemagglutinin__InfluenzaA__EPI391247
augaagacuaucauugcuuugagcuacauucuaugucugguuuucgcucaaaaacuuccuggaaaugacaauagcacggcaacgcugugccuugggcaccaugcaguaccaaacggaacgauagugaaaacaaucacgaaugaccgaauugaaguuacuaaugcuacugaacugguucagaauuccucaauaggugaaauaugcgacaguccucaucagauccuugauggagaaaacugcacacuaauagaugcucuauugggagacccucagugugauggcuuccaaaauaagaaaugggaccuuuuuguugaacgaagcaaagccuacagcaacuguuacccuuaugaugugccggauuaugccucccuuaggucacuaguugccucauccggcacacuggaguuuaacaaugaaagcuucaauuggaauggagucacucaaaacggaacaaguucugcuugcauaaggagaucuaauaauaguuucuuuaguagauuaaauugguugacccacuuaaacuucaaauacccagcauugaacgugacuaugccaaacaaugaacaauuugacaaauuguacauuugggggguucaccacccgguuacggacaaggaccaaaucuuccuguaugcucaaccaucaggaagaaucacaguaucuaccaaaagaagccaacaagcuguaaucccgaauaucggauuuagacccagaauaaggaauaucccuagcagaauaagcaucuauuggacaauaguaaaaccgggagacauacuuuugauuaacagcacagggaaucuaauugcuccuagggguuacuucaaaauacgaagugggaaaagcucaauaaugagaucagaugcacccauuggcaaaugcaagucugaaugcaucacuccaaauggaagcauucccaaugacaaaccauuccaaaauguaaacaggaucacauacggggccugucccagauauguuaagcaaagcacucugaaauuggcaacaggaaugcggaauguaccagagaaacaaacuagaggcauauuuggcgcaauagcggguuucauagaaaaugguugggagggaaugguggaugguugguacgguuucaggcaucaaaauucugagggaagaggacaagcagcagaucucaaaagcacucaagcagcaaucgaucaaaucaaugggaagcugaaucgauugaucgggaaaaccaacgagaaauuccaucagauugaaaaagaauucucagaaguagaagggagaauucaggaccuugagaaauauguugaggacacuaaaauagaucucuggucauacaacgcggagcuucuuguugcccuggagaaccaacauacaauugaucuaacugacucagaaaugaacaaacuguuugaaaaaacaaagaagcaacugagggaaaaugcugaggauaugggcaaugguuguuucaaaauauaccacaaaugugacaaugccugcauaggaucaaucagaaauggaacuuaugaccacgauguauacagagaugaagcauuaaacaaccgguuccagaucaagggaguugagcugaagucaggguacaaagauuggauccuauggauuuccuuugccauaucauguuuuuugcuuuguguugcuuuguugggguucaucaugugggccugccaaaagggcaacauuaggugcaacauuugcauuuga

SEQ ID NO: 45980 - RNA, 1701 nt, Artificial Sequence
  derived and/or modified CDS sequence (wt) from hemagglutinin__InfluenzaA__EPI407123
augaagacuaucauugcuuugagcuacauucuaugucugguuuucgcucaaaaacuuccuggaaaugacaauagcacggcaacgcugugccuugggcaccaugcaguaccaaacggaacgauagugaaaacaaucacgaaugaccgaauugaaguuacuaaugcuacugaacugguucagaauuccucaauaggugaaauaugcgacaguccucaucagauccuugauggagaaaacugcacacuaauagaugcucuauugggagacccucagugugauggcuuccaaaauaagaaaugggaccuuuuuguugaacgaagcaaagccuacagcaacuguuacccuuaugaugugccggauuaugccucccuuaggucacuaguugccucauccggcacacuggaguuuaacaaugaaagcuucaauuggaauggagucacucaaaacggaacaaguucugcuugcauaaggagaucuaauaauaguuucuuuaguagauuaaauugguugacccacuuaaacuucaaauacccagcauugaacgugacuaugccaaacaaugaacaauuugacaaauuguacauuugggggguucaccacccgguuacggacaaggaccaaaucuuccuguaugcucaaccaucaggaagaaucacaguaucuaccaaaagaagccaacaagcuguaaucccgaauaucggauuuagacccagaauaaggaauaacccuagcagaauaagcaucuauuggacaauaguaaaaccgggagacauacuuuugauuaacagcacagggaaucuaauugcuccuagggguuacuucaaaauacgaagugggaaaagcucaauaaugagaucagaugcacccauuggcaaaugcaagucugaaugcaucacuccaaauggaagcauucccaaugacaaaccauuccaaaauguaaacaggaucacauacggggccugucccagauauguuaagcaaagcacucugaaauuggcaacaggaaugcggaauguaccagagaaacaaacuagaggcauauuuggcgcaauagcggguuucauagaaaaugguugggagggaaugguggaugguugguacgguuucaggcaucaaaauucugagggaagaggacaagcagcagaucucaaaagcacucaagcagcaaucgaucaaaucaaugggaagcugaaucgauugaucggggaaaccaacgagaaauuccaucagauugaaaaagaauucucagaaguagaagggagaauucaggaccuugagaaauauguugaggacacuaaaauagaucucuggucauacaacgcggagcuucuuguugcccuggagaaccaacauacaauugaucuaacugacucagaaaugaacaaacuguuugaaaaaacaaagaagcaacugagggaaaaugcugaggauaugggcaaugguuguuucaaaauauaccacaaaugugacaaugccugcauaggaucaaucagaaauggaacuuaugaccacgauguauacagagaugaagcauuaaacaaccgguuccagaucaagggaguugagcugaagucaggguacaaagauuggauccuauggauuuccuuugccauaucauguuuuuugcuuuguguugcuuuguugggguucaucaugugggccugccaaaagggcaacauuaggugcaacauuugcauuuga

SEQ ID NO: 45981 - RNA, 1701 nt, Artificial Sequence
  derived and/or modified CDS sequence (wt) from hemagglutinin__InfluenzaA__EPI407126
augaagacuaucauugcuuugagcuacauucuaugucugguuuucgcucaaaaacuuccuggaaaugacaauagcacggcaacgcugugccuugggcaccaugcaguaccaaacggaacgauagugaaaacaaucacgaaugaccgaauugaaguuacuaaugcuacugaacugguucagaauuccucaauaggugaaauaugcgacaguccucaucagauccuugauggagaaaacugcacacuaauagaugcucuauugggagacccucagugugauggcuuccaaaauaagaaaugggaccuuuuuguugaacgaagcaaagccuacagcaacuguuacccuuaugaugugccggauuaugccucccuuaggucacuaguugccucauccggcacacuggaguuuaacaaugaaagcuucaauuggaauggagucacucaaaacggaacaaguucugcuugcauaaggagaucuaauaauaguuucuuuaguagauuaaauugguugacccacuuaaacuucaaauacccagcauugaacgugacuaugccaaacaaugaacaauuugacaaauuguacauuugggggguucaccacccgguuacggacaaggaccaaaucuuccuguaugcucaaccaucaggaagaaucacaguaucuaccaaaagaagccaacaagcuguaaucccgaauaucggauuuagacccagaauaaggaauaacccuagcagaauaagcaucuauuggacaauaguaaaaccgggagacauacuuuugauuaacagcacagggaaucuaauugcuccuagggguuacuucaaaauacgaagugggaaaagcucaauaaugagaucagaugcacccauuggcaaaugcaagucugaaugcaucacuccaaauggaagcauucccaaugacaaaccauuccaaaauguaaacaggaucacauacggggccugucccagauauguuaagcaaagcacucugaaauuggcaacaggaaugcggaauguaccagagaaacaaacuagaggcauauuuggcgcaauagcggguuucauagaaaaugguugggagggaaugguggaugguugguacgguuucaggcaucaaaauucugagggaagaggacaagcagcagaucucaaaagcacucaagcagcaaucgaucaaaucaaugggaagcugaaucgauugaucgggaaaaccaacgagaaauuccaucagauugaaaaagaauucucagaaguagaagggagaauucaggaccuugagaaauauguugaggacacuaaaauagaucucuggucauacaacgcggagcuucuuguugcccuggagaaccaacauacaauugaucuaacugacucagaaaugaacaaacuguuugaaaaaacaaagaagcaacugagggaaaaugcugaggauaugggcaaugguuguuucaaaauauaccacaaaugugacaaugccugcauaggaucaaucagaaauggaacuuaugaccacgauguauacagagaugaagcauuaaacaaccgguuccagaucaagggaguugagcugaagucaggguacaaagauuggauccuauggauuuccuuugccauaucauguuuuuugcuuuguguugcuuuguugggguucaucaugugggccugccaaaagggcaacauuaggugcaacauuugcauuuga

SEQ ID NO: 45982 - RNA, 1701 nt, Artificial Sequence
  derived and/or modified CDS sequence (wt) from hemagglutinin__InfluenzaA__EPI562037
augaagacuaucauugcuuugagcuacauucuaugucugguuuucgcucaaaaaauuccuggaaaugacaauagcacggcaacgcugugccuugggcaccaugcaguaccaaacggaacgauagugaaaacaaucacaaaugaccgaauugaaguuacuaaugcuacugaguugguucagaauuccucaauaggugaaauaugcgacaguccucaucagauccuugauggagaaaacugcacacuaauagaugcucuauugggagacccucagugugauggcuuucaaaauaagaaaugggaccuuuuuguugaacgaagcaaagccuacagcagcuguuacccuuaugaugugccggauuaugccucccuuaggucacuaguugccucauccggcacacuggaguuuaacaaugaaagcuucaauuggacuggagucacucaaaacggaacaaguucugcuugcauaaggagaucuaguaguaguuucuuuaguagauuaaauugguugacccacuuaaacuacaaauacccagcauugaacgugacuaugccaaacaaugaacaauuugacaaauuguacauuugggggguucaccacccggguacggacaaggaccagaucuucccguaugcucaaucaucaggaagaaucacaguaucuaccaaaagaagccaacaagcuguaaucccaaauaucggaucuagacccagaauaagggauaucccuagcagaauaagcaucuauuggacaauaguaaaaccgggagacauacuuuugauuaacagcacagggaaucuaauugcuccuagggguuacuucaaaauacgaagugggaaaagcucaauaaugagaucagaugcacccauuggcaaaugcaagucugaaugcaucacuccaaauggaagcauucccaaugacaaaccauuccaaaauguaaacaggaucacauacggggccugucccagauauguuaagcauagcacucugaaauuggcaacaggaaugcgaaauguaccagagaaacaaacuagaggcauauuuggcgcaauagcggguuucauagaaaaugguugggagggaaugguggaugguugguacgguuucaggcaucaaaauucugagggaagaggacaagcagcagaucucaaaagcacucaagcagcaaucgaucaaaucaaugggaagcugaaucgguugaucgggaaaaccaacgagaaauuccaucagauugaaaaagaauucucagaaguagaaggaagaauucaggaccuugagaaauauguugaggacacuaaaauagaucucuggucauacaacgcggagcuucuuguugcccuggagaaccaacauacaauugaucuaacugacucagaaaugaacaaacuguuugaaaaaacaaagaagcaacugagggaaaaugcugaggauaugggaaaugguuguuucaaaauauaccacaaaugugacaaugccugcauaggaucaauaagaaauggaacuuaugaccacaauguguacagggaugaagcauuaaacaaccgguuucagaucaagggaguugagcugaagucaggguacaaagauuggauccuauggauuuccuuugccauaucauguuuuuugcuuuguguugcuuuguugggguucaucaugugggccugccaaaaaggcaacauuaggugcaacauuugcauuuga

SEQ ID NO: 45983 - RNA, 1701 nt, Artificial Sequence
  derived and/or modified CDS sequence (wt) from hemagglutinin__InfluenzaA__EPI562034
augaagacuaucauugcuuugagcuacauucuaugucugguuuucgcucaaaaaauuccuggaaaugacaauagcacggcaacgcugugccuugggcaccaugcaguaccaaacggaacgauagugaaaacaaucacaaaugaccgaauugaaguuacuaaugcuacugaguugguucagaauuccucaauaggugaaauaugcgacaguccucaucagauccuugauggagaaaacugcacacuaauagaugcucuauugggagacccucagugugauggcuuucaaaauaagaaaugggaccuuuuuguugaacgaagcaaagccuacagcaacuguuacccuuaugaugugccggauuaugccucccuuaggucacuaguugccucauccggcacacuggaguuuaacaaugaaagcuucaauuggacuggagucacucaaaacggaacaaguucugcuugcauaaggagaucuaguaguaguuucuuuaguagauuaaauugguugacccacuuaaacuacacauacccagcauugaacgugacuaugccaaacaaugaacaauuugacaaauuguacauuugggggguucaccacccggguacggacaaggaccagaucuuccuguaugcucaaucaucaggaagaaucacaguaucuaccaaaagaagccaacaagcuguaaucccaaauaucggaucuagacccagaauaagggauaucccuagcagaauaagcaucuauuggacaauaguaaaaccgggagacauacuuuugauuaacagcacagggaaucuaauugcuccuagggguuacuucaaaauacgaagugggaaaagcucaauaaugagaucagaugcacccauuggcaaaugcaagucugaaugcaucacuccaaauggaagcauucccaaugacaaaccauuccaaaauguaaacaggaucacauacggggccugucccagauauguuaagcauagcacucugaaauuggcaacaggaaugcgaaauguaccagagaaacaaacuagaggcauauuuggcgcaauagcggguuucauagaaaaugguugggagggaaugguggaugguugguacgguuucaggcaucaaaauucugagggaagaggacaagcagcagaucucaaaagcacucaagcagcaaucgaucaaaucaaugggaagcugaaucgguugaucgggaaaaccaacgagaaauuccaucagauugaaaaagaauucucagaaguagaaggaagaauucaggaccuugagaaauauguugaggacacuaaaauagaucucuggucauacaacgcggagcuucuuguugcccuggagaaccaacauacaauugaucuaacugacucagaaaugaacaaacuguuugaaaaaacaaagaagcaacugagggaaaaugcugaggauaugggaaaugguuguuucaaaauauaccacaaaugugacaaugccugcauaggaucaauaagaaauggaacuuaugaccacaauguguacagggaugaagcauuaaacaaccgguuucagaucaagggaguugagcugaagucaggguacaaagauuggauccuauggauuuccuuugccauaucauguuuuuugcuuuguguugcuuuguugggguucaucaugugggccugccaaaaaggcaacauuaggugcaacauuugcauuuga

SEQ ID NO: 45984 - RNA, 1701 nt, Artificial Sequence
  derived and/or modified CDS sequence (wt) from hemagglutinin__InfluenzaA__EPI653140
augaagacuaucauugcuuugagcuacauucuaugucugguuuucgcucaaaaaauuccuggaaaugacaauagcacggcaacgcugugccuugggcaccaugcaguaccaaacggaacgauagugaaaacaaucacaaaugaccgaauugaaguuacuaaugcuacugaguugguucagaauuccucaauaggugaaauaugcgacaguccucaucagauccuugauggagaaaacugcacacuaauagaugcucuauugggagacccucagugugauggcuuucaaaauaagaaaugggaccuuuuuguugaacgaagcaaagccuacagcagcuguuacccuuaugaugugccggauuaugccucccuuaggucacuaguugccucauccggcacacuggaguuuaacaaugaaagcuucaauuggacuggagucacucaaaacggaacaaguucugcuugcauaaggagaucuaguaguaguuucuuuaguagauuaaauugguugacccacuuaaacuacaaauacccagcauugaacgugacuaugccaaacaaugaacaauuugacaaauuguacauuugggggguucaccacccggguacggacaaggaccagaucuucccguaugcucaaucaucaggaagaaucacaguaucuaccaaaagaagccaacaagcuguaaucccaaauaucggaucuagacccagaauaagggguaucccuagcagaauaagcaucuauuggacaauaguaaaaccgggagacauacuuuugauuaacagcacagggaaucuaauugcuccuagggguuacuucaaaauacgaagugggaaaagcucaauaaugagaucagaugcacccauuggcaaaugcaagucugaaugcaucacuccaaauggaagcauucccaaugacaaaccauuccaaaauguaaacaggaucacauacggggccugucccagauauguuaagcauagcacucugaaauuggcaacaggaaugcgaaauguaccagagaaacaaacuagaggcauauuuggcgcaauagcggguuucauagaaaaugguugggagggaaugguggaugguugguacgguuucaggcaucaaaauucugagggaagaggacaagcagcagaucucaaaagcacucaagcagcaaucgaucaaaucaaugggaagcugaaucgguugaucgggaaaaccaacgagaaauuccaucagauugaaaaagaauucucagaaguagaaggaagaauucaggaccuugagaaauauguugaggacacuaaaauagaucucuggucauacaacgcggagcuucuuguugcccuggagaaccaacauacaauugaucuaacugacucagaaaugaacaaacuguuugaaaaaacaaagaagcaacugagggaaaaugcugaggauaugggaaaugguuguuucaaaauauaccacaaaugugacaaugccugcauaggaucaauaagaaauggaacuuaugaccacaauguguacagggaugaagcauuaaacaaccgguuucagaucaagggaguugagcugaagucaggguacaaagauuggauccuauggauuuccuuugccauaucauguuuuuugcuuuguguugcuuuguugggguucaucaugugggccugccaaaaaggcaacauuaggugcaacauuugcauuuga

SEQ ID NO: 45985 - RNA, 1707 nt, Artificial Sequence
  derived and/or modified CDS sequence (wt) from hemagglutinin__InfluenzaA__ACR48873/m
auggagaaaauagugcuucuuuuugcaauagucagucuuguuaaaagugaucagauuugcauugguuaccaugcaaacaacucgacagagcagguugacacaauaauggaaaagaacguuacuguuacacaugcccaagacauacuggaaaagacacacaaugggaagcucugcgaucuagauggagugaagccucuaauuuugagagauuguaguguagcuggauggcuccucggaaacccaaugugugacgaauucaucaaugugccggaauggucuuacauaguggagaaggccaauccagucaaugaccucuguuacccaggggauuucaaugacuaugaagaauugaaacaccuauugagcagaauaaaccauuuugagaaaauucagaucauccccaaaaguucuugguccagucaugaagccucauugggggugagcucagcauguccauaccagggaaaguccuccuuuuucagaaaugugguauggcuuaucgaaaagaacaguacauacccaacaauaaagaggagcuacaauaauaccaaccaagaagaucuuuugguacugugggggauucaccauccuaaugaugcggcagagcagacaaagcucuaucaaaacccaaccaccuauauuuccguugggacaucaacacuaaaccagagauugguaccaagaauagcuacuagauccaaaguaaacgggcaaaguggaaggauggaguucuucuggacaauuuuaaaaccgaaugaugcaaucaacuucgagaguaauggaaauuucauugcuccagaauaugcauacaaaauugucaagaaaggggacucaacaauuaugaaaagugaauuggaauaugguaacugcaacaccaagugucaaacuccaaugggggcgauaaacucuagcaugccauuccacaauauacacccucucaccaucggggaaugccccaaauaugugaaaucaaacagauuaguccuugcgacugggcucagaaauagcccucaaagagagagaagaagaaaaaagagaggauuauuuggagcuauagcagguuuuauagagggaggauggcagggaaugguagaugguugguauggguaccaccauagcaacgagcaggggaguggguacgcugcagacaaagaauccacucaaaaggcaauagauggagucaccaauaaggucaacucgauuauugacaaaaugaacacucaguuugaggccguuggaagggaauuuaacaacuuagaaaggagaauagagaauuuaaacaagaagauggaagacggguuccuagaugucuggacuuauaaugcugaacuucuaguucucauggaaaaugagagaacucuagacuuucaugacucaaaugucaagaaccuuuacgacaagguccgacuacagcuuagggauaaugcaaaggagcuggguaacgguuguuucgaguucuaucauaaaugugauaaugaauguauggaaaguguaagaaacggaacguaugacuacccgcaguauucagaagaagcaagacuaaaaagagaggaaauaaguggaguaaaauuggaaucaauaggaauuuaccaaauauugucaauuuauucuacaguggcgagcucccuagcacuggcaaucaugguagcuggucuauccuuauggaugugcuccaaugggucguuacaaugcagaauuugcauuuaa

SEQ ID NO: 45986 - RNA, 1707 nt, Artificial Sequence
  derived and/or modified CDS sequence (wt) from hemagglutinin__InfluenzaA__ACR48874/m
auggagaaaauagugcuucuuuuugcaauagucagucuuguuaaaagugaucagauuugcauugguuaccaugcaaacaacucgacagagcagguugacacaauaauggaaaagaacguuacuguuacacaugcccaagacauacuggaaaagacacacaaugggaagcucugcgaucuagauggagugaagccucuaauuuugagagauuguaguguagcuggauggcuccucggaaacccaaugugugacgaauucaucaaugugccggaauggucuuacauaguggagaaggccaauccagucaaugaccucuguuacccaggggauuucaaugacuaugaagaauugaaacaccuauugagcagaauaaaccauuuugagaaaauucagaucauccccaaaaguucuugguccagucaugaagccucauugggggugagcucagcauguccauaccagggaaaguccuccuuuuucagaaaugugguauggcuuaucaaaaagaacaguacauacccaacaauaaagaggagcuacaauaauaccaaccaagaagaucuuuugguacugugggggauucaccauccuaaggaugcggcagagcagacaaagcucuaucaaaacccaaccaccuauauuuccguugggacaucaacacuaaaccagagauugguaccaagaauagcuacuagauccaaaguaaacgggcaaaguggaaggauggaguucuucuggacaauuuuaaaaccgaaugaugcaaucaacuucgagaguaauggaaauuucauugcuccagaauaugcauacaaaauugucaagaaaggggacucaacaauuaugaaaagugaauuggaauaugguaacugcaacaccaagugucaaacuccaaugggggcgauaaacucuagcaugccauuccacaauauacacccucucaccaucggggaaugccccaaauaugugaaaucaaacagauuaguccuugcgacugggcucagaaauagcccucaaagagagagaagaagaaaaaagagaggauuauuuggagcuauagcagguuuuauagagggaggauggcagggaaugguagaugguugguauggguaccaccauagcaacgagcaggggaguggguacgcugcagacaaagaauccacucaaaaggcaauagauggagucaccaauaaggucaacucgauuauugacaaaaugaacacucaguuugaggccguuggaagggaauuuaacaacuuagaaaggagaauagagaauuuaaacaagaagauggaagacggguuccuagaugucuggacuuauaaugcugaacuucuaguucucauggaaaaugagagaacucuagacuuucaugacucaaaugucaagaaccuuuacgacaagguccgacuacagcuuagggauaaugcaaaggagcuggguaacgguuguuucgaguucuaucauaaaugugauaaugaauguauggaaaguguaagaaacggaacguaugacuacccgcaguauucagaagaagcaagacuaaaaagagaggaaauaaguggaguaaaauuggaaucaauaggaauuuaccaaauauugucaauuuauucuacaguggcgagcucccuagcacuggcaaucaugguagcuggucuauccuuauggaugugcuccaaugggucguuacaaugcagaauuugcauuuaa

SEQ ID NO: 45987 - RNA, 1701 nt, Artificial Sequence
  derived and/or modified CDS sequence (wt) from hemagglutinin__InfluenzaA__ACD47234
augaagacuaucauugcuuugagcuacauucuaugucugguuuucgcucaaaaacuuccuggaaaugacaacagcacggcaacgcugugccuugggcaccaugcaguaccaaacggaacgauagugaaaacaaucacgaaugaccaaauugaaguuacuaaugcuacugagcugguucagaguuccucaacaggugaaauaugcgacaguccucaucagauccuugauggagaaaacugcacacuaauagaugcucuauugggagacccucagugugauggcuuccaaaauaagaaaugggaccuuuuuguugaacgcagcaaagccuacagcaacuguuacccuuaugaugugccggauuaugccucccuuaggucacuaguugccucauccggcacacuggaguuuaacaaugaaagcuucaauuggacuggagucacucaaaacggaacaagcucuucuugcauaaggggaucuaauaacaguuucuuuaguagauugaauugguugacccacuuaaaauucaaauacccagcauugaacgugacuaugccaaacaaugaaaaauuugacaaauuguacauuugggggguucaccacccggguacggacaaugaccaaaucuucccguaugcucaagcaucaggaagaaucacagucucuaccaaaagaagccaacaaacuguaaucccgaauaucggaucuagacccagaguaaggaauauccccagcagaauaagcaucuauuggacaauaguaaaaccgggagacauacuuuugauuaacagcacagggaaucuaauugcuccuagggguuacuucaaaauacgaagugggaaaagcucaauaaugagaucagaugcacccauuggcaaaugcaauucugaaugcaucacuccaaaugggagcauucccaaugacaaaccauuccaaaauguaaacaggaucacauacggggccugucccagauauguuaagcaaaacacucugaaauuggcaacagggaugcgaaauguaccagagaaacaaacuagaggcauauuuggcgcaaucgcggguuucauagaaaaugguugggagggaaugguggaugguugguacgguuucaggcaucaaaauucugagggaauaggacaagcagcagaucucaaaagcacucaagcagcaaucgaucaaaucaaugggaagcugaauagguugaucgggaaaaccaacgagaaauuccaucagauugaaaaggaauucucagaagucgaagggaggauucaggaccuugagaaauauguugaggacaccaaaauagaucucuggucauacaacgcggagcuucuuguugcccuggagaaccaacauacaauugaucuaacugacucagaaaugaacaaacuguuugaaaaaacaaagaagcaacugagggaaaaugcugaggauaugggcaaugguuguuucaaaauauaccacaaaugugacaaugccugcauaggaucaaucagaaauggaacuuaugaccacgauguauacagagaugaagcauuaaacaaccgguuccagaucaagggcguugagcugaagucaggauacaaagauuggauccuauggauuuccuuugccauaucauguuuuuugcuuuguguugcuuuguugggguucaucaugugggccugccaaaaaggcaacauuaggugcaacauuugcauuuga

SEQ ID NO: 45988 - RNA, 1707 nt, Artificial Sequence
  derived and/or modified CDS sequence (wt) from hemagglutinin__InfluenzaA__ACZ36881
auggagaaaauagugcuucuucuugcaauagucagucuuguuaaaagugaucagauuugcauugguuaccaugcaaacaacucgacagagcagguugacacaauaauggaaaagaacgucacuguuacacacgcacaagacauacuggaaaagacacacaacgggaaacucugcgaucuagauggagugaagccucuaauuuuaagagauuguaguguagcuggauggcuccucgggaacccaaugugugacgaauuccucaaugugccggaauggucuuacauaguggagaagaucaauccagccaaugaccucuguuacccagggaauuucaacgacuaugaagaacugaaacaccuauugagcagaauaaaccauuuugagaaaauucagaucauccccaaaaguucuuggucagaucaugaagccucaucaggggugagcucagcauguccauaccagggaagguccuccuuuuuuagaaaugugguauggcuuaucaaaaaggacaaugcauacccaacaauaaagagaaguuacaauaauaccaaccaagaagaucuuuugguacugugggggauucaccauccaaaugaugcggcagagcagacaaggcucuaucaaaacccaaccaccuauauuuccguugggacaucaacacuaaaccagagacugguaccaaaaauagcuacuagauccaagguaaacgggcaaaguggaaggauggaguucuuuuggacaauuuuaaaaccgaaugaugcaauaaacuuugagaguaauggaaauuucauugcuccagaaaaugcauacaaaauugucaagaaaggggacucaacaauuaugaaaagugaauuggaauaugguaacugcaacaccaagugucaaacuccaauaggggcgauaaacucuaguaugccauuccacaacauccacccucucaccaucggggaaugccccaaauaugugaaaucaaacagauuaguccuugcgacugggcucagaaauagcccucaaggagagagaagaagaagaaagagaggacuauuuggagcuauagcagguuuuauagagggaggauggcagggaaugguagaugguugguauggguaccaccauagcaacgagcaggggaguggguacgcugcagacaaagaauccacucaaaaggcaauagauggagucaccaauaaggucaacucgaucauugacaaaaugaacacucaguuugaggcuguuggaagggaauuuaauaacuuagaaaggagaauagaaaauuuaaacaagaagauggaagacggauuccuagaugucuggacuuauaaugcugaacuucugguucucauggaaaaugagagaacucuagacuuucaugacucaaaugucaagaaccuuuacgacaagguccgacuacagcuuagggauaaugcaaaggagcuugguaacgguuguuucgaguucuaucauagaugugauaaugaauguauggaaaguguaagaaacggaacguaugacuacccgcaguauucagaagaagcaagauuaaaaagagaggaaauaaguggaguaaaauuggaaucaauaggaacuuaccaaauacugucaauuuauucaacaguggcgagcucccuagcacuggcaaucaugguggcuggucuaucuuuauggaugugcuccaauggaucguuacaaugcagaauuugcauuuaa

SEQ ID NO: 45989 - RNA, 1704 nt, Artificial Sequence
  derived and/or modified CDS sequence (wt) from hemagglutinin__InfluenzaA__EPI500771
auggagaaaauaguucuucucuuugcaacaaucagccuugucaaaagcgaucauauuugcauugguuaucaugcaaauaacucgacagagcagguugacacaauaauggaaaagaacguuacuguuacacaugcccaagacauacuggaaaagacacacaacgggaagcucugcgaucuaaauggagugaagccucugauuuuaaaagauuguaguguagcaggauggcuccucggaaauccauugugugacgaauucaccaaugugccagaauggucuuacauaguagagaaggccaauccagccaaugaccucuguuacccagggaauuucaacgauuaugaggaacuaaaacaccuauugagcaggauaaaccauuuugagaaaauacagaucauccccaaagauucuuggucagaucaugaagccucauugggggugagcgcagcauguucauaccagggaaauuccuccuucuucagaaaugugguguggcuuaucaaaaaggacaaugcauacccaacaauaaagaaaggcuacaauaauaccaaccgagaagaucucuugauacugugggggauccaccauccuaaugaugaagcagagcagacaaagcucuaucaaaacccaacuaccuauauuuccauugggacuucaacacuaaaccagagauugguaccaaaaauagccacuagauccaaaauaaacaggcaaaguggcaggauagauuucuucuggacaauuuuaaaaccgaaugacgcaauccauuucgagaguaauggaaauuucauugcuccagaauaugcauacaaaauugucaagaagggagacuccacaaucaugagaagugagguggaauaugguaacugcaacaccaggugucagacuccaauaggggcgauaaacucuagcaugccauuccacaacauacacccucucacuaucggagaaugucccaaauaugugaaaucaaacaaauuaguccuugcaacugggcucagaaauaguccucaaagagagagaagaagaaaaagaggacuguuuggagcuauagcagguuuuauagagggaggauggcagggaaugguagaugguugguauggguaccaccacagcaaugaacagggaagugguuacgcugcagacaaagaaucuacucaaaaggcgauagacggaguaaccaauaaggucaauucgaucauugauaaaaugaacacucaguuugaggcuguaggaagggaauuuaauaacuuggagaggagaauagaaaauuuaaacaagaagauggaagacggauuccuagaugucuggacuuauaaugcugaacuucugguucucauggagaaugagagaacucuagacuuccaugacucaaaugucaagaaccuuuacgauaagguccgacuacagcuuaaggauaaugcaaaagagcugggaaacgguuguuucgaguucuaucacaaauguaauaaugaauguauggaaaguguaagaaacgggacguaugacuacccgcaguauucagaagaagcaagauuaaaaagagaggaaauaaguggaguaaaacuggaaucaauaggaaucuaccaaauacugucaauuuauucaacaguggcgaguucccuagugcuggcaaucaugauggcuggucuaucuuuauggauguguuccaacgggucguuacagugcagaauuugcauuuaa

SEQ ID NO: 45990 - RNA, 1695 nt, Artificial Sequence
  derived and/or modified CDS sequence (wt) from hemagglutinin__InfluenzaA__ABF93441
auggagaaaauagugcuucuucuugcaauagucagucuuguuaaaagugaucagauuugcauugguuaccaugcaaacaacucgacagagcagguugacacaauaauggaaaagaacgucacuguuacacacgcccaagacauacuggaaaagacacacaacgggaagcucugcgaucuagauggagugaagccucuaauuuuaagagauuguaguguagcuggauggcuccucgggaacccaaugugugacgaauuccucaaugugccggaauggucuuacauaguggagaagaucaauccagccaaugaccucuguuacccagggaauuucaacgacuaugaagaacugaaacaccuauugagcagaauaaaccauuuugagaaaauucagaucauccccaaaaguucuuggucagaucaugaagccucaucaggggugagcucagcauguccauaccagggaagguccuccuuuuuuagaaaugugguauggcuuaucaaaaagaacaaugcauacccaacaauaaagagaaguuacaauaauaccaaccaagaagaucuuuugguacugugggggauucaccauccaaaugaugcggcagagcagacaaggcucuaucaaaacccaaccaccuauauuuccguugggacaucaacacuaaaccagagauugguaccaaaaauagcuacuagauccaagguaaacgggcaaaguggaaggauggaguucuuuuggacaauuuuaaaaccgaaugaugcaauaaacuuugagaguaauggaaauuucauugcuccagaaaaugcauacaaaauugucaagaaaggggacucaacaauuaugaaaagugaauuggaauaugguaacugcaacaccaagugucaaacuccaauaggggcgauaaacucuaguaugccauuccacaacauccacccucucaccaucggggaaugccccaaauaugugaaaucaaacagauuaguccuugcgacugggcucagaaauagcccucaaauugaaacuagaggauuauuuggagcuauagcagguuuuauagagggaggauggcagggaaugguagaugguugguauggguaccaccauagcaacgagcaggggaguggguacgcugcagacaaagaauccacucaaaaggcaauagauggagucaccaauaaggucaacucgaucauugacaaaaugaacacucaguuugaggccguuggaagggaauuuaauaacuuagaaaggagaauagaaaauuuaaacaagaagauggaagacggauuccuagaugucuggacuuauaaugcugaacuucugguucucauggaaaaugagagaacucuagacuuucaugacucaaaugucaagaaccuuuacgacaagguccgacuacagcuuagggauaaugcaaaggagcuugguaacgguuguuucgaguucuaucacagaugugauaaugaauguauggaaaguguaagaaacggaacguaugacuacccgcaguauucagaagaagcaagauuaaaaagagaggaaauaaguggaguaaaauuggaaucaauaggaacuuaccaaauacugucaauuuauucaacaguggcgagcucccuagcacuggcaaucaugguggcuggucuaucuuuguggaugugcuccaauggaucguuacaaugcagaauuugcauuuaa

SEQ ID NO: 45991 - RNA, 1707 nt, Artificial Sequence
  derived and/or modified CDS sequence (wt) from hemagglutinin__InfluenzaA__AGG12577
auggaaaaaauagugcuucuuuuugcaauaaucagccuuguuaaaagcgaucauauuugcauugguuaccaugcaaacaacucgacagagcagguugacacaauaauggaaaagaacguuacuguuacacaugcucaagacauacuggagaagacacacaaugggaagcucugcgaucuaaauggagugaagccucugauuuuaaaagauuguaguguagcaggauggcuccucgggaacccgaugugugacgaauucaucgaugugccagaauggucuuacauaguagagaaggccaauccagccaaugaccucuguuacccagggaauuucaacgauuaugaagaauuaaaacaccuauugagcagaauaaaccauuuugagaaaauacggaucauccccaaagauucuuggccagaucaugaagccucauugggggugagcgcagcauguucauaccagggaaauuccuccuuuuucagaaaugugguauggcuucucaaaaaggacaaugcauacccaauaauaaagaaaagcuacaauaauaccaauaaagaagaucucuugguacugugggggauccaccauccuaaugaugaggcagagcagacaaggcucuaucaaaacccaaccaccuauguuuccauugggacaucaacacuaaaccagagauugguaccaagaauagcuacuagauccaaaguaaacgggcaaaguggaaggauagauuucuucuggacaauuuuaaaaccgaaugaugcaaucaacuucgagaguaauggaaauuucauugcuccagaauaugcauacaaaauagucaagaaaggagacucaacaauuaugagaagugaaguggaauaugguaacugcagcaccaggugucagacuccgaugggggcaauaaauucuaguaugccauuccacaacauacacccucucaccaucggagaaugucccaaauaugugaaaucaaacaaauuaguccuugcgacugggcucagaaauaguccucaaauagaaagaagaagaagaaaaagaggacuguuuggagcuauagcagguuuuauagagggaggauggcagggaaugguagaugguugguauggguaccaccacagcaaugagcaggggaguggauaugcugcagacaaagaauccacucaaaaggcaauagauggggucaccaauaaagucaacucgaucauugacaaaaugaacacucaguuugaggcaguaggaagggaauuuaauaacuuagagaggagaauagagaauuuaaacaagaagauggaagacggauuccuagaugucuggacuuauaaugcugaacuccugguucuaauggaaaaugagagaacucuagacuuccaugacucaaaugucaagaaccuuuacgacaaggucagacuacagcuuagggauaaugcaaaagagcuggguaacgguuguuucgaguucuaucacaaaugugauaaugaauguauggaaaguguaagaaacggaacguaugacuacccgcaguauucagaagaagcaagauuaaaaagagaggaaauaaguggaguaaaauuggaaucaauaggaacuuaccaaauauugucaauuuauucaacaguggcgaguucccuaguacuggcaaucaugguggcuggucuaucuuuauggauguguuccaacgggucguuacaaugcagaauuugcauuuaa

SEQ ID NO: 45992 - RNA, 1707 nt, Artificial Sequence
  derived and/or modified CDS sequence (wt) from hemagglutinin__InfluenzaA__AGC13463
auggaaaaaauagugcuucuuuuugcaauaaucagccuuguuaaaagcgaucauauuugcauugguuaccaugcaaacaacucgacagagcagguugacacaauaauggaaaagaacguuacuguuacacaugcucaagacauacuggagaagacacacaaugggaagcucugcgaucuaaauggagugaagccucugauuuuaaaagauuguaguguagcaggauggcuccucgggaacccgaugugugacgaauucaucgaugugccagaauggucuuacauaguagagaaggccaauccagccaaugaccucuguuacccagggaauuucaacgauuaugaagaauuaaaacaccuauugagcagaauaaaccauuuugagaaaauacggaucauccccaaagauucuuggccagaucaugaagccucauugggggugagcgcagcauguucauaccagggaaauuccuccuuuuucagaaaugugguauggcuucucaaaaaggacaaugcauacccaauaauaaagaaaagcuacaauaauaccaauaaagaagaucucuugguacugugggggauccaccauccuaaugaugaggcagagcagacaaggcucuaucaaaacccaaccaccuauguuuccauugggacaucaacacuaaaccagagauugguaccaagaauagcuacuagauccaaaguaaacgggcaaaguggaaggauagauuucuucuggacaauuuuaaaaccgaaugaugcaaucaacuucgagaguaauggaaauuucauugcuccagaauaugcauacaaaauagucaagaaaggagacucaacaauuaugagaagugaaguggaauaugguaacugcagcaccaggugucagacuccgaugggggcgauaaauucuaguaugccauuccacaacauacacccucucaccaucggagaaugucccaaauaugugaaaucaaacaaauuaguccuugcgacugggcucagaaauaguccucaaauagaaagaagaagaaggaaaagggggcuguuuggagcuauagcagguuuuauagagggaggauggcagggaaugguagaugguugguauggguaccaccacagcaaugagcaggggaguggauaugcugcagacaaagaauccacucaaaaggcaauagauggggucaccaauaaagucaacucgaucauugacaaaaugaacacucaguuugaggcaguaggaagggaauuuaauaacuuagagaggagaauagagaauuuaaacaagaagauggaagacggauuccuagaugucuggacuuauaaugcugaacuccugguucuaauggaaaaugagagaacucuagacuuccaugacucaaaugucaagaaccuuuacgacaaggucagacuacagcuuagggauaaugcaaaagagcuggguaacgguuguuucgaguucuaucacaaaugugauaaugaauguauggaaaguguaagaaacggaacguaugacuacccgcaguauucagaagaagcaagauuaaaaagagaggaaauaaguggaguaaaauuggaaucaauaggaacuuaccaaauauugucaauuuauucaacaguggcgaguucccuaguacuggcaaucaugguggcuggucuaucuuuauggauguguuccaacgggucguuacaaugcagaauuugcauuuaa

SEQ ID NO: 45993 - RNA, 1707 nt, Artificial Sequence
  derived and/or modified CDS sequence (wt) from hemagglutinin__InfluenzaA__ACI06178/m1
auggagaaaauagugcuucuuuuugcgauagucagucuuguuaaaagugaucagauuugcauugguuaccaugcaaacaacucgacagagcagguugacacaauaauggaaaagaacguuacuguuacacaugcccaagacauacuggaaaagacacauaacgggaagcucugugaucuagauggagugaagccucuaaucuugagagauuguaguguagcuggauggcuccucggaaacccaaugugugacgaauucaucaaugugccggaauggucuuauauaguggagaaggccaauccagucaaugaccucuguuacccaggggauuucaaugacuaugaagaauugaaacaccuauugagcagaauaaaccauuuugagaaaauucagaucauucccaaaaguucuuggcccagucaugaagccucauugggggugagcgcagcauguccauaccaggggaaguccucuuuuuucagaaaugugguauggcuuaucaaaaagaacaacacauacccaacaauaaagaggagcuacaauaauaccaaccaagaagaucuuuugguaaugugggggauccaccauccuaaugaugcggcagagcagacaaaucucuaucaaaauccaaccaccuauauuuccguugggacaucaacacuaaaccagagauugacaccaagaauagcuacuagauccaaaguaaacgggcaaagugggaggauggaguucuucuggacaauuuuaaaaccgaaugaugcaaucaacuucgagaguaauggaaacuucauugcuccagaguaugcauacaaaauugucaagaaaggggacucaacaauuaugaaaagugaauuagaauaugguaacugcaacaccaagugucaaacuccaaugggggcgauaaacucuaguaugccauuccacaauauacauccucucaccauuggggaaugccccaaauaugugaaaucaaacagauuaguccuugcgacugggcucagaaauagcccucaaagagagggaagaagaaaaaagagaggauuauuuggagcuauagcagguuucauagagggaggauggcagggaaugguagaugguugguauggguaccaccauagcaaugagcaggggaguggguacgcugcagacaaagaauccacucaaaaggcuauagauggagucaccaauaaggucaacucgaucauugacaaaaugaacacucaguuugaggccguuggaagggaauuuaacaacuuagaaaggagaauagagaauuuaaacaagaagauggaagacggguuccuggaugucuggacuuauaaugcugaacuucugguucucauggaaaaugagagaacucuggacuuccaugacucaaauguaaagaaccuuuacgacaagguccgauuacagcuuagggauaaugcaaaggagcuggguaacgguuguuucgaguucuaucacaaaugugauaaugaauguauggaaagugugagaaacgggacguaugacuauccgcaguauucagaagaagcaagauuaaaaagagaggaaauaaguggagugaaauuggaaucaauaggaauuuaccaaauacugucaauuuauucuacaguggcgaguucucuagcacuggcaaucaugguagcuggucuauccuuguggaugugcuccaauggaucguuacaaugcagaauuugcauuuaa

SEQ ID NO: 45994 - RNA, 1707 nt, Artificial Sequence
  derived and/or modified CDS sequence (wt) from hemagglutinin__InfluenzaA__AHF20402
auggagaaaauagugcuucuuuuugcgauagucagucuuguuaaaagugaccagauuugcauuggcuaccaugcaaacaacucgacagagcagguugacacgauaauggaaaagaacguuacuguuacacaugcccaagacauacuagaaaagacacauaacggaaagcucugugacuuagauggaguuaggccucuaauuuugagagauuguaguguagcuggauggcuucucggaaacccaaugugugacgaauucaucaaugugccagaauggucuuauauaguggagaaggccaauccagucaaugaccucugcuacccaggaguuuucaaugacuaugaagaauugaaacaccuauugagcagaauaaaccauuuugagaaaauucagaucauccccaagaauucuuggcccagucaugaagccucauugggggugagcgcagcauguccauaccaggggcaguccucuuuuuuccgaaaugugguguggcuuaucaaaaagaacaauacauacccaacaauaaagaggaguuacaauaauaccaaccaagaagaucuuuugguaaugugggggauccaccauccuaaugaugcaguagaacagacaaaacucuaucaaaauccaaccaccuauaucuccguugggacgucaacauuaaaccagagauugacaccaagaauagcuacuagauccaaaguaaaaggacuaagugggaggauggaguucuuuuggacaaucuuaaaaccgaaugaugcaaucaacuucgagaguaauggaaauuucaucgcuccagaauaugcauacaaaauugucaagaaaggggacucaacaauuaugagaagugaacuggaauaugguaacugcaacaccaagugucaaacuccaaugggggcgauaaacucuaguaugccauuccacaauauacauccucucacuauuggagaaugccccaaauaugugaaaucaaccagauuaguccuugcgacugggcucagaaauagcccucaaagagaggaaagaagaaaaaagagaggauuauuuggagcuauagcaggguuuauagaaggaggauggcaggggaugguagaugguugguauggguaccaucauagcaacgagcagggaagcggguacgcugcagacaaagaauccacucaaaaggcuauagauggagucaccaauaaggucaacucgaucauugacaaaaugaacacucaguuugaggcuguugggagggaauuuaacaacuuagaaagaagaauagagaauuuaaacaagaagauggaagacggguuccuagauguuuggacuuauaaugcugaacuucugguucucauggaaaaugagagaacucuagacuuccaugacucaaauguaaagaaccuuuacgacaagguccgauuacagcuuagggauaaugccaaggagcuggguaacgguuguuuugaguucuaucacaaaugugauaauaaauguauggaaagugugagaaaugggacauaugacuauccgcaguauucagaagaagcaagauuaaaaagagaggagauaaguggagugaaauuggaaucgauaggaguuuaccaaauacugucaauuuauucuacaguggcgaguucccuagcacuggcaaucaugguagcuggucuauccuuauggaugugcuccaaugggucguuacaaugcagaauuugcauuuaa

SEQ ID NO: 45995 - RNA, 1707 nt, Artificial Sequence
  derived and/or modified CDS sequence (wt) from hemagglutinin__InfluenzaA__ABQ45850
auggagaaaauagugcuucuucuugcaauagucagucuuguuaaaagugaucagauuugcauugguuaccaugcaaacaacucgacagagcagguugacacaauaauggaaaagaacgucacuguuacacacgcccaagacauacuggaaaagacacacaacgggaagcucugcgaucuagacggagugaagccucuaauuuuaagagauuguaguguagcuggauggcuccucgggaacccaaugugugacgaauuccucaaugugccggaauggucuuacauaguggagaagaucaauccagccaaugaccucuguuacccagggaauuucaacgacuaugaagaacugaaacaccuauugagcagaauaaaccauuuugagaaaauucagaucauccccaaaaguucuuggucagaucaugaagccucaucaggggugagcucagcauguccauaccagggaagguccuccuuuuuuagaaaugugguauggcuuaucaaaaagaacgaugcauacccaacaauaaagagaaguuacaauaauaccaaccaagaagaucuuuugguacugugggggauucaccauccaaaugaugcggcagagcagacaaggcucuaucaaaacccaaccaccuauauuuccguugggacaucaacacuaaaccagagauugguaccaaaaauagcuacuagauccaagguaaacgggcaaaguggaaggauggaguucuuuuggacaauuuuaaaaccgaaugaugcaauaaacuuugagaguaauggaaauuucauugcuccagaaaaugcauacaaaauugucaagaaaggggacucaacaaucaugaaaagugaauuggaauaugguaacugcaacaccaagugucaaacuccaauaggggcgauaaacucuaguaugccauuccacaacauccacccucucaccaucggggaaugccccaaauaugugaaaucaaacagauuaguccuugcgacugggcucagaaauagcccucaaggagagagaagaagaaaaaagagaggacuauuuggagcuauagcagguuuuauagagggaggauggcagggaaugguagaugguugguauggguaccaccauagcaacgagcaggggaguggguacgcugcagacaaagaauccacucaaaaggcaauagauggagucaccaauaaggucaacucgaucauugacaaaaugaacacucaauuugaggccguuggaagggaauuuaauaacuuagaaaggagaauagaaaauuuaaacaagaagauggaagacggauuccuagaugucuggacuuauaaugcugaacuucugguucucauggaaaaugagagaacucuagacuuucaugacucaaaugucaagaaccuuuacgacaagguccgacuacagcuuagggauaaugcaaaggagcuugguaacgguuguuucgaguucuaucacagaugugauaaugaauguauggaaaguguaagaaacggaacguaugacuacccgcaguauucagaagaagcaagauuaaaaagagaggaaauaaguggaguaaaauuggaaucaauaggaacuuaccaaauacugucaauuuauucaacaguggcgagcucccuagcacuggcaaucaugguggcuggucuaucuuuauggaugugcuccaauggaucguuacaaugcagaauuugcauuuaa

SEQ ID NO: 45996 - RNA, 1713 nt, Artificial Sequence
  derived and/or modified CDS sequence (wt) from hemagglutinin__InfluenzaA__AKI82373
auggagaaaauagugccucuucuugcaauaaucggucuuguuaaaagugaucagauuugcauugguuaccaugcaaacaacucgacagagcagguugacacaauaauggaaaagaacguuacuguuacacaugcucaagacauacuggagaagacacacaacgggaagcucugcaaccuagauggagugaagccucuaauucuaaaagacuguaguguagcuggauggcuccucgggaacccaaugugugacgaauuucucaaugugucagaauggucuuacauaguggagaaggccaguccagccaauggccucuguuacccaggggauuucaaugacuaugaagaacugaaacaccuauuaaacagaauaacacaucuuaagaaaauuaagaucauccccaaaaguuauugguccaaucaugaagccucaucaggggugagcgcagcauguuccuauaugggggagcccuccuuuuucagaaaugugguauggcuuaucaaaaagaauaauacauacccaccaauaaaggugaacuacaccaauaccaaucaagaagaucuuuugguacugugggggauucaccaucccaauaaugaggcagagcagauacagaucuaucaaaaccuaaucacccauauuucaguuggaacaucaacacuaaaccagagauugauaccaaaaauagcuacuagauccaaagugaacgggcaaaguggaagaauggaguucuucuggacaauuuuaaagccgaaugauucuaucaauuucgauagcaauggaaauuucauugcuccagaauaugccuacauugucaagaaaggggacucggcaauuaugaaaagugaauuggaguaugguaacugcaacaccaagugucaaacuccaaugggggcgauaaauucuaguaugccauuccacaacauacacccucucaccaucggggaaugccccaaauaugugaagucaaacagauuaguccucgcgacuggacucagaaaugccccucaaagagaaagagaggggggaagaagaagaaaaagaggacuauuuggagccauagcaggguuuauagagggaggauggcagggaaugguagaugguugguauggguaccaccauagcaaugagcaggggaguggguacgcugcagacaaagaauccacucaaaaggcaauagauggaaucacuaauaaggucaacucgaucauugacaaaaugaacacucaauuugaggccguuggaagggaauuuaauaacuuagagaggagaauagaaaauuuaaacaaaaagauggaggacggauuccuagaugucuggacuuauaacgcugaacuucugguucucauggaaaaugagagaacucuagacuuucaugacucaaaugucaagaaccuuuacgaaaagguccgacuacagcuuagggauaaugcaaaggagcuggguaacgguuguuucgaguucuaccacaaaugugauaaugaauguauggaaaguguaagaaacggaacguaugacuacucgcaguauucagaagaagcaagacuaagcagagaggaaauaaauggaguaaaauuggaaucaaugguaacuuaccaaauacugucaauuuauucaacaguggcgaguucccuagcauuggcaaucaugguggcuggucuaucuuuauggaugugcuccaauggaucguuacaaugcagaauuugcauuuga

SEQ ID NO: 45997 - RNA, 1713 nt, Artificial Sequence
  derived and/or modified CDS sequence (wt) from hemagglutinin__InfluenzaA__EPI284473
auggagaaaauagugcuucuucuugcaauaaucagccuuguuaaaagugaucagauuugcauugguuaccaugcaaacaacucgacagagcagguugacacaauaauggaaaagaacguuacuguuacacaugcucaagacauacuggagaagacacacaacgggaagcucugcaaccuagauggagugaagccucuaauucuaaaagacuguaguguagcuggauggcuccucgggaacccaaugugugacgaauuucucaaugugucagaauggucuuacauaguggagaaggccaguccagccaauggccucuguuacccaggggauuucaaugacuaugaagaacugaaacaccuauuaaacagaauaacacaucuuaagaaaauuaagaucauccccaaaaguuauugguccaaucaugaagccucaucaggggugagcgcagcauguuccuauaugggggagcccuccuuuuucagaaaugugguauggcuuaucaaaaagaauaauacauacccaccaauaaaggugaacuacaccaauaccaaucaagaagaucuuuugguacugugggggauucaccaucccaauaaugaggcagagcagauacagaucuaucaaaaccuaaucacccauauuucaguuggaacaucaacacuaaaccagagauugauaccaaaaauagcuacuagauccaaagugaacgggcaaaguggaagaauggaguucuucuggacaauuuuaaagccgaaugauucuaucaauuucgauagcaauggaaauuucauugcuccagaauaugccuacauugucaagaaaggggacucggcaauuaugaaaagugaauuggaguaugguaacugcaacaccaagugucaaacuccaaugggggcgauaaauucuaguaugccauuccacaacauacacccucucaccaucggggaaugccccaaauaugugaagucaaacagauuaguccucgcgacuggacucagaaaugccccucaaagagaaagagaggggggaagaagaagaaaaagaggacuauuuggagccauagcaggguuuauagagggaggauggcagggaaugguagaugguugguauggguaccaccauagcaaugagcaggggaguggguacgcugcagacaaagaauccacucaaaaggcaauagauggaaucacuaauaaggucaacucgaucauugacaaaaugaacacucaauuugaggccguuggaagggaauuuaauaacuuagagaggagaauagaaaauuuaaacaaaaagauggaggacggauuccuagaugucuggacuuauaacgcugaacuucugguucucauggaaaaugagagaacucuagacuuucaugacucaaaugucaagaaccuuuacgaaaagguccgacuacagcuuagggauaaugcaaaggagcuggguaacgguuguuucgaguucuaccacaaaugugauaaugaauguauggaaaguguaagaaacggaacguaugacuacucgcaguauucagaagaagcaagacuaagcagagaggaaauaaauggaguaaaauuggaaucaaugguaacuuaccaaauacugucaauuuauucaacaguggcgaguucccuagcauuggcaaucaugguggcuggucuaucuuuauggaugugcuccaauggaucguuacaaugcagaauuugcauuuga

SEQ ID NO: 45998 - RNA, 1710 nt, Artificial Sequence
  derived and/or modified CDS sequence (wt) from hemagglutinin__InfluenzaA__ACO07033
auggagaaaauagugcuucuucuugcaaugaucggucuuguuaaaagugaucagauuugcauugguuaccaugcaaacaacucgacagagcagguugacacaauaauggaaaagaacguuacuguuacacaugcucaagacauacuggagaagacacacaacgggaagcucugcaaccuagauggggugaagccucuaauuuugaaagacuguaguguagcuggauggcuccucgggaacccaaugugugacgaauuucucaaugugucagaauggucuuacauaguggagaaggccaguccagccaauggccucuguuacccaggggauuucaaugacuaugaagaacugaaacaccuauugagcagaauaaaccaucuuaagaaaauuaagaucauccccaaaaguuauugguccaaucaugaagccucaucaggggugagcgcagcauguuccuaucugggagagcccuccuuuuucagaaaugugguauggcuuaucaaaaagaauaauacauacccaccaauaaaggugaacuacaccaauaccaaccaagaagaucuuuugguacugugggggauucaccaucccaaugaugagaaagagcagauaaggaucuaucaaaacccaaacaccucuauuucaguuggaacaucaacacuaaaccagagauugguaccaaaaauagcuacuagacccaaagugaacgggcaaaguggacgaauggaguucuucuggacaauuuuaaagccgaaugauucuaucaauuucgauagcaauggaaauuucauugcuccagaauaugcauacaaaauugccaagaaaggggacucagugauuaugaaaagugaauuggaauaugguaacugcaacaccaagugucaaacuccaaugggggcgauaaauucuaguaugccauuccacaacauacacccucucaccaucggggaaugccccaaauaugugaaaucaaacagauuaguccucgcgacuggacucagaaaugccccccaaagagagggaggaagaaggagaaaaagaggacuauuuggagccauagcaggguuuauagagggaggauggcagggaaugguagaugguugguauggguaccaccauagcaaugagcaggggaguggauacgcugcagacaaagaauccacucaaaaggcaauagauggaaucaccaauaaggucaacucgaucauugacaaaaugaacacucaguuugagaucguuggaagggaauuuaauaacuuagaaaggagaauagaaaauuuaaacaagaagauggaggacggauuccuagaugucuggacuuauaacgcugaacuucugguucucauggagaaugagagaacucuagacuuucaugacucaaaugucaagaaccuuuacgaaaagguccgacuacagcuuagggauaaugcaaaggagcuggguaacgguuguuuugaguucuaccacaaaugugauaaugaauguauggaaaguguaagaaacggaacguaugacuacccgcaguauucagaagaagcaagacuaagcagagaggaaauaaguggaguaaaaauggaaucaaugguaacuuaucaaauacugucaauuuauucaacaguggcgaguucccuagcauuggcaaucaugguggcuggucuaucuuuauggaugugcuccaauggaucguuacaaugcagaauuugcauuuga

SEQ ID NO: 45999 - RNA, 1695 nt, Artificial Sequence
  derived and/or modified CDS sequence (wt) from hemagglutinin__InfluenzaA__EPI174803
auggagaaaauagugcuucuucuugcaaugaucggucuuguuaaaagugaucagauuugcauugguuaccaugcaaacaacucgacagagcagguugacacaauaauggaaaagaacguuacuguuacacaugcucaagacauacuggagaagacacacaacgggaagcucugcaaccuagauggggugaagccucuaauuuugaaagacuguaguguagcuggauggcuccucgggaacccaaugugugacgaauuucucaaugugucagaauggucuuacauaguggagaaggccaguccagccaauggccucuguuacccaggggauuucaaugacuaugaagaacugaaacaccuauugagcagaauaaaccaucuuaagaaaauuaagaucauccccaaaaguuauugguccaaucaugaagccucaucaggggugagcgcagcauguuccuaucugggagagcccuccuuuuucagaaaugugguauggcuuaucaaaaagaauaauacauacccaccaauaaaggugaacuacaccaauaccaaccaagaagaucuuuugguacugugggggauucaccaucccaaugaugagaaagagcagauaaggaucuaucaaaacccaaacaccucuauuucaguuggaacaucaacacuaaaccagagauugguaccaaaaauagcuacuagacccaaagugaacgggcaaaguggacgaauggaguucuucuggacaauuuuaaagccgaaugauucuaucaauuucgauagcaauggaaauuucauugcuccagaauaugcauacaaaauugccaagaaaggggacucagugauuaugaaaagugaauuggaauaugguaacugcaacaccaagugucaaacuccaaugggggcgauaaauucuaguaugccauuccacaacauacacccucucaccaucggggaaugccccaaauaugugaaaucaaacagauuaguccucgcgacuggacucagaaaugccccccaaacagagacccgaggacuauuuggagccauagcaggguuuauagagggaggauggcagggaaugguagaugguugguauggguaccaccauagcaaugagcaggggaguggauacgcugcagacaaagaauccacucaaaaggcaauagauggaaucaccaauaaggucaacucgaucauugacaaaaugaacacucaguuugagaucguuggaagggaauuuaauaacuuagaaaggagaauagaaaauuuaaacaagaagauggaggacggauuccuagaugucuggacuuauaacgcugaacuucugguucucauggagaaugagagaacucuagacuuucaugacucaaaugucaagaaccuuuacgaaaagguccgacuacagcuuagggauaaugcaaaggagcuggguaacgguuguuuugaguucuaccacaaaugugauaaugaauguauggaaaguguaagaaacggaacguaugacuacccgcaguauucagaagaagcaagacuaagcagagaggaaauaaguggaguaaaaauggaaucaaugguaacuuaucaaauacugucaauuuauucaacaguggcgaguucccuagcauuggcaaucaugguggcuggucuaucuuuauggaugugcuccaauggaucguuacaaugcagaauuugcauuuga

SEQ ID NO: 46000 - RNA, 1704 nt, Artificial Sequence
  derived and/or modified CDS sequence (wt) from hemagglutinin__InfluenzaA__AGZ62382
auggagaaaauagugcuucuuuuugcggcaaucagccuuguuaaaagcgaucauauuugcauugguuaucaugcaaauaacucgacaaagcagguugacacaauaauggaaaagaacguuacuguuacacaugcccaagacauacuggaaaagacacacaaugggaagcucugcgaucuaaauggagugaaaccucugauuuuaaaagauuguaguguagcaggauggcuccucggaaacccaaugugugacgaauucaucaaugugccagaauggucuuacauaguagagaaggccaauccagccaauggccucuguuacccagggaauuucaacgauuaugaggaauugaaacaccuauugagcaggauaaaccauuuugagaaaauacggaucauccccaaagauucuuggucagaucaugaagccucacugggggugagugcagcauguccauaccagggaaauuccuccuucuucagaaaugugguguggcuuaucaaaaaggacaauacauacccaacaauaaagaaaagcuacaauaauaccaaccaagaagaucucuugauacugugggggauucaucacccuaaugaugaagcagagcagacaaggcucuaucaaaacccaaccaccuauauuuccauugggacaucaacacuaaaccagagauugguaccaaaaauagccacuagauccaaaauaaaugggcaaaguggcaggauagauuucuucuggacaauuuuaaaaccgaaugaugcaauccacuucgagaguaacggaaauuucauugcuccagaguaugcauacaaaauugucaagaaaggagacucaacaauuaugaaaagugaaguggaauaugguaauugcaacaccaggugucagacuccuauaggggcgauaaacucuaguaugccauuccacaacauacauccccucaccaucggagaaugucccaaauaugugaaaucaaacaaauuaguccuugcgacugggcucagaaauaguccucaaagagagagaagaagaaaaagaggauuguuuggagcuauagcaggguuuauagagggaggauggcaggggaugguagaugguugguauggguaccaccacagcaacgagcaggggaguggguacgcugcagacaaagaaucuacucaaaaggcaauagacggagucaccaauaaggucaacucgaucauugacaaaaugaacacucaguuugaggccguaggaagggaguuuaauaacuuagagaggagaauagagaauuugaacaagaagauggaagacggauuccuagaugucuggacuuauaaugcagaacuucugguucucauggaaaaugagagaacucuggacuuccaugacucaaaugucaggaaucuuuacgacaaggucagacuacagcuuaaggacaaugcaaaagagcuggguaacgguuguuucgaguucuaccacaaauguaauaaugaauguauggaaaguguaagaaacggaacguaugacuacccgcaguauucagaagaagcaagauuaagaagagaagaaauaaguggaguaaaguuggaaucaauaggaauuuaccaaauauugucaauuuauucaacaguggcaaguuccuuaguacuggcaaucaugauggcuggucuaucuuuauggauguguuccaacgggucguuacagugcagaauuugcauuuaa

SEQ ID NO: 46001 - RNA, 1704 nt, Artificial Sequence
  derived and/or modified CDS sequence (wt) from hemagglutinin__InfluenzaA__ABG67978/m
auggagaaaauagugcuucuucuugcaauagucagccuuguuaaaagugaucagauuugcauugguuaccaugcaaacaacucgacagagcagguugacacaauaauggaaaagaacguuacuguuacacaugcccaagacauacuggaaaagacacacaacgggaagcucugcgaucuagauggagugaagccucugauuuuaagagauuguaguguagcuggauggcuccucggaaacccaaugugugacgaauucaucaaugugccggaauggucuuacauaguggagaaggccaacccagccaaugaccucuguuacccagggaauuucaacgacuaugaagaacugaaacaccuauugagcagaauaaaccauuuugagaaaauucagaucauccccaaaaguucuugguccgaucaugaagccucaucaggggugagcucagcauguccauaccagggaacgcccuccuuuuucagaaaugugguauggcuuaucaaaaagaauaauacauacccaacaauaaagagaagcuacaauaauaccaaccaggaagaucuuuugauacugugggggauucaucauucuaaugaugcggcagagcagacaaagcucuaucaaaacccaaccaccuauauuuccguugggacaucaacacuaaaccagagauugguaccaaaaauagcuacuagauccaaaguaaacgggcaaaguggaagaauggauuucuucuggacaauuuuaaaaccgaaugaugcaaucaacuucgagaguaauggaaauuucauugcuccagaauaugcauacaaaauugucaagaaaggggacucagcaauuauaaaaagugaaguggaauaugguaacugcaacacaaagugucaaacuccaauaggggcgauaaacucuaguaugccauuccacaacauacacccucucaccaucggggaaugccccaaauaugugaaaucaaacaaauuaguccuugcgacugggcucagaaauaguccucuaagagaaagaagaagaaaaagaggacuauuuggagcuauagcaggguuuauagagggaggauggcagggaaugguagaugguugguauggguaccaccauagcaaugagcaggggaguggguacgcugcagacaaagaauccacucaaaaggcaauagauggagucaccaauaaggucaacucgaucauugacaaaaugaacacucaguuugaggccguuggaagggaauuuaauaacuuagaaaggagaauagagaauuuaaacaagaaaauggaagacggauuccuagaugucuggacuuauaaugcugaacuucugguucucauggaaaaugagagaacucuagacuuccaugacucaaaugucaagaaccuuuacgacaagguccgacuacagcuuagggauaaugcaaaggagcuggguaacgguuguuucgaguucuaucacaaaugugauaaugaguguauggaaaguguaagaaacggaacguaugacuacccgcaguauucagaagaagcaagauuaaaaagagaggaaauaaguggaguaaaauuggaaucaauaggaacuuaccaaauacugucaauuuauucaacaguugcgaguucucuagcacuggcaaucaugguggcuggucuaucuuuguggaugugcuccaaugggucguuacaaugcagaauuugcauuuaa

SEQ ID NO: 46002 - RNA, 1695 nt, Artificial Sequence
  derived and/or modified CDS sequence (wt) from hemagglutinin__InfluenzaA__EPI827075
auggagaaaauaguucuucucuuugcaacaaucagccuugucaaaagcgaucauauuugcauugguuaucaugcaaauaacucgacagagcagguugacacaauaauggaaaagaacguuacuguuacacaugcccaagacauacuggaaaagacacacaacgggaagcucugcgaucuaaauggagugaagccucugauuuuaaaagauuguaguguagcaggauggcuccucggaaauccauugugugacgaauucaccaaugugccagaauggucuuacauaguagagaaggccaauccagccaaugaccucuguuacccagggaauuucaacgauuaugaagaauugaaacaccuauugagcaggauaaaccauuuugagaaaauacagaucauccccaaagauucuuggucagaucaugaagccucauugggggugagugcagcauguucauaccagggaaauuccuccuucuucagaaaugugguguggcuuaucaaaaaggacaaugcauacccaacaauaaagaaaggcuacaauaauaccaaccgagaagaucucuugauacugugggggauccaccauccuaaugaugaggcagagcagacaaggcucuaccaaaacccaacuaccuauauuuccauugggacuucaacacuaaaccagagauugguaccaaaaauagccacuagauccaaaauaaacgggcaaagcggcaggauagauuucuucuggacaauuuuaaaaccgaaugacgcaauccacuucgagaguaauggaaauuucauugcuccagaauaugcauacaaaauugucaagaagggagacuccacaaucaugagaagugaaguggaauaugguaacugcaacaccaggugucagacuccaauaggggcgauaaacucuaguaugccauuccacaacauacacccucucaccaucggagaaugucccaaauaugugaaaucaaacaaauuaguccuugcaacugggcucagaaauaguccucaacgagagacgcgaggacuguuuggagcuauagcagguuuuauagagggaggauggcagggaaugguagaugguugguauggguaccaccacagcaaugaacaggggagugguuacgcugcagacaaagaaucuacucaaaaggcgauagacggagucaccaauaaggucaauucgaucauugacaaaaugaacacucaguuugaggcuguaggaagggaauuuaauaacuuagagaggagaauagaaaauuuaaacaagaagauggaagacggauuccuagaugucuggacuuauaaugcugaacuucugguucucauggagaaugagagaacucuagacuuccaugacucaaaugucaagaaccuuuacgauaagguccgacuacagcuuaaggauaaugcaaaagagcugggaaacgguuguuucgaguucuaucacaaauguaauaaugaauguauggaaaguguaagaaacgggacguaugacuacccgcaguauucagaagaagcaagauuaaaaagagaggaaauaaguggaguaaaacuggaaucaauaggaaucuaccaaauacugucaauuuauucaacaguggcgaguucccuagugcuggcaaucaugauggcuggucuaucuuuauggauguguuccaacgggucguuacagugcagaauuugcauuuaa

SEQ ID NO: 46003 - RNA, 1707 nt, Artificial Sequence
  derived and/or modified CDS sequence (wt) from hemagglutinin__InfluenzaA__ABP96850
auggagaaaauagugcuucuucuugcaauagucagucuuguuaaaagugaucaaauuugcauugguuaccaugcaaacaacucgacagaacagguugacacaauaauggaaaagaacgucacuguuacacacgcccaagacauacuggaaaagacacacaacgggaaacucugcgaucuagauggagugaagccucuaauuuuaagagauuguaguguagcuggauggcuccucgggaacccaaugugugacgaauuccucaaugugccggaauggucuuacauaguggagaagaucaauccagccaaugaccucuguuacccaggggauuucaacgacuaugaagaacugaaacaccuauugagcagaauaaaccauuuugagaaaauucagaucauccccaaaaguucuuggucagauuaugaagccucaucaggagugagcucagcauguccauaccagggaagauccuccuuuuuuagaaaugugguauggcuuaucaaaaagaacaaugcauacccaacaauaaagagaaguuacaauaauaccaaccaagaggaucuuuugguacugugggggauucaccauccgaaugaugcggcagagcagauaaggcucuaucaaaacccaacuaccuauauuuccguugggacaucaacacuaaaccagagauugguaccaaaaauagcuacuagaucuaagguaaaugggcaaaguggaaggauggaguucuuuuggacaauuuuaaaaucgaaugaugcaauaaacuuugagaguaauggaaauuucauugcuccagaauaugcauacaaaauugucaagaaaggggacucaacaauuaugaaaagugaguuggaauaugguaacugcaacaccaaaugucaaacuccaauaggggcgauaaacuccaguaugccauuccacaacauccacccucucaccaucggggaaugccccaaauaugugaaaucaaacagauuaguccuugcuacugggcucagaaauagcccucaaggagagagaagaagaagaaagagaggacuauuuggagcuauagcaggguuuauagagggaggauggcagggaaugguagaugguugguauggguaccaccauagcaacgagcaggggaguggguacgcugcagacaaagaauccacucaaaaggcaauagauggagucaccaauaaggucaacucgaucauuaacaaaaugaacacucaguuugaggcuguuggaagggaauuuaauaacuuagaaaggagaauagaaaauuuaaacaagaagauggaagacggauuccuagaugucuggacuuauaaugcugaacuucugguucucauggaaaaugagagaacucuagacuuucaugacucaaaugucaagaaccuuuacgacaaggucagacuacagcuuagggauaaugcaaaggagcuugguaacgguuguuucgaguucuaucacagaugugauaaugaauguauggaaaguguaagaaacggaacguaugacuacccgcaguauucagaagaagcaagauuaaaaagagaggaaauaaguggaguaaaauuggaaucaauaggaauuuaccaaauacugucaauuuauucaacaguggcgagcucccuagcacuggcaaucaugguggcuggucuauuuuuauggaugugcuccaauggaucguuacaaugcagaauuugcauuuaa

SEQ ID NO: 46004 - RNA, 1692 nt, Artificial Sequence
  derived and/or modified CDS sequence (wt) from hemagglutinin__InfluenzaA__EPI827077
auggagaaaauagugcuucuucuugcaauagucaguauuguuaaaagugaucagauuugcauugguuaccaugcaaacaacucgacagagcagguugacacaauaauggaaaagaaugucacuguuacacacgcccaagacauacuggaaaagacacacaacgggaaacucugcaaucuagauggagugaagccucucauuuugagagauuguaguguagcuggauggcuccucgggaacccaaugugcgaugaauuccucaaugugccggaauggucuuacauaguggagaaaaucaauccagccaaugaccucuguuauccagggaauuucaacgacuaugaagaacugaaacaccuauugagcagaauaaaccauuuugagaaaauucagaucauucccaaagauucuuggucagaucaugaagccucgggagugagcucagcaugcccauaccaaggaagauccuccuuuuuuagaaauguuguauggcuuaccaaaaagaacgaugcauacccaacaauaaagaaaaguuacaauaauacuaaccaagaagaucuuuugguacuaugggggauucaccauccaaaugaugcugcagagcagacaaggcuuuaucaaaacccaacuaccuauaucuccguugggacaucaacacuaaaccagagauugguacccaaaauagcuacuagaucuaagguaaacgggcaaaguggaaggauggaguucuuuuggacaauuuuaaaaucgaaugaugcaauaaacuuugagagcaauggaaacuucauugcuccagaaaaugcauacaaaauugucaagaaaggagauucaacaauuaugaaaagugaguuggaauauaguaacugcaacaccaagugucagacuccaauaggggcgauaaacuccaguaugccauuccacaacauccacccucucaccaucggggaaugccccaaauaugugaaaucaaacagauuaguccuugcuacugggcucaggaauagcccucaacgagagacgcgaggacuauucggagccauagcaggcuuuauagagggaggauggcagggaaugguagaugguugguauggguaccaccauagcaacgagcaggggaguggguacgcugcagacaaagaauccacucaaagggcuauagauggagucaccaauaaggucaauucgaucauugacaaaaugaacacucaguuugaggcuguuggaagggaauuuaauaacuuagaaaggagaauagaaaauuuaaacaagaagauggaagacggauuccuagaugucuggacuuauaaugcugaacuucugguucucauggaaaaugagagaacucuagacuuucaugacucaaaugucaagaaucuuuaugacaagguccgacuacagcuuagggauaaugcaaaggagcuugguaacgguuguuucgaguucuaucacagaugugauaaugaauguauggaaaguguaagaaacggaacguaugacuacccucaauauucagaagaagcaagauuaaaaagagaggaaauaaguggaguaaaauuggagucaauaggaacuuaccaaauacugucaauuuauucaacaguggcgagcucccuagcacuggcaaucaugguggcuggucuaucuuuauggaugugcuccaauggaucgcuacaaugcagaauuugcauuuaa

SEQ ID NO: 46005 - RNA, 1704 nt, Artificial Sequence
  derived and/or modified CDS sequence (wt) from hemagglutinin__InfluenzaA__EPI594523
auggagaaaauaauacuucuucuugcaauaaucggucuuguuaagagugaucagauuugcguuggcuaccaugcaaacaacucgacagagcggguugacacaauaauggaaaagaacguuacuguuacacaugcucaagacauacuggagaagacacacaacgggaagcucugcaaccucaauggagugaagccuuuaauuuuggaagauuguaguguagcuggauggcuccucggaaacccaaugugugacaaauuucucaaugugucagaauggucuuauauaguggagaaggccgguccagccaauggccuuuguuacccaggggauuucaaugauuaugaagaacugaaacaccuauugagcagaauaaaccauuuugaaaaaauugagaucauccccaaaaaucauugguccaaucauaauaccucaggggugagcucagcuuguuccuaucuggagaaucccucuuuuuucagaaauguaguauggcuuaccaaaaagaacaauacauacccaacaauaaaagugaacuacaccaaugccaaccaaaaagaucuuuugguacuguggggaauccaccaucccaauaaugaggcagagcagaaaaugaucuaucaaaacucaaacacuuauguuuccguuggaacaucaacauuaaaccagagacugguacccaaaauagcuacuagauccaaagugaacgggcaaaguggaagaauagacuucuucuggacaauuuuaaagccgaaugauacuaucaauuucgauaguaauggaaauuucauugccccaaaauaugcauacaaaauugucaagaaaggggacucagcaauuaugaaaagugaauugaaauaugauaacugcaacaccaaaugccaaacuccaauaggggcgauaaauucuaguaugccauuccacaacauacauccucucaccaucggggaaugccccaaauaugugaaaucaaacagauuaguccucgcaacuggacucagaaaugccccucaaauagagggaagaagaagaaaaagaggacuauuuggagccauagcaggauuuauagagggaggauggcagggaaugguagauggcugguauggguaccaccauaguaaugagcagggaaguggauacgcugcagacaaggaauccacucaaaaagcaguagauggaaucaccaauaagaucaacucgaucauugacaaaaugaacaaucaguuugaggccguuggaagggaauuuaauaacuuagagaggagaauugaaaauuuaaauaaaaagauggaggacggauuccuagaugucuggacuuauaacgcugaacuucugguucucauggaaaaugagagaacucuagacuuccaugacucaaaugucaagaaucuguaugaaaagguccgacuacagcuuagggauaaugcaaaggagcuggguaacgguugcuucgaguucuaccacaaaugugauaacgaauguauggaaaguguaaaaaacgggacauaugacuacccgcaauauucagaagaagcaagacuaaacagagaggaaauaaguggaguaaaauuggaaucaacuguaacuuaucaaauacugucaauuuauucaacaguggcgaguucccuaguauuggcaaucaugguggcuggucuaucuuuauggaugugcuccaauggaucguuacaaugcagaauuugcauuuga

SEQ ID NO: 46006 - RNA, 1707 nt, Artificial Sequence
  derived and/or modified CDS sequence (wt) from hemagglutinin__InfluenzaA__AAD37782
auggagagaauagugcuucuucuugcaauagucagucuugucaaaagugaucagauuugcauugguuaccaugcaaacaacucgacagagcagguugacacaauaauggaaaagaacguuacuguuacacaugcccaagacauacuggaaaagacacacaaugggaagcucugcgaucuaaauggagugaagccucucauuuugagagauuguaguguagcuggauggcuccucggaaacccuaugugugacgaauucaucaaugugccggaauggucuuacauaguggagaaggccaguccagccaaugaccucuguuacccaggggauuucaacgacuaugaagaacugaaacaccuauugagcagaacaaaccauuuugagaagauucagaucauccccccaaguucuugguccaaucaugaugccucaucaggggugagcucagcauguccauaccaugggagguccuccuuuuucagaaaugugguauggcuuaucaaaaagaacagugcauacccaacaauaaagaggagcuacaauaauaccaaccaagaagaucuuuuaguacugugggggauucaccauccuaaugaugcggcagagcagacaaagcuauaucaaaacccaaccacuuacauuuccguuggaacaucaacacugaaccagagauugguuccagaaauagcuacuagacccaaaguaaacgggcaaaguggaagaauggaguucuucuggacaauuuuaaagccgaaugaugccaucaauuucgagaguaauggaaauuucauugcuccagaauaugcauacaaaauugucaagaaaggggacucagcaauuaugaaaagugaauuggaauaugguaacugcaacaccaagugucaaacuccaaugggggcgauaaacucuaguaugccauuccacaacauacacccccucaccaucggggaaugccccaaauaugugaaaucaaacagauuaguccuugcgacuggacucagaaauaccccucaaagagagagaagaagaaaaaagagaggacuauuuggagcuauagcagguuuuauagagggaggauggcagggaaugguaaaugguugguauggguaccaccauagcaaugagcaggggaguggauacgcugcagacaaagaauccacucaaaaggcaauagauggagucaccaauaaggucaacucgaucauugacaaaaugaacacucaguuugaggccguuggaagggaauuuaauaacuuggaaaggaggauagagaauuuaaacaagcagauggaagacggauuccuagaugucuggacuuauaaugcugaacuucugguucucauggaaaaugagagaacucuagacuuucaugacucaaaugucaagcaccuuuaugacaagguccgacuacagcuuagggauaaugcaaaggagcuggguaaugguuguuucgaguucuaucacaaaugugauaaugaauguauggaaaguguaaaaaacggaacguaugacuacccgcaguauucagaagaagcaagacuaaacagagaggaaauaaguggaguaaaauuggaaucaaugggaacuuaccaaauacugucaauuuauucaacaguggcgaguucccuagcacuggcaaucaugguagcuggucuaucuuuauggaugugcuccaauggaucguuacaaugcagaauuugcauuuaa

SEQ ID NO: 46007 - RNA, 1707 nt, Artificial Sequence
  derived and/or modified CDS sequence (wt) from hemagglutinin__InfluenzaA__AAD51927
auggagaaaauagugcuucuucuugcaauagucagucuugucaaaagugaucagauuugcauugguuaccaugcaaacaacucgacagagcagguugacacaauaauggaaaagaacguuacuguuacacaugcccaagacauacuggaaaagacacacaaugggaagcucugcgaucuaaauggagugaagccucucauuuugagagauuguaguguagcuggauggcuccucggaaacccuaugugugacgaauucaucaaugugccggaauggucuuacauaguggagaaggccaguccagccaaugaccucuguuacccaggggauuucaacgacuaugaagaacugaaacaccuauugagcagaacaaaccauuuugagaaaauucagaucauccccaaaaguucuugguccaaucaugaugccucaucaggggugagcucagcauguccauaccaugggagguccuccuuuuucagaaaugugguauggcuuaucaaaaagaacagugcauacccaacaauaaagaggagcuacaauaauaccaaccaagaagaucuuuuaguacugugggggauucaccauccuaaugaugcggcagagcagacaaagcucuaucaaaacccaaccacuuacauuuccguuggaacaucaacacugaaccagagauugguuccagaaauagcuacuagacccaaaguaaacgggcaaaguggaagaauggaguucuucuggacaauuuuaaagccgaaugaugccaucaauuucgagaguaauggaaauuucauugcuccagaauaugcauacaaaauugucaagaaaggggacucagcaauuaugaaaagugaauuggaauaugguaacugcaacaccaagugucaaacuccaaugggggcgauaaacucuaguaugccauuccacaacauacacccccucaccaucggggaaugccccaaauaugugaaaucaaacagauuaguccuugcgacuggacucagaaauaccccucagagagagagaagaagaaaaaagagaggacuauuuggagcuauagcagguuuuauagagggaggauggcagggaaugguagaugguugguauggguaccaccauagcaaugagcaggggaguggauacgcugcagacaaagaauccacucaaaaggcaauagauggagucaccaauaaggucaacucgaucauugacaaaaugaacacucaguuugaggccguuggaagggaauuuaauaacuuggaaaggaggauagagaauuuaaacaagcagauggaagacggauuccuagaugucuggacuuauaaugcugaacuucugguucucauggaaaaugagagaacucuagacuuucaugacucaaaugucaagaaccuuuaugacaagguccgacuacagcuuagggauaaugcaaaggagcuggguaaugguuguuucgaguucuaucacaaaugugauaaugaauguauggaaaguguaaaaaacggaacguaugacuacccgcaguauucagaagaagcaagacuaaacagagaggaaauaaguggaguaaaauuggaaucaaugggaacuuaccaaauacugucaauuuauucaacaguggcgaguucccuagcacuggcaaucaugguagcuggucuaucuuuauggaugugcuccaauggaucguuacaaugcagaauuugcauuuaa

SEQ ID NO: 46008 - RNA, 1704 nt, Artificial Sequence; identical to SEQ ID NO: 39729
  derived and/or modified CDS sequence (wt) from hemagglutinin__InfluenzaA__AEO89181

SEQ ID NO: 46009 - RNA, 1707 nt, Artificial Sequence; identical to SEQ ID NO: 41183
  derived and/or modified CDS sequence (wt) from hemagglutinin__InfluenzaA__AFM78567

SEQ ID NO: 46010 - RNA, 1707 nt, Artificial Sequence
  derived and/or modified CDS sequence (wt) from hemagglutinin__InfluenzaA__ACR48872
auggagaaaauagugcuucuucuugcaauagucagucuuguuaaaagugaucagauuugcauugguuaccaugcaaacaauucaacagagcagguugacacaaucauggaaaagaacguuacuguuacacaugcccaagacauacuggaaaagacacacaacgggaagcucugcgaucuagauggagugaagccucuaauuuuaagagauuguaguguagcuggauggcuccucgggaacccaaugugugacgaauucaucaauguaccggaauggucuuacauaguggagaaggccaauccaaccaaugaccucuguuacccagggaguuucaacgacuaugaagaacugaaacaccuauugagcagaauaaaccauuuugagaaaauucaaaucauccccaaaaguucuugguccgaucaugaagccucaucaggagugagcucagcauguccauaccugggaagucccuccuuuuuuagaaaugugguauggcuuaucaaaaagaacaguacauacccaacaauaaagaaaagcuacaauaauaccaaccaagaagaucuuuugguacuguggggaauucaccauccuaaugaugcggcagagcagacaaugcuauaucaaaacccaaccaccuauauuuccauugggacaucaacacuaaaccagagauugguaccaaaaauagcuacuagauccaaaguaaacgggcaaaguggaaggauggaguucuucuggacaauuuuaaaaccuaaugaugcaaucaacuucgagaguaauggaaauuucauugcuccagaauaugcauacaaaauugucaagaaaggggacucagcaauuaugaaaagugaauuggaauaugguaacugcaacaccaagugucaaacuccaaugggggcgauaaacucuaguaugccauuccacaacauacacccucucaccaucggggaaugccccaaauaugugaaaucaaacagauuaguccuugcaacagggcucagaaauagcccucaaagagagagcagaagaaaaaagagaggacuauuuggagcuauagcagguuuuauagagggaggauggcagggaaugguagaugguugguauggguaccaccauagcaaugagcaggggaguggguacgcugcagacaaagaauccacucaaaaggcaauagauggagucaccaauaaggucaacucaaucauugacaaaaugaacacucaguuugaggccguuggaagggaauuuaauaacuuagaaaggagaauagagaauuuaaacaagaagauggaagacggguuucuagaugucuggacuuauaaugccgaacuucugguucucauggaaaaugagagaacucuagacuuucaugacucaaauguuaagaaccucuacgacaagguccgacuacagcuuagggauaaugcaaaggagcuggguaacgguuguuucgaguucuaucacaaaugugauaaugaauguauggaaaguauaagaaacggaacguacaacuauccgcaguauucagaagaagcaagauuaaaaagagaggaaauaagugggguaaaauuggaaucaauaggaacuuaccaaauacugucaauuuauucaacaguggcgaguucccuagcacuggcaaucaugauggcuggucuaucuuuauggaugugcuccaauggaucguuacaaugcagaauuugcauuuaa

SEQ ID NO: 46011 - RNA, 1707 nt, Artificial Sequence
  derived and/or modified CDS sequence (wt) from hemagglutinin__InfluenzaA__ABW06108
auggagaaaauagugcuucuucuugcaauagucagucuuguuaaaagugaucagauuugcauugguuaccaugcaaacaauucaacagagcagguugacacaaucauggaaaagaacguuacuguuacacaugcccaagacauacuggaaaagacacacaacgggaagcucugcgaucuagauggagugaagccucuaauuuuaagagauuguaguguagcuggauggcuccucgggaacccaaugugugacgaauucaucaauguaccggaauggucuuacauaguggagaaggccaauccaaccaaugaccucuguuacccagggaguuucaacgacuaugaagaacugaaacaccuauugagcagaauaaaccauuuugagaaaauucaaaucauccccaaaaguucuugguccgaucaugaagccucaucaggagugagcucagcauguccauaccugggaagucccuccuuuuuuagaaaugugguauggcuuaucaaaaagaacaguacauacccaacaauaaagaaaagcuacaauaauaccaaccaagaagaucuuuugguacuguggggaauucaccauccuaaugaugcggcagagcagacaaggcuauaucaaaacccaaccaccuauauuuccauugggacaucaacacuaaaccagagauugguaccaaaaauagcuacuagauccaaaguaaacgggcaaaguggaaggauggaguucuucuggacaauuuuaaaaccuaaugaugcaaucaacuucgagaguaauggaaauuucauugcuccagaauaugcauacaaaauugucaagaaaggggacucagcaauuaugaaaagugaauuggaauaugguaacugcaacaccaagugucaaacuccaaugggggcgauaaacucuaguaugccauuccacaacauacacccucucaccaucggggaaugccccaaauaugugaaaucaaacagauuaguccuugcaacagggcucagaaauagcccucaaagagagagcagaagaaaaaagagaggacuauuuggagcuauagcagguuuuauagagggaggauggcagggaaugguagaugguugguauggguaccaccauagcaaugagcaggggaguggguacgcugcagacaaagaauccacucaaaaggcaauagauggagucaccaauaaggucaacucaaucauugacaaaaugaacacucaguuugaggccguuggaagggaauuuaauaacuuagaaaggagaauagagaauuuaaacaagaagauggaagacggguuucuagaugucuggacuuauaaugccgaacuucugguucucauggaaaaugagagaacucuagacuuucaugacucaaauguuaagaaccucuacgacaagguccgacuacagcuuagggauaaugcaaaggagcuggguaacgguuguuucgaguucuaucacaaaugugauaaugaauguauggaaaguauaagaaacggaacguacaacuauccgcaguauucagaagaagcaagauuaaaaagagaggaaauaagugggguaaaauuggaaucaauaggaacuuaccaaauacugucaauuuauucaacaguggcgaguucccuagcacuggcaaucaugauggcuggucuaucuuuauggaugugcuccaauggaucguuacaaugcagaauuugcauuuaa

SEQ ID NO: 46012 - RNA, 1707 nt, Artificial Sequence
  derived and/or modified CDS sequence (wt) from hemagglutinin__InfluenzaA__EPI341633
auggagaaaauaacgcuucuucuuucaauagucagucuuguaaaaagcgaucagauuugcauugguuaccaugcaaacaauucaacggagcagguugacacaaucauggaaaagaacguuacuguuacacaugcccaagacauacuggagaagacacacaacgggaagcucugcgaucuagauggagugaagccucuaauuuuaaaagauugcaguguagcuggauggcuccucgggaauccaaugugugacgaauucaucaauguaccagaguggucuuacauaguggagaaggccaauccaaccaaugaccucuguuacccaggaaguuucaacgacuaugaagaacugaaacaucuauugagcagaauaaaccauuuugagaaaauucagaucauccccaaaaguucuugguccgaucaugaagcaucaucaggagugagcucagcauguccauaccugggaagucccuccuuuuucagaaacgugguauggcuuaucaaaaagaacaguacauacccaacaauaaagaaaaccuacaacaauaccaaccaagaagaucuuuugauacuguggggaauucaccauccuaauaauggggcagagcagacaaugcuauaucaaaacccaaccaccuauauuuccauugggacaucaacacuaaaccagagauugguaccaaaaauagcuacuagauccaaaguaaacgggcaaaguggaagaauggaguuuuuuuggacaauuuuaaaaccaaaugaugcaaucaacuucgagaguaauggaaacuucauugcuccagaauaugcauacaaaauugucaagaaaggggacucagcaauuaugaaaagugaauuggaauaugguaacugcaacaccaagugucaaaccccaaugggagcgauaaacucuaguaugccauuccacaacauacacccuaucaccauuggggaaugccccaaauaugugaaaucaaacagacuagucuuagcaacagggcucagaaacagcccucaaagagagagcagaaggaaaaagagaggucuauuuggagcuauagcagguuuuauagagggaggauggcagggaaugguagaugguugguauggguaccaccauagcaaugagcaggggaguggauacgcugcagacaaagaaucuacucaaaaggcaauagauggagucaccaauaaggucaacucaauuauugacaaaaugaacacucaguuugaggcugucggaagggaauuuaguaacuuagaaaggagaauagagaauuuaaacaagaagauggaagacggguuucuagauguuuggacuuauaaugcagaacuucugguucucauggaaaaugagagaacucuagacuuucaugacucaaaugucaagaaccucuaugacaagguccgacuacagcucagggauaaugcaaaggagcuggguaacgguuguuucgaguucuaucacaaaugugauaaugaauguauggaaaguauaaggaacggaacauacaacuauccgcaauauucagaagaagcaagacuaaaaagagaggaaauaaguggggugaaauuggaaucaauaggaacuuaccaaauacugucaauuuacucaacaguggcgaguucccuagcacuggcaaucaugauagcuggucuaucuuuauggaugugcuccaauggaucgcuacaaugcagaauuugcauuuaa

SEQ ID NO: 46013 - RNA, 1707 nt, Artificial Sequence
  derived and/or modified CDS sequence (wt) from hemagglutinin__InfluenzaA__ABD95991
auggagaaaauaaugcuucuucuugcaauagucagucuuguuaaaagugaucagauuugcauugguuaccaugcaaacaacucgacagagcagguugacacaauaauggaaaagaacgucacuguuacacacgcccaagacauacuggaaaagacacacaacgggaaacucugcgaucuagauggagugaagccucuaauuuuaagagauuguaguguagcuggauggcuccucgggaacccaaugugugacgaauuccucaauguaccggaauggucuuacauaguggagaagaucaauccagccaaugaccucuguuacccagggaauuucaacgacuaugaagaacugaaacaccuauugagcagaauaaaccauuuugagaaaauucagaucauccccaaaaguucuuggucagaucaugaagccucaucaggggugagcucagcauguccauaccagggaagguccuccuuuuuuagaaaugugguauggcuuaucaaaaaggacaaugcauacccaacaauaaagagaaguuacaauaauaccaaccaagaagaucuuuugguacugugggggauucaccauccaaaugaugcggcagagcagacaaggcucuaucaaaacccaaccaccuauauuuccguugggacaucaacauuaaaccagagauugguaccaaaaauagcuacuagauccaagguaaacgggcaaaguggaaggauggaguucuuuuggacaauuuuaaaaccgaaugaugcaauaaacuuugagaguaauggaaauuucauugcuccagaaaaugcauacaaaauugucaagaaaggggacucaacaauuaugaaaagugaauuggaauaugguaacugcaacaccaagugucaaacuccaauaggggcgauaaacucuaguaugccauuccacaacauccacccucucaccaucggggaaugccccaaauaugugaaaucaaacagauuaguucuugcgacugggcucagaaauagcccucaaggagagagaagaagaaaaaagagaggacuauuuggagcuauagcagguuuuauagagggaggauggcagggaaugguagaugguugguauggguaccaccauagcaacgagcaggggaguggguacgcugcagauaaagaauccacucaaaaggcaauagauggagucaccaauaaggucaacucgaucauugacaaaaugaacacucaguuugaggcuguuggaagggaauuuaauaacuuagaaaggagaauagaaaauuuaaacaagaagauggaagacggauuccuagaugucuggacuuauaaugcugaacuucugguucucauggaaaaugagagaacucuagacuuucaugauucaaaugucaagaaccuuuacgacaagguccgacuacagcuuagggauaaugcaaaggagcuugguaacgguuguuuugaguucuaucacagaugugauaaugaauguauggaaaguguaagaaacggaacguaugacuacccgcaguauucagaagaagcaagauuaaaaagagaggaaauaaguggaguaaaauuggaaucaauaggaacuuaccaaauacugucaauuuauucaacaguggcgagcucccuagcacuggcaaucaugguggcuggucuaucuuuauggaugugcuccaauggaucguuacaaugcagaauuugcauuuaa

SEQ ID NO: 46014 - RNA, 1707 nt, Artificial Sequence
  derived and/or modified CDS sequence (wt) from hemagglutinin__InfluenzaA__AGN69453
auggagaaaauagugcuucuucuugcaauagucagccuuguuaaaagugaucagauuugcauugguuaccaugcaaacaacucgacagagcagguugacacaauaauggaaaagaacgucacuguuacacacgcccaagacauacuggaaaagacacacaacgggaaacucugcgaucuagauggagugaagccucuaauuuuaagagauuguaguguagcuggauggcuccucgggaacccaaugugugacgaauuccucaaugugccggaauggucuuacauaguggagaagaucaauccagccaaugaccucuguuacccagggaauuucaaugacuaugaagaacugaaacaccuauugagcagaauaaaccauuuugagaaaauucagaucauccccaaaaguucuuggucagaucaugaagccucagcaggggugaguucagcauguccauaccagggaauguccuccuuuuuuagaaaugugguauggcuuaucaaaaaggacaaugcauacccaacaauaaagagaaguuacaauaauaccaaccaagaagaucuuuugguauugugggggauucaccauccaaaugaugcggcagagcagacaaagcucuaucaaaacucaacuaccuauauuuccguugggacaucaacacuaaaccagagauugguaccaaaaauagccacuagaucuaagguaaacgggcaaaguggaaggauagaguucuuuuggacaauuuuaaaaccgaaugauacaauaaacuuugagaguaauggaaauuucauugcuccagaaaaugcauacaaaauugucaagaaaggggacucaacaauuaugaaaagugaguuggaauaugguaacugcaacaccaagugucaaacuccaauaggggcgauaaacucuaguaugccauuccacaacauccacccucucaccaucggggaaugccccaaauaugugaaaucaagcagauuaguccuugcuacugggcucagaaauagcccucaaggagagagaagaagaaaaaagagaggacuauuuggagcuauagcagguuuuauagagggaggauggcagggaaugguagaugguugguauggguaccaccauagcaacgagcaggggaguggguacgcugcagacaaagaauccacucaaaaggcaauagauggagucaccaauaaggucaacucgaucauugacaaaaugaacacucaguuugaggcuguuggaagggaauuuaauaacuuagaaaggagaauagaaaauuuaaacaagaagauggaagacggauuccuagaugucuggacuuauaaugcugaacuucugguucucauggaaaaugagagaacucuagacuuucaugacucaaaugucaagaaccuuuacgacaagguccgacuacagcuuagggauaaugcaaaggagcuugguaacgguuguuucgaguucuaucacagaugugauaaugaauguauggaaaguguaagaaacggaacguaugacuacccgcaguauucagaagaagcaagauuaaaaagagaggaaauaaguggaguaaaauuggaaucaauaggaacuuaccaaauacugucaauuuauucaacaguggcgagcucccuagcacuggcaaucaugguggcuggucuaucuuuauggaugugcuccaauggaucguuacaaugcagaauuugcauuuaa

SEQ ID NO: 46015 - RNA, 1707 nt, Artificial Sequence
  derived and/or modified CDS sequence (wt) from hemagglutinin__InfluenzaA__AGN69452
auggagaaaauagugcuucuucuugcaauagucagccuuguuaaaagugaucagauuugcauugguuaccaugcaaacaacucgacagagcagguugacacaauaauggaaaagaacgucacuguuacacacgcccaagacauacuggaaaagacacacaacgggaaacucugcgaucuagauggagugaagccucuaauuuuaagagauuguaguguagcuggauggcuccucgggaacccaaugugugacgaauuccucaaugugccggaauggucuuacauaguggagaagaucaauccagccaaugaccucuguuacccagggaauuucaacgacuaugaagaacugaaacaccuauugagcagaauaaaccauuuugagaaaauucagaucauccccaaaaguucuuggucagaucaugaagccucagcaggggugagcucagcauguccauaccagggaagguccuccuuuuuuagaaaugugguauggcuuaucaaaaaggacaaugcauacccaacaauaaagagaaguuacaauaauaccaaccaagaagaucuuuugguauugugggggauucaccauccaaaugaugcggcagagcagacaaggcucuaucaaaacucaacuaccuauauuuccguugggacaucaacacuaaaccagagauugguaccaaaaauagccacuagaucuaagguaaacgggcaaaguggaaggauagaguucuuuuggacaauuuuaaaaccgaaugauacaauaaacuuugagaguaauggaaauuucauugcuccagaaaaugcauacaaaauugucaagaaaggggacucaacaauuaugaaaagugaguuggaauaugguaacugcaacaccaagugucaaacuccaauaggggcgauaaacucuaguaugccauuccacaacauccacccucucaccaucggggaaugccccaaauaugugaaaucaagcagauuaguccuugcuacugggcucagaaauagcccucaaggagagagaagaagaaaaaagagaggacuauuuggagcuauagcagguuuuauagagggaggauggcagggaaugguagaugguugguauggguaccaccauagcaacgagcaggggaguggguacgcugcagacaaagaauccacucaaaaggcaauagauggagucaccaauaaggucaacucgaucauugacaaaaugaacacucaguuugaggcuguuggaagggaauuuaauaacuuagaaaggagaauagaaaauuuaaacaagaagauggaagacggauuccuagaugucuggacuuauaaugcugaacuucugguucucauggaaaaugagagaacucuagacuuucaugacucaaaugucaagaaccuuuacgacaagguccgacuacagcuuagggauaaugcaaaggagcuugguaacgguuguuucgaguucuaucacagaugugauaaugaauguauggaaaguguaagaaacggaacguaugacuacccgcaguauucagaagaagcaagauuaaaaagagaggaaauaaguggaguaaaauuggaaucaauaggaacuuaccaaauacugucaauuuauucaacaguggcgagcucccuagcacuggcaaucaugguggcuggucuaucuuuauggaugugcuccaauggaucguuacaaugcagaauuugcauuuaa

SEQ ID NO: 46016 - RNA, 1707 nt, Artificial Sequence
  derived and/or modified CDS sequence (wt) from hemagglutinin__InfluenzaA__ABD73284
auggagaaaauagugcuucuucuugcaauagucagccuuguuaaaagugaucagauuugcauugguuaccaugcaaacaacucgacagagcagguugacacaauaauggaaaagaacgucacuguuacacacgcccaagacauacuggaaaagacacacaacgggaaacucugcgaucuagauggagugaagccucuaauuuuaagagauuguaguguagcuggauggcuccucgggaacccaaugugugacgaauuccucaaugugccggaauggucuuacauaguggagaagaucaauccagccaaugaccucuguuacccagggaauuucaacgacuaugaagaacugaaacaccuauugagcagaauaaaccauuuugagaaaauucagaucauccccaaaaguucuuggucagaucaugaagccucagcaggggugagcucagcauguccauaccagggaagguccuccuuuuuuagaaaugugguauggcuuaucaaaaaggacaaugcauacccaacaauaaagagaaguuacaauaauaccaaccaagaagaucuuuugguauugugggggauucaccauccaaaugaugcggcagagcagacaaggcucuaucaaaacccaacuaccuauauuuccguugggacaucaacacuaaaccagagauugguaccaaaaauagccacuagaucuaagguaaacgggcaaaguggaaggauggaguucuuuuggacaauuuuaaaaccgaaugaugcaauaaacuuugagaguaauggaaauuucauugcuccagaaaaugcauacaaaauugucaagaaaggggacucaacaauuaugaaaagugaguuggaauaugguaacugcaacaccaagugucaaacuccaauaggggcgauaaacucuaguaugccauuccacaacauccacccucucaccaucggggaaugccccaaauaugugaaaucaagcagauuaguccuugcuacugggcucagaaauagcccucaaggagagagaagaagaaaaaagagaggacuauuuggagcuauagcagguuuuauagagggaggauggcagggaaugguagaugguugguauggguaccaccauagcaacgagcaggggaguggguacgcugcagacaaagaauccacucaaaaggcaauagauggagucaccaauaaggucaacucgaucauugacaaaaugaacacucaguuugaggcuguuggaagggaauuuaauaacuuagaaaggagaauagaaaauuuaaacaagaagauggaagacggauuccuagaugucuggacuuauaaugcugaacuucugguucucauggaaaaugagagaacucuagacuuucaugacucaaaugucaagaaccuuuacgacaagguccgacuacagcuuagggauaaugcaaaggagcuugguaacgguuguuucgaguucuaucacagaugugauaaugaauguauggaaaguguaagaaacggaacguaugacuacccgcaguauucagaagaagcaagauuaaaaagagaggaaauaaguggaguaaaauuggaaucaauaggaacuuaccaaauacugucaauuuauucaacaguggcgagcucccuagcacuggcaaucaugguggcuggucuaucuuuauggaugugcuccaauggaucguuacaaugcagaauuugcauuuaa

SEQ ID NO: 46017 - RNA, 1695 nt, Artificial Sequence
  derived and/or modified CDS sequence (wt) from hemagglutinin__InfluenzaA__ABF93440
auggagaaaauagugcuucuucuugcaauagucagucuuguuaaaagugaucagauuugcauugguuaccaugcaaacaacucgacagagcagguugacacaauaauggaaaagaacgucacuguuacacacgcgcaagacauacuggaaaagacacacaacgggaaacucugcgaucuagauggagugaagccucuaauuuuaagagauuguaguguagcuggauggcuccucgggaacccaaugugugacgaauuccucaaugugccggaauggucuuacauaguggagaagaucaauccagccaaugaccucuguuacccagggaauuucaacgacuaugaagaacugaaacaccuauugagcagaauaaaccauuuugagaaaauucagaucauccccaaaaguucuuggucagaucaugaagccucaucaggggugagcucagcauguccauaccagggaagguccuccuuuuuuagaaaugugguauggcuuaucaaaaaggacaaugcauacccaacaauaaagagaaguuacaauaauaccaaccaagaagaucuuuugguacugugggggauucaccauccaaaugaugcggcagagcagacaaggcucuaucaaaacccaaccaccuauauuuccguugggacaucaacacuaaaccagagacugguaccaaaaauagcuacuagauccaagguaaacgggcaaaguggaaggauggaguucuuuuggacaauuuuaaaaccgaaugaugcaauaaacuuugagaguaauggaaauuucauugcuccagaaaaugcauacaaaauugucaagaaaggggacucaacaauuaugaaaagugaauuggaauaugguaacugcaacaccaagugucaaacuccaauaggggcgauaaacucuaguaugccauuccacaacauccacccucucaccaucggggaaugccccaaauaugugaaaucaaacagauuaguccuugcgacugggcucagaaauagcccucaaauugaaacuagaggauuauuuggagcuauagcagguuuuauagagggaggauggcagggaaugguagaugguugguauggguaccaccauagcaacgagcaggggaguggguacgcugcagacaaagaauccacucaaaaggcaauagauggagucaccaauaaggucaacucgaucauugacaaaaugaacacucaguuugaggcuguuggaagggaauuuaauaacuuagaaaggagaauagaaaauuuaaacaagaagauggaagacggauuccuagaugucuggacuuauaaugcugaacuucugguucucauggaaaaugagagaacucuagacuuucaugacucaaaugucaagaaccuuuacgacaagguccgacuacagcuuagggauaaugcaaaggagcuugguaacgguuguuucgaguucuaucauagaugugauaaugaauguauggaaaguguaagaaacggaacguaugacuacccgcaguauucagaagaagcaagauuaaaaagagaggaaauaaguggaguaaaauuggaaucaauaggaacuuaccaaauacugucaauuuauucaacaguggcgagcucccuagcacuggcaaucaugguggcuggucuaucuuuauggaugugcuccaauggaucguuacaaugcagaauuugcauuuaa

SEQ ID NO: 46018 - RNA, 1701 nt, Artificial Sequence
  derived and/or modified CDS sequence (wt) from hemagglutinin__InfluenzaA__AKC45369
auggagaaaauagugcuucuucuugcagugguuagccuuguuaaaagugaucagauuugcauugguuaccaugcaaacaacucgacagagcagguugacacgauaauggaaaaaaacgucacuguuacacaugcccaagacauacuggaaaagacacacaacgggaggcucugcgaucugaauggagugaaaccucugauuuugaaggauuguaguguagcuggauggcuucuuggaaacccaaugugcgacgaguucaucagagugccggaauggucuuacauaguggagagggcuaacccagccaaugaccucuguuacccagggaaccucaaugacuaugaagaacugaaacaccuauugagcagaauaaaucauuuugagaagacucugaucauccccaagaguucuuggcccaaucauacaucaucaggggugagcgcagcauguccauaccagggaacgcccuccuuuuucagaaaugugguauggcuuaccaagaagaacgaugcauacccaacaauaaagaugagcuacaauaauaccaauagggaagaucuuuugauacugugggggauucaucauuccaacaaugcagcagagcagacaaaucucuauaaaaacccaaccaccuauguuuccguugggacaucaacauuaaaccagagauuggugccaaaaauagcuacuagaucccaaguaaacgggcaacguggaagaauggauuucuucuggacaauuuuaaaaccgaaugaugcaauccacuucgagaguaauggaaauuuuauugcuccagaauaugcauacaaaauugucaagaaaggggacucaacaauuaugaaaagugaaauggaauauggccacugcaacaccaaaugucaaacuccaauaggggcgauaaacucuaguaugccauuccacaauauacauccucucacuaucggggagugccccaaauacgugaaaucaaacaaauuaguccuugcgacugggcucagaaauaguccucuaagagaaagaagaagaaaaagaggacuauuuggagcuauagcaggguuuauagagggaggauggcaaggaaugguagaugguugguauggguaccaccauagcaaugaacaggggaguggguacgcugcagacagagaauccacccaaaaggcaauagauggaguuaccaauaaggucaacucgaucauugacaaaaugaacacucaauuugaggccguuggaagggaauuuaauaacuuagaacggagaauagagaauuuaaauaagaaaauggaagacggauuccuagaugucuggacuuauaaugcugaacuucuaguucucauggaaaaugagagaacucuagauuuccaugacucaaaugucaagaaccuuuaugacaaaguccgacugcagcuuagggauaaugcaaaggagcuggguaaugguuguuucgaguucuaucacaaaugugauaaugaauguauggaaaguguaagaaaugggacguaugacuacccccaguauucagaagaagcaagauuaaaaagggaagaaauaagcggagugaaauuggaaucaauaggaacuuaccaaauacugucaauuuauucaacaguggcgaguucccuagcacuggcaaucauuguggcuggucuaucuuuauggaugugcuccaaugggucguuacaaugcagaauuugcauuuaa

SEQ ID NO: 46019 - RNA, 1704 nt, Artificial Sequence; identical to SEQ ID NO: 44970
  derived and/or modified CDS sequence (wt) from hemagglutinin__InfluenzaA__AJS18479

SEQ ID NO: 46020 - RNA, 1704 nt, Artificial Sequence
  derived and/or modified CDS sequence (wt) from hemagglutinin__InfluenzaA__EPI691378
auggagaaaauagugcuucuucuugcagugguuagccuuguuaaaagugaucagauuugcauugguuaccaugcaaacaacucgacagagcagguugacacgauaauggaaaaaaacgucacuguuacacaugcccaagacauacuggaaaagacacacaacgggaggcucugcgaucugaauggagugaaaccucugauuuuaaaggauuguaguguagcuggauggcuucuuggaaacccaaugugcgacgaguucaucagagugccggaauggucuuacauaguggagagggcuaacccagccaaugaccucuguuacccagggaaccucaaugacuaugaagaacugaaacaccuauugagcagaauaaaucauuuugagaagacucugaucauccccaagaguucuuggcccaaucaugaaacaucauuaggggugagcgcagcauguccauaccagggagugcccuccuuuuucagaaaugugguauggcuuaccaagaagaacgaugcauacccaacaauaaagaugagcuacaauaauaccaauagggaagaucuuuugauacugugggggauucaucauuccaacaaugcagcagagcagacaaaucucuauaaaaacccaaccaccuauguuuccguugggacaucaacauuaaaccagagauuggugccaaaaauagcuacuagaucccaaguaaacgggcaacguggaagaauggauuucuucuggacaauuuuaaaaccgaaugaugcaauccacuucgagaguaauggaaauuuuauugcuccagaauaugcauacaaaauagucaagaaaggggacucaacaauuaugaaaagugaaauggaauauggccacugcaacaccaaaugucaaacuccaauaggggcgauaaacucuaguaugccauuccacaauauacacccucucaccaucggggagugccccaaauacgugaaaucaaacaaauuaguccuugcgacugggcucagaaauaguccucuaagagaaagaagaagaaaaagaggacuauuuggagcuauagcaggguucauagagggaggauggcaaggaaugguagaugguugguauggguaccaccauagcaaugaacaggggaguggguacgcugcagacagagaauccacccaaaaggcaauagauggaguuaccaauaaggucaacucgauaauugacaaaaugaacacucaauuugaggccguuggaagggaguuuaauaacuuagaacggagaauagagaauuuaaauaagaaaauggaagacggauuccuagaugucuggacuuacaaugcugaacuuuuaguucucauggaaaaugagagaacucuagauuuccaugauucaaaugucaagaaccuuuaugacaaaguccgacuacagcuuagggauaaugcaaaggagcuggguaaugguuguuucgaguucuaucacaaaugugauaaugaauguauggaaaguguaagaaaugggacguaugacuacccccaguauucagaagaagcaagauuaaaaagggaagaaauaagcggagugaaauuggaaucaauaggaacuuaccaaauacugucaauuuauucaacgguggcgaguucccuagcacuggcaaucauuguggcuggucuaucuuuauggaugugcuccaaugggucguuacaaugcagaauuugcauuuaa

SEQ ID NO: 46021 - RNA, 1704 nt, Artificial Sequence
  derived and/or modified CDS sequence (wt) from hemagglutinin__InfluenzaA__EPI533583
auggagaaaauagugcuucuucuugcaauaguuagccuuguuaaaggugaucagauuugcauugguuaccaugcaaacaacucgacggagcagguugacacgauaauggaaaagaacgucacuguuacacaugcccaagacauacuggaaaagacacacaauggaaagcucugcgauuuaaauggagugaagccucugauuuuaaaggauuguaguguagcuggauggcuucucggaaacccaaugugcgacgaauucaucagggugccggaauggucuuacauaguagaaagggcuaacccagccaaugaccucuguuacccagggaaccucaaugauuaugaagaacugaaacaccuauugagcagaauaaaucauuuugagaaaauucugaucauccccaagaguucuuggaccaaucaugaaacaucauuaggggugagcgcagcaugcccauaccagggaacgcccuccuuuuucagaaaugugguauggcuuaucaaaaagaacgaugcauaccccacaauaaaaauaagcuacaauaauaccaaucaggaagaucuguugauacugugggggguucaccauuccaacaaugcagcagagcagacgaaccucuauaaaaacccaaccaccuauauuuccguugggacaucaacauuaaaccagagauugguaccaaaaauagcuacuagaucccaagugaacggacagcguggaagaauggauuucuucuggacaauucuaaaaccgaaugaugcaauccacuucgagaguaauggaaauuucauugcuccagaauaugcauacaaaauugucaagaaaggggacucaacaauuaugaaaagugaaauggaauauggccacugcaacaccaaaugucaaacuccaauaggggcgauaaacucuaguaugccauuucacaauauacacccucucaccaucggggaaugccccaaauacgugaaaucaaacaaauuaguccuugcgacugggcucagaaauaguccucuaagagaaaagagaagaaaaagaggacuauuuggagcuauagcaggguuuauagagggaggauggcagggaaugguagauggcugguauggguaccaccauagcaaugagcaggggaguggguacgcugcagacaaagaauccacccaaaaggcuauagauggaguuaccaauaaggucaacucgauuauugacaaaaugaacacucaauuugaggccguuggaagggaauuuaauaacuuagaaaggagaauagagaauuuaaacaagaaaauggaagacggauuccuagaugucuggacuuauaaugcugaacuucuaguucucauggaaaaugagagaacucuagauuuccaugacucaaaugucaagaaccuuuacgauaaaguccgacuacagcuuagggacaaugcaaaggaacuggguaaugguuguuuugaguucuaucacaaaugugauaauaaauguauggaaaguguaagaaaugggacauaugacuacccgcaauauucagaagaagcaagauuaaaaagagaagaaauaagcggagugaaauuagagucaauaggaacuuaccaaauacugucaauuuauucaacaguggcgaguucccuagcacuggcaaucauaguggcugguuuaucuuuauggaugugcuccaaugggucguugcagugcagaauuugcauuuaa

SEQ ID NO: 46022 - RNA, 1701 nt, Artificial Sequence
  derived and/or modified CDS sequence (wt) from hemagglutinin__InfluenzaA__AKS48023
auggagaaaauggugcuucuucuugcagugguuagccuuguuaaaagugaucagauuugcauugguuaccaugcaaacaacucgacagagcagguugacacgauaauggaaaaaaacgucacuguuacacaugcccaagacauacuggaaaagacacacaacgggagacucugcgaucugaauggagugaaaccucugauuuuaaaggauuguaguguagcuggauggcuccuuggaaacccaaugugugacgaguucaucagagugccggaauggucuuacauaguggagagggcuaauccagccaaugaccucuguuauccagggaaccucaaugacuaugaggaacugaaacaccuauugagcagaauaaaucauuuugagaagacucugaucauccccaagaguucuuggcccaaucauacaucaucaggggugagugcagcauguccauaccagggaaugcccuccuuuuucagaaaugugguauggcuuaccaaaaagaacgaugcauacccaacaauaaagaugagcuacaauaauaccuauagggaagaucuuuugauacugugggggauucaucauuccaacaaugcagcagagcagacaaaucucuauaaaaacccaaccaccuauguuuccguugggacaucaacauuaaaccagagauuggagccaaaaauagcuacuagaucccaaguaaacgggcaacguggaagaauggauuucuucuggaccauuuuaaaaccgaaugaugcaauccacuucgagaguaauggaaauuuuauugcuccagaauaugcauacaaaauugucaagaaaggggacucaacaauuaugaaaagugaaauggaauaugggcacugcaacaccaaaugucaaacuccaauaggggcgauaaacucuaguaugccauuccacaauauacacccucucacuaucggggagugccccaaauacgugaaaucgaacaaauuaguccuugcgacugggcucagaaauaguccucuaagagaaagaagaagaaaaagaggacuauuuggagcuauagcaggguuuauagagggaggauggcaaggaaugguagaugguugguauggguaccaccauagcaaugaacaggggaguggguacgcugcagacagagaauccacccaaaaggcaauagauggaguuaccaauaaggucaacucgauaauagacaaaaugaacacucaauuugaggccguuggaagagaauuuaauaacuuagaacggagaauagagaauuuaaauaagaaaauggaagacggauucuuagaugucuggacuuauaaugcugaacuuuuaguucucauggaaaaugagagaacucuagauuuccaugacucaaaugucaagaaccuuuaugacaagguccgacuacagcuuagggauaaugcaaaggagcuggguaaugguuguuucgaguucuaucacaaaugugauaaugaauguauggaaaguguaagaaaugggacguaugacuacccccaguauucagaagaagcaagguuaaaaagggaagaaauaagcggggugaaauuggaaucaauaggaacuuaccaaauacugucaauuuauucaacaguggcgaguucccuagcacuggcaaucauuguggcuggucuaucuuuauggaugugcuccaaugggucguuacaaugcagaauuugcauuuaa

SEQ ID NO: 46023 - RNA, 1701 nt, Artificial Sequence
  derived and/or modified CDS sequence (wt) from hemagglutinin__InfluenzaA__EPI587621
auggagaaaauggugcuucuucuugcagcgguuagccuuguuaaaagugaucagauuugcauugguuaccaugcaaacaacucgacagagcagguugacacgauaauggaaaaaaacgucacuguuacacaugcccaagacauacuggaaaagacacacaacgggagacucugcgaucugaauggagugaaaccucugauuuuaaaggauuguaguguagcuggauggcuccuuggaaacccaaugugugacgaguucaucagagugccggaauggucuuacauaguggagagggcuaauccagccaaugaccucuguuauccagggaaccucaaugacuaugaggaacugaaacaccuauugagcagaauaaaucauuuugagaagacuuugaucauccccaagaguucuuggcccaaucauacaucaucaggggugagugcagcauguccauaccagggaaugcccuccuuuuucagaaaugugguauggcuuaccaaaaagaacgaugcauacccaacaauaaagaugagcuacaauaauaccuauagggaagaucuuuugauacugugggggauucaucauuccaacaaugcagcagagcagacaaaucucuauaaaaacccaaccaccuauguuuccguugggacaucaacauuaaaccagagauuggagccaaaaauagcuacuagaucccaaguaaacgggcaacguggaagaauggauuucuucuggaccauuuuaaaaccgaaugaugcaauccacuucgagaguaauggaaauuuuauugcuccagaauaugcauacaaaauugucaagaaaggggacucaacaauuaugaaaagugaaauggaauaugggcacugcaacaccaaaugucaaacuccaauaggggcgauaaacucuaguaugccauuccacaauauacacccucucacuaucggggagugccccaaauacgugaaaucgaacaaauuaguccuugcgacugggcucagaaauaguccucuaagagaaagaagaagaaaaagaggacuauuuggagcuauagcaggguuuauagagggaggauggcaaggaaugguagaugguugguauggguaccaccauagcaaugaacaggggaguggguacgcugcagacagagaauccacccaaaaggcaauagauggaguuaccaauaaggucaacucgauaauagacaaaaugaacacucaauuugaggccguuggaagagaauuuaauaacuuagaacggagaauagagaauuuaaauaagaaaauggaagacggauucuuagaugucuggacuuauaaugcugaacuuuuaguucucauggaaaaugagagaacucuagauuuccaugacucaaaugucaagaaccuuuaugacaagguccgacuacagcuuagggauaaugcaaaggagcuggguaaugguuguuucgaguucuaucacaaaugugauaaugaauguauggaaaguguaagaaaugggacguaugacuacccccaguauucagaagaagcaagguuaaaaagggaagaaauaagcggggugaaauuggaaucaauaggaacuuaccaaauacugucaauuuauucaacaguggcgaguucccuagcacuggcaaucauuguggcuggucuaucuuuauggaugugcuccaaugggucguuacaaugcagaauuugcauuuaa

SEQ ID NO: 46024 - RNA, 1704 nt, Artificial Sequence
  derived and/or modified CDS sequence (wt) from hemagglutinin__InfluenzaA__AJE30333
auggagaaaauagugcuucuucuugcagugauuagccuuguuaaaagugaucagauuugcauugguuaccaugcaaacaacucaacaaagcagguugacacgauaauggagaaaaacgucacuguuacacaugcccaagacauacuggaaaagacacacaacgggaagcucugcgaucuuaauggagugaagccccugauucuaaaggauuguagcguagcuggguggcuccuuggaaauccaaugugcgacgaguucaucaggguaccggaauggucuuacaucguggagagggcuaacccagccaacgaccuauguuacccagggacccucaaugacuaugaggaacugaaacaccuauugagcagaauaaaucauuuugagaaaacucugaucauccccaggaguucuuggcccaaucaugaaacaucauuaggggugagcgcagcauguccauaccagggagcauccucauuuuucagaaaugugguauggcucaucaaaaagaacgaugcauacccgacaauaaagauaagcuacaauaauaccaaucgggaagaucuuuugauacugugggggauucaucauuccaacaaugcagcagagcagacaaaucucuauaaaaacccagacacuuauguuuccguugggacaucaacauuaaaccagagauuggugccaaaaauagcuacuagaucccaaguaaacgggcagaguggaagaauggauuucuucuggacaauuuuaaaaccgaaugaugcaauccacuuugagaguaauggaaauuucauugcuccagaauaugcauacaaaauugucaagaaaggggacucaacaauuaugaaaagugaaauggaguauggccacugcaacaccaaaugucaaacuccaauaggggcgauaaacucuagcaugccauuccacaauauacacccucucaccaucggggaaugccccaaauacgugaagucaaacaaauuaguccuugcgacugggcucagaaauaguccucuaagagaaagaagaagaaaaagaggacuauuuggagcuauagcaggguuuauagagggaggauggcagggaaugguagacgguugguauggguaucaucauagcaaugagcaggggaguggguacgcugcagacaaagaauccacccaaaaggcaauagauggaguuaccaauaaggucaacucaaucauugacaaaaugaacacucaauuugaggccguuggaagggaauuuaauaacuuagaaaggagaauagagaauuuaaacaagaaaauggaagacggauuccuagaugucuggacuuauaaugcugaacuuuuaguucucauggaaaaugagagaacucuagauuuucaugacucaaaugucaagaaccuuuacgacaaaguccgacuacagcuuagggauaaugcaaaggagcugggcaaugguuguuucgaguucuaucacaaaugugauaacgaauguauggagagcguaagaaaugggacguaugacuacccuaaguauucagaagaagcaauauuaaaaagagaagaaauaagcggagugaaauuagaaucaauaggaacuuaccagauacugucaauuuauucaacaguggcgaguucccuagcacuggcaaucauaguggcuggucuaucuuuauggaugugcucuaaugggucguuacaaugcagaauuugcaucuaa

SEQ ID NO: 46025 - RNA, 1704 nt, Artificial Sequence
  derived and/or modified CDS sequence (wt) from hemagglutinin__InfluenzaA__EPI459855
augauugcaaucguugugauagcgauauuggcaucggccggaaaaucagacaagaucuguauuggguaccacgccaacaauucaacaacacaaguggauacacuacuugagaagaauguaacugucacacauucaguugaauuacuagagaaucagaaagaaaagagguucugcaaaauuaugaacaaggccccucucgaccuaaaggauugcaccauagaagguuggauacuggggaauccuaagugcgacuuauugcuuggugaucaaaguuggucauacauaguggaaagaccuaaugcucaaaaugggauuuguuacccaggaguucugaaugaauuagaagaacugaaggcauuuauaggaucuggagaaagaguagagagauuugagauguuucccaaaagcacaugggcaggaguagauacuaguagaggggugacaaacgcuuguccaucuuauacuauugauucaucuuucuacagaaaccuuguauggauaguaaaaacugauucagcaacauauccaguaauuaaggggacguacaacaauacuggaacccagccaauccucuauuucugggguguucaucauccucuugacaccacugugcaggauaauuuguaugggucuggugauaaauacguuagaaugggaacugaaagcaugaauuuugccaagaguccggaaauugcagcaagaccugcugugaacggccaaaggagcagaauugauuauuacuggucugucuugagaccaggggaaaccuuaaauguggaguccaauggaaaucuaauugcuccuugguaugccuacaaauuugucagcacaaauaagaagggagcugucuucaagucagauuuaccaaucgagaacugcgaugccacaugccagacaauuacaggaguccuaagaaccaauaaaacauuucagaaugugagcccucuauggauaggagaaugcccuaaauauguaaaaagugaaagucugaggcuugcaacgggauuaagaaauguuccacagauugcaacaagaggaauuuuuggagcuauugcagguuucauugaaggaggauggacuggaaugauagauggaugguaugguuaucaccacgaaaauucucaaggcucaggauaugcagcagacagagaaagcacccaaaaggcuauagacggaauuacaaauaaggucaacuccaucauuaacaaaaugaacacacaauucgaagcuguagaucacgaauucucaaaccuugagagaagaauuggcaaucugaauaagagaauggaagauggguuucuggacguuuggacuuacaaugcugaguuguugguucuucuugaaaaugaaagaacacuagaucugcaugaugcaaaugugaagaaucuauaugaaaaggucaaaucgcagcuaagggacaacgcuaaugaucuaggaaauggguguuuugaauuuuggcauaagugugacaaugaaugcauggagucugucaaaaaugguaccuaugacuaucccaaauaucagaaggagaguaaauuaaacagacaggggauagaaucugugaagcuagagaaucuugguguguaucaaauucuugccaucuauaguacgguaucgagcagucuaguguugguagggcugaucauggcaauaggucuuuggauguguucaaaugguucaaugcaaugcaggauauguauauaa

SEQ ID NO: 46026 - RNA, 1704 nt, Artificial Sequence
  derived and/or modified CDS sequence (wt) from hemagglutinin__InfluenzaA__EPI459855/m1
augauugcaaucguugugauagcgauauuggcaucggccggaaaaucagacaagaucuguauuggguaccacgccaacaauucaacaacacaaguggauacacuacuugagaagaauguaacugucacacauucaguugaauuacuagagaaucagaaagaaaagagguucugcaaaauuaugaacaaggccccucucgaccuaaaggauugcaccauagaagguuggauacuggggaauccuaagugcgacuuauugcuuggugaucaaaguuggucauacauaguggaaagaccuaaugcucaaaaugggauuuguuacccaggaguucugaaugaauuagaagaacugaaggcauuuauaggaucuggagaaagaguagagagauuugagauguuucccaaaagcacaugggcaggaguagauacaaguagaggggugacaaacgcuuguccaucuuauacuauugauucaucuuucuacagaaaccuuguauggauaguaaaaacugauucagcaacauauccaguaauuaaggggacguacaacaauacuggaacccagccaauccucuauuucugggguguucaucauccucuugacaccacugugcaggauaauuuguaugggucuggugauaaauacguuagaaugggaacugaaagcaugaauuuugccaagaguccggaaauugcagcaagaccugcugugaacggccaaaggagcagaauugauuauuacuggucugucuugagaccaggggaaaccuuaaauguggaguccaauggaaaucuaauugcuccuugguaugccuacaaauuugucagcacaaauaagaagggagcugucuucaagucagauuuaccaaucgagaacugcgaugccacaugccagacaauuacaggaguccuaagaaccaauaaaacauuucagaaugugagcccucuauggauaggagaaugcccuaaauauguaaaaagugaaagucugaggcuugcaacgggauuaagaaauguuccacagauugcaacaagaggaauuuuuggagcuauugcagguuucauugaaggaggauggacuggaaugauagauggaugguaugguuaucaccacgaaaauucucaaggcucaggauaugcagcagacagagaaagcacccaaaaggcuauagacggaauuacaaauaaggucaacuccaucauuaacaaaaugaacacacaauucgaagcuguagaucacgaauuuucaaaccuugagagaagaauuggcaaucugaauaagagaauggaagauggguuucuggacguuuggacuuacaaugcugaguuguugguucuucuugaaaaugaaagaacacuagaucugcaugaugcaaaugugaagaaucuauaugaaaaggucaaaucgcagcuaagggacaacgcuaaugaucuaggaaauggguguuuugaauuuuggcauaagugugacaaugaaugcauggagucugucaaaaaugguaccuaugacuaucccaaauaucagaaggagaguaaauuaaacagacaggggauagaaucugugaagcuagagaaucuugguguguaucaaauucuugccaucuauaguacgguaucgagcagucuaguguugguagggcugaucauggcaauaggucuuuggauguguucaaaugguucaaugcaaugcaggauauguauauaa

SEQ ID NO: 46027 - RNA, 1692 nt, Artificial Sequence
  derived and/or modified CDS sequence (wt) from hemagglutinin__InfluenzaA__ACZ36872
augaacacucaaauccugguauuugcccuuguggcagucauccacacaaaugcagacaaaauuugccuuggacaucaugcuguaucaaauggcaccaagguaaacacacucacugagagaggaguagaaguugucaaugcaacagaaacaguggagcggacaaacauccccaaaauuugcucaaaagggaaaagaaccguugaucuuggccaaugcggacuacuggggaccauuaccggaccaccucaaugugaccaauuucuagaauuuucagcugauuuaauaauugagaggcgggacggaaaugauguuuguuacccggggaaauuugugaauggagaggcauugcggcaaauccucagaaaaucaggugggauuaacaaagaaacaaugggauucacauacaguggaauaagaaccaauggaacaacuagugcguguagaagaucaggaucuucauucuaugcagaaaugaaguggcuccugucagauacagacaaugcugcuuucccacaaaugacgaaaucauacaaaaacacaaggagagaaccagcucugauagucuggggaauccaucauucaggaucaaccaccgagcagaccaaacuauauggaaguggaaauaaacugguaacagucggaaguuccaaauaucagcagucuuuugugccgaguccaggaacacgaccacaaguaaauggccaguccggacgaauugauuuucacugguugauacuggauuccaaugacacaguuacuuuuaguuucaauggggcuuucauagcuccagaucgugcuagcuucuugaagggaaaguccaugggaauccaaagcgaugugcagguugaugccaauugcgaaggggaaugcuaccacaguggagggaccauaacaagcaguuugcccuuccaaaacaucaacagcagggcaguuggcaaguguccaagauauguaaaacaggaaagucuauuauuggcaacagggaugaagaauguucccgaacuucccaaaaaaagaagaaaaagaggccuguuuggcgccauagcgggguuuauugaaaaugguugggaaggucuggucgacggaugguacgguuucaggcaucagaaugcacaaggagaaggaacugcagcagacuacaaaagcacccagucggcaauugaucagauaaccggaaaauuaaauagacucauugagaaaacuaaucagcaauuugagcuaauagauaaugaauucacugagguagaaaagcagauuggcaauguaauuaacuggaccagagacuccaucacagaaguauggucuuacaaugcugaacuucucguggcaauggaaaaucagcacacuauugaucuagcugauucagagaugaacaaauuguaugagcgagugaggaaacaauugagggaaaaugcugaggaagauggcacugguuguuuugagauuuuccacaaaugugaugaugauuguauggcuaguauaaggaacaauacuuaugaucacagcaaauacagagaagaagcaaugcaaaauagaauacaaauugacccagucaaauugagugguggcuacaaagaugugauacuuugguuuagcuucggggcgucaugcuuuuuacuucuugccauugcaaugggccuugucuucauaugugugaagaauggaaacaugcggugcacuauuuguauauaa

SEQ ID NO: 46028 - RNA, 1692 nt, Artificial Sequence
  derived and/or modified CDS sequence (wt) from hemagglutinin__InfluenzaA__AGB51388
augaacacucaaauccugguauucgcccuuguggcagucauccacacaaaugcagacaaaauuugccuuggacaucaugcuguaucaaauggcaccaagguaaacacacucacugagagaggaguagaaguugucaaugcaacagaaacaguggagcggacaaacauccccaaaauuugcucaaaagggaaaagaaccguugaucuuggccaaugcggacuacuggggaccauuaccggaccaccucaaugugaccaauuucuagaauuuucagcugauuuaauaaucgagaggcgggacggaaaugauguuuguuacccggggaaauuugugaauggagaggcauugcggcaaauccucagaaaaucaggugggauuaacaaagaaacaaugggauucacauacaguggaauaagaaccaauggaacaacuagugcauguagaagaucaggaucuucauucuaugcagaaaugaaguggcuccugucagauacagacaaugcugcuuucccacaaaugacgaaaucauacaaaaacacaaggagagaaccagcucugauagucuggggaauccaucauucaggaucaaccaccgagcagaccaaacuauauggaaguggaaauaaacugguaacagucggaaguuccaaauaucagcagucuuuugugccgaauccagaaacacgaccacaaguaaauggccaguccggacgaauugauuuucacugguugauacuggauuccaaugacacaguuacuuuuaguuucaauggggcuuucauagcuccagaucgugcuagcuucuugaagggaaaguccaugggaauccaaagcgaugugcagguugaugccaauugcgaaggggaaugcuaccacaguggagggaccauaacaagcaguuugcccuuccaaaacaucaacagcagggcaguuggcaaguguccaagauauguaaaacaggaaagucuauuauuggcaacagggaugaagaauguucccgaacuucccaaaaaaagaagaaaaagaggccuguuuggcgccauagcgggguuuauugaaaaugguugggaaggucuggucgacggaugguacgguuucaggcaucagaaugcacaaggagaaggaacugcagcagacuacaaaagcacccagucggcaauugaucagauaaccggaaaauuaaauagacucauugagaaaacuaaucagcaauuugagcuaauagauaaugaauucacugagguagaaaagcagacuggcaauguaauuaacuggaccagagacuccaucacagaaguauggucuuacaaugcugaacuucucguggcaauggaaaaucagcacacuauugaucuagcugauucagagaugaacaaauuguaugagcgagugaggaaacaauugagggaaaaugcugaggaagauggcacugguuguuuugagauuuuccacaaaugugaugaugauuguauggcuaguauaaggaacaauacuuaugaucacagcaaauacagagaagaagcaaugcaaaauagaauacaaauugacccagucaaauugagugguggcuacaaagaugugauacuuugguuuagcuucggggcgucaugcuuuuuacuucuugccauugcaaugggccuugucuucauaugugugaagaauggaaacaugcggugcacuauuuguauauaa

SEQ ID NO: 46029 - RNA, 1683 nt, Artificial Sequence; identical to SEQ ID NO: 42000
  derived and/or modified CDS sequence (wt) from hemagglutinin__InfluenzaA__EPI439507

SEQ ID NO: 46030 - RNA, 1704 nt, Artificial Sequence
  derived and/or modified CDS sequence (wt) from hemagglutinin__InfluenzaA__EPI164216
auggagaaaauagugcuucuucuugcaauagucagccuuguuaaaagugaucagauuugcauugguuaccaugcaaacaacucgacagagcagguugacacaauaauggaaaagaacguuacuguuacacaugcccaagacauacuggaaaagacacacaacgggaagcucugcgaucuagauggagugaagccucugauuuuaagagauuguaguguagcuggauggcuccucggaaacccaaugugugacgaauucaucaaugugccggaauggucuuacauaguggagaaggccaacccagccaaugaccucuguuacccagggaauuucaacgacuaugaagaacugaaacaccuauugagcagaauaaaccauuuugagaaaauucagaucauccccaaaaguucuugguccgaucaugaagccucaucaggggugagcucagcauguccauaccagggaacgcccuccuuuuucagaaaugugguauggcuuaucaaaaagaacaauacauacccaacaauaaagagaagcuacaauaauaccaaccaggaagaucuuuugauacugugggggauucaucauucuaaugaugcggcagagcagacaaagcucuaucaaaacccaaccaccuauauuuccguugggacaucaacacuaaaccagagauugguaccaaaaauagcuacuagauccaaaguaaacgggcaaaguggaaggauggauuucuucuggacaauuuuaaaaccgaaugaugcaaucaacuucgagaguaauggaaauuucauugcuccagaauaugcauacaaaauugucaagaaaggggacucagcaauuguuaaaagugaaguggaauaugguaacugcaacacaaagugucaaacuccaauaggggcgauaaacucuaguaugccauuccacaacauacacccucucaccaucggggaaugccccaaauaugugaaaucaaacaaauuaguccuugcgacugggcucagaaauaguccucuaagagaaagaagaagaaaaagaggacuauuuggagcuauagcaggguuuauagagggaggauggcagggaaugguagaugguugguauggguaccaccauagcaaugagcaggggaguggguacgcugcagacaaagaauccacucaaaaggcaauagauggagucaccaauaaggucaacucgaucauugacaaaaugaacacucaguuugaggccguuggaagggaauuuaauaacuuagaaaggagaauagagaauuuaaacaagaaaauggaagacggauuccuagaugucuggacuuauaaugcugaacuucugguucucauggaaaaugagagaacucuagacuuccaugauucaaaugucaagaaccuuuacgacaagguccgacuacagcuuagggauaaugcaaaggagcuggguaacgguuguuucgaguucuaucacaaaugugauaaugaauguauggaaaguguaagaaacggaacguaugacuacccgcaguauucagaagaagcaagauuaaaaagagaggaaauaaguggaguaaaauuggaaucaauaggaacuuaccaaauacugucaauuuauucaacaguugcgaguucucuagcacuggcaaucaugguggcuggucuaucuuuguggaugugcuccaaugggucguuacaaugcagaauuugcauuuaa

SEQ ID NO: 46031 - RNA, 1683 nt, Artificial Sequence; identical to SEQ ID NO: 44364
  derived and/or modified CDS sequence (wt) from hemagglutinin__InfluenzaA__EPI486492

SEQ ID NO: 46032 - RNA, 1683 nt, Artificial Sequence
  derived and/or modified CDS sequence (wt) from hemagglutinin__InfluenzaA__EPI740738
augaacacucaaauccugguauucgcucugauugcgaucauuccaacaaaugcagauaaaaucugccucggacaucaugccgugucaaacgggaccaaaguaaacacauuaacugaaagaggaguggaagucgucaaugcaacugaaacaguggaacgaacaaacaucccuaggaucugcucaaaagggaaacggacaguugaccucggucaauguggacuccuggggacaaucacuggaccaccucaaugugaccaauuccuagaauuuucggccgauuuaauuauugagaggcgagaaggaagugaugucuguuauccugggaaauucgugaaugaagaagcucugaggcaaauucucagagaaucaggcggaauugauaaggaaacaaugggguucacauacaguggaauaagaacuaauggaguaaccagugcauguaagagaucaggaucuucauucuaugcagaaaugaaauggcuccugucaaacacagauaaugcugcauucccgcagaugacuaagucauauaaaaauacaagaaaaagcccagcuauaauaguaugggggauccaucauuccguuucaacugcagagcaaaccaagcuauaugggaguggaaacaaacuggugacaguugggaguucuaauuaucaacaaucuuucguaccgaguccaggagcgagaccacaaguuaauggucuauccggaagaauugacuuucauuggcuaauacuaaaucccaaugauacagucacuuucaguuucaauggggcuuucauagcuccagaccgugcaagcuuccugagaggaaaaucuaugggaauccagaguggaguacagguugaugccaauugugaaggggacugcuaucauaguggugggacaauaauaaguaacuugccauuucagaacauagauagcagggcaguuggaaaauguccgagauauguuaagcaaaggagucugcugcuggcaacagggaugaagaauguuccugagauuccaaagggaagaggccuauuuggugcuauagcggguuucauugaaaauggaugggaaggccuaauugaugguugguaugguuucagacaccagaaugcacagggagagggaacugcugcagauuacaaaagcacucaaucggcaauugaucaaauaacagggaaauuaaaccggcuuauagcaaaaaccaaccaacaauuugaguugauagacaaugaauucaaugagguagagaagcaaaucgguaaugugauaaauuggaccagagauucuauaacagaaguguggucauacaaugcugaacucuugauagcaauggagaaccagcauacaauugaucuggcugauucagaaauggacaaacuguaugaacgggugaaaagacagcugagagagaaugcugaagaggauggcacugguugcuuugaaauauuucacaagugugaugaugacuguauggccaguauuagaaacaacaccuaugaucacagaaaauacagggaagaggcaaugcaaaauagaauacagauugacccagucaagcuaagcagcggcuacaaagaugugauacuuugguuuagcuucggggcaucauguuucauacuucuagccauuguaaugggccuugucuucauaugugugaagaauggaaacaugcggugcacuauuuguauauaa

SEQ ID NO: 46033 - RNA, 1683 nt, Artificial Sequence
  derived and/or modified CDS sequence (wt) from hemagglutinin__InfluenzaA__EPI730495
augaacauucaaauccugguauucgcucugauugcgaucauuccaacagaugcagacaaaaucugccucggacaucaugccgugucaaacggaaccaaaguaaacacauuaacugaaagaggaguggaagucgucaaugcaacugaaacaguggaacgaacaaacauccccaggaucugcucaaaagggaaaaggacaguugaccucggucaauguggacuccuggggacaaucacuggaccaccucaaugugaccaauuccuagaauuuucagccgauuuaauuauugagaggcgagaaggaagugaugucuguuauccugggaaauucgugaaugaagaagcucugaggcaaauucucagaaaaucaggcggaauugacaaggaagcaaugggauucacauacaguggaauaagaacuaauggagcaaccagugcauguaggagaucaggaucuucauucuaugcagaaaugaaauggcuccugucaaacacagauaaugcugcauucccgcaaaugacuaagucauauaaaaauacaagaaaaagcccagcuauaauaguaugggggauccaucauuccguaucaacugcagagcaaaccaagcuauaugggaguggaagcaaacuggugacaguugggaguucuaauuaucaacaaucuuuuguaccgaguccaggagcgagaccacaaguuaaugguuuaucuggaagaauugacuuucauuggcuaauauuaaaucccaaugauacagucacuuucaguuucaauggggcuuucauagcuccagaccgugcaagcuuccugagaggaaaaucuaugggaauccagaguggaguacagguugaugccgauugugaaggggacugcuaucauaguggagggacaauaauaaguaacuugccauuucagaacauagauagcagggcaguuggaaaauguccgagauauguuaaacaaaggagucugcugcuagcaacagggaugaagaauguuccugagauuccaaagggaagaggccuauuuggugcuauagcggguuucauugaaaauggaugggaaggccuaauugaugguugguaugguuucagacaccagaaugcacagggagagggaacugcugcagauuacaaaagcacucaaucggcaauugaucaaauaacagggaaauuaaaccggcuuauagaaaaaaccaaccaacaauuugaauugauagacaaugaauucaucgagguagagaaacaaauugguaaugugauaaacuggaccagagauucuauaacagaaguguggucauacaaugcugaacucuugguagcaauggagaaccagcauacaauugaucuggcugauucagaaauggacaaacuguacgaacgagugaaaagacaacugagagagaaugcugaagaagauggcacuggcugcuuugaaauauuucacaagugugaugaugacuguauggccagcauuaggaauaacaccuaugaucacagcaaauacagggaagaggcaaugcagaauagaauacagauugacccagucaaacuaagcagcggcuacaaagaugugauacuuugguuuagcuucggggcaucauguuucauacuuccagccauuguaaugggccuugucuucauguguguaaagaauggaaacaugcggugcacuauuuguauauaa

SEQ ID NO: 46034 - RNA, 1683 nt, Artificial Sequence
  derived and/or modified CDS sequence (wt) from hemagglutinin__InfluenzaA__EPI712926
augaacacucaaauccugguauucgcucugauugcgaucauuccaacaaaugcagauaaaaucugccucggacaucaugccgugucaaacgggaccaaaguaaacacauuaacugaaagaggaguggaagucgucaaugcaacugaaacaguggaacgaacaaacaucccuaggaucugcucaaaagggaaacggacaguugaccucggucaauguggacuccuggggacaaucacuggaccaccucaaugugaccaauuccuagaauuuucggccgauuuaauuauugagaggcgagaaggaagugaugucuguuauccugggaaauucgugaaugaagaagcucugaggcaaauucucagagaaucaggcggaauugacaaggaaacaaugggguucacauacaauggaauaagaauuaauggaguaaccagugcauguaagagaucaggaucuucauucuaugcagaaaugaaauggcuccugucaaacacagauaaugcugcauucccgcagaugacuaagucauauaaaaauacaagaaaaagcccagcuauaauaguaugggggauccaucauuccguuucaacugcagagcaaaccaagcuauaugggaguggaaacaaacuggugacaguugggaguucuaauuaucaacaaucuuucguaccgaguccaggagcgagaccacaaguuaauggucuauccggaagaauugacuuucauuggcuaauacuaaaucccaaugauacagucacuuucaguuucaauggggcuuucauagcuccagaccgugcaagcuuccugagggggaaaucuauaggaauccagaguggaguacagguugaugccaauugugaaggggacugcuaucauaguggugggacaauaauaaguaacuugccauuucagaacauagauagcagggcaguuggaaaauguccgagauauguuaagcaaaggagucugcugcuggcaacagggaugaagaauguuccugagauuccaaagggaagaggccuauuuggugcuauagcggguuucauugaaaauggaugggaaggccuaauugaugguugguaugguuucagacaccagaaugcacagggagagggaacugcugcagauuacaaaagcacucaaucggcaauugaucaaauaacagggaaauuaaaccggcuuauagcaaaaaccaaccaacaauuugaguugauagacaaugaauucaaugagguagagaagcaaaucgguaaugugauaaauuggaccagagauucuauaacagaaguguggucauacaaugcugaacucuugauagcaauggagaaccagcauacaauugaucuggcugauucagaaauggacaaacuguaugaacgagugaaaagacagcugagagagaaugcugaagaggauggcacugguugcuuugaaauauuucacaagugugaugaugacuguauggccaguauuagaaacaacaccuaugaucacagaaaauacagggaagaggcaaugcaaaauagaauacagauugacccagucaagcuaagcagcggcuacaaagaugugauacuuugguuuagcuucggggcaucauguuucauacuucuagccauuguaaugggccuugucuucauaugugugaagaauggaaacaugcggugcacuauuuguauauaa

SEQ ID NO: 46035 - RNA, 1683 nt, Artificial Sequence; identical to SEQ ID NO: 42101
  derived and/or modified CDS sequence (wt) from hemagglutinin__InfluenzaA__AGL44438

SEQ ID NO: 46036 - RNA, 1683 nt, Artificial Sequence
  derived and/or modified CDS sequence (wt) from hemagglutinin__InfluenzaA__EPI445996
auggaaacaguaucacugaugacuauacuacuauuaguaacaacaagcaaugcagacaaaaucuguaucggccaccaaucaacaaauucuacagaaacuguggacacgcuaacagaaacuaauguuccugugacacaugccaaagaauugcuccacacagaucacaauggaaugcugugugcaacaaaucuaggacauccccucauccuagauacaugcaacgucgaaggacugauuuacggcaacccuucuugugaccuucuguugggaggaagagaaugguccuacaucgucgaaagaccaucggcagugaauggaacguguuacccugggaauguagaaaacuuagaggaacucagaacacuuuuuaguuccucuaguuccuaccaaaggauccaaauuuucccagauacaaucuggaaugugacuuacacuggaacaagcaaaucauguucagacuccuucuauaggaauaugagauggcugacucaaaagaacggucuuuacccuguucaagaugcccaauucacaaacaaucggggaaaggacauccuuuuuguauggggcauacaucauccacccaccgauacugcacagacgaauuuauacacaagaaccgacacaacaacaagcgugacaacagaaaaucuggauaggacuuucaaaccauuaauagggccaaggccacuuguuaauggucuaauuggaagaauuaacuauuauuggucaguacuaaaaccaggccagacauugcgaguacgauccaaugggaaucuaauugcuccaugguauggacauguucucucaggagagagccaugggagaauccugaagacuaauuugaacagcgguaauugcguaguucaaugucaaacugaaaaggguggcuuaaacaguacgcugccauuccacaauauuaguaaauaugcauucgggaacugccccaaauauauuggagucaaaagucucaaacuagcaaucggucugagaaacgugccugccaaaucaaguagaggacuauuuggagccauagcuggauucauagaaggagguuggccaggacuagucgcugguugguaugguuuccagcauucuaaugaucaagggguugguauagcggcagauaggguuucaacccaaaaggcaguugauaaaauaacauccaaggugaauaauauaguggauaagaugaacaagcaauaugaaauaauugaucaugaauucagugagguugagacuagacucaauaugaucaauaauaaaauugaugaccaaauacaagacguaugggcauauaaugcagaauugcuaguauuacuugaaaaccagaaaacacucgaugagcaugacgcaaaugugaacaaucuguauaacaaagugaaaagggccuugggcucaaaugcgcuggaagauggaaaggguuguuucgagcuauaccauaaaugugaugaccaaugcauggaaacaauuaggaacgggaccuauaauaggagaaaguaccaagaggaaucaagacuggaaaggcagaaaauagaagggauaaagcuggagucugaggggacuuacaaaauccucacuauuuauucgacugucgccucaucucuuguacuugcaaugggguuugcugccuucuuguucugggccaugucuaauggaucaugcaggugcaacauuuguauauaa

SEQ ID NO: 46037 - RNA, 1695 nt, Artificial Sequence
  derived and/or modified CDS sequence (wt) from hemagglutinin__InfluenzaA__EPI433309
auggagaaaauagugcuucuucuugcaauagccagccuuguuaaaagugaucagauuugcauugguuaccaugcaaacaacucgacagagcagguugacacaauaauggaaaagaacguuacugucacacaugcccaagauauacuggaaaagacacacaacgggaagcucugcgaucuagauggagugaagccucuaauuuuaagagauuguaguguagcuggauggcuccucggaaacccaaugugugacaaauucaacgaugugccggaauggucuuacauaguggagaaggccaacccagccaaugaccucuguuacccagggaaucucaacgauuaugaagaacugaaacaccuauugagcagaauaaaccauuuugagaaaauucagacuuuccccaaaagcucuugguccgaucaugaagccucauugggggugagcgcggcauguccauaccagggaaugcccuccuuuuucagaaaugugguauggcuuaucaaaaagaacaauacauacccaacaauaaagaguagcuacaauaauaccaaucaagaagaucuuuugauacugugggggauucaucauucuaaugaugaggcagaacagacaaggcucuaucaaaacucaaacaccuauauuuccguugggacaucaacacuaaaccagagauugguaccaaaaauagcuacuagauccaaaguaaacgggcaaaguggaaggauggauuuuuucuggacaauuuuaaaaccgaaugaugcaaucaacuucgagaguaacggaaauuucauugcuccagaauaugcauacaaaauugucaagaaaggagacucagcaauuaugaaaagugaaguaggauauggugacugcaacaccaagugucaaacuccaauaggggcgauaaacucuaguaugccauuccacaacauacacccucucaccaucggggaaugccccaaauaugugaaaucaaacaaauuaguccuugcgacugggcucagaaauagcccucaaauugaaacuagaggauuauuuggagcuauagcagguuuuauagagggaggauggcagggaaugguagaugguugguauggguaccaccauagcaaugaacaggggaguggguacgcugcagacaaagaauccacucaaaaggcaauagauggagucaccaauaaggucaacucgaucauugacaaaaugaacacucaguuugaggccguugagagggaauuuaauaacuuagaaaggagaauagagaauuugaacaagaaaauggaagacggauuccuagaugucuggacuuauaaugcugaacuucugguucucauggaaaaugagagaacucuagacuuccaugacucaaaugucaagaaccuuuacgacaagguccgacuacagcuuagggauaaugcaaaggagcuggguaacgguuguuuugaguucuaucacaaaugugauaaugaaugcauggaaaguguaagaaacggaacguaugacuacccgcaguauucagaagaagcaagauuaaaaagagaggaaauaaguggaguaaaauuggaaucaauaggaacuuaccaaauacugucaauuuauucaacaguugcaaguucccuagcacuggcaaucaugguggcuggucuaucuuuauggaugugcuccaaugggucguuacagugcagaauuugcauuuaa

SEQ ID NO: 46038 - RNA, 1683 nt, Artificial Sequence
  derived and/or modified CDS sequence (wt) from hemagglutinin__InfluenzaA__EPI470859
auggaagcaauaccacuaauaacuauacuacuaguaguaacagcaagcaaugcagacaaaaucugcaucggcuaccaaucaacaaacuccacagaaaccguagacacgcuaacagaaaacaauguuccugugacacaugccaaagaauugcuccacacagagcacaaugggaugcugugugcaacaaaucugggacguccucuuauucuagacacuugcaccauugaaggacugaucuauggcaacccuucuugugaucuacuguugggaggaagagaaugguccuacaucgucgaaagaccaucggcuguuaauggaauguguuaccccgggaauguagaaaaccuagaggaacuaaggucauuuuuuaguucugcuaguuccuaccaaagaauccagaucuuuccagacacaaucuggaaugugucuuacaguggaacaagcaaagcauguucagauucauucuacaggagcaugagaugguugacucaaaagaacaacgcuuacccuauucaagacgcccaauacacaaauaauagaggaaagagcauucuuuucauguggggcauaaaucacccaccuaccgauacugcacagacaaaucuguacacaaggacugacacaacaacaaguguggcaacagaagauauaaauaggaccuucaaaccagugauagggccaaggccccuugucaauggucugcagggaagaauugauuauuauuggucgguauugaaaccaggucagacauugcgaguaagauccaaugggaaucuaaucgcuccaugguaugggcacauucuuucaggagagagccacggaagaauccugaagacugauuuaaacagugguagcuguguagugcaaugucaaacagaaagagguggcuuaaauacuacuuugccauuccacaaugucaguaaauaugcauuuggaaacugcccaaaauauguuggaguaaagagucucaaacuggcaguuggucugaggaaugugccugcuagaucaaguagaggacuauuuggggccauagcuggauucauagagggagguuggucagggcuggucgcugguugguauggguuccagcauucaaaugaucaagggguugguauagcugcagauagagacucaacucaaagggcaauugacaaaauaacguccaaagugaauaauauagucgauaaaaugaacaagcaauaugaaauuauugaucaugaauucagcgagguugaaaauagacucaauaugaucaauaauaagauugaugaccagauacaagacauaugggcauauaacgcugaauugcuagugcugcuugaaaaccagaaaacacucgaugagcaugaugcgaauguaaacaaucuauauaacaaagugaagagggcacuggguuccaaugcaauggaagaugggaaaggauguuucgagcuauaccauaaaugugaugaucagugcauggagacaauucggaacgggaccuauaacaggaggaaguauaaagaggaaucaagacuagaaagacagaaaauagaaggggucaagcuggaaucugaaggaacuuacaaaauccucaccauuuauucgacugucgccucaucucuugugauugcaaugggguuugcugccuucuuguucugggccauguccaauggaucuugcagaugcaacauuuguauauaa

SEQ ID NO: 46039 - RNA, 1683 nt, Artificial Sequence
  derived and/or modified CDS sequence (wt) from hemagglutinin__InfluenzaA__EPI498037
auggagacaguaucacuaauaacuauacuacuaguagcaacaguaagcaaugcagauaaaaucugcaucggcuaucaaucaacaaacuccacagaaacuguggacacacuaacagaaaacaaugucccugugacacaugccaaagaacugcuccacacagagcauaaugggaugcugugugcaacaagcuugggacaaccucuuauuuuagacaccugcaccauugaagggcuaaucuauggcaauccuucuugugaucuauugcuggaaggaagagaaugguccuauaucgucgagagaccaucagcuguuaacggauuguguuaccccgggaauguagaaaaucuagaagagcuaaggucacuuuuuaguucugcuagaucuuaucaaagaauccagauuuucccagacacaaucuggaaugugucuuacaaugggacaagcaaagcuugcucagguucauucuacagaagcaugagaugguugacucgaaagaacggcgauuaccccauccaagacguccaauacacaaauaaucaagggaagaacauucuuuucauguggggcauaaaucacccacccaccgauacuacgcagagagaucuguacacgagaaccgacacaacaacgaguguggcaacagaagaaauaaauaggaucuucaaaccauugauaggaccaaggccucuugucaacgguuugaugggaagaauugauuauuauuggucgguuuugaaaccgggucaaacacugcgaauaaaaucugaugggaaucuaauagcuccaugguauggacacauucuuucaggagagagccacggaagaauucugaagacugaucuaaaaagggguagcugcacagugcaaugucagacagagaaagguggcuuaaacacaacauugccauuccaaaauguaaguaaguaugcauuuggaaacugcucaaaauacauuggcauaaagagccucaaacuugcaguuggucugaggaaugugccuucuagaucuaguagaggacuauucggggccauagcaggguuuauagagggagguuggucaggacuaguugcugguugguauggguuccagcauucaaaugaccaagggguugguauggcagcagauagagacucaacucaaaaggcaauugauaaaauaacauccaaagugaauaauauagucgacaaaaugaacaagcaauaugaaaucauugaucaugaauucagugagguagaaacuagacuuaacaugaucaauaauaagauugaugaucaaauccaggauauaugggcauauaaugcagaauugcuaguucugcuugaaaaccagaaaacacucgaugagcaugacgcaaauguaaacaaucuauauaauaaaguaaagagggcguuggguuccaaugcgguggaagaugggaaaggauguuucgagcuauaccacaaaugugauaaccaaugcauggagacaauucggaacgggaccuacaacaaaaggaaauaucaagaggagucaaaauuagaaagacagaaaauagagggggucaagcuggaaucugaaggaacuuacaaaauccucaccauuuauucgacugucgccucaucucuugugauugcaaugggguuugcugccuucuuguucugggccauguccaaugggucuugcagaugcaacauuuguauauaa

SEQ ID NO: 46040 - RNA, 1683 nt, Artificial Sequence
  derived and/or modified CDS sequence (wt) from hemagglutinin__InfluenzaA__AGO17847
auggaaacaauaucacuaaugacuauacuacugauaacgacagcaagcaaugcagauaaaaucugcaucggucaccagucaacaaacuccacagaaacuguggacacgcuaacagaaaccaauguuccugugacacaugccaaagaauugcuccaaacagagcacaauggaaugcugugugcgacaaaucuggggcauccccucauucuagacacaugcacuaucgaaggacuaaucuauggcaaccccucuugugaccugcuauuggagggaagagaaugguccuacauagucgaaagacccucagcuguaaacggaacuuguuacccugggaauguagaaaaccuagaggaacucaggacacuuuuuaguuccgccaguuccuaccaaagaauccaaaucuucccagacacaacauggaauguuacuuacacuggaacaagcagaucauguucagguucauucuacaggaguaugagauggcugacucaaaaaagcggguuuuacccuguccaagacgccaaauacacaaauaacagggggaagaacauccuuuucgugugggguauacaucacccacacaccuauaccgaccaaacaacuuuguacauaagaaacgacacaacaacaagugugacaacagaggaguugaauaggaucuucaaaccagugauagugccaaggcuucuugucaauggucagcaggggagaauugauuauuauuggucaguacuaaaaccaggccaaacauugcgaguaagauccaaugggaaucuaauugcuccaugguauggacacguucuuucaggagggagccauggaagaauccugaagacugauuuaaaaaguggcaauuguguagugcaaugucagacugaaaaagguggauuaaacaguacauugcccuuccacaauaucagcaaauaugcauuuggaaccugccccaaauauguaaaagucaauagucucaaacuggcaauuggucugaggaaugugccugcuagaucaaauagaggacuauuuggggcuaucgcugguuucauagaaggagguuggccaggacuaguagcuggcugguaugguuuccagcauucaaaugaucaagggguugguauggccgcagauagggauucaacucaaaaggcaguugauaaaauaacaucuaaggugaauaauauagucgacaagaugaauaagcaauaugaaauaauugaucaugaauucagugagguugaaacuagacucaauaugaucaauaauaagauugaugaucaaauacaagacguaugggcauauaaugcagaauugcuaguacuacuugaaaaccagaaaacgcucgaugagcaugaugcgaacgugaacaaucuauauaacaaggugaagagggcucugggcuccaaugcuauggaagaugggaaagguuguuucgaguuauaccauaagugugaugaucaaugcauggaaacaauucgaaacgggaccuaugauaggagaaaguauagagaggaaucaagauuagaacggcagagaauagaagggguuaaacuggaaucugagggaacuuacaaaauccucacuauuuauucgacugucgccucaucucuugugauugcgaugggguuugcugccuuccuguucugggccauguccaaugguucuugcaggugcaacauuuguauauaa

SEQ ID NO: 46041 - RNA, 1683 nt, Artificial Sequence
  derived and/or modified CDS sequence (wt) from hemagglutinin__InfluenzaA__ANZ03807
auggagacaguaucacuaauaacuauacuacuaguagcaacaguaagcaaugcagauaaaaucugcaucggcuaucaaucaacaaacuccacagaaacuguggacacacuaacagaaaacaaugucccugugacacaugccaaagaacugcuccacacagagcauaaugggaugcugugugcaacaagcuugggacaaccucuuauuuuagacaccugcaccauugaagggcuaaucuauggcaauccuucuugugaucuaucgcuggaaggaagagaaugguccuauaucgucgagagaccaucagcuguuaacggauuguguuaccccgggaauguagaaaaucuagaagagcuaaggucacuuuuuaguucugcuaggucuuaucaaagaauccagauuuucccggacacaauauggaaugugucuuacgauggaacaaguacagcaugcucagguucauucuacagaagcaugagaugguugacucgaaagaacggcgauuacccuacccaagacgcccaauacacaaauaaucaagggaagaacauccuuuucauguggggcauaaaucauccacccaccgaugauacgcagagaaaucuguacacgagaaccgacacaacaacgaguguggcaacagaagaaauaaauaggaucuucaaaccauugauaggaccaaggccucuugucaacgguuugaugggaagaauugauuauuauuggucuguauugaaaccgggucaaacacugcgaauaaaaucugaugggaaucuaauagcuccaugguauggacacauucuuucaggagagagccauggaagaauucugaagacugauuugaaaagggguagcugcacagugcaaugucagacagagaaagguggcuuaaacacaacacugccauuccaaaauguaaguaaguaugcauuuggaaacugcucaaaauacauuggcauaaagagucucaaacuugcaguuggucugaggaaugugccuucuagaucuaguagaggacuauucggggccauagcaggguuuauagagggagguuggucaggacucguugcugguugguauggguuccagcauucaaaugaccaagggguagguauggcagcagauagagacucaacccaaaaggcaauugauaaaauaacauccaaagugaauaauauagucgacaaaaugaacaagcaguaugaaaucauugaucaugaauucagugagguggaaacuagacuuaacaugaucaauaauaagauugaugaucaaauccaggauauaugggcauauaaugcagaauugcuaguuuuacuugaaaaucagaaaacacucgaugagcaugacgcaaaugugaacaaucuauauaauaaaguaaagagggcguuggguuccaaugcgguggaagaugggaaaggauguuucgagcuauaccacaaauguaaugaccaaugcauggagacaauucggaacgggaccuacaacagaaggaaguaucaagaggagucaaaauuagaaagacagaaaauagagggggucaagcuggaaucugaaggaacuuacaaaauccucaccauuuauucgacuguugccucaucucuugugauugcaaugggguuugcugccuucuuguucugggccauguccaaugggucuugcagaugcaacauuuguauauaa

SEQ ID NO: 46042 - RNA, 1683 nt, Artificial Sequence; identical to SEQ ID NO: 46041
  derived and/or modified CDS sequence (wt) from hemagglutinin__InfluenzaA__EPI680526

SEQ ID NO: 46043 - RNA, 1683 nt, Artificial Sequence; identical to SEQ ID NO: 45697
  derived and/or modified CDS sequence (wt) from hemagglutinin__InfluenzaA__ALT20080

SEQ ID NO: 46044 - RNA, 1410 nt, Artificial Sequence
  derived and/or modified CDS sequence (wt) from neuraminidase__InfluenzaA__AAA43084
augaauccaaaucaaaagauaauaacaauuggcucugucucucucaccauugcaacaguaugcuuccucaugcagauugccauccuggcaacuacugugacauugcauuuuaaacaacaugagugcgacucccccgcgagcaaccaaguaaugccaugugaaccaauaauaauagaaaggaacauaacagagauaguguauuugaauaacaccaccauagagaaagagauuugccccgaaguaguggaauacagaaauuggucaaagccgcaaugucaaauuacaggauuugcaccuuuuucuaaggacaauucaauccggcuuucugcugguggggacauuugggugacgagagaaccuuaugugucaugcgacccuggcaaguguuaucaauuugcacucgggcaggggaccacacuagacaacaaacauucaaauggcacaauacaugauagaaucccucaccgaacccuauuaaugaaugaguuggguguuccauuucauuuaggaaccaaacaaguguguguagcaugguccagcucaaguugucacgauggaaaagcaugguugcauguuugugucacuggggaugauagaaaugcgacugcuagcuucauuuaugacgggaggcuuguggacaguauugguucauggucucaaaauauccucaggacccaggagucggaaugcguuuguaucaaugggacuugcacaguaguaaugacugauggaagugcaucaggaagagccgauacuagaauacuauucauuaaagaggggaaaauuguccauauuagcccauugucaggaagugcucagcauauagaggaguguuccuguuacccucgauauccugacguaagauguaucugcagagacaacuggaaaggcucuaauaggcccguuauagacauaaauauggaagauuauagcauugauuccgguuaugugugcucagggcuuguuggcgacacacccaggaacgacgacagcucuagcaauagcaauugcagggauccuaacaaugaaagagggaauccaggagugaaaggcugggccuuugacaauggagaugauguauggaugggaagaacaaucaacaaagaaucacgcucagguuaugaaacuuucaaagucauuggugguugguccacaccuaauuccaaaucgcaggucaauagacaggucauaguugacaacaauaauuggucugguuacucugguauuuucucuguugagggcaaaagcugcaucaauaggugcuuuuauguggaguugauaaggggaaggccacaggagacuagaguaugguggaccucaaacaguauuguuguguuuuguggcacuucagguacuuauggaacaggcucauggccugauggggcgaacaucaauuucaugccuauauaa

SEQ ID NO: 46045 - RNA, 1362 nt, Artificial Sequence
  derived and/or modified CDS sequence (wt) from neuraminidase__InfluenzaA__AAA43397
augaauccaaaccagaaaauaauaaccauugggucaaucuguaugguagucggaauaauuagccuaauauugcaaauaggaaauauaaucucaauauggauuagccauucaauucaaaccggaaaucaaaaccauacuggaauaugcaaccaaggcagcauuaccuauaaaguuguugcugggcaggacucaacuucagugauauuaaccggcaauucaucucuuugucccauccgugggugggcuauacacagcaaagacaauggcauaagaauugguuccaaaggagacguuuuugucauaagagagccuuuuauuucauguucucacuuggaaugcaggaccuuuuuucugacucaaggcgccuuacugaaugacaagcauucaagggggaccuuuaaggacagaagcccuuauagggccuuaaugagcugcccugucggugaagcuccguccccguacaauucaagguuugaaucgguugcuuggucagcaagugcaugucaugauggagugggcuggcuaacaaucggaauuucugguccagaugauggagcaguggcuguauuaaaauacaaccgcauaauaacugaaaccauaaaaaguuggaggaagaauauauugagaacacaagagucugaauguaccuguguaaaugguucauguuuuaccauaaugaccgauggcccaagugaugggcuggccucguacaaaauuuucaagaucgagaaggggaagguuacuaaaucaauagaguugaaugcaccuaauucucacuacgaggaauguuccuguuacccugauaccggcaaagugaugugugugugcagagacaauuggcacgguucgaaccgaccauggguguccuucgaccaaaaccuagauuauaaaauaggauacaucugcagugggguuuucggugacaacccgcgucccaaagauggaacaggcagcuguggcccagugucugcugauggagcaaacggaguaaagggauuuucauauaaguauggcaaugguguuuggauaggaaggacuaaaagugacaguuccagacauggguuugagaugauuugggauccuaauggauggacagagacugauaguagguucucuaugagacaagauguuguggcaauaacuaaucggucaggguacagcggaaguuucguucaacauccugagcuaacagggcuagacuguaugaggccuugcuucuggguugaauuaaucagggggcuaccugaggaggacgcaaucuggacuagugggagcaucauuucuuuuuguggugugaauagugauacuguagauuggucuuggccagacggugcugaguugccguucaccauugacaaguag

SEQ ID NO: 46046 - RNA, 1365 nt, Artificial Sequence
  derived and/or modified CDS sequence (wt) from neuraminidase__InfluenzaA__AAA43412
augaauccaaaucagaaaauaauaaccauuggaucaaucugucugguagucggacuaauuagccuaauauugcaaauagggaauauaaucucaauauggauuagccauucaauucaaacuggaagucaaaaccauacuggaauaugcaaccaaaacaucauuaccuauaaaaauagcaccuggguaaaggacacaacuucagugauauuaaccggcaauucaucucuuugucccauccgugggugggcuauauacagcaaagacaauagcauaagaauugguuccaaaggagacguuuuugucauaagagagcccuuuauuucauguucucacuuggaaugcaggaccuuuuuucugacccaaggugccuuacugaaugacaggcauucaaaugggacuguuaaggacagaagcccuuauagggccuuaaugagcugcccugucggugaagcuccguccccguacaauucaagauuugaaucgguugcuuggucagcaagugcaugucaugauggcaugggcuggcuaacaaucggaauuucagguccagauaauggagcaguggcuguauuaaaauacaacggcauaauaacugaaaccauaaaaaguuggaggaagaaaauauugaggacacaagagucugaaugugccuguguaaaugguucauguuuuacuauaaugacugauggcccgagugaugggcuggccucguacaaaauuuucaagaucgaaaaggggaagguuacuaaaucaauagaguugaaugcaccuaauucucacuaugaggaauguuccuguuacccugauaccggcaaagugaugugugugugcagagacaauuggcaugguucgaaccggccaugggugucuuucgaucaaaaccuggauuaucaaauaggauacaucugcagugggguuuucggugacaacccgcgucccaaagauggaacaggcagcugugguccaguguauguugauggagcaaacggaguaaagggauuuucauauagguaugguaaugguguuuggauaggaaggaccaaaagucacaguuccagacauggguuugagaugauuugggauccuaauggauggacagagacugauaguaaguucucugugaggcaagauguuguggcaaugacugauuggucaggguauagcgggaguuucguucaacauccugagcuaacagggcuagacuguauaaggccgugcuucuggguugaauuaaucaggggacgaccuaaagaaaaaacaaucuggacuagugcgagcagcauuucuuuuuguggcgugaauagugauacuguagauuggucuuggccagacggugcugaguugccauucaccauugacaaguag

SEQ ID NO: 46047 - RNA, 1410 nt, Artificial Sequence
  derived and/or modified CDS sequence (wt) from neuraminidase__InfluenzaA__AAG01743
augaauccaaaucaaaagauaauaacacuuggcucugucucucucaccauugcaacaauaugcuuccucaugcagauugccauccugguaaccacuguaacauugcauuucaagcaauaugagugcgacuacccagcgaacaaccaagcaaugccgugugaaccaauaauaauagaaaggaacauaacagagauaguguaucugacuaacaccaccauagaaaaagagguaugccccaaauuaguggaauacaggaauuggucaaaaccacaauguaaaauuacaggauuugcaccuuucucuaaggacaauucaauucggcuuucugcugguggggacauuugggugacgagagaaccuuaugugucaugcgauccuggcaaguguuaucaauuugcacucgggcaggggaccacacuagacaacaaacauucaaaugacacaauacaugauagaaccccucaucgaacccuauugaugaaugaguuggguguuccauuucacuugggaaccaggcaaguguguauagcaugguccagcucaaguugucacgauggaaaagcauggcugcauguuugugucacuggguaugauaaaaaugcaacugcuagcuucauuuacgaugggaggcuuguagacagcauugguucauggucucaaaauauccucaggacccaggagucggaauguguuugcaucaaugggacuuguacagugguaaugacugauggaagugcuucaggaagagcugauaccaaaauacuauucauugaagaggggaaaauuguucauacuagcccauugucaggaagugcucagcauguagaggaguguuccuguuauccucgauauccuggugucagauguaucugcagagacaacuggaaaggcucuaauaggccagucguagauauaaaugugaaagauuauagcauuaauuccaguuaugugugcucagggcuugugggcgacacacccagaaacaaugacagaucuagcaguagcuauugccagaauccuaacaaugaaaaagggacucacggagugaaaggcugggccuuugacgauggaaaugacguguggaugggaagaacgaucagcgaggauucacgcucagguuaugaaaccuucaaagucauuggugguugguccacaccuaauuccaaauugcagauaaauaggcaagucauaguugacagcgauaauaggucagguuauucugguauuuucucuguugagggcaaaagcugcaucaauaggugcuuuuauguggaguugauaaggggaagggaacaggaaacuagaguaugguggaccucaaacaguauuguuguguuuuguggcacuucagguaccuaugggacaggcucauggccugauggggcggacaucaauaucaugccuauauaa

SEQ ID NO: 46048 - RNA, 1410 nt, Artificial Sequence
  derived and/or modified CDS sequence (wt) from neuraminidase__InfluenzaA__AAG01759
augaauccaaaucaaaagauaauaacgauuggcucuguuucucucacuauugccacaaugugcuuccuuaugcaaauugccauccugguaacuacuguaacauugcauuucaagcaauaugaaugcaacucccccccaaacaaccaaguaauacugugugaaccaacaauaauagaaagaaacauaacagagauaguguaucugaccaacaccaccauagagaaggaaauaugccccaaacuagcagaauacaaaaauuggucaaagccgcaauguaaaauuacaggauuugcaccguuuuccaaggacaauucgauuaggcuuuccgcugguggggacauuugggugacaagagaaccuuaugugucaugcgauccugacaaguguuaucaauuugcccuuggacagggaacaacacuaaacaacaggcauucaaaugacacaguacaugauaggaccccuuaucgaacccuauugaugaaugaguuggguguuccauuucauuugggaaccaagcaagugugcauagcaugguccagcucaaguugucacgauggaaaagcauggcugcauguuuguguaacugggcaugaugaaaaugcaacugcuagcuucauuuacgaugggaggcuuguagauaguauugguucaugguccaaaaaaauccucaggacccaggagucggaaugcguuuguaucaauggaacuuguacaguaguaaugacugaugggagugcuucaggaagagcugauacuaaaauauuauucauugaggaggggaaaaucguucauauuagcccauuguuaggaagugcucagcaugucgaggagugcuccuguuauccucgauauccuggugucagaugugucugcagagacaacuggaaaggcuccaauaggcccaucguagauauaaauguaaaggauuauagcauuguuuccagcuaugugugcucaggacuuguuggagacacacccagaaaaaacgacagauccagcaguagcaauugccugaauccuaacaaugaggaagggggucauggagugaaaggcugggccuuugaugauggaaaugacguguggaugggaagaacgaucagcgagaaauuacgcucagguuaugaaaccuucaaagucauugaagguugguccaaaccuaacuccaaauugcagauaaauaggcaagucauaguugacagagguaauagguccgguuauucuggcauuuucucuguugaaggcaaaagcugcaucaaucggugcuuuuauguggaguugauaaggggaaggaaacaggaaacugaagucugguggaccucaaacaguauuguuguguuuuguggcaccucagguacauauggaacaggcucauggccugauggggcggacaucaaucucaugccuauauaa

SEQ ID NO: 46049 - RNA, 1410 nt, Artificial Sequence
  derived and/or modified CDS sequence (wt) from neuraminidase__InfluenzaA__AAG01777
augaauccaaaucaaaagauaauaacgauuggcucuguuucucucacuauugccacaauaugcuuccuuaugcaaauugccauccugguaacuacuguaacauugcauuucaagcaauaugaaugcaacucccccccaaacaaccaaguaauacugugugaaccaacaauaauagaaagaaacauaacagagauaguguaucugaccaacaccaccauagagaaggaaauaugccccaaacuagcagaauacaaaaauuggucaaagccgcaauguaaaauuacaggauuugcaccguuuuccaaggacaauucgauuaggcuuuccgcugguggggacauuugggugacaagagaaccuuaugugucaugcgauccugacaaguguuaucaauuugcccuuggacagggaacaacacuaaacaacaggcauucaaaugacacaguacaugauaggaccccuuaucgaacccuauugaugaaugaguuggguguuccauuucauuugggaaccaagcaagugugcauagcaugguccagcucaaguugucacgauggaaaagcauggcugcauguuuguguaacugggcaugaugaaaaugcaacugcuagcuucauuuacgaugggaggcuuguagauaguauugguucaugguccaaaaaaauccucaggacccaggagucggaaugcguuuguaucaauggaacuuguacaguaguaaugacugaugggagugcuucaggaagagcugauacuaaaauacuauucauugaggaggggaaaaucguucauauuagcccauuguuaggaagugcucagcaugucgaggagugcuccuguuauccucgauauccuggugucagaugugucugcagagacaacuggaaaggcuccaauaggcccaucguagauauaaauguaaaggauuauagcauuguuuccagcuaugugugcucaggacuuguuggagacacacccagaaaaaacgacagauccagcaguagcaauugccugaauccuaacaaugaggaagggggucauggagugaaaggcugggccuuugaugauggaaaugacguguggaugggaagaacgaucagcgagaaguuacgcucagguuaugaaaccuucaaagucauugaaggaugguccaaaccuaacuccaaauugcagauaaauaggccagucauaguugacagaggugauagguccgguuauucuggcauuuuuucuguugaaggcaaaagcugcaucaaucggugcuuuuauguggaguugauaaggggaaggaaacaggaaacugaagucugguggaccucaaacaguauuguuguguuuuguggcaccucagguacauauggaacaggcucauggccugauggggcggacaucaaucucaugccuauauaa

SEQ ID NO: 46050 - RNA, 1410 nt, Artificial Sequence
  derived and/or modified CDS sequence (wt) from neuraminidase__InfluenzaA__AAG01786
augaauccaaaucaaaagauaauaacgauuggcucuguuucucucacuauugccacaaugugcuuccuuaugcaaauugccauccugguaacuacuguaacauugcauuucaagcaauaugaaugcaacucccccccaaacaaccaaguaauacugugugaaccaacaauaauagaaagaaacauaacagagauaguguaucugaccaacaccaccauagagaaggaaauaugccccaaacuagcagaauacaaaaauuggucaaagccgcaauguaaaauuacaggauuugcaccguuuuccaaggacaauucgauuaggcuuuccgcugguggggacauuugggugacaagagaaccuuaugugucaugcgauccugacaaguguuaucaauuugcccuuggacagggaacaacacuaaacaacaggcauucaaaugacacaguacaugauaggaccccuuaucgaacccuauugaugaaugaguuggguguuccauuucauuugggaaccaagcaagugugcauagcaugguccagcucaaguugucacgauggaaaagcauggcugcauguuuguguaacugggcaugaugaaaaugcaacugcuagcuucauuuacgaugggaggcuuguagauaguauugguucaugguccaaaaaaauccucaggacccaggagucggaaugcguuuguaucaauggaacuuguacaguaguaaugacugaugggagugcuucaggaagagcugauacuaaaauauuauucauugaggaggggaaaaucguucauauuagcccauuguuaggaagugcucagcaugucgaggagugcuccuguuauccucgauauccuggugucagaugugucugcagagacaacuggaaaggcuccaauaggcccaucguagauauaaauguaaaggauuauagcauuguuuccagcuaugugugcucaggacuuguuggagacacacccagaaaaaacgacagauccagcaguagcaauugccugaauccuaacaaugaggaagggggucauggagugaaaggcugggccuuugaugauggaaaugacguguggaugggaagaacgaucagcgagaaauuacgcucagguuaugaaaccuucaaagucauugaaggcugguccaaaccuaacuccaaauugcagauaaauaggcaagucauagucgacagaggugauagguccgguuauucuggcauuuucucuguugaaggcaaaagcugcaucaaucggugcuuuuauguggaguugauaaggggaaggaaacaggaaacugaagucugguggaccucaaacaguauuguuguguuuuguggcaccucagguacauauggaacaggcucauggccugauggggcggacaucaaucucaugccuauauaa

SEQ ID NO: 46051 - RNA, 1410 nt, Artificial Sequence
  derived and/or modified CDS sequence (wt) from neuraminidase__InfluenzaA__AAK71688
augaauccaaaucaaaagauaauaacgauuggcucuguuucucucacuauugccacaaugugcuuccuuaugcaaauugccauccugguaacuacuguaacauugcauuucaagcaauaugaaugcaacucccccccaaacaaccaaguaauacugugugaaccaacaauaauagaaagaaacauaacagagauaguguaucugaccaacgccaccauagagaaggaaauaugccccaaacuagcagaauacagaaauuggucaaagccacaauguaaaauuacaggauuugcaccauuuuccaaggacaauucgauuaggcuuuccgcugguggggacauuugggugacaagagaaccuuaugugucaugcgauccugacaaguguuaucaauuugcccuuggacagggaacaacacuaaacaacaggcauucaaaugacacaguacaugauaggaccccuuaucgaacccuauugaugaaugaguuggguguuccauuucauuugggaaccaagcaagugugcauagcaugguccagcucaaguugucacgauggaaaagcauggcugcauguuuguguaacuggacaugaugaaaaugcaacugcuagcuucauuuacgaugggaggcuuguagauaguauugguucaugguccaaaaaaauccucaggacccaggagucggaaugcguuuguaucaauggaacuuguacaguaguaaugacugaugggagugcuucaggaagagcugauacuaaaauauuauucauugaggaggggaaaaucguucauauuagcccauuguuaggaagugcucagcaugucgaggagugcuccuguuauccucgauauccuggugucagaugugucugcagagacaacuggaaaggcuccaauaggcccaucguagauauaaauguaaaggauuauagcauuguuuccaguuaugugugcucaggacuuguuggagacacacccagaaaaaacgacagauccagcaguagcaauugccugaauccuaacaaugaggaaggaggucauggagugaaaggcugggccuuugaugauggaaaugacguguggaugggaagaacgaucagcgaggaguuacgcucagguuaugaaaccuucaaagucauugaaggcugguccaaaccuaauuccaaauugcagauaaauaggcaagucauaguugacagaggugacagguccgguuauucuggcauuuucucuguugaaggcaaaagcugcaucaaucggugcuuuuauguggaguugauaaggggaaggaaacaggaaacugaagucugguggaccucaaacaguauuguuguguuuuguggcaccucagguacauauggaacaggcucauggccugauggggcggacaucaaucucaugccuauauaa

SEQ ID NO: 46052 - RNA, 1410 nt, Artificial Sequence
  derived and/or modified CDS sequence (wt) from neuraminidase__InfluenzaA__AAN01169
augaauccaaaucaaaagauaauaacgauuggcucuguuucucucacuauugccacaauaugcuuccuuaugcaaauugccauccugguaacuacuguaacauugcauuucaagcaauaugaaugcaacucucucccaaacaaccaaguaaugcugugugaaccaacaauaauagaaagaaacauaacagagauaguguaucugaccaacaccaccauagagaaggaaauaugccccaaacuagcagaauacagaaauuggucaaagccgcaauguaaaauuacaggauuugcaccuuuuucuaaggacaauucaauucggcuuuccgcugguggggacauuugggugacaagagaaccuuaugugucaugcgauccugacaaguguuaucaauuugcccuuggacagggaacaacacuaaacaacaggcauucaaaugacacaguacaugauaggaccccuuaucgaacccuauugaugaaugaguuggguguuccauuucauuugggaaccaagcaagugugcauagcaugguccagcucaaguugucacgauggaaaagcauggcugcauguuuguguaacugggcacgaugaaaaugcaacugcuagcuucauuuacgaugggaggcuuguagauaguauugguucaugguccaaaaaaauccucaggacccaggagucggaaugcguuuguaucaauggaacuuguacaguaguaaugacugaugggagugcuucaggaagagcugauacuaaaauacuauucauugaggaggggaaaaucauucauauuagccaauugucaggaagugcucagcaugucgaggagugcucauguuauccucgauauccuggugucagaugugucugcagagacaacuggaaaggcuccaauaggcccauuguagauauaaauguaaaggauuacagcauuguuuccaguuaugugugcucaggacuuguuggagacacacccagaaaaaacgacagcuccagcaguagccauugccugaauccuaacaaugaggaagggggucauggagugaaaggcugggccuuugaugauggaaaugacguguggaugggaagaacgaucagcgagaaauuccgcucagguuaugaaaccuucaaagucauugaaggcugguccaaaccuaacuccaaauugcagauaaauaggcaagucauaguugacagagauaauagguccgguuauucugguauuuucucuguugaaggcaaaagcugcaucaaucggugcuuuuauguggaauugauaaggggaaggaaacaggaaacugaagucugguggaccucaaacaguauuguuguguuuuguggcaccucagguacauauggaacaggcucauggccugauggggcggacaucaaucucaugccuauauaa

SEQ ID NO: 46053 - RNA, 1410 nt, Artificial Sequence
  derived and/or modified CDS sequence (wt) from neuraminidase__InfluenzaA__AAN01170
augaauccaaaucaaaagauaauaacgauuggcucuguuucucucacuauugccacaauaugcuuccuuaugcaaauugccauccugguaacuacuguaacauugcauuucaagcaauaugaaugcaacucucucccaaacaaccaaguaaugcugugugaaccaacaauaauagaaagaaacauaacagagauaguguaucugaccaacaccaccauagagaaggaaauaugccccaaacuagcagaauacagaaauuggucaaagccgcaauguaaaauuacaggauuugcaccuuuuucuaaggacaauucaauucggcuuuccgcugguggggacauuugggugacaagagaaccuuaugugucaugcgauccugacaaguguuaucaauuugcccuuggacagggaacaacacuaaacaacaggcauucaaaugacacaguacaugauaggaccccuuaucgaacccuauugaugaaugaguuggguguuccauuucauuugggaaccaagcaagugugcauagcaugguccagcucaaguugucacgauggaaaagcauggcugcauguuuguguaacugggcacgaugaaaaugcaacugcuagcuucauuuacgaugggaggcuuguagauaguauugguucaugguccaaaaaaauccucaggacccaggagucggaaugcguuuguaucaauggaacuuguacaguaguaaugacugaugggagugcuucaggaagagcugauacuaaaauacuauucauugaggaggggaaaaucauucauauuagccaauugucaggaagugcucagcaugucgaggagugcucauguuauccucgauauccuggugucagaugugucugcagagacaacuggaaaggcuccaauaggcccauuguagauauaaauguaaaggauuauagcauuguuuccaguuaugugugcucaggacuuguuggagacacacccagaaaaaacgacagcuccagcaguagccauugccugaauccuaacaaugaggaagggggucauggagugaaaggcugggccuuugaugauggaaaugacguguggaugggaagaacgaucagcgagaaauuccgcucagguuaugaaaccuucaaagucauugaaggcugguccaaaccuaacuccaaauugcagauaaauaggcaagucauaguugacagagauaauagguccgguuauucugguauuuucucuguugaaggcaaaagcugcaucaaucggugcuuuuauguggaauugauaaggggaaggaaacaggaaacugaagucugguggaccucaaacaguauuguuguguuuuguggcaccucagguacauauggaacaggcucauggccugauggggcggacaucaaucucaugccuauauaa

SEQ ID NO: 46054 - RNA, 1410 nt, Artificial Sequence
  derived and/or modified CDS sequence (wt) from neuraminidase__InfluenzaA__AAN01171
augaauccaaaucaaaagauaauaacgauuggcucuguuucucucacuauugccacaauaugcuuccuuaugcaaauugccauccugguaacuacuguaacauugcauuucaagcaauaugaaugcaacucucucccaaacaaccaaguaaugcugugugaaccaacaauaauagaaagaaacauaacagagauaguguaucugaccaacaccaccauagagaaggaaauaugccccaaacuagcagaauacagaaauuggucaaagccgcaauguaaaauuacaggauuugcaccuuuuucuaaggacaauucaauucggcuuuccgcugguggggacauuugggugacaagagaaccuuaugugucaugcgauccugacaaguguuaucaauuugcccuuggacagggaacaacacuaaacaacaggcauucaaaugacacaguacaugguaggaccccuuaucgaacccuauugaugaaugaguuggguguuccauuucauuugggaaccaagcaagugugcauagcaugguccagcucaaguugucacgauggaaaagcauggcugcauguuuguguaacugggcacgaugaaaaugcaacugcuagcuucauuuacgaugggaggcuuguagauaguauugguucaugguccaaaaaaauccucaggacccaggagucggaaugcguuuguaucaauggaacuuguacaguaguaaugacugaugggagugcuucaggaagagcugauacuaaaauacuauucauugaggaggggaaaaucauucauauuagccaauugucaggaagugcucagcaugucgaggagugcucauguuauccucgauauccuggugucagaugugucugcagagacaacuggaaaggcuccaauaggcccauuguagauauaaauguaaaggauuauagcauuguuuccaguuaugugugcucaggacuuguuggagacacacccagaaaaaacgacagcuccagcaguagccauugccugaauccuaacaaugaggaagggggucauggagugaaaggcugggccuuugaugauggaaaugacguguggaugggaagaacgaucagcgagaaauuccgcucagguuaugaaaccuucaaagucauugaaggcugguccaaaccuaauuccaaauugcagauaaauaggcaagucauaguugacagagauaauagguccgguuauucugguauuuucucuguugaaggcaaaagcugcaucaaucggugcuuuuauguggaauugauaaggggaaggaaacaggaaacugaagucugguggaccucaaacaguauuguuguguuuuguggcaccucagguacauauggaacaggcucauggccugauggggcggacaucaaucucaugccuauauaa

SEQ ID NO: 46055 - RNA, 1410 nt, Artificial Sequence; identical to SEQ ID NO: 46053
  derived and/or modified CDS sequence (wt) from neuraminidase__InfluenzaA__AAN01172

SEQ ID NO: 46056 - RNA, 1410 nt, Artificial Sequence
  derived and/or modified CDS sequence (wt) from neuraminidase__InfluenzaA__AAN01173
augaauccaaaucaaaagauaauaacgauuggcucuguuucucucacuauugccacaauaugcuuccuuaugcaaauugccauccugguaacuacuguaacauugcauuucaagcaauaugaaugcaacucucucccaaacaaccaaguaaugcugugugaaccaacaauaauagaaagaaacauaacagagauaguguaucugaccaacaccaccauagagaaggaaaugugccccaaacuagcagaauacagaaauuggucaaagccgcaauguaaaauuacaggauuugcaccuuuuucuaaggacaauucaauucggcuuuccgcugguggggacauuugggugacaagagaaccuuaugugucaugcgauccugacaaguguuaucaauuugcccuuggacagggaacaacacuaaacaacaggcauucaaaugacacaguacaugauaggaccccuuaucgaacccuauugaugaaugaguuggguguuccauuucauuugggaaccaagcaagugugcauagcaugguccagcucaaguugucacgauggaaaagcauggcugcauguuuguguaacugggcacgaugaaaaugcaacugcuagcuucauuuacgaugggaggcuuguagauaguauugguucaugguccaaaaaaauccucaggacccaggagucggaaugcguuuguaucaauggaacuuguacaguaguaaugacugaugggagugcuucaggaagagcugauacuaaaauacuauucauugaggaggggaaaaucauucauauuagccaauugucaggaagugcucagcaugucgaggagugcucauguuauccucgauauccuggugucagaugugucugcagagacaacuggaaaggcuccaauaggcccauuguagauauaaauguaaaggauuauagcauuguuuccaguuaugugugcucaggacuuguuggagacacacccagaaaaaacgacagcuccagcaguagccauugccugaauccuaacaaugaggaagggggucauggagugaaaggcugggccuuugaugauggaaaugacguguggaugggaagaacgaucagcgagaaauuccgcucagguuaugaaaccuucaaagucauugaaggcugguccaaaccuaacuccaaauugcagauaaauaggcaagucauaguugacagagauaauagguccgguuauucugguauuuucucuguugaaggcaaaagcugcaucaaucggugcuuuuauguggaauugauaaggggaaggaaacaggaaacugaagucugguggaccucaaacaguauuguuguguuuuguggcaccucagguacauauggaacaggcucauggccugauggggcggacaucaaucucaugccuauauaa

SEQ ID NO: 46057 - RNA, 1410 nt, Artificial Sequence; identical to SEQ ID NO: 46053
  derived and/or modified CDS sequence (wt) from neuraminidase__InfluenzaA__AAN01174

SEQ ID NO: 46058 - RNA, 1410 nt, Artificial Sequence; identical to SEQ ID NO: 46052
  derived and/or modified CDS sequence (wt) from neuraminidase__InfluenzaA__AAN01175

SEQ ID NO: 46059 - RNA, 1410 nt, Artificial Sequence
  derived and/or modified CDS sequence (wt) from neuraminidase__InfluenzaA__AAN01176
augaauccaaaucaaaagauaauaacgauuggcucuguuucucucacuauugccacaauaugcuuccuuaugcaaauugccauccugguaacuacuguaacauugcauuucaagcaauaugaaugcaacucucucccaaacaaccaaguaaugcugugugaaccaacaauaauagaaagaaacauaacagagauaguguaucugaccaacaccaccauagagaaggaaauaugccccaaacuagcagaauacagaaauuggucaaagccacaauguaaaauuacaggauuugcaccuuuuucuaaggacaauucaauucggcuuuccgcugguggggacauuugggugacaagagaaccuuaugugucaugcgauccugacaaguguuaucaauuugcccuuggacagggaacaacacuaaacaacaggcauucaaaugacacaguacaugauaggaccccuuaucgaacccuauugaugaaugaguuggguguuccauuucauuugggaaccaagcaagugugcauagcaugguccagcucaaguugucacgauggaaaagcauggcugcauguuuguguaacugggcacgaugaaaaugcaacugcuagcuucauuuacgaugggaggcuuguagauaguauugguucaugguccaaaaaaauccucaggacccaggagucggaaugcguuuguaucaauggaacuuguacaguaguaaugacugaugggagugcuucaggaagagcugauacuaaaauacuauucauugaggaggggaaaaucauucauauuagccaauugucaggaagugcucagcaugucgaggagugcucauguuauccucgauauccuggugucagaugugucugcagagacaacuggaaaggcuccaauaggcccauuguagauauaaauguaaaggauuauagcauuguuuccaguuaugugugcucaggacuuguuggagacacacccagaaaaaacgacagcuccagcaguagccauugccugaauccuaacaaugaggaagggggucauggagugaaaggcugggccuuugaugauggaaaugacguguggaugggaagaacgaucagcgagaaauuccgcucagguuaugaaaccuucaaagucauugaaggcugguccaaaccuaacuccaaauugcagauaaauaggcaagucauaguugacagagauaauagguccgguuauucugguauuuucucuguugaaggcaaaagcugcaucaaucggugcuuuuauguggaauugauaaggggaaggaaacaggaaacugaagucugguggaccucaaacaguauuguuguguuuuguggcaccucagguacauauggaacaggcucauggccugauggggcggacaucaaucucaugccuauauaa

SEQ ID NO: 46060 - RNA, 1410 nt, Artificial Sequence; identical to SEQ ID NO: 46053
  derived and/or modified CDS sequence (wt) from neuraminidase__InfluenzaA__AAN01177

SEQ ID NO: 46061 - RNA, 1410 nt, Artificial Sequence; identical to SEQ ID NO: 46053
  derived and/or modified CDS sequence (wt) from neuraminidase__InfluenzaA__AAN01178

SEQ ID NO: 46062 - RNA, 1410 nt, Artificial Sequence; identical to SEQ ID NO: 46053
  derived and/or modified CDS sequence (wt) from neuraminidase__InfluenzaA__AAN01179

SEQ ID NO: 46063 - RNA, 1410 nt, Artificial Sequence
  derived and/or modified CDS sequence (wt) from neuraminidase__InfluenzaA__AAN01180
augaauccaaaucaaaagauaauaacgauuggcucuguuucucucacuauugccacaauaugcuuccuuaugcaaauugccauccugguaacuacuguaacauugcauuucaagcaauaugaaugcaacucucucccaaacaaccaaguaaugcugugugaaccaacaauaauagaaagaaacauaacagagauaguguaucugaccaacaccaccauagagaaggaaauaugccccaaacuagcagaauacagaaauuggucaaagccgcaauguaaaauuacaggauuugcaccuuuuucuaaggacaauucaauucggcuuuccgcugguggggacauuugggugacaagagaaccuuaugugucaugcgauccugacaaguguuaucaauuugcccuuggacagggaacaacacuaaacaacaggcauucaaaugacacaguacaugauaggaccccuuaucgaacccuauugaugaaugaguuggguguuccauuucauuugggaaccaagcaagugugcauagcaugguccagcucaaguugucacgauggaaaagcauggcugcauguuuguguaacugggcaugaugaaaaugcaacugcuagcuucauuuacgaugggaggcuuguagauaguauugguucaugguccaaaaaaauccucaggacccaggagucggaaugcguuuguaucaauggaacuuguacaguaguaaugacugaugggagugcuucaggaagagcugauacuaaaauacuauucauugaggaggggaaaauuauucauauuagccaauugucaggaagugcucagcaugucgaggagugcucauguuauccucgauauccuggugucagaugugucugcagagacaacuggaaaggcuccaauaggcccauuguagauauaaauguaaaggauuauagcauuguuuccaguuaugugugcucaggacuuguuggagacacacccagaaaaaacgacagcuccagcaguagccauugccugaauccuaacaacgaggaagggggucauggagugaaaggcugggccuuugaugauggaaaugacguguggaugggaagaacgaucagcgagaaauuccgcucagguuaugaaaccuucaaagucauugaaggcugguccaaaccuaacuccaaauugcagauaaauaggcaagucauaguugacagagauaauagguccgguuauucugguauuuucucuguugaaggcaaaagcugcaucaaucggugcuuuuauguggaauugauaaggggaaggaaacaggaaacugaagucugguggaccucaaacaguauuguuguguuuuguggcaccucagguacauauggaacaggcucauggccugauggggcggacaucaaucucaugccuauauaa

SEQ ID NO: 46064 - RNA, 1410 nt, Artificial Sequence
  derived and/or modified CDS sequence (wt) from neuraminidase__InfluenzaA__AAN01181
augaauccaaaucaaaagauaauaacgauuggcucuguuucucucacuauugccacaauaugcuuccuuaugcaaauugccauccugguaacuacuguaacauugcauuucaagcaauaugaaugcaacucucucccaaacaaccaaguaaugcugugugaaccaacaauaauagaaagaaacauaacagagauaguguaucugaccaacaccaccauagagaaggagauaugccccaaacuagcagaauacagaaauuggucaaagccgcaauguaaaauuacaggauuugcaccuuuuucuaaggacaauucaauucggcuuuccgcugguggggacauuugggugacaagagaaccuuaugugucaugcgauccugacaaguguuaucaauuugcccuuggacagggaacaacacuaaacaacaggcauucaaaugacacaguacaugauaggaccccuuaucgaacccuauugaugaaugaguuggguguuccauuucauuugggaaccaagcaagugugcauagcaugguccagcucaaguugucaugauggaaaagcauggcugcauguuuguguaacugggcacgaugaaaaugcaacugcuagcuucauuuacgaugggaggcuuguagauaguauugguucaugguccaaaaaaauccucaggacccaggagucggaaugcguuuguaucaauggaacuuguacaguaguaaugacugaugggagugcuucaggaagagcugauacuaaaauacuauucauugaggaggggaaaaucauucauauuagccaauugucaggaagugcucagcaugucgaggagugcucauguuauccucgauauccuggugucagaugugucugcagagacaacuggaaaggcuccaauaggcccauuguagauauaaauguaaaggauuauagcauuguuuccaguuaugugugcucaggacuuguuggagacacacccagaaaaaacgacagcuccagcaguagccauugccugaauccuaacaaugaggaagggggucauggagugaaaggcugggccuuugaugauggaaaugacguguggaugggaagaacgaucggcgagaaauuccgcucagguuaugaaacuuucaaagucauugaaggcugguccaaaccuaacuccaaauugcagauaaauaggcaagucauaguugacagagauaauagguccgguuauucugguauuuucucuguugaaggcaaaagcugcaucaaucggugcuuuuauguggaguugauaaggggaaggaaacaggaaacugaagucugguggaccucaaacaguauuguuguguuuuguggcaccucagguacauauggaacaggcucauggccugauggggcggacaucaaucucaugccuauauaa

SEQ ID NO: 46065 - RNA, 1410 nt, Artificial Sequence; identical to SEQ ID NO: 46053
  derived and/or modified CDS sequence (wt) from neuraminidase__InfluenzaA__AAN01182

SEQ ID NO: 46066 - RNA, 1410 nt, Artificial Sequence
  derived and/or modified CDS sequence (wt) from neuraminidase__InfluenzaA__AAN01183
augaauccaaaucaaaagauaauaacgauuggcucuguuucucucacuauugccacaauaugcuuccuuaugcaaauugccauccugguaacuacuguaacauugcauuucaagcaauaugaaugcaacucucucccaaacaaccaaguaaugcugugugaaccaacaauaauagaaagaaacauaacagagauaguguaucugaccaacaccaccauagagaaggaaauaugccccaaacuagcagaauacagaaauuggucaaagccgcaauguaaaauuacaggauuugcaccuuuuucuaaggacaauucaauucggcuuuccgcugguggggacauuugggugacaagagaaccuuaugugucaugcgauccugacaaguguuaucaauuugcccuuggacagggaacaacacuaaacaacaggcauucaaaugacacaguacaugauaggaccccuuaucgaacccuauugaugaaugaguugggugucccauuucauuugggaaccaagcaagugugcauagcaugguccagcucaaguugucacgauggaaaagcauggcugcauguuuguguaacugggcacgaugaaaaugcaacugcuagcuucauuuacgaugggaggcuuguagauaguauugguucaugguccaaaaaaauccucaggacccaggagucggaaugcguuuguaucaauggaacuuguacaguaguaaugacugaugggagugcuucaggaagagcugauacuaaaauacuauucauugaggaggggaaaaucauucauauuagccaauugucaggaagugcucagcaugucgaggagugcucauguuauccucgauauccuggugucagaugugucugcagagacaacuggaaaggcuccaauaggcccauuguagauauaaauguaaaggauuauagcauuguuuccaguuaugugugcucaggacuuguuggagacacacccagaaaaaacgacagcuccagcaguagccauugccugaauccuaacaaugaggaagggggucauggagugaaaggcugggccuuugaugauggaaaugacguguggaugggaagaacgaucagcgagaaauuccgcucagguuaugaaaccuucaaagucauugaaggcugguccaaaccuaacuccaaauugcagauaaauaggcaagucauaguugacagagauaauagguccgguuauucugguauuuucucuguugaaggcaaaagcugcaucaaucggugcuuuuauguggaguugauaaggggaaggaaacaggaaacugaagucugguggaccucaaacaguauuguuguguuuuguggcaccucagguacauauggaacaggcucauggccugauggggcggacaucaaucucaugccuauauaa

SEQ ID NO: 46067 - RNA, 1410 nt, Artificial Sequence; identical to SEQ ID NO: 46059
  derived and/or modified CDS sequence (wt) from neuraminidase__InfluenzaA__AAN01184

SEQ ID NO: 46068 - RNA, 1410 nt, Artificial Sequence
  derived and/or modified CDS sequence (wt) from neuraminidase__InfluenzaA__AAN01185
augaauccaaaucaaaagauaauaacgauuggcucuguuucucucacuauugccacaauaugcuuccuuaugcaaauugccauccugguaacuacuguaacauugcauuucaagcaauaugaaugcaacucucucccaaacaaccaaguaaugcugugugaaccaacaauaauagaaagaaacauaacagagauaguguaucugaccaacaccaccauagagaaggaaauaugccccaaacuagcagaauacagaaauuggucaaagccgcaauguaaaauuacaggauuugcaccuuuuucuaaggacaauucaauucggcuuuccgcugguggggacauuugggugacaagagaaccuuaugugucaugcgauccugacaaguguuaucaauuugcccuuggacagggaacaacacuaaacaacaggcauucaaaugacacaguacaugauaggaccccuuaucgaacccuauugaugaaugaguuggguguuccauuucauuugggaaccaagcaagugugcauagcaugguccagcucaaguugucacgauggaaaagcauggcugcauguuuguguaacugggcacgaugaaaaugcaacugcuagcuucauuuacgaugggaggcuuguagauaguauugguucaugguccaaaaaaauccucaggacccaggagucggaaugcguuuguaucaauggaacuuguacaguaguaaugacugaugggagugcuucaggaagagcugauacuaaaauacuauucauugaggaggggaaaaucauucauauuagccaauugucaggaagugcucagcaugucgaggagugcucauguuauccucgauauccuggugucagaugugucugcagagacaacuggaaaggcuccaauaggcccauuguagauauaaauguaaaagauuauagcauuguuuccaguuaugugugcucaggacuuguuggagacacacccagaaaaaacgacagcuccagcaguagccauugccugaauccuaacaaugaggaagggggucauggagugaaaggcugggccuuugaugauggaaaugacguguggaugggaagaacgaucagcgagaaauuccgcucagguuaugaaaccuucaaagucauugaaggcugguccaaaccuaacuccaaauugcagauaaauaggcaagucauaguugacagagauaauagguccgguuauucugguauuuucucuguugaaggcaaaagcugcaucaaucggugcuuuuauguggaauugauaaggggaaggaaacaggaaacugaagucugguggaccucaaacaguauuguuguguuuuguggcaccucagguacauauggaacaggcucauggccugauggggcggacaucaaucucaugccuauauaa

SEQ ID NO: 46069 - RNA, 1410 nt, Artificial Sequence
  derived and/or modified CDS sequence (wt) from neuraminidase__InfluenzaA__AAN01186
augaauccaaaucaaaagauaauaacgauuggcucuguuucucucacuauugccacaauaugcuuccuuaugcaaauugccauccugguaacuacuguaacauugcauuucaagcaauaugaaugcaacucucucccaaacaaccaaguaaugcugugugaaccaacaauaauagaaagaaacauaacagagauaguguaucugaccaacaccaccauagagaaggaaauaugccccaaauuagcagaauacagaaauuggucaaagccgcaauguaaaauuacaggauuugcaccuuuuucuaaggacaauucaauucggcuuuccgcugguggggacauuugggugacaagagaaccuuaugugucaugcgauccugauaaguguuaucaauuugcccuuggacagggaacaacacuaaacaacaggcauucaaacgacacaguacaugauaggaccccuuaucgaacccuauugaugaaugaguuggguguuccauuucauuugggaaccaagcaagugugcauagcaugguccagcucaaguugucacgauggaaaagcauggcugcauguuuguguaacugggcacgaugaaaaugcaacugcuagcuucauuuacgaugggaggcuuguagauaguauugguucaugguccaaaaaaauccucaggacccaggagucggaaugcguuuguaucaauggaacuuguacaguaguaaugacugaugggagugcuucaggaagagcugauacuaagauacuauucauugaggaggggaaaaucauucauauuagccaauugucaggaagugcucagcaugucgaggagugcucauguuauccucgauauccuggugucagaugugucugcagagacaacuggaaaggcuccaauaggcccauuguagauauaaauguaaaggauuauagcauuguuuccaguuaugugugcucaggacuuguuggagacacacccagaaaaaacgacagcuccagcaguagccauugccugaauccuaacaaugaggaagggggucauggagugaaaggcugggccuuugaugauggaaaugacguguggaugggaagaacgaucagcgagaaauuccgcuuagguuaugaaacuuucaaagucauugaaggcugguccaaaucuaacuccaaauugcagauaaauaggcaagucauaguugacagagauaauagguccgguuauucugguauuuucucuguugaaggcaaaagcuguaucaaucggugcuuuuauguggaguugauaaggggaaggaaacaggaaacugaagucugguggaccucaaacaguauuguuguguuuuguggcaccucagguacauauggaacaggcucauggccugauggggcggacaucaaucucaugccuauauaa

SEQ ID NO: 46070 - RNA, 1410 nt, Artificial Sequence
  derived and/or modified CDS sequence (wt) from neuraminidase__InfluenzaA__AAN01187
augaauccaaaucaaaagauaauaacgauuggcucuguuucucucacuauugccacaauaugcuuccuuaugcaaauugccauccugguaacuacuguaacauugcauuucaagcaauaugaaugcgacucucucccaaacaaccaaguaaugcugugugaaccaacaauaauagaaagaaacauaacagagauaguguaucugaccaacaccaccauagagaaggaaaugugccccaaacuagcagaauacagaaauuggucaaagccgcaauguaaaauuacaggauuugcaccuuuuucuaaggacaauucaauucggcuuuccgcugguggggacauuugggugacaagagaaccuuaugugucaugcgauccugacaaguguuaucaauuugcccuuggacagggaacaacacuaaacaacaggcauucaaacgacacaguacaugauaggaccccuuaucgaacccuauugaugaaugaguuggguguuccauuucauuugggaaccaagcaagugugcauagcaugguccagcucaaguugucacgauggaaaagcauggcugcauguuuguguaacugggcacgaugaaaaugcaacugcuagcuucauuuacgaugggaggcuuguagauaguauugguucaugguccaaaaaaauccucaggacccaggagucggaaugcguuuguaucaauggaacuuguacaguaguaaugacugaugggagugcuucaggaagagcugauacuaaaauacuauucauugaggaggggaaaaucauucauauuagccaaaugucaggaagugcucagcaugucgaggagugcucauguuauccucgauauccuggugucagaugugucugcagagacaacuggaaaggcuccaauaggcccauuguagauauaaauguaaaggauuauagcauuguuuccaguuaugugugcucaggacuuguuggagacacacccagaaaaaacgacagcuccagcaguagccauugccugaauccuaacaaugaggaagggggucauggagugaaaggcugggccuuugaugauggaaaugacguguggaugggaagaacgaucagcgagaaauuccgcucagguuaugaaaccuucaaagucauugaaggcugguccaaaccuaacuccaaauugcagauaaauaggcaagucauaguugacagagauaauagguccgguuauucugguauuuucucuguugaaggcaaaagcugcaucaaucggugcuuuuauguggaguugauaaggggaaggaaacaggaaacugaagucugguggaccucaaacaguauuguuguguuuuguggcaccucagguacauauggaacaggcucauggccugauggggcggacaucaaucucaugccuauauaa

SEQ ID NO: 46071 - RNA, 1410 nt, Artificial Sequence
  derived and/or modified CDS sequence (wt) from neuraminidase__InfluenzaA__AAN01188
augaauccaaaucaaaagauaauaacgauuggcucuguuucucucacuauugccacaauaugcuuccuuaugcaaauugccauccugguaacuacuguaacauugcauuucaagcaauaugaaugcaacucucucccaaacaaccaaguaaugcugugugaaccaacaauaauagaaagaaacauaacagagauaguguaucugaccaacaccaccauagagaaggaaauaugccccaaacuagcagaauacagaaauuggucaaagccgcaauguaaaauuacaggauuugcaccuuuuucuaaggacaauucaauucggcuuuccgcugguggggacauuugggugacaagagaaccuuaugugucaugcgauccugacaaguguuaucaauuugcccuuggacagggaacaacacuaaacaacaggcauucaaaugacacaguacaugauaggaccccuuaucgaacccuauugaugaaugaguuggguguuccauuucauuugggaaccaagcaagugugcauagcaugguccagcucaaguugucacgauggaaaagcauggcugcauguuuguguaacugggcacgaugaaaaugcaacugcuagcuucauuuacgaugggaggcuuguagauaguauugguucaugguccaaaaaaauccucaggacccaggagucggaaugcguuuguaucaauggaacuuguacaguaguaaugacugaugggagugcuucaggaagagcugauacuaaaauacuauucauugaggaggggaaaaucauucauauuagccaauugucaggaagugcucagcaugucgaggagugcucauguuauccucgauauccuggugucagaugugucugcagagacaacuggaaaggcuccaauaggcccauuguagauauaaauguaaaggauuauagcauuguuuccaguuaugugugcucaggacuuguuggagacacacccagaaaaaacgacagcuccagcaguagccauugccugaauccuaacaaugaggaagggggucauggagugaaaggcugggccuuugaugauggaaaugacguguggaugggaagaacgaucagcgagaaauuccgcucagguuaugaaaccuucaaagucauugaaggcugguccaaaccuaacuccaaauugcagauaaauaggcaagucauaguugacagagauaauagguccgguuauucugguauuuucucuguugaaggcaaaagcugcaucaaucggugcuuuuauguggaguugauaaggggaaggaaacaggaaacugaagucugguggaccucaaacaguauuguuguguuuuguggcaccucagguacauauggaacaggcucauggccugauggggcggacaucaaucucaugccuauauaa

SEQ ID NO: 46072 - RNA, 1410 nt, Artificial Sequence
  derived and/or modified CDS sequence (wt) from neuraminidase__InfluenzaA__AAN64883
augaauccaaaucaaaagauaauaacgauuggcucuguuucucucaccauugccacaauaugcuuccuuaugcaaauugccauccugguaacuacuguaacauugcauuucaagcaauaugaaugcaacucccccccaaacaaccaagugaugcugugugaaccaacaauaauagaaagaaacauaacagagauaguguaucugaccaacaccaccauagagaaggaaauaugccccaaacuagcagaauacagaaauuggucaaagccgcaauguaacauuacuggauuugcaccuuuuucuaaggacaauucgauucggcuuuccgcugguggggacaucugggugacaagagaaccuuaugugucaugcgauccugacaaguguuaucaauuugcccuuggacagggaacaacacuaaacaacgggcauucaaaugacacaguacaugauaggaccccuuaucggacccuauugaugaaugaguuggguguuccauuucauuugggaaccaagcaagugugcauagcaugguccagcucaaguugucacgauggaaaagcauggcugcauguuuguguaacgggggaugaugaaaaugcaacugcuagcuucauuuacaaugggaggcuuguagauaguauagguucaugguccaaaaaaauccucaggacccaggagucggaaugcguuuguaucaauggaacuuguacaguaguaaugacugaugggagugcuucaggaaaagcugauacuaaaauacuauucauugaggaggggaaaaucguucauacuagccuauugucagggagugcucagcaugucgaggagugcuccuguuauccucgauauccuggugucagaugugucugcagagacaacuggaaaggcuccaauaggcccauuguagauauaaauguaaaggauuauagcauuguuuccaguuaugugugcucaggacuuguuggggacacacccagaaaaaacgacagcuccagcaguagccauugcuuggauccuaacaaugaggaagguggucauggagugaaaggcugggccuuugaugauggagaugacguguggaugggaagaacgaucagcgagaaguuacgcucaggauaugaaaccuucaaaguaauugaaggcugguccaaaccuaacuccaaacugcagauaaauaggcaagucauaguugacagagguaauagguccgguuauucugguauuuucucuguugaaggcaaaagcugcaucaaucggugcuuuuauguggaguugauaaggggaaggaaacaggaaacugaagucuuguggaccucaaacaguauuguuguguuuuguggcaccucagguacauauggaacaggcucauggccugauggggcggacaucaaucucaugccuauauaa

SEQ ID NO: 46073 - RNA, 1410 nt, Artificial Sequence
  derived and/or modified CDS sequence (wt) from neuraminidase__InfluenzaA__AAN64884
augaauccaaaucaaaagauaauaacgauuggcucuguuucucucaccauugccacaauaugcuuccuuaugcaaauugccauccugguaacuacuguaacauugcauuucaagcaauaugaaugcaacucccccccaaacaaccaagugaugcugugugaaccaacaauaauagaaagaaacauaacagagauaguguaucugaccaacaccaccauagagaaggaaauaugccccaaacuagcagaauacagaaauuggucaaagccgcaauguaacauuacuggauuugcaccuuuuucuaaggacaauucgauucggcuuuccgcugguggggacaucugggugacaagagaaccuuaugugucaugcgauccugacaaguguuaucaauuugcccuuggacagggaacaacacuaaacaacgggcacucaaaugacacaguacaugauaggaccccuuaucggacccuauugaugaaugaguuggguguuccauuucauuugggaaccaagcaagugugcauagcaugguccagcucaaguugucacgauggaaaagcauggcugcauguuuguguaacgggggaugaugaaaaugcaacugcuagcuucauuuacaaugggaggcuuguagauaguauagguucaugguccaaaaaaauccucaggacccaggagucggaaugcguuuguaucaauggaacuuguacaguaguaaugacugaugggagugcuucaggaaaagcugauacuaaaauacuauucauugaggaggggaaaaucguucauacuagccuauugucagggagugcucagcaugucgaggagugcuccuguuauccucgauauccuggugucagaugugucugcagagacaacuggaaaggcuccaauaggccuauuguagauauaaauguaaaggauuauagcauuguuuccaguuaugugugcucaggacuuguuggggacacacccagaaaaaacgacagcuccagcaguagccauugcuuggauccuaacaaugaggaagguggucauggagugaaaggcugggccuuugaugauggaaaugacguguggaugggaagaacgaucagcgagaaguuacgcucaggauaugaaaccuucaaagucauugaaggcugguccaaaccuaacuccaaacugcagauaaauaggcaagucauaguugacagagguaauagguccgguuauucugguauuuucucuguugaaggcaaaagcugcaucaaucggugcuuuuauguggaguugauaaggggaaggaaacaggaaacugaagucuuguggaccucaaacaguauuguuguguuuuguggcaccucagguacauauggaacaggcucauggccugauggggcggacaucaaucucaugccuauauaa

SEQ ID NO: 46074 - RNA, 1410 nt, Artificial Sequence
  derived and/or modified CDS sequence (wt) from neuraminidase__InfluenzaA__AAN64885
augaauccaaaucaaaagauaauaacgauuggcucuguuucucucaccauugccacaauaugcuuccuuaugcaaauugccauccugguaacuacuguaacauugcauuucaagcaauaugaaugcaacucccccccaaacaaccaagugaugcugugugaaccaacaauaauagaaagaaacauaacagagauaguguaucugaccaacaccaccauagagaaggaaauaugccccaaacuagcagaauacagaaauuggucaaagccgcaauguaacauuacuggauuugcaccuuuuucuaaggacaauucgauucggcuuuccgcugguggggacaucugggugacaagagaaccuuaugugucaugcgauccugacaaguguuaucaauuugcccuuggacagggaacaacacuaaacaacgggcauucaaaugacacaguacaugauaggaccccuuaucggacccuauugaugaaugaguuggguguuccauuucauuugggaaccaagcaagugugcauagcaugguccagcucaaguugucacgauggaaaagcauggcugcauguuuguguaacgggggaugaugaaaaugcaacugcuagcuucauuuacaaugggaggcuuguagauaguauagguucaugguccaaaaaaauccucaggacccaggagucggaaugcguuuguaucaauggaacuuguacaguaguaaugacugaugggagugcuucaggaaaagcugauacuaaaauacuauucauugaggaggggaaaaucguucauacuagccuauugucagggagugcucagcaugucgaggagugcuccuguuauccucgauauccuggugucagaugugucugcagagacaacuggaaaggcuccaauaggcccauuguagauauaaauguaaaggauuauagcauuguuuccaguuaugugugcucaggacuuguuggggacacacccagaaaaaacgacagcuccagcaguagccauugcuuggauccuaacaaugaggaagguggucauggagugaaaggcugggccuuugaugauggaaaugacguguggaugggaagaacgaucagcgagaaguuacgcucaggauaugaaaccuucaaagucauugaaggcugguccaaaccuaacuccaaacugcaaauaaauaggcaagucauaguugacagagguaauagguccgguuauucugguauuuucucuguugaaggcaaaagcugcaucaaucggugcuuuuauguggaguugauaaggggaaggaaacaggaaacugaagucuuguggaccucaaacaguauuguuguguuuuguggcaccucagguacauauggaacaggcucauggccugauggggcggacaucaaucucaugccuauauaa

SEQ ID NO: 46075 - RNA, 1410 nt, Artificial Sequence
  derived and/or modified CDS sequence (wt) from neuraminidase__InfluenzaA__AAN64886
augaauccaaaucaaaagauaauaacgauuggcucuguuucucucaccauugccacaauaugcuuccuuaugcaaauugccauccugguaacuacuguaacauugcauuucaagcaauaugaaugcaacucccccccaaacaaccaagugaugcugugugaaccaacaauaauagaaagaaacauaacagagauaguguaucugaccaacaccaccauagagaaggaaauaugccccaaacuagcagaauacagaaauuggucaaagccgcaauguaacauuacuggauuugcaccuuuuucuaaggacaauucgauucggcuuuccgcugguggggacaucugggugacaagagaaccuuaugugucaugcgauccugacaaguguuaucaauuugcccuuggacagggaacaacacuaaacaacgggcauucaaaugacacaguacaugauaggaccccuuaucggacccuauugaugaaugaguuggguguuccauuucauuugggaaccaagcaagugugcauagcaugguccagcucaaguugucacgauggaaaagcauggcugcauguuuguguaacgggggaugaugaaaaugcaacugcuagcuucauuuacaaugggaggcuuguagauaguauagguucaugguccaaaaaaauccucaggacccaggagucggaaugcguuuguaucaauggaacuuguacaguaguaaugacugaugggagugcuucaggaaaagcugauacuaaaauacuauucauugaggaggggaaaaucguucauacuagccuauugucagggagugcucagcaugucgaggagugcuccuguuauccucgauauccuggugucagaugugucugcagagacaacuggaaaggcuccaauaggcccauuguagauauaaauguaaaggauuauagcauuguuuccaguuaugugugcucaggacuuguuggggacacacccagaaaaaacgacagcuccagcaguagccauugcuuggauccuaacaaugaggaagguggucauggagugaaaggcugggccuuugaugauggaaaugacguguggaugggaagaacgaucagcgagaaguuacgcucaggauaugaaaccuucaaagucauugaaggcugguccaaaccuaacuccaaacugcagauaaauaggcaagucauaguugacagagguaauagguccgguuauucugguauuuucucuguugaaggcaaaagcugcaucaaucggugcuuuuauguggaguugauaaggggaaggaaacaggaaacugaagucuuguggaccucaaacaguauuguuguguuuuguggcaccucagguacauauggaacaggcucauggccugauggggcggacaucaaucucaugccuauauaa

SEQ ID NO: 46076 - RNA, 1410 nt, Artificial Sequence
  derived and/or modified CDS sequence (wt) from neuraminidase__InfluenzaA__AAN64887
augaauccaaaucaaaagauaauaacgauuggcucuguuucucucaccauugccacaauaugcuuccuuaugcaaauugccauccugguaacuacuguaacauugcauuucaagcaauaugaaugcaacucccccccaaacaaccaagugaugcugugugaaccaacaauaauagaaagaaacauaacagagauaguguaucugaccaacaccaccauagagaaggaaauaugccccaaacuagcagaauacagaaauuggucaaagccgcaauguaacauuacuggauuugcaccuuuuucuaaggacaauucgauucggcuuuccgcugguggggacaucugggugacaagagaaccuuaugugucaugcgauccugacaaguguuaucaauuugcccuuggacagggaacaacacuaaacaacgggcauucaaaugacacaguacaugauaggaccccuuaucggacccuauugaugaaugaguuggguguuccauuucauuugggaaccaagcaagugugcauagcaugguccagcucaaguugucacgauggaaaagcauggcugcauguuuguguaacgggggaugaugaaaaugcaacugcuagcuucauuuacaaugggaggcuuguagauaguauagguucauggucuaaaaaaauccucaggacccaggagucggaaugcguuuguaucaauggaacuuguacaguaguaaugacugaugggagugcuucaggaaaagcugauacuaaaauacuauucauugaggaggggaaaaucguucauacuagccuauugucagggagugcucagcaugucgaggagugcuccuguuauccucgauauccuggugucagaugugucugcagagacaacuggaaaggcuccaauaggcccauuguagauauaaauguaaaggauuauagcauuguuuccaguuaugugugcucaggacuuguuggggacacacccagaaaaaacgacagcuccagcaguagccauugcuuggauccuaacaaugaggaagguggucauggagugaaaggcugggccuuugaugauggaaaugacguguggaugggaagaacgaucagcgagaaguuacgcucaggauaugaaaccuucaaagucauugaaggcugguccaaaccuaacuccaaacugcagauaaauaggcaagucauaguugacagagguaauagguccgguuauucugguauuuucucuguugaaggcaaaagcugcaucaaucggugcuuuuauguggaguugauaaggggaaggaaacaggaaacugaagucuuguggaccucaaacaguauuguuguguuuuguggcaccucagguacauauggaacaggcucauggccugauggggcggacaucaaucucaugccuauauaa

SEQ ID NO: 46077 - RNA, 1410 nt, Artificial Sequence
  derived and/or modified CDS sequence (wt) from neuraminidase__InfluenzaA__AAN64888
augaauccaaaucaaaagauaauaacgauuggcucuguuucucucaccauugccacaauaugcuuccuuaugcaaauugucauccugguaacuacuguaacauugcauuucaagcaauaugaaugcaacucccccccaaacaaccaagugaugcugugugaaccaacaauaauagaaagaaacauaacagagauaguguaucugaccaacaccaccauagagaaggaaauaugccccaaacuagcagaauacagaaauuggucaaagccgcaauguaacauuacuggauuugcaccuuuuucuaaggacaauucgauucggcuuuccgcugguggggacaucuggguuacaagagaaccuuaugugucaugcgauccugacaaguguuaucaauuugcccuuggacagggaacaacacuaaacaacgggcauucaaaugacacaguacaugauaggaccccuuaucggacccuauugaugaaugaguuggguguuccauuucauuugggaaccaagcaagugugcauagcaugguccagcucaaguugucacgauggaaaagcauggcugcauguuuguguaacgggggaugauaaaaaugcaacugcuagcuucauuuacaaugggaggcuuguagauaguauagguucaugguccaaaaaaauccucaggacccaggagucggaaugcguuuguaucaauggaacuuguacaguaguaaugacugaugggagugcuucaggaaaagcugauacuaaaauacuauucauugaggaggggaaaaucguucauacuagccuauugucagggagugcucagcaugucgaggagugcuccuguuauccucgauauccuggugucagaugugucugcagagacaacuggaaaggcuccaauaggcccaucguagacauaaauguaaaggauuauagcauuguuuccaguuaugugugcucaggacuuguuggagacacacccagaaaaaacgacagcuccagcaguagccauugcuuggauccuaacaaugaggaagguggucauggagugaaaggcugggccuuugaugauggaaaugacguguggaugggaagaacgaucagcgagaaguuacgcucaggauaugaaaccuucaaagucauugaaggcugguccaaaccuaacuccaaacugcagauaaauaggcaagucauaguugacagagguaauagguccgguuauucugguauuuucucuguugaaggcaaaagcugcaucaaucggugcuuuuauguggaguugauaaggggaaggaaccaggaaacugaagucuuguggaccucaaacaguauuguuguguuuuguggcaccucagguacauauggaacaggcucauggccugauggggcggacaucaaucucaugccuauauaa

SEQ ID NO: 46078 - RNA, 1410 nt, Artificial Sequence; identical to SEQ ID NO: 46073
  derived and/or modified CDS sequence (wt) from neuraminidase__InfluenzaA__AAN64889

SEQ ID NO: 46079 - RNA, 1410 nt, Artificial Sequence
  derived and/or modified CDS sequence (wt) from neuraminidase__InfluenzaA__AAN64890
augaauccaaaucaaaagauaauaacgauuggcucuguuucucucaccauugccacaauaugcuuccuuaugcaaauugccauccugguaacuacuguaacauugcacuucaagcaauaugaaugcaacucccccccaaacaaccaagagaugcugugugaaccaacaauaauagaaagaaacauaacagagauaguguaucugaccaacaccaccauagagaaggaaauaugccccaaacuagcagaauacagaaauuggucaaagccgcaauguaacauuacuggauuugcaccuuuuucuaaggacaauucgauucggcuuuccgcugguggggacaucugggugacaagagaaccuuaugugucaugcgauccugacaaguguuaucaauuugcccuuggacagggaacaacacuaaacaacgggcauucaaaugacacaguacaugauaggaccccuuaucggacccuauugaugaaugaguuggguguuccauuucauuugggaaccaagcaagugugcauagcaugguccagcucaaguugucacgauggaaaagcauggcugcauguuuguguaacgggggaugaugaaaaugcaacugcuagcuucauuuacaaugggaggcuuguagacaguauagguucaugguccaaaaaaauccucaggacccaggagucggaaugcguuuguaucaauggaacuuguacaguaguaaugacugaugggagugcuucaggaaaagcugauacuaaaauacuauucauugaggaggggaaaaucguucauacuagccuauugucagggagugcucagcaugucgaggagugcuccuguuauccucgauauccuggugucagaugugucugcagagacaacuggaaaggcuccaauaggcccauuguagauauaaauguaaaggauuauagcauuguuuccaguuaugugugcucaggacuuguuggggacacacccagaaaaaacgacagcuccagcaguagccauugcuuggauccuaacaaugaggaagguggucauggagugaaaggcugggccuuugaugauggaaaugacguguggaugggaagaacgaucagcgagaaguuacgcucaggauaugaaaccuucaaagucauugaaggcugguccaaaccuaacuccaaacugcagauaaauaggcaagucauaguugacagagguaauagguccgguuauucugguauuuucucuguugaaggcaaaagcugcaucaaucggugcuuuuauguggaguugauaaggggaaggaaacaggaaacugaagucuuguggaccucaaacaguauuguuguguuuuguggcaccucagguacauauggaacaggcucauggccugauggggcggacaucaaucucaugccuauauaa

SEQ ID NO: 46080 - RNA, 1410 nt, Artificial Sequence
  derived and/or modified CDS sequence (wt) from neuraminidase__InfluenzaA__AAN64891
augaauccaaaucaaaagauaauaacgauuggcucuguuucucucaccauugccacaauaugcuuccuuaugcaaauugccauccugguaacuacuguaacauugcauuucaagcaauaugaaugcaacucccccccaaacaaccaagugaugcugugugaaccaacaauaauagaaagaaacauaacagagauaguguaucugaccaacaccaccauagagaaggaaauaugccccaaacuagcagaauacagaaauuggucaaagccgcaauguaacauuacuggauuugcaccuuuuucuaaggacaauucgauucggcuuuccgcugguggggacaucugggugacaagagaaccuuaugugucaugcgauccugacaaguguuaucaauuugcccuuggacagggaacaacacuaaacaacgggcauucaaaugacacaguacaugauaggaccccuuaucggacccuauugaugaaugaguuggguguuccauuucauuugggaaccaagcaagugugcauagcaugguccagcucaaguugucacgauggaaaagcauggcugcauguuuguguaacgggggaugaugaaaaugcaacugcuagcuucauuuacaaugggaggcuuguagauaguauagguucaugguccaaaaaaauccucaggacccaggaaucggaaugcguuuguaucaauggaacuuguacaguaguaaugacugaugggagugcuucaggaaaagcugauacuaaaauacuauucauugaggaggggaaaaucguucauacuagccuauugucagggagugcucagcaugucgaggagugcuccuguuauccucgauauccuggugucagaugugucugcagagacaacuggaaaggcuccaauaggcccauuguagauauaaauguaaaggauuauagcauuguuuccaguuaugugugcucaggacuuguuggggacacacccagaaaaaacgacagcuccagcaguagccauugcuuggauccuaacaaugaggaagguggucauggagugaaaggcugggccuuugaugauggaaaugacguguggaugggaagaacgaucagcgagaaguuacgcucaggauaugaaaccuucaaagucauugaaggcugguccaaaccuaacuccaaacugcagauaaauaggcaagucauaguugacagagguaauagguccgguuauucugguauuuucucuguugaaggcaaaagcugcaucaaucggugcuuuuauguggaguugauaaggggaaggaaacaggaaacugaagucuuguggaccucaaacaguauuguuguguuuuguggcaccucagguacauauggaacaggcucauggccugauggggcggacaucaaucucaugccuauauaa

SEQ ID NO: 46081 - RNA, 1410 nt, Artificial Sequence
  derived and/or modified CDS sequence (wt) from neuraminidase__InfluenzaA__AAO46212
augaauccaaaucaaaagauaauaacaauuggcucugucucucucaccauugaaacaguaugcuuccucaugcagauugccauccuggcaacuacugugacauugcauuuuaagcaacaugagugcgacucccccgcgagcaaccaaguaaugccaugugaaccaauaauaauagaaaggaacauaacagagauaguguauuugaauaacaccaccauagagaaagagauuugccccgaaguaguggaauacagaaauuggucaaagccgcaaugucaaauuacaggauuugcaccuuuuucuaaggacaauucaauccggcuuucugcugguggggacauuugggugacgagagaaccuuaugugucaugcgauacuggcaaguguuaucaauuugcacucgggcaggggaccacacuagacaacaaacauucaaauggcacaauacaugauagaaucccucaucgaacccuauuaaugaaugaguuggguguuccauuucauuuaggaaccaaacaaguguguguagcaugguccagcucaaguugucacgauggaaaagcaugguugcauguuugugucacuggggaugauagaaaugcaacugcuagcuucauuuaugacgggaggcuuguggacaguauugguucauggucucaaaauauccucaggacccaggagucggaaugcguuuguaucaaugggacuugcacaguaguaaugacugauggaagugcaucaggaagagccgauacuagaauacuauucauuaaagaggggaaaauuguccauauuagcccauugucaggaagugcucagcauauagaggaguguuccuguuacccucgauauccugacgucagauguaucugcagagacaacuggaaaggcucuaauaggcccguuauagacauaaauauggaagauuauagcauugauuccaguuaugugugcucagggcuuguuggcgacacacccaggaacgacgacagcucuagcaauagcaauugcagggauccuaacaaugagagagggaauccaggagugaaaggcugggccuuugacaauggagaugauguauggaugggaagaacaaucagcaaagauuuacgcucagguuaugaaacuuucaaagucauuggugguugguccacaccuaauuccaaaucgcaggucaauagacaggucauaguugacaacaauaauuggucugguuacucugguauuuucucuguugagggcaaaagcugcaucaauaggugcuuuuauguggaguugauaaggggaaggccacaggagacuagaguaugguggaccucaaacaguauuguuguguuuuguggcacuucagguacuuauggaacaggcucauggccugauggggcgaacaucaauuucaugccuauauaa

SEQ ID NO: 46082 - RNA, 1410 nt, Artificial Sequence
  derived and/or modified CDS sequence (wt) from neuraminidase__InfluenzaA__AAO46213
augaauccaaaucaaaagauaauaacaauugacucugucucucucaccauugcaacaguaugcuuccucaugcagauugccauccuggcaacuacugugacauugcauuuuaagcaacaugagugcgacucccccgcgagcaaccaaguaaugccaugugaaccaauaauaauagaaaggaacauaacagagauaguguauuugaauaacaccaccauagagaaagagauuugccccgaaguaguggaauacagaaauuggucaaagccgcaaugucaaauuacaggauuugcaccuuuuucuaaggacaauucaauccggcuuucugcugguggggacauuugggugacgagagaaccuuaugugucaugcgauacuggcaaguguuaucaauuugcacucgggcaggggaccacacuagacaacaaacauucaaauggcacaauacaugauagaaucccucaucgaacccuauuaaugaaugaguuggguguuccauuucauuuaggaaccaaacaaguguguguagcaugguccagcucaaguugucacgauggaaaagcaugguugcauguuugugucacuggggaugauagaaaugcaacugcuagcuucauuuaugacgggaggcuuguggacaguauugguucauggucucaaaauauccucaggacccaggagucggaaugcguuuguaucaaugggacuugcacaguaguaaugacugauggaagugcaucaggaagagccgauacuagaauacuauucauuaaagaggggaaaauuguccauauuagcccauugucaggaagugcucagcauauagaggaguguuccuguuacccucgauauccugacgucagauguaucugcagagacaacuggaaaggcucuaauaggcccguuauagacauaaauauggaagauuauagcauugauuccaguuaugugugcucagggcuuguuggcgacacacccaggaacgacgacagcucuagcaauagcaauugcagggauccuaacaaugagagagggaauccaggagugaaaggcugggccuuugacaauggagaugauguauggaugggaagaacaaucagcaaagauuuacgcucagguuaugaaacuuucaaagucauuggugguugguccacaccuaauuccaaaucgcaggucaauagacaggucauaguugacaacaauaauuggucugguuacucugguauuuucucuguugagggcaaaagcugcaucaauaggugcuuuuauguggaguugauaaggggaaggccacaggagacuagaguaugguggaccucaaacaguauuguuguguuuuguggcacuucagguacuuauggaacaggcucauggccugauggggcgaacaucaauuucaugccuauauaa

SEQ ID NO: 46083 - RNA, 1410 nt, Artificial Sequence
  derived and/or modified CDS sequence (wt) from neuraminidase__InfluenzaA__AAO46214
augaauccaaaucaaaagauaauaacaauuggcucugucucucucaccauugcaacaguaugcuuccucaugcagauugccauccuggcaacuacugugacauugcauuuuaagcaacaugagugcgacucccccgcgagcaaccaaguaaugccaugugaaccaauaauaauagaaaggaacauaacagagauaguguauuugaauaacaccaccauagagaaagagauuugccccgaagcaguggaauacagaaauuggucaaagccgcaaugucaaauuacaggauuugcaccuuuuucuaaggacaauucaauccggcuuucugcugguggggacauuugggugacgagagaaccuuaugugucaugcgauccuggcaaguguuaucaauuugcacucgggcaggggaccacacuagacaacaaacauucaaauggcacaauacaugauagaaucccucaucgaacccuauuaaugaaugaguuggguguuccauuucauuuaggaaccaaacaaguguguguagcaugguccagcucaaguugucacgauggaaaagcaugguugcauguuugugucacuggggaugauagaaaugcaacugcuagcuucauuuaugacgggaggcuuguggacaguauugguucauggucucaaaauauccucaggacccaggagucggaaugcguuuguaucaaugggauuugcacaguaguaaugacugauggaagugcaucaggaagagccgauacuagaauacuauucauugaagaggggaaaauuguccauauuagcccauugucaggaagugcucagcauguagaagaguguuccuguuauccucgauauccugacgucagauguaucugcagagacaacuggaaaggcucuaauaggcccguuauagacauaaauauggaagauuauagcauugauuccaguuaugugugcucagggcuuguuggcgacacacccagaaacgacgacagaucuagcaauagcaauugcagggauccuaacaaugagagagggaauccaggagugaaaggcugggccuuugacaauggagaugacguguggaugggaagaacgaucagcaaagauuuacgcucagguuaugaaacuuucaaagucauuggugguugguccacaccuaauuccaaaucgcaggucaauagacaggucauaguugacaacaauaauuggucugguuacucugguauuuucucuguugagggcaaaagcugcaucaauaggugcuuuuauguggaguugauaaggggaaggcaacaggagacuagaguaugguggaccucaaacaguauuguuguguuuuguggcacuucagguacuuauggaacaggcucauggccugauggggcgaacaucaauuucaugccuauauaa

SEQ ID NO: 46084 - RNA, 1410 nt, Artificial Sequence
  derived and/or modified CDS sequence (wt) from neuraminidase__InfluenzaA__AAO46215
augaauccaaaucaaaagauaauaacaauuggcucugucucucucaccauugcaacaguaugcuuccucaugcagauugccauccuggcaacuacugugacauugcauuuuaaacaacaugagugcgacucccccacgagcaaccaaguaaugccaugugaaccaauaauaauagaaaggaacauaacagagauaguguauuugaauaacaccaccauagagaaagagauuugccccgaaguaguggaauacagaaauuggucaaagccgcaaugucaaauuacaggauuugcaccuuuuucuaaggacaauucaauccggcuuucugcugguggggacauuugggugacgagagaaccuuaugugucaugcgauccuggcaaguguuaucaauuugcacucgggcaggggaccacacuagacaacaaacauucaaauggcacaauacaugauagaaucccucaccgaacccuauuaaugaaugaguuggguguuccauuucauuuaggaaccaaacaaguguguguagcaugguccagcucaaguugucacgauggaaaagcaugguugcauguuugugucacuggggaugauagaaaugcgacugcuagcuucauuuaugacgggaggcuuguggacaguauugguucauggucucaaaauauccucaggacccaggagucggaaugcguuuguaucaaugggacuugcacaguaguaaugacugauggaagugcaucaggaagagccgauacuagaauacuauucauuaaagaggggaaaauuguccauauuagcccauugucaggaagugcucagcauauagaggaguguuccuguuacccucgauauccugacgucagauguaucugcagagacaacuggaaaggcucuaauaggcccguuauagacauaaauauggaagauuauagcauugauuccaguuaugugugcucagggcuuguuggcgacacacccaggaacggcgacagcucuagcaauagcaauugcagggauccuaacaaugaaagagggaauccaggagugaaaggcugggccuuugacaauggagaugauguauggaugggaagaacaaucagcaaagaaucacgcucagguuaugaaacuuucaaagucauuggugguugguccacaccuaauuccaaaucgcaggucaauagacaggucauaguugacaacaauaauuggucugguuacucugguauuuucucuguugagggcaaaagcugcaucaauaggugcuuuuauguggaguugauaaggggaaggccacaggagacuagaguaugguggaccucaaacaguauuguuguguuuuguggcacuucagguacuuauggaacaggcucauggccugauggggcgaacaucaauuucaugccuauauaa

SEQ ID NO: 46085 - RNA, 1410 nt, Artificial Sequence
  derived and/or modified CDS sequence (wt) from neuraminidase__InfluenzaA__AAO46216
augaauccaaaucaaaagauaauaacaauugguucugucucucucaccauugcaacaguaugcuuccucaugcagauugccauccuggcaacuacugugacauugcauuuuaagcaacaugagugcgacucccccgcgagcaaccaaguaaugccaugugaaccaauaauaauagaaaggaacauaacagagauaguguauuugaauaacaccaccauagagaaagagauuugccccgaaguaguggaauacagaaauuggucaaagccgcaaugucaaauuacaggauuugcaccuuuuucuaaggacaauucaauccggcuuucugcugguggggacauuugggugacgagagaaccuuacgugucaugcgauccuagcaaguguuaucaauuugcacucgggcaggggaccacacuagaaaacaaacauucaaauggcacaaaacaugauagaaucccucaucgaacccuauuaaugaaugaguuggguguuccauuucauuuaggaaccaaacaaguguguguagcaugguccagcucaaguugucacgauggaaaagcaugguugcauguuugugucacuggggaugauagaaaugcaacugcuagcuucauuuaugaagggaggcuuguggacaguauuguuucauggucucaaaauauccucaggacccaggagucggaaugcguuuguaucaaugggacuugcacaguaguaaugacugauggaagugcaucaggaagagccgauacuagaauacuauucauuaaagaggggaaaauuguccauauuagcccauugucaggaagugcucagcauauagaggaguguuccuguuacccucgauauccugacgucagauguaucugcagagacaacuggaaaggcucuaauaggcccguuauagacauaaauauggaagauuauagcauugauuccaguuaugugugcucagggcuuguuggcgacacacccaggaacgacgacagcucuagcaauagcaauugcagggauccuaacaaugagagagggaauccaggagugaaaggcugggccuuugacaauggagaugauguauggaugggaagaacaaucagcaaagauucacgcucagguuaugaaacuuucaaagucauuggugguugguccacaccuaauuccaaaucgcaggucaauagacaggucauaguugacagcaauaauuggucugguuacucugguauuuucucuguugagggcaaaagcugcaucaauaggugcuuuuauguggaguuaauaaggggaaggccacaggagacuagaguaugguggacaucaaacaguauuguuguguuuuguggcacuucagguacuuauggaacaggcucauggccugauggggcgaacaucaauuucaugccuauauaa

SEQ ID NO: 46086 - RNA, 1410 nt, Artificial Sequence
  derived and/or modified CDS sequence (wt) from neuraminidase__InfluenzaA__AAO46217
augaauccaaaucaaaagauaauaacaauuggcucugucucucucaccauugcaacaguaugcuuccucaugcagauugccauccuggcaacuacugugacauugcauuuuaagcaacaugagugcgacucccccgcgagcaaccaaguaaugccaugugaaccaauaauaauagaaaggaacauaacagagauaguguauuugaauaacaccaccauagagaaagagauuugccccgaaguaguagaauacagaaauuggucaaagccgcaaugucaaauuacaggauuugcaccuuucucuaaggacaauucaauccggcuuucugcugguggggacauuugggugacgagagaaccuuaugugucaugugauccuagcaaguguuaucaauuugcacucgggcaggggaccacacuagacaacaaacauucaaauggcacaauacaugauagaaucccucaucgaacccuauuaaugaaugaguuggguguuccauuucauuuaggaaccaaacaaguguguguagcaugguccagcucaaguugccacgauggaaaagcaugguugcauguuugugucacuggggaugauagaaaugcaacugcuagcuucauuuaugacgggaggcuugaggacaguauugguucauggucucaaaauauccucaggacccaggagucggaaugcguuuguaucaaugggacuugcacaguaguaaugacugauggaagugcaucaggaagagccgauacuagaauacuauucauuaaagaggggaaaauuguccauauuagcccauugucaggaagugcucagcauauagaggaguguuccuguuacccucgauauccugacgucagauguaucugcagagacaacuggaaaggcucuaauaggcccguuuuagacauaaguauggaagauuauagcauugauuccaguuaugugugcucagggcuuguuggcgacacacccaggaacgacgacagcucuagcaauagcaacugcagggauccuaacaaugagagagggaauccaggagugaaaggcugggccuuugacaauggagaugauguauggaugggaagaacaaucagcaaagauuuacgcucagguuaugaaacuuucaaagucauuggugguugguccacaccuaacuccaaaucgcaggucaauagacaggucauaguggacaacaauaauuggucugguuacucugguauuuucucuguugagggcaaaagcugcaucaauaggugcuuuuauguggaguugauaaggggaaggucacaggagacuagaguaugguggaccucaaacaguauuguuguguucuguggcacuucaggcacuuauggaacaggcucauggccugauggggcgaacaucaauuucaugccuauauaa

SEQ ID NO: 46087 - RNA, 1410 nt, Artificial Sequence
  derived and/or modified CDS sequence (wt) from neuraminidase__InfluenzaA__AAO46218
augaauccaaaucaaaagauaauaacaauuggcucugucucucucaccauugcaacaguaugcuuccucaugcagauugccauccuggcaacuacugugacauugcauuuuaagcaacaugagugcgacucccccgcgagcaaccaaguaaugccaugugaaccaauaauaauagaaaggaacauaacagagauaguguauuugaauaacaccaccauagagaaagagauuugccccgaaguaguagaauacagaaauuggucaaagccgcaaugucaaauuacaggauuugcaccuuucucuaaggacaauucaauccggcuuucugcugguggggacauuugggugacgagagaaccuuaugugucaugugauccuggcaaguguuaucaauuugcacucgggcaggggaccacacuagacaacaaacauucaaauggcacaauacaugauagaaucccucaucgaacccuauuaaugaaugaguuggguguuccauuucauuuaggaaccaaacaaguguguguagcaugguccagcucaaguugccacgauggaaaagcaugguugcauguuugugucacuggggaugauagaaaugcaacugcuagcuucauuuaugacgggaggcuugaggacaguauugguucauggucucaaaauauccucaggacccaggagucggaaugcguuuguaucaaugggacuugcacaguaguaaugacugauggaagugcaucaggaagagccgauacuagaauacuauucauuaaagaggggaaaauuguccauauuagcccauugucaggaagugcucagcauauagaggaguguuccuguuacccucgauauccugacgucagauguaucugcagagacaacuggaaaggcucuaauaggcccguuuuagacauaaguauggaagauuauagcauugguuccaguuaugugugcucagggcuuguuggcgacacacccaggaacgacgacagcucuagcaauagcaacugcagggauccuaacaaugagagagggaauccgggagugaaaggcugggccuuugacaauggagaugauguauggaugggaagaacaaucagcaaagauuuacgcucagguuaugaaacuuucaaagucauuggugguugguccacaccuaacuccaaaucgcaggucaauagacaggucauaguggacaacaauaauuggucugguuacucugguauuuucucuguugagggcaaaagcugcaucaauaggugcuuuuauguggaguugauaaggggaaggucacaggagacuagaguaugguggaccucaaacaguauuguuguguucuguggcacuucagguacuuauggaacaggcucauggccugauggggcgaacaucaauuucaugccuauauaa

SEQ ID NO: 46088 - RNA, 1410 nt, Artificial Sequence
  derived and/or modified CDS sequence (wt) from neuraminidase__InfluenzaA__AAO46220
augaauccaaaucaaaagauaauaacaauuggcucugucucucucaccauugcaacaguaugcuuccucaugcagauugccauccuggcaacuacugugacauugcauuuuaagcaacaugagugcgacucccccgcgagcaaccaaguaaugccaugugaaccaauaauaauagaaaggaacauaacagagauaguguauuugaauaacaccaccauagagaaagagaucugccccgaagcaguggaauacagaaauuggucaaagccgcaaugucaaauuacaggauuugcaccuuuuucuaaggacaauucaauccggcuuucugcugguggggacauuugggugacgagagaaccuuaugugucaugcgauccuggcaaguguuaucaauuugcacucgggcaggggaccacacuagacaacaaacauucaaaugacacaauacaugauagaaucccucaucgaacccuauuaaugaaugaguuggguguuccauuucauuuaggaaccagacaaguguguguagcaugguccagcucaaguugucacgauggaaaagcaugguugcauguuugugucacuggggaugauagaaaugcaacugcuagcuucauuuaugacgggaggcuuguggacaguauugguucauggucucaaaauauccucaggacccaggagucggaaugcguuuguaucaaugggauuugcacaguaguaaugacugauggaagugcaucaggaagagccgauacuagaauacuauucauugaagaggggaaaauuguccauauuagcccauugucaggaagugcucagcauguagaggaguguuccuguuauccucgauauccugacgucagauguaucugcagagacaacuggaaaggcucuaauaggcccguuauagacauaaauauggaagauuauagcauugauuccaguuaugugugcucagggcuuguuggcgacacacccagaaacgacgacagaucuagcaauagcaauugcagggauccuaacaaugagagagggaauccaggagugaaaggcugggccuuugacaauggagaugacguguggaugggaagaacgaucagcaaagauuuacgcucagguuaugaaacuuucaaagucauuggugguugguccacaccuaauuccaaaucgcaggucaauagacaggucauaguugacaacaauaauuggucugguuacucugguauuuucucuguugagggcaaaagcugcaucaauaggugcuuuuauguggaguugauaaggggaaggcaacaggagacuagaguaugguggaccucaaacaguauuguuguguuuuguggcacuucagguacuuauggaacaggcucauggccugauggggcgaacaucaauuucaugccuauauaa

SEQ ID NO: 46089 - RNA, 1410 nt, Artificial Sequence
  derived and/or modified CDS sequence (wt) from neuraminidase__InfluenzaA__AAO46221
augaauccaaaucaaaagauaauaacaauuggcucugucucucucaccauugcaacaguaugcuuccucaugcagauugccauccuggcaacuacugugacauugcauuuuaagcaacaugagugcgacucccccgcgagcaaccaaguaaugccaugugaaccaauaauaauagaaaggaacauaacagagauaguguauuugaauaacaccaccauagagaaagagaucugccccgaagcagcggaauacagaaauuggucaaagccgcaaugucaaauuacaggauuugcaccuuuuucuaaggacaauucaauccggcuuucugcugguggggacauuugggugacgagagaaccuuaugugucaugcgauccuggcaaguguuaucaauuugcacucgggcaggggaccacacuagacaacaaacauucaaaugacacaauacaugauagaaucccucaucgaacccuauuaaugaaugaguuggguguuccauuucauuuaggaaccagacaaguguguguagcaugguccagcucaaguugucacgauggaaaagcaugguugcauguuugugucacuggggaugauagaaaugcaacugcuagcuucauuuaugacgggaggcuuguggacaguauugguucauggucucaaaauauccucaggacccaggagucggaaugcguuuguaucaaugggauuugcacaguaguaaugacugauggaagugcaucaggaagagccgauacuagaauacuauucauugaagaggggaaaauuguccauauuagcccauugucaggaagugcucagcauguagaagaguguuccuguuauccucgauauccugacgucagauguaucugcagagacaacuggaaaggcucuaauaggcccguuauagacauaaauauggaagauuauagcauugauuccaguuaugugugcucagggcuuguuggcgacacacccagaaacgacgacagaucuagcaauagcaauugcagggauccuaacaaugagagagggaauccaggagugaaaggcugggccuuugacaauggagaugacguguggaugggaagaacgaucagcaaagauuuacgcucagguuaugaaacuuucaaagucauuggugguugguccacaccuaauuccaaaucgcaggucaauagacagguuauaguugacaacaauaauuggucugguuacucugguauuuucucuguugagggcaaaagcugcaucaauaggugcuuuuauguggaguugauaaggggaaggcaacaggagacuagaguaugguggaccucaaacaguauuguuguguuuuguggcacuucagguacuuauggaacaggcucauggccugauggggcgaacaucaauuucaugccuauauaa

SEQ ID NO: 46090 - RNA, 1410 nt, Artificial Sequence
  derived and/or modified CDS sequence (wt) from neuraminidase__InfluenzaA__AAO46223
augaauccaaaucaaaagauaauaacaauuggcucugucucucucaccauugcaacaguaugcuuccucaugcagauugccauccugguaacuacuguaacauugcauuuuaagcaacaugagugcgacucccccgcgagcaaccaaguaaugccaugugaaccaauaauaauagaaaggaacauaacagagauaguguauuugaauaacaccaccauagagaaagagaucugccccgaaguaguggaauacagaaauuggucaaagccacaaugucaaauuacaggauuugcaccuuuuucuaaggacaauucaauccggcuuucugcugguggggacauuugggugacgagagaaccuuaugugucaugcgauccuggcaaguguuaucaauuugcacucgggcaggggaccacacuagacaacaaacauucaaaugacacaauacaugauagaaucccucaucgaacccuauuaaugaaugaguuggguguuccauuucauuuaggaaccaggcaaguguguguagcaugguccagcucaaguugucacgauggaaaagcaugguugcauguuugugucacuggggaugauaaaaaugcaacugcuagcuucauuuaugacgggaggcuuguggacaguauugguucauggucucaaaauauccucaggacccaggagucggaaugcguuuguaucaaugggacuugcacaguaguaaugacugauggaagugcuucaggaagagccgauacuagaauacuauucauugaagaggggaaaauuguccauauuagcccauugucaggaagugcucagcauguagaggaauguuccuguuauccucgauauccugacgucagauguaucugcagagacaacuggaaaggcucuaauaggcccguuauagacauaaauauggaagauuauagcauugauuccaguuaugugugcucagggcuuguuggcgacacacccagaaacgacgacagaucuagcaauagcaauugcagggauccuaacaaugagagagggaauccaggagugaaaggcugggccuuugacaauggagaugacguguggaugggaagaacgaucagcaaggauuuacgcucagguuaugaaacuuucaaagucauuggugguugguccacaccuaauuccaaaucgcagaucaauagacaggucauaguugacagcaauaauuggucagguuacucugguauuuucucuguugagggcaaaagcugcaucaauaggugcuuuuauguggaguugauaaggggaaggaaacaggagacuagaguaugguggaccucaaacaguauuguuguguuuuguggcacuucagguacuuauggaacaggcucauggccugauggggcgaacaucaauuucaugccuauauaa

SEQ ID NO: 46091 - RNA, 1410 nt, Artificial Sequence; identical to SEQ ID NO: 46090
  derived and/or modified CDS sequence (wt) from neuraminidase__InfluenzaA__AAO46224

SEQ ID NO: 46092 - RNA, 1410 nt, Artificial Sequence
  derived and/or modified CDS sequence (wt) from neuraminidase__InfluenzaA__AAO46225
augaauccaaaucaaaagauaauaacaauuggcuuugucucucucaucauugcaacaguaugcuuccucaugcagauugccauccuggcaacuacugugacauugcauuuuaagcaacaugagugcgacucccccgcaagcaaccaaguaaugccaugugaaccaauaauaauagaaaggaacauaacaaagauaguguauuugaauaacaccaccauagagaaagagaucugccccgaaguaguggaauacagaaauuggucaaagccgcaaugucacauuacaggauuugcaccuuuuucuaaggacaauucaauccgacuuucugcugguggggacauuugggugacgagagaaccuuaugugucaugcgauccuggcaaguguuaucaauuugcacucgggcaggggaccacacuagacaauaaacauucaaaugacacaauacaugauagaaucccucaucgaacccuauuaaugaaugaguuggguguuccauuucauuuaggaaccagacaaguguguguagcaugguccagcucaaguugucaugauggaaaagcaugguugcauguuugugucacuggggaugauaaaaaugcaacugcuagcuucauuuaugacgggaggcuuguggacaguauugguucauggucucacaauauccucaggacccaggagucggaaugcguuuguaucaaugggacuugcacaguaguaaugacugauggaagugcaucaggaagagccgauacuagaauacuauucauuaaagaggggaaaauuguccacauuagcccauugucaggaagugcucagcauguagaggaguguuccuguuauccucgauauccugacgucagauguaucugcagagacaacuggaaaggcuccaauaggcccguuauagacauaaauauggaagauuauagcauugauuccaguuaugugugcucagggcuuguuggcgacacacccagaaacaacgacggaucuagcaauagcaauugcagggauccuaacaaugagagagggaauccaggagugaaaggcugggccuuugacaauggagaugacguguggaugggaagaacgaucaguaaagauuuacgcucagguuaugaaacuuucaaagucauuggugguugguccacaccuaauuccaaaucgcaggucaauagacaggucauaguugacaacaauaauuggucugguuacucugguauuuucucuguugagggcaaaagcugcaucaauaggugcuuuuauguggaguugauaaggggaaggcaacaggagacuagaguaugguggaccucaaacaguauuguuguguuuuguggcacuucagguacuuauggaacaggcucauggccugauggggcgaacaucaauuucaugccuauauaa

SEQ ID NO: 46093 - RNA, 1410 nt, Artificial Sequence
  derived and/or modified CDS sequence (wt) from neuraminidase__InfluenzaA__AAO46226
augaauccaaaucaaaagauaauaacaauuggcucugucucucucaccauugcaacaguaugcuuccucaugcagauugccauccugguaacuacuguaacauugcauuuuaagcaacaugagugcgacucccccgcgagcaaccaaguaaugccaugugaaccaauaauaauagaaaggaacauaacagagauaguguauuugaauaacaccaccauagagaaagagaucugccccgaaguaguggaauacagaaauuggucaaagccgcaaugucaaauuacaggauuugcaccuuuuuccaaggacaauucaauccggcuuucugcugguggggacauuugggugacgagagaaccuuaugugucaugcgauccuggcaaguguuaucaauuugcacucgggcaggggaccacacuagacaacaaacauucaaaugacacaauacaugauagaaucccucaucgaacccuauuaaugaaugaguuggguguuccauuucauuuaggaaccaggcaaguguguguagcaugguccagcucaaguugucacgauggaaaagcaugguugcauguuugugucacuggggaugaugaaaaugcaacugcuagcuucauuuaugacgggaggcuuguggacaguauugguucauggucucaaaauauccucaggacccaggagucggaaugcguuuguaucaauggaacuugcacaguaguaaugacugauggaagugcuucaggaagagccgauacuagaauacuauucauugaagaggggaaaauuguccauauuagcccauugucaggaagugcucagcauguagaggaguguuccuguuauccucgauauccugacgucagauguaucugcagagacaacuggaaaggcucuaauaggcccgucauagacauaaauauggaagauuauagcauugauuccaguuaugugugcucagggcuaguuggcgacacacccagaaacgacgacagaucuagcaauagcaauugcagggauccuaacaaugagagagggaauccaggagugaaaggcugggccuuugacaauggagaugacguguggaugggaagaacgaucagcaaggauuuacgcucagguuaugaaacuuucaaagucauuggugguugguccacaccuaauuccaaaucgcagaucaauagacaggucauaguugacagcaauaauuggucagguuacucugguauuuucucuguugagggcaaaagcugcaucaauaggugcuuuuauguggaguugauaaggggaaggcaacaggagacuagaguaugguggaccucaaacaguauuguuguguuuuguggcacuucagguacuuauggaacaggcucauggccugauggggcgaacaucaauuucaugccuauauaa

SEQ ID NO: 46094 - RNA, 1410 nt, Artificial Sequence
  derived and/or modified CDS sequence (wt) from neuraminidase__InfluenzaA__AAO46229
augaauccaaaucaaaagauaauaacaauuggcucugucucucucaccauugcaacaguaugcuuccucaugcagauugccauccugguaacuacuguaacauugcauuuuaagcaacaugagugcgacucccccgcgagcaaccaaguaaugccgugugaaccaauaauaauagaaaggaacauaacagagauaauguauuugaauaacaccaccauagagaaagagaucugccccgaaguaguggaauacagaaauuggucaaagccgcaaugucaaauuacaggauuugcaccuuuuucuaaggacaauucaauccggcuuucugcugguggggacauuugggugacgagagaaccuuaugugucaugcgauccuggcaaguguuaucaauuugcacucgggcaggggaccacacuagacaacaaacauucaaaugacacaauacaugauagaaucccucaucgaacccuauuaaugaaugaguuggguguuccauuucauuuaggaaccaggcaaguguguguagcaugguccagcucaaguugucacgauggaaaagcaugguugcauguuugugucacuggggaugauaaaaaugcaacugcuagcuucauuuaugacgggaggcuuguggacaguauugguucauggucucaaaauauccucaggacccaggagucggaaugcguuuguaucaaugggacuugcacaguaguaaugacugauggaagugcuucaggaagagccgauacuagaauacuauucauugaagaggggaaaauuguccauauuagcccauugucaggaagugcucagcauguagaggaguguuccuguuauccucgauauccugacgucagauguaucugcagagacaacuggaaaggcucuaauaggcccaucauagacauaaauauggaagauuauagcauugauuccaguuaugugugcucagggcuuguuggcgacacacccagaaacgacgacagaucuagcaauaguaauugcaggaauccuaacaaugagagagggaauccaggagugaaaggcugggccuuugacaauggagaugacguguggaugggaagaacaaucagcaaggauuuacgcucagguuaugaaacuuucaaagucauuggugguugguccacaccuaauuccaaaucgcagaucaauagacaggucauaguugacagcaauaauuggucagguuacucugguauuuucucuguugagggcaaaagcugcaucaauaggugcuuuuauguggaguugauaaggggaaggcaacaggagacuagaguaugguggaccucaaacaguauuguuguguuuuguggcacuucagguacuuauggaacaggcucauggccugauggggcgaacaucaauuucaugccuauauaa

SEQ ID NO: 46095 - RNA, 1410 nt, Artificial Sequence
  derived and/or modified CDS sequence (wt) from neuraminidase__InfluenzaA__AAO46230
augaauccaaaucaaaagauaauaacgauuggcucugucucucucaccauugcaacaguaugcuuccucaugcagauugccauccugguaacuacuguaacauugcauuuuaagcaacaugagugcgacucccccgcgagcaaccaaguaaugccgugugaaccaauaauaauagaaaggaaccuaacagagauaguguauuugaauaacaccaccauagagaaagagaucugccccgaaguaguggaauacagaaauuggucaaagccgcaaugucaaauuacaggauuugcaccuuuuucuaaggacaauucuauccggcuuucugcugguggggacauuugggugacgagagaaccuuaugugucaugcgauccuggcaaguguuaucaauuugcacucgggcaggggaccacacuagacaacaaacauucaaaugacacaauacaugauagaaucccucaucgaacccuauuaaugaaugaguuggguguuccauuucauuuaggaaccaggcaaguguguguagcaugguccagcucaaguugucacgauggaaaagcaugguugcauguuugugucacuggggaugauaaaaacgcaacugcuagcuucauuuaugacgggaggcuuguggacaguauugguucauggucucaaaauauccucaggacccaggagucggaaugcguuuguaucaaugggacuugcacaguaguaaugacugauggaagugcuucaggaagagccgauacuagaauacuauucauugaagaggggaaaauuguccauauuagcccauugucaggaagugcucagcauguagaggaguguuccuguuauccucgauauccugacgucagauguaucugcagagacaacuggaaaggcucuaauaggcccgucauagacauaaauauggaagauuauagcauugauuccaguuaugugugcucagggcuuguuggcgacacacccagaaacgacgacagaucuagcaauaguaauugcagggauccuaacaaugagagagggaauccaggagugaaaggcugggccuuugacaauggagaugacguguggaugggaagaacgaucagcaaggauuuacgcucagguuaugaaacuuucaaagucauuggugguugguccacaccuaauuccaaaucgcagaucaauagacaggucauaguugacagcaauaauuggucagguuacucugguauuuucucuguugagggcaaaagcugcaucaauaggugcuuuuauguggaguugauaaggggaaggcaacaggagacuagaguaugguggaccucaaacaguauuguuguguuuuguggcacuucagguacuuauggaacaggcucauggccugauggggcgaacaucaauuucaugccuauauaa

SEQ ID NO: 46096 - RNA, 1410 nt, Artificial Sequence
  derived and/or modified CDS sequence (wt) from neuraminidase__InfluenzaA__AAO46231
augaauccaaaucaaaagauaauaacaauuggcucugucucucucaccauugcaacaguaugcuuucucaugcagauugccauccugguaacuacuguaacauugcacuuuaagcaacaugauugcgacucccccgcgagcaaccaaguaaugccgugugaaccaauaauaauagaaaggaacauaacagagauaguguauuugaauaacaccaccauagagaaagagauaugccccaaaguaguggaauacagaaauuggucaaagccgcaaugucaaauuacaggauuugcaccuuuuucuaaggacaauucaauccggcuuucugcugguggggacauuugggugacgagagaaccuuaugugucaugcgauccugucaaguguuaucaauuugcacucgggcaggggaccacacuagacaacaaacauucaaaugacacaguacaugauagaaucccucaucgaacccuauuaaugaaugaguuggguguuccauuucacuuaggaaccaggcaaguguguauagcaugguccagcucaaguugucacgauggaaaagcaugguugcauguuugugucacuggggaugauaaaaacgcaacugcuagcuucauuuaugacgggaggcuuguggacaguauugguucauggucucaaaauauccucaggacccaggagucggaaugcguuuguaucaaugggacuugcacaguaguaaugacugauggaagugcuucaggaagagccgauacuagaauacuauucauugaagaggggaaaauuguccauauuagcccauugucgggaagugcucagcauguagaggaguguuccuguuauccucgauauccugacgucagauguaucugcagagacaacuggaaaggcucuaauaggcccgucauagacauaaauauggaagauuauagcauugauuccaguuaugugugcucagggcuuguuggugacacacccagaaacgacgacagaucuagcaauaguaauugcaggaauccuaacaaugagagagggaauccaggagugaaaggcugggccuuugacaauggagaugacguguggaugggaagaacgaucagcaaggauuuacgcucagguuaugaaacuuucaaagucauuggugguugguccacaccuaauuccaaaucgcagaucaauagacaggucauaguugacagcaauaauuggucagguuacucugguauuuucucuguugagggcaaaagcugcaucaauaggugcuuuuauguggaguugauaaggggaaggcaacaggagacuagaguaugguggaccucaaacaguauuguuguguuuuguggcacuucagguacuuauggaacaggcucauggccugauggggcgaacaucaauuucaugccuauauaa

SEQ ID NO: 46097 - RNA, 1410 nt, Artificial Sequence
  derived and/or modified CDS sequence (wt) from neuraminidase__InfluenzaA__AAO46232
augaauccaaaucaaaagauaauaacaauuggcucugucucucucaccauugcaacaguaugcuuccucaugcagauugccauccugguaacuacuguaacauugcacuuuaagcaacaugagugcgacucccccgcgagcaaccaaguaaugccgugugaaccaacaauaauagaaaggaacauaacagagauaguguaccugaacaacaccaccauagagaaagagaucugccccaaaguaguggaauacagaaauuggucaaagccgcaaugucaaauuacaggauuugcaccuuuuucuaaggacaauucaauccggcuuucugcugguggggacauuugggugacgagagaaccuuaugugucaugcgauccuggcaaguguuaucaauuugcacucgggcagggaaccacacuagacaacaaacauucaaaugacacaauacaugauagaaucccucaucgaacccuauuaaugaaugaguuggguguuccauuucauuuaggaaccaggcaaguguguauagcaugguccagcucaaguugucacgauggaaaagcauggcugcauguuugugucacuggggaugauaaaaaugcaacugcuagcuucauuuaugacgggaggcuuguggacaguauugguucauggucucaaaauauccucaggacccaggagucggaaugcguuuguaucaaugggacuugcacaguaguaaugacugauggaagugcuucaggaagagccgauacuagaauacuauucauugaagaggggaaaauuguccauauuagcccauugucaggaagugcucagcauguagaggaguguuccuguuauccucgauauccugacgucagauguaucugcagagacaacuggaaaggcucuaauaggcccaucauagacauaaauauggaagauuauagcauugauuccaguuaugugugcucagggcuuguuggcgacacacccagaaacgacgacagaucuagcaauagcaauugcaggaauccuaacaaugagagagggaauccaggagugaaagggugggccuuugacaauggagaugacguguggaugggaagaacgaucagcaaggauuuacgcucagguuaugaaacuuucaaagucauuggugguuggucuacaccuaauuccaaaucgcagaucaauagacaagucauaguugacagcaauaauuggucagguuacucugguauuuucucuguugagggcaaaagcugcaucaauaggugcuuuuauguggaguugauaaggggaaggcaacaggagacuagaguaugguggaccucaaacaguauuguuguguuuuguggcacuucagguacuuauggaacaggcucauggccugauggggcgaacaucaauuucaugccuauauaa

SEQ ID NO: 46098 - RNA, 1410 nt, Artificial Sequence
  derived and/or modified CDS sequence (wt) from neuraminidase__InfluenzaA__AAO46233
augaauccaaaucaaaagauaauaacaauuggcucugucucucucaccauugcagcaguaugcuuccucaugcagauugccauccugguaacuacuguaacauugcauuuuaagcaacaugagugcgacucccccgcgagcaaccaaguaaugccgugugaaccaauaauaauagaaaggaacauaacagagauaguguauuugaauaacaccaccauagagaaagagauaugccccaaaguaguggaauacagaaauuggucaaagccgcaaugucaaauuacaggauuugcaccuuuuucuaaggacaauucaauccggcuuucugcugguggggacauuugggugacgagagaaccuuaugugucaugcgauccuggcaaguguuaucaauuugcacucgggcaggggaccacacuagacaacaaacauucaaaugacacaauacaugauagaaucccucaucgaacccuauuaaugaaugaguuggguguuccauuucauuuaggaaccaggcaaguguguauagcaugguccagcucaaguugucacgauggaaaagcauggcugcauguuugugucacuggggaugauaaaaaugcaacugcuagcuucauuuaugacgggaggcuuguggacaguauugguucauggucucaaaauauccucaggacccaggagucggaaugcguuuguaucaaugggacuugcacaguaguaaugacugauggaagugcuucaggaagagccgauacuagaauacuauucauugaagaggggaaaauuguccauauuagcccauugucaggaagugcucagcauguagaggaguguuccuguuauccucgauauccugacgucagauguaucugcagagacaacuggaaaggcucuaauaggcccgucguagacauaaauauggaagauuauagcauugauuccaguuaugugugcucagggcuuguuggcgacacaccuagaaacgacgacagaucuagcaauagcaauugcaggaauccuaacaaugagagagggaauccaggagugaaaggcugggccuuugacaauggagaugacguguggaugggaagaacgaucagcaaggauuuacgcucagguuaugaaacuuucaaagucauuggugguugguccacaccuaauuccaaaucgcagaucaauagacaagucauaguugacagcaauaaucggucagguuacucugguauuuucucuguugagggcaaaggcugcaucaauaggugcuuuuauguggaguugauaaggggaaggcaacaggagacuagaguaugguggaccucaaacaguauuguuguguuuuguggcacuucagguaccuauggaacaggcucauggccugauggggcgaacaucaauuucaugccuauauaa

SEQ ID NO: 46099 - RNA, 1410 nt, Artificial Sequence
  derived and/or modified CDS sequence (wt) from neuraminidase__InfluenzaA__AAO46235
augaauccaaaucaaaagauaauaacaauuggcucugucucucucaccauugcaacaguaugcuuccucaugcagauugccauccugguaacuacuguaacauugcauuuuaagcaacaugagugcgacucccccgcgagcaaccaaguaaugccgugugaaccaauaauaauagaaaggaacauaacagagauaguguauuugaauaacacuaccauagagaaagagauaugccccaaaguaguggaauacagaaauuggucaaagccgcaaugucaaauuacaggauuugcaccuuuuucuaaggacaauucaauccggcuuucugcugguggggacauuugggugacgagagaaccuuaugugucaugcgauccuggcaaguguuaucaauuugcacucgggcaggggaccacacuagacaacaaacauucaaaugacacaauacaugauagaaucccucaucgaacccuauuaaugaaugaguuggguguuccauuucauuuaggaaccaggcaaguguguauagcaugguccagcucaaguugucacgauggaaaagcauggcugcauguuuguaucacuggggaugauaaaaaugcaacugcuagcuucauuuaugacgggaggcuuguggacaguauugguucauggucucaaaauauccucagaacccaggagucggaaugcguuuguaucaaugggacuugcacaguaguaaugacugauggaagugcuucaggaagagccgauacuagaauacuauucauugaagaggggaaaauuguccauauuagcccauugucaggaagugcucagcauguagaggaguguuccuguuauccucgauauccuggcgucagauguaucugcagagacaacuggaaaggcucuaauaggcccgucguagacauaaauauggaagauuauagcauugauuccaguuaugugugcucagggcuuguuggcgacacaccuagaaacgacgacagaucuagcaauagcaauugcaggaauccuaacaaugagagagggaaucaaggagugaaaggcugggccuuugacaauggagaugacguguggaugggaagaacgaucagcaaggauuuacgcucagguuaugaaacuuucaaagucauuggugguugguccacaccuaauuccaaaucgcagaucaauagacaagucauaguugacagcgauaaucggucagguuacucugguauuuucucuguugagggcaaaagcugcaucaauaggugcuuuuauguggaguugauaaggggaaggaaacaggagacuagaguaugguggaccucaaacaguauuguuguguuuuguggcacuucagguaccuauggaacaggcucauggccugauggggcgaacaucaauuucaugccuauauaa

SEQ ID NO: 46100 - RNA, 1410 nt, Artificial Sequence
  derived and/or modified CDS sequence (wt) from neuraminidase__InfluenzaA__AAO46236
augaauccaaaucaaaagauaauaacaauuggcucugucucucucaccauugcaacaguaugcuuccucaugcauauugccauccugguaacuacuguaacauugcauuuuaagcaacaugagugcgacucccccgcgagcaaccaaguaaugccgugugaaccaauaauaauagaaaggaacauaacagagauaguguauuugaauaacaccaccauagagaaagagauaugccccaaaguaguggaauacagaaauuggucaaagccgcaaugucaaauuacaggauuugcaccuuuuucuaaggacaauucaauccggcuuucugcugguggggacauuugggugacgagagaaccuuaugugucaugcgauccuggcaaguguuaucaauuugcacucgggcaggggaccacacuagacaacaaacauucaaaugacacaauacaugauagaaucccucaucgaacccuauuaaugaaugaguuggguguuccauuucauuuaggaaccaggcaaguguguauagcaugguccagcucaaguugucacgauggaaaagcauggcugcauguuuguaucacuggggaugauaaaaaugcaacugcuagcuucauuuaugacgggaggcuuguggacaguauugguucauggucucaaaauauccucagaacccaggagucggaaugcguuuguaucaaugggacuugcacaguaguaaugacugauggaagugcuucaggaagagccgauacuagaauacuauucauugaagaggggaaaauuguccauauuagcccauugucaggaagugcucagcauguagaggaguguuccuguuauccucgauauccuggcgucagauguaucugcagagacaacuggaaaggcucuaauaggcccgucguagacauaaauauggaagauuauagcauugauuccaguuaugugugcucagggcuuguuggcgacacaccuagaaacgacgacagaucuagcaauagcaauugcaggaauccuaacaaugagagagggaaucaaggagugaaaggcugggccuuugacaauggagaugacguguggaugggaagaacgaucagcaaggauuuacgcucagguuaugaaacuuucaaagucauuggugguugguccacaccuaauuccaaaucgcagaucaauagacaagucauaguugacagcgauaaucggucagguuacucugguauuuucucuguugagggcaaaagcugcaucaauaggugcuuuuauguggaguugauaaggggaaggaaacaggagacuagaguaugguggaccucaaacaguauuguuguguuuuguggcacuucagguaccuauggaacaggcucauggccugauggggcgaacaucaauuucaugccuauauaa

SEQ ID NO: 46101 - RNA, 1410 nt, Artificial Sequence
  derived and/or modified CDS sequence (wt) from neuraminidase__InfluenzaA__AAO46237
augaauccaaaucaaaagauaauaacaauuggcucugucucucucaccauugcaacaguaugcuuccucaugcagauugccauccugguaacuacuguaacauugcauuuuaagcaacaugagugcgacucccccgcgagcaaccaaguaaugccgugugaaccaauaauaauagaaaggaacauaacagagauaguguauuugaauaacaccaccauagagaaagagauaugccccaaaauaguggaauacagaaauuggucaaagccgcaaugucaaauuacaggauuugcaccuuuuucuaaggacaauucaauccggcuuucugcugguggggacauuugggugacgagagaaccuuaugugucaugcgauccuggcaaguguuaucaauuugcacucgggcaggggaccacacuagacaacaaacauucaaaugacacaauacaugauagaaucccucaucgaacccuauuaaugaaugaguuggguguuccauuucauuuaggaaccaggcaaguguguauagcaugguccagcucaaguugucacgauggaaaagcauggcugcauguuuguaucacuggggaugauaaaaaugcaacugcuagcuucauuuaugacgggaggcuuguggacaguauugguucauggucucaaaauauccucagaacccaggagucggaaugcguuuguaucaaugggacuugcacaguaguaaugacugauggaagugcuucaggaagagccgauacuagaauacuauucauugaagaggggaaaauuguccauauuagcccauugucaggaagugcucagcauguagaggaguguuccuguuauccucgauauccuggcgucagauguaucugcagagacaacuggaaaggcucuaauaggcccgucguagacauaaauauggaagauuauagcauugauuccaguuaugugugcucaggccuuguuggcgacacaccuagaaacgacgacagaucuagcaauagcaauugcaggaauccuaacaaugagagagggaaucaaggagugaaaggcugggccuuugacaauggagaugacguguggaugggaagaacgaucagcaaggauuuacgcucagguuaugaaacuuucaaagucauuggugguugguccacaccuaauuccaaaucgcagaucaauagacaagucauaguugacagcgauaaucggucagguuacucugguauuuucucuguugagggcaaaagcugcaucaauaggugcuuuuauguggaguugauaaggggaaggaaacaggagacuagaguaugguggaccucaaacaguauuguuguguuuuguggcacuucagguaccuauggaacaggcucauggccugauggggcgaacaucaauuucaugccuauauaa

SEQ ID NO: 46102 - RNA, 1410 nt, Artificial Sequence
  derived and/or modified CDS sequence (wt) from neuraminidase__InfluenzaA__AAO46238
augaauccaaaucaaaagauaauaacaauuggcucugccucucucaccauugcaacaguaugcuuccucaugcagauugccauccugguaacuacuguaacauugcauuucaagcaacaugagugcgacucucccgcgagcaaccaaguaaugccgugugaaccaauaauaauagaaaggaacauaacagagauaguguauuugaauaacaccaccauagagaaagagauaugccccaaaauaguggaauacagaaauuggucaaagccgcaauguaaaauuacaggauuugcaccuuuuucuaaggacaauucaauccggcuuucugcugguggggacauuugggugacgagagaaccuuaugugucaugcgauccuggcaaguguuaucaauuugcacucgggcaggggaccacacuagacaacaaacauucaaaugacacaauacaugauagaaucccucaucgaacccuauugaugaaugaguuggguguuccauuucauuuaggaaccaggcaaguguguauagcaugguccagcucaaguugucacgauggaaaagcauggcugcauguuugugucacuggggaugauaaaaaugcaacugcuagcuucauuuaugacgggaggcuuguggacaguauugguucauggucucaaaauauccucaggacccaggagucggaaugcguuuguaucaaugggacuuguacaguaguaaugacugauggaagugcuucaggaagagccgauacuagaauacuauucauugaagaggggaaaauuguccauauuagcccauugucaggaagugcucagcauguagaggaguguuccuguuauccucgauauccugacgucagauguaucugcagagacaacuggaaaggcucuaauaggcccgucguagacauaaauauggaagauuauagcauugauuccaguuaugugugcucagggcuuguuggagacacaccuagaaacgacgacagaucuagcaauagcaauugcagaaauccuaacaaugagaaagggaaucaaggagugaaaggcugggccuuugacaauggagaugacguguggaugggaagaacgaucagcaaggauuuacgcucagguuaugaaacuuucaaagucauuggugguugguccacaccuaauuccaaaucgcagaucaauaggcaagucauaguugacagcgauaauaggucagguuauucugguauuuucucuguugagggcaaaagcugcaucaauaggugcuuuuauguggaguugauaaggggaaggaaacaggagacuagaguaugguggaccucaaacaguauuguuguguucuguggcacuucagguaccuaugggacaggcucauggccugauggggcgaacaucaaucucaugccuauauaa

SEQ ID NO: 46103 - RNA, 1410 nt, Artificial Sequence
  derived and/or modified CDS sequence (wt) from neuraminidase__InfluenzaA__AAO46241
augaauccaaaucaaaagauaauaacaauuggcucugucucucucaccauugcaacaguaugcuuccucaugcagauugccauccugguaacuacuguaacauugcauuuuaagcaacaugagugcgacucccccgcgagcaaccaaguaaugccgugugaaccaauaauaauagaaaggaacauaacagagauaguguauuugaauaacaccaccauagagaaagagauaugcccaaaaguagugggauacagaaauuggucaaagccgcaaugucaaauuacaggauuugcaccuuuuucuaaggacaauucaauccggcuuucugcugguggggacauuugggugacgagagaaccuuaugugucaugcgauccuggcaaguguuaucaauuugcacucgggcaggggaccacacuagacaacaaacauucaaaugacacaauacaugauagaaucccucaucgaacccuauuaaugaaugaguuggguguuccauuucaucuaggaaccaggcaaguguguauagcaugguccagcucaaguugucacgauggaaaagcauggcugcauguuuguaucacuggggaugauaaaaaugcaacugcuagcuucauuuaugacgggaggcuuguggacaguauugguucauggucucaaaauauccucagaacccaggagucggaaugcguuuguaucaaugggacuugcacaguaguaaugacugauggaagugcuucaggaagagccgauacuagaauacuauucauugaagaggggaaaauuguccauauuagcccauugucaggaagugcucagcauguagaggaguguuccuguuauccucgauauccgggcgucagauguaucugcagagacaacuggaaaggcucuaauaggcccgucguagacauaaauauggaagauuauagcauugauuccaguuaugugugcucagggcuuguuggcgacacaccuagaaacgacgacagaucuagcaauagcaauugcaggaauccuaacaaugagagagggaaucaaggagugaaaggcugggccuuugacaauggagaugacguguggaugggaagaacgaucagcaaggauuuacgcucagguuaugaaacuuucaaagucauuggugguugguccacaccuaauuccaaaucgcagaucaauagacaagucauaguugacagcgauaaucggucagguuacuccgguauuuucucuguugagggcaaaagcugcaucaauaggugcuuuuauguggaguugauaaggggaaggaaacaggaaacuagaguaugguggaccucaaacaguauuguuguguuuuguggcacuucagguaccuauggaacaggcucauggccugauggggcgaacaucaauuucaugccuauauaa

SEQ ID NO: 46104 - RNA, 1410 nt, Artificial Sequence
  derived and/or modified CDS sequence (wt) from neuraminidase__InfluenzaA__AAO46245
augaauccaaaucaaaagauaauaacaauuggcucugucucucucaccauugcaacaguaugcuuucucaugcagauugccauccugguaacuacuguaacauugcacuuuaagcaacaugauugcgacucccccgcgagcaaccaaguaaugccgugugaaccaauaauaauagaaaggaacauaacagagauaguguauuugaauaacaccaccauagagaaagagauaugccccaaaguaguggaauacagaaauuggucaaagccgcaaugucaaauuacaggauuugcaccuuuuucuaaggacaauucaauccggcuuucugcugguggggacauuugggugacgagagaaccuuaugugucaugcgauccugucaaguguuaucaauuugcacucgggcaggggaccacacuagacaacaaacauucaaaugacacaguacaugauagaaucccucaucgaacccuauuaaugaaugaguuggguguuccauuucacuuaggaaccaggcaaguguguauagcaugguccagcucaaguugucacgauggaaaagcauggcugcauguuuguaucacuggggaugauaaaaaugcaacugcuagcuucauuuaugacgggaggcuuguggacaguauugguucauggucucaaaauauccucagaacccaggagucggaaugcguuuguaucaaugggacuugcacaguaguaaugacugauggaagugcuucaggaagagccgauacuagaauacuauucauugaagaggggaaaauuguccauauuagcccauuggcaggaagugcucagcauguagaggaguguuccuguuauccucgauauccuggcgucagauguaucugcagagacaacuggaaaggcucuaauaggcccgucguagacauaaauauggaagauuauagcauugauuccaguuaugugugcucagggcuuguuggcgacacaccuagaaacgaugacagaucuagcaauagcaauugcaggaauccuaacaaugagagagggacucaaggagugaaaggcugggccuuugacaauggaaaugacuuguggaugggaagaacaaucagcaaggauuuacgcucagguuaugaaacuuucaaagucauuggugguugguccacaccuaauuccaaaucgcagaucaauagacaagucauaguugacagugauaaucggucagguuacucugguauuuucucuguugagggcaaaagcugcaucaauaggugcuuuuauguggaguugauaaggggaaggaaacaggagacuagaguaugguggaccucaaacaguauuguuguguuuuguggcacuucagguaccuauggaacaggcucauggccugauggggcgaacaucaauuucaugccuauauaa

SEQ ID NO: 46105 - RNA, 1410 nt, Artificial Sequence
  derived and/or modified CDS sequence (wt) from neuraminidase__InfluenzaA__AAO46246
augaauccaaaucaaaagauaauaacaauuggcucugucucucucaccauugcaacaguaugcuuccucaugcagauugccauccuggcaacuacuguaacauugcauuuuaagcagcaugagugcgacuccccagcaagcaaccaaguaaugccgugugaaccaauaauaauagaaaggaacauaacagagauaguguacuugaauaacaccaucauagagaaagagauaugccccaaaguaguggaauacagaaauuggucaaagccgcaaugucaaauuacaggauuugcacccuuuucuaaggacaauucaauccggcuuucugcugguggggacauuugggugacgagagaaccuuaugugucaugcgauccuggcaaguguuaucaauuugcacucgggcaggggaccacacuagacaacaaacauucaaaugacacaauacaugauagaaccccucaucgaacccuauuaaugaaugaguuggguguuccauuucauuuaggaaccaggcaaguguguauagcaugguccagcucaaguugucacgauggaaaagcauggcugcauguuuguaucacuggggaugauaaaaaugcaacugcuagcuucauuuaugacgggaggcuuguggacaguauugguucauggucucaaaauauccucagaacccaggagucggaaugcguuuguaucaaugggacuugcacaguaguaaugacugauggaagugcuucaggaagagccgauacuagaauacuauucauugaagaggggaaaauuguccauauuagcccauugucaggaagugcucagcauguagaggaguguuccuguuauccucgauauccuggcgucagauguaucugcagagacaacuggaaaggcucuaauaggcccgucguagacauaaauauggaagauuauagcauugauuccaguuaugugugcucagggcuuguuggcgacacaccuagaaacgacgacagaucuagcaauagcaauugcaggaauccuaacaaugagagagggaaucaaggagugaaaggcugggccuuugacaauggagaugacguguggaugggaagaacaaucagcaaggauuuacgcucagguuaugaaacuuucaaagucauuggugguugguccacaccuaauuccaaaucgcagaucaauagacaagucauaguugacagcgauaaucggucagguuacucugguauuuucucuguugagggcaaaagcugcaucaauaggugcuuuuauguggaguugauaaggggaaggaaacaggagacuagaguaugguggaccucaaacaguauugcuguguuuuguggcacuucagguaccuauggaacaggcucauggccugauggggcgaacaucaauuuuaugccuauauaa

SEQ ID NO: 46106 - RNA, 1410 nt, Artificial Sequence
  derived and/or modified CDS sequence (wt) from neuraminidase__InfluenzaA__AAO46247
augaauccaaaucaaaagauaauaacaauuggcucugucucucucaccauugcaacaguaugcuuccucaugcagauugccauccugguaacuacuguaacauugcauuuuaagcaacaugagugcgacucccccgcgagcaaccaaguaaugccgugugaaccaauaauaauagaaaggaacauaacagagauaguguauuugaauaacaccaccauagagaaagagauaugccccaaaguaguggaauacagaaauuggucaaagccgcaaugucaaauuacaggauuugcaccuuuuucuaaggacaauucaauccggcuuucugcugguggggacauuugggugacgagagaaccuuaugugucaugcgauccuggcaaguguuaucaauuugcacucgggcaagggaccacacuagacaacaaacauucaaaugacacaauacaugauagaaucccucaucgaacccuauuaaugaaugaguuggguguuccauuucauuuaggaaccaggcaaguguguauagcaugguccagcucaaguugccacgauggaaaagcauggcugcauguuuguaucacuggggaugauaaaaaugcaacugcuagcuucauuuaugacgggaggcuuguggacaguauugguucauggucucaaaauauccucagaacccaggagucggaaugcguuuguaucaaugggacuugcacaguaguaaugacugauggaagugcuucaggaagagccgauacuagaauacuauucauugaagaggggaaaauuguccauauuagcccauugucaggaagugcucagcauguagaggaguguuccuguuauccucgauauccuggcgucagauguaucugcagagacaacuggaaaggcucuaauaggcccgucauagacauaaauauggaagauuauagcauugauuccaguuaugugugcucagggcuuguuggcgacacaccuagaaacgacgacagaucuagcaauagcaauugcaggaacccuaacaaugagagagggaaucaaggagugaaaggcugggccuuugacaauggagaugacguguggaugggaagaacgaucagcaaggauuuacgcucagguuaugaaacuuucaaagucauuggugguugguccacaccuaauuccaaaucgcagaucaauagacaagucauaguugacagcgauaaucggucagguuacucugguauuuucucuguugagggcaaaagcugcaucaauaggugcuuuuauguggaguugauaaggggaaggaaacaggagacuagaguaugguggaccucaaacaguauuguuguguuuuguggcacuucagguaccuauggaacaggcucauggccugauggggcgaacaucaauuucaugccuauauaa

SEQ ID NO: 46107 - RNA, 1410 nt, Artificial Sequence
  derived and/or modified CDS sequence (wt) from neuraminidase__InfluenzaA__AAO46462
augaauccaaaucaaaagauaauaacaauuggcucugucucucucaccauugcaacaguaugcuuccucaugcagauugccauccugguaacuacuguaacauugcauuuuaagcaauaugagugcgacucccccgcgagcaaccaaguaaugccgugugaaccaauaauaauagaaaggaacauaacagagauaguguauuugaauaacaccaccauagagaaagagauaugccccaaaguaguggaauacagaaauuggucaaagccgcaaugucaaauuacaggauuugcaccuuuuucuaaggacaauucaauccggcuuucugcugguggggacauuugggugacgagagaaccuuaugugucaugcgaucauggcaaguguuaucaauuugcacucgggcaggggaccacacuagacaacaaacauucaaaugacacaauacaugauagaaucccucaucgaacccuauuaaugaaugaguuggguguuccauuucauuuaggaaccaggcaaguguguauagcaugguccagcucaaguugucacgauggaaaagcauggcugcauguuuguaucacuggggaugacaaaaaugcaacugcuagcuucauuuaugacgggaggcuuguggacaguauugguucauggucucaaaauauccucagaacccaggagucggaaugcguuuguaucaaugggacuugcacaguaguaaugacugauggaagugcuucaggaagagccgauacuagaauacuauucauugaagaggggaaaauuguccauauuagcccauugucaggaagugcucagcauguagaagaguguuccuguuauccuagauauccuggcgucagauguaucugcagagacaacuggaaaggcucuaauaggcccgucguagacauaaauauggaagauuauagcauugauuccaguuaugugugcucagggcuuguuggcgacacaccuagaaacgacgacagaucuagcaauagcaauugcaggaauccuaacaaugagagagggaaucaaggagugaaaggcugggccuuugacaauggagaugacguguggaugggaagaacgaucagcaaggauuuacgcucagguuaugaaacuuucaaagucauuggugguugguccacaccuaauuccaaaucgcagaucaauagacaagucauaguugacagcgauaaucggucagguuacucugguauuuucucuguugagggcaaaagcugcaucaauaggugcuuuuauguggaguugauaaggggaaggaaacaggagacuagagugugguggaccucaaacaguauuguuguguuuuguggcacuucagguaccuauggaacaggcucauggccugauggggcgaacaucaauuucaugccuauauaa

SEQ ID NO: 46108 - RNA, 1410 nt, Artificial Sequence; identical to SEQ ID NO: 46107
  derived and/or modified CDS sequence (wt) from neuraminidase__InfluenzaA__AAO46463

SEQ ID NO: 46109 - RNA, 1410 nt, Artificial Sequence; identical to SEQ ID NO: 46107
  derived and/or modified CDS sequence (wt) from neuraminidase__InfluenzaA__AAO46464

SEQ ID NO: 46110 - RNA, 1410 nt, Artificial Sequence; identical to SEQ ID NO: 46107
  derived and/or modified CDS sequence (wt) from neuraminidase__InfluenzaA__AAO46465

SEQ ID NO: 46111 - RNA, 1410 nt, Artificial Sequence
  derived and/or modified CDS sequence (wt) from neuraminidase__InfluenzaA__AAO46466
augaauccaaaucaaaagauaauaacaauuggcucugucucucucaccauugcaacaguaugcuuccucaugcagauugccauccugguaacuacuguaacauugcauuuuaagcaauaugagugcgacucccccgcgagcaaccaaguaaugccgugugaaccaauaauaauagaaaggaacauaacagagauaguguauuugaauaacaccaccauagagaaagagauaugccccaaaguaguggaauacagaaauuggucaaagccgcaaugucaaauuacaggauuugcaccuuuuucuaaggacaauucaauccggcuuucugcugguggggacauuugggugacgagagaaccuuaugugucaugcgaucauggcaaguguuaucaauuugcacucgggcaggggaccacacuagacaacaaacauucaaaugacacaauacaugauagaaucccucaucgaacccuauuaaugaaugaguuggguguuccauuucauuuaggaaccaggcaaguguguauagcaugguccagcucaaguugucacgauggaaaagcauggcugcauguuuguaucacuggggaugacaaaaaugcaacugcuagcuucauuuaugacgggaggcuuguggacaguauugguucauggucucaaaauauccucagaacccaggagucggaaugcguuuguaucaaugggacuugcacaguaguaaugacugauggaagugcuucaggaagagccgauacuagaauacuauucauugaagaggggaaaauuguccauauuagcccauugucaggaagugcucagcauguagaagaguguuccuguuauccuagauauccuggcgucagauguaucugcagagacaacuggaaaggcucuaauaggcccgucguagacauaaauauggaagauuauagcauugauuccaguuaugugugcucagggcuuguuggcgacacaccuagaaacgacgacagaucuagcaauagcaauugcaggaauccuaacaaugagagagggaaucaaggagugaaaggcugggccuuugacaauggagaugacguguggaugggaagaacgaucagcaaggauuuacgcucagguuaugaaacuuucaaagucauuggugguugguccacaccuaauuccaaaucgcagaucaauagacaagucauaguugacagcgauaaucggucagguuacucugguauuuucucuguugagggcaaaagcugcaucaauaggugcuuuuauguggaguugauaaggggaaggaaacaggagacuagaguaugguggaccucaaacaguauuguuguguuuuguggcacuucagguaccuauggaacaggcucauggccugauggggcgaacaucaauuucaugccuauauaa

SEQ ID NO: 46112 - RNA, 1410 nt, Artificial Sequence
  derived and/or modified CDS sequence (wt) from neuraminidase__InfluenzaA__AAO46467
augaauccaaaucaaaagauaauaacaauuggcucugucucucucaccauugcaacaguaugcuuccucaugcagauugccauccugguaacuacuguaacauugcauuuuaagcaauaugagugcgacucccccgcgagcaaccaaguaaugccgugugaaccaauaauaauagaaaggaacauaacagagauaguguauuugaauaacaccaccauagagaaagagauaugccccaaaguaguggaauacagaaauuggucaaagccgcaaugucaaauuacaggauuugcaccuuuuucuaaggacaauucaauccggcuuucugcugguggggacauuugggugacgagagaaccuuaugugucaugcgaucauggcaaguguuaucaauuugcacucgggcaggggaccacacuagacaacaaacauucaaaugacacaauacaugauagaaucccucaucgaacccuauuaaugaaugaguuggguguuccauuucauuuaggaaccaggcaaguguguauagcaugguccagcucaaguugucacgauggaaaagcauggcugcauguuuguaucacuggggaugacaaaaaugcaacugcuagcuucauuuaugacgggaggcuuguggacaguauugguucauggucucaaaauauccucagaacccaggagucggaaugcguuuguaucaaugggacuugcacaguaguaaugacugauggaagugcuucaggaagagccgauacuagaauacuauucauugaagaggggaaaauuguccauauuagcccauugacaggaagugcucagcauguagaagaguguuccuguuauccuagauauccuggcgucagauguaucugcagagacaacuggaaaggcucuaauaggcccgucguagacauaaauauggaagauuauagcauugauuccaguuaugugugcucagggcuuguuggcgacacaccuagaaacgacgacagaucuagcaauagcaauugcaggaauccuaacaaugagagagggaaucaaggagugaaaggcugggccuuugacaauggagaugacguguggaugggaagaacgaucagcaaggauuuacgcucagguuaugaaacuuucaaagucauuggugguugguccacaccuaauuccaaaucgcagaucaauagacaagucauaguugacagcgauaaucggucagguuacucugguauuuucucuguugagggcaaaagcugcaucaauaggugcuuuuauguggaguugauaaggggaaggaaacaggagacuagagugugguggaccucaaacaguauuguuguguuuuguggcacuucagguaccuauggaacaggcucauggccugauggggcgaacaucaauuucaugccuauauaa

SEQ ID NO: 46113 - RNA, 1410 nt, Artificial Sequence
  derived and/or modified CDS sequence (wt) from neuraminidase__InfluenzaA__AAO46468
augaauccaaaucaaaagauaauaacaauuggcucugucucucucaccauugcaacaguaugcuuccucaugcagauugccauccugguaacuacuguaacauugcauuuuaagcaauaugagugcgacuuccccgcgagcaaccaaguaaugccgugugaaccaauaauaauagaaaggaacauaacagagauaguguauuugaauaacaccaccauagagaaagagauaugccccaaaguaguggaauacagaaauuggucaaagccgcaaugucaaauuacaggauuugcaccuuuuucuaaggacaauucaauccggcuuucugcugguggggacauuugggugacgagagaaccuuaugugucaugcgaucauggcaaguguuaucaauuugcacucgggcaggggaccacacuagacaacaaacauucaaaugacacaauacaugauagaaucccucaucgaacccuauuaaugaaugaguuggguguuccauuucauuuaggaaccaggcaaguguguauagcaugguccagcucaaguugucacgauggaaaagcauggcugcauguuuguaucacuggggaugacaaaaaugcaacugcuagcuucauuuaugacgggaggcuuguggacaguauugguucauggucucaaaauauccucagaacccaggagucggaaugcguuuguaucaaugggacuugcacaguaguaaugacugauggaagugcuucaggaagagccgauacuagaauacuauucauugaagaggggaaaauuguccauauuagcccauugucaggaagugcucagcauguagaagaguguuccuguuauccuagauauccuggcgucagauguaucugcagagacaacuggaaaggcucuaauaggcccgucguagacauaaauauggaagauuauagcauugauuccaguuaugugugcucagggcuuguuggcgacacaccuagaaacgacgacagaucuagcaauagcaauugcaggaauccuaacaaugagagagggaaucaaggagugaaaggcugggccuuugacaauggagaugacguguggaugggaagaacgaucagcaaggauuuacgcucagguuaugaaacuuucaaagucauuggugguugguccacaccuaauuccaaaucgcagaucaauagacaagucauaguugacagcgauaaucggucagguuacucugguauuuucucuguugagggcaaaagcugcaucaauaggugcuuuuauguggaguugauaaggggaaggaaacaggagacuagagugugguggaccucaaacaguauuguuguguuuuguggcacuucagguaccuauggaacaggcucauggccugauggggcgaacaucaauuucaugccuauauaa

SEQ ID NO: 46114 - RNA, 1410 nt, Artificial Sequence
  derived and/or modified CDS sequence (wt) from neuraminidase__InfluenzaA__AAO46469
augaauccaaaucaaaagauaauaacaauuggcucugucucucucaccauugcaacaguaugcuuccucaugcagauugccauccugguaacuacuguaacauugcauuuuaagcaauaugagugcgacucccccgcgagcaaccaaguaaugccgugugaaccaauaauaauagaaaggaacauaacagagauaguguauuugaauaacaccaccauagagaaagagauaugccccaaaguaguggaauacagaaauuggucaaagccgcaaugucaaauuacaggauuugcaccuuuuucuaaggacaauucaauccggcuuucugcugguggggacauuugggugacgagagaaccuuaugugucaugcgaucauggcaaguguuaucaauuugcacucgggcagggaaccacacuagacaacaaacauucaaaugacacaauacaugauagaaucccucaucgaacccuauuaaugaaugaguuggguguuccauuucauuuaggaaccaggcaaguguguauagcaugguccagcucaaguugucacgauggaaaagcauggcugcauguuuguaucacuggggaugacaaaaaugcaacugcuagcuucauuuaugacgggaggcuuguagacaguauugguucauggucucaaaauauccucagaacccaggagucggaaugcguuuguaucaaugggacuugcacaguaguaaugacugauggaagugcuucaggaagagccgauacuagaauacuauucauugaagaggggaaaauuguccauauuagcccauugucaggaagugcucagcauguagaagaguguuccuguuauccuagauauccuggcgucagauguaucugcagagacaacuggaaaggcucuaauaggcccgucguagacauaaauauggaagauuauagcauugauuccaguuaugugugcucagggcuuguuggcgacacaccuagaaacgacgacagaucuagcaauagcaauugcaggaauccuaacaaugagagagggaaucaaggagugaaaggcugggccuuugacaauggagaugacguguggaugggaagaacgaucagcaaggauuuacgcucagguuaugaaacuuucaaagucauuggugguugguccacaccuaauuccaaaucgcagaucaauagacaagucauaguugacagcgauaaucggucagguuacucugguauuuucucuguugagggcaaaagcugcaucaauaggugcuuuuauguggaguugauaaggggaaggaaacaggagacuagagugugguggaccucaaacaguauuguuguguuuuguggcacuucagguaccuauggaacaggcucauggccugauggggcgaacaucaauuucaugccuauauaa

SEQ ID NO: 46115 - RNA, 1410 nt, Artificial Sequence
  derived and/or modified CDS sequence (wt) from neuraminidase__InfluenzaA__AAO46471
augaauccaaaucaaaagauaauaacaauuggcucugucucucucaccauugcaacaguaugcuuccucaugcagauugccauccugguaacuacuguaacauugcauuuuaagcaauaugagugcgacucccccgcgagcaaccaaguaaugccgugugaaccaauaauaauagaaaggaacauaacagagauaguguauuugaauaacaccaccauagagaaagagauaugccccaaaguaguggaauacagaaauuggucaaagccgcaaugucaaauuacaggauuugcaccuuuuucuaaggacaauucaauccggcuuucugcugguggggacauuugggugacgagagaaccuuaugugucaugcgauccuggcaaguguuaucaauuugcacucgggcaggggaccacacuagacaacaaacauucaaaugacacaauacaugauagaaucccucaucgaacccuauuaaugaaugaguuggguguuccauuucauuuaggaaccaggcaaguguguauagcaugguccagcucaaguugucacgauggaaaagcauggcugcauguuuguaucacuggggaugacaaaaaugcaacugcuagcuucauuuaugacgggaggcuuguggacaguauugguucauggucucaaaauauccucagaacccaggagucggaaugcguuuguaucaaugggaccugcacaguaguaaugacugauggaagugcuucaggaagagccgauacuagaauacuauucauugaagaggggaaaauuguccauauuagcccauugucaggaagugcucagcauguagaagaguguuccuguuauccuagauauccuggcgucagauguaucugcagagacaacuggaaaggcucuaauaggcccgucguagacauaaauauggaagauuauagcauugauuccaguuaugugugcucagggcuuguuggcgacacaccuagaaacgacgacagaucuagcaauagcaauugcaggaauccuaacaaugagagagggaaucaaggagugaaaggcugggccuuugacaauggagaugacguguggaugggaagaacgaucagcaaggauuuacgcucagguuaugaaacuuucaaagucauuggugguugguccacaccuaauuccaaaucgcagaucaauagacaagucauaguugacagcgauaaucggucagguuacucugguauuuucucuguugagggcaaaagcugcaucaauaggugcuuuuauguggaguugauaaggggaaggaaacaggagacuagaguaugguggaccucaaacaguauuguuguguuuuguggcacuucagguaccuauggaacaggcucauggccugauggggcgaacaucaauuucaugccuauauaa

SEQ ID NO: 46116 - RNA, 1410 nt, Artificial Sequence
  derived and/or modified CDS sequence (wt) from neuraminidase__InfluenzaA__AAO46472
augaauccaaaucaaaagauaauaacaauuggcucugucucucucaccauugcaacaguaugcuuccucaugcagauugccauccugguaacuacuguaacauugcauuuuaagcaauaugagugcgacucccccgcgagcaaccaaguaaugccgugugaaccaauaacaauagaaaggaacauaacagagauaguguauuugaauaacaccaccauagagaaagagauaugccccaaaguaguggaauacagaaauuggucaaagccgcaaugucaaauuacaggauuugcaccuuuuucuaaggacaauucaauccggcuuucugcugguggggacauuugggugacgagagaaccuuaugugucaugcgauccuggcaaguguuaucaauuugcacucgggcaggggaccacacuagacaacaaacauucaaaugacacaauacaugauagaaucccucaucgaacccuauuaaugaaugaguuggguguuccauuucauuuaggaaccaggcaaguguguauagcaugguccagcucaaguugucacgauggaaaagcauggcugcauguuuguaucacuggggaugacaaaaaugcaacugcuagcuucauuuaugacgggaggcuuguggacaguauugguucauggucucaaaauauccucagaacccaggagucggaaugcguuuguaucaaugggacuugcacaguaguaaugacugauggaagugcuucaggaagagccgauacuagaauacuauucauugaagaggggaaaauuguccauauuagcccauugucaggaagugcucagcauguagaagaguguuccuguuauccuagauauccuggcgucagauguaucugcagagacaacuggaaaggcucuaauaggcccgucguagacauaaauauggaagauuauagcauugauuccaguuaugugugcucagggcuuguuggcgacacaccuagaaacgacgacagaucuagcaauagcaauugcaggaauccuaacaaugagagagggaaucaaggagugaaaggcugggccuuugacaauggagaugacguguggaugggaagaacgaucagcaaggauuuacgcucagguuaugaaacuuucaaagucauuagugguugguccacaccuaauuccaaaucgcagaucaauagacaagucauaguugacagcgauaaucggucagguuacucugguauuuucucuguugagggcaaaagcugcaucaauaggugcuuuuauguggaguugauaaggggaaggaagcaggagacuagaguaugguggaccucaaacaguauuguuguguuuuguggcacuucagguaccuauggaacaggcucauggccugauggggcgaacaucaauuucaugccuauauaa

SEQ ID NO: 46117 - RNA, 1410 nt, Artificial Sequence; identical to SEQ ID NO: 46107
  derived and/or modified CDS sequence (wt) from neuraminidase__InfluenzaA__AAO46473

SEQ ID NO: 46118 - RNA, 1410 nt, Artificial Sequence; identical to SEQ ID NO: 46107
  derived and/or modified CDS sequence (wt) from neuraminidase__InfluenzaA__AAO46474

SEQ ID NO: 46119 - RNA, 1410 nt, Artificial Sequence
  derived and/or modified CDS sequence (wt) from neuraminidase__InfluenzaA__AAO46475
augaauccaaaucaaaagauaauaacaauuggcucugucucucucaccauugcaacaguaugcuuccucaugcagauugccauccugguaacuacuguaacauugcauuuuaagcaauaugagugcgacucccccgcgagcaaccaaguaaugccgugugaaccaauaauaauagaaaggaacauaacagagauaguguauuugaauaacaccaccauagagaaagagauaugccccaaaguaguggaauacagaaauuggucaaagccgcaaugucaaauuacaggauuugcaccuuuuucuaaggacaauucaauccggcuuucugcugguggggacauuugggugacgagagaaccuuaugugucaugcgaucauggcaaguguuaucaauuugcacucgggcaggggaccacacuagacaacaaacauucaaaugacacaauacaugauagaaucccucaucgaacccuauuaaugaaugaguuggguguuccauuucauuuaggaaccaggcaaguguguauagcaugguccagcucaaguugucacgauggaaaagcauggcugcauguuuguaucacuggggaugacaaaaaugcaacugcuagcuucauuuaugacgggaggcuuguggacaguauugguucauggucucaaaauauccucagaacccaggagucggaaugcguuuguaucaaugggacuugcacaguaguaaugacugauggaagugcuucaggaagagccgauacuagaauacuauucauugaagaggggaaaauuguccauauuagcccauugucaggaagugcucagcauguagaagaguguuccuguuauccuagauauccuggcgucagauguaucugcagagacaacuggaaaggcucuaauaggcccgucguagacauaaauauggaagauuauagcauugauuccaguuaugugugcucagggcuuguuggcgacacaccuagaaacgacgacagaucuagcaauagcaauugcaggaauccuaauaaugagagagggaaucaaggagugaaaggcugggccuuugacaauggagaugacguguggaugggaagaacgaucagcaaggauuuacgcucagguuaugaaacuuucaaagucauuggugguugguccacaccuaauuccaaaucgcagaucaauagacaagucauaguugacagcgauaaucggucagguuacucugguauuuucucuguugagggcaaaagcugcaucaauaggugcuuuuauguggaguugauaaggggaaggaaacaggagacuagagugugguggaccucaaacaguauuguuguguuuuguggcacuucagguaccuauggaacaggcucauggccugauggggcgaacaucaauuucaugccuauauaa

SEQ ID NO: 46120 - RNA, 1410 nt, Artificial Sequence
  derived and/or modified CDS sequence (wt) from neuraminidase__InfluenzaA__AAO46476
augaauccaaaucaaaagauaauaacaauuggcucugucucucucaccauugcaacaguaugcuuccucaugcagauugccauccugguaacuacuguaacauugcauuucaggcaauaugagugcgacucccccgcgaacaaccaaguaaugccgugugaaccaacaauaauagaaaggaacauaacagagauaguguauuugaauaacaccaccauagagaaagagauaugccccaaauuaguggaauacagaaauuggucaaagccgcaauguaaaauuacaggauuugcaccuuuuucuaaggacaauucaauccggcuuucugcugguggggacauuugggugacgagagaaccuuaugugucaugcgauccuggcaaguguuaucaauuugcacucgggcaggggaccacacuagacaacaaacauucaaaugacacaauacaugauagaaucccucaucgaacccuauugaugaaugaguuggguguuccauuucauuuaggaaccaggcaaguguguauagcaugguccagcucaaguugucacgauggaaaagcauggcugcauguuugugucacuggggaugauaaaaaugcaacugcuagcuucauuuaugacgggaggcuuguggacaguauugguucauggucucaaaauauccucaggacccaggagucggaaugcguuuguaucaaugggacuuguacaguaguaaugacugauggaagugcuucgggaagagcugauacuagaauacuauucauugaagaggggaaaauuguccauauuagcccauugucaggaagugcucagcauguagaggaguguuccuguuauccucgauauccuggcgucagauguaucugcagagacaacuggaaaggcucuaauaggcccgucguagauauaaauguggaagauuauagcauugauuccaguuaugugugcucagggcuuguuggcgacacacccagaaacaacgacagaucuagcaauagcaauugcaggaauccuaacaaugagagagggaaucacggagugaaaggcugggccuuugacgauggaaaugacguguggaugggaagaacgaucagcaaggauuuacgcucagguuaugaaaccuucaaagucauuggugguugguccacaccuaauuccaaaucgcagauaaauaggcaagucauaguugacagcgauaauaggucagguuauucugguauuuucucuguugagggcaaaagcugcaucaauaggugcuuuuauguggaguuaauaaggggaagggaacaggagacuagaguaugguggaccucaaacaguauuguuguguuuuguggcacuucagguaccuaugggacaggcucauggccugauggggcggacaucaaucucaugccuauauaa

SEQ ID NO: 46121 - RNA, 1410 nt, Artificial Sequence; identical to SEQ ID NO: 46119
  derived and/or modified CDS sequence (wt) from neuraminidase__InfluenzaA__AAO46477

SEQ ID NO: 46122 - RNA, 1410 nt, Artificial Sequence
  derived and/or modified CDS sequence (wt) from neuraminidase__InfluenzaA__AAO46478
augaauccaaaucaaaagauaauaacaauuggcucugucucucucaucauugcaacaguaugcuuccucaugcagauugccauccugguaacuacuguaacauugcauuuuaaacaacaugagugcgacucccccucgagcaaccaaguaaugccgugugaaccaauaauaauagaaaggaacauaacagagauaguguauuugaauaacaccaccauagagaaagagacaugccccaaauuaguggaauacagaaauuggucaaagccgcaauguaaaauuacaggauuugcaccuuuuucuaaggacaauucaauccgacucucugcugguggggacauuuggguuacgagagagccuuaugugucaugcgauccuggcaaguguuaucaauuugcacucgggcaggggaccacacuagacaacaaacauucaaaugacacaauacaugauagaaucccacaucgaacccuauugaugaaugaguuggguguuccauuucauuuaggaaccaggcaaguguguauagcaugguccagcucaaguugucacgauggaaaagcauggcugcauguuugugucacuggggaugauaaaaaugcaacugcuagcuucauuuaugacgggaggcuuguggacaguauugguucauggucucaaaauauccucaggacccaggagucggaaugcguuuguaucaaugguacuugcacaguaguaaugacugaugggaaugcuucagggagagccgauacuagaauacuauucauugaagaggggaaaauuguccauauuagcccauugucaggaagugcucagcauguagaggaguguuccuguuauccucgauauccugacgucagauguaucugcagagacaacuggaaaggcucuaauaggcccaucguagacauaaauaugaaagauuauagcauugauuccaguuaugugugcucagggcuuguuggcgacacaccuagaaacgacgacagaucuagcaagagcaauugcaggaauccuaacaaugagagagggaaucacggagugaaaggcugggccuuugacaauggaaaugacguguggaugggaagaacgaucagcaaggauuuacgcucagguuaugaaacuuucaaagucauuggugguugguccacaccuaauuccaaaucgcagaucaauaggcaagucauaguugacagcgauaaucggucagguuauucugguauuuucucuguugagggcaaaagcugcaucaauaggugcuuuuauguggaguugauaaggggaagggaacaggagacuagaguaugguggacuucaaacaguauuguuguguuuuguggcacuucagguaccuauggaacaggcucauggccugauggggcgaacaucaacuucaugccuauauaa

SEQ ID NO: 46123 - RNA, 1410 nt, Artificial Sequence
  derived and/or modified CDS sequence (wt) from neuraminidase__InfluenzaA__AAO46479
augaauccaaaucaaaagauaauaacaauuggcucugucucucucaccauugcaacaguaugcuuccucaugcagauugccauccugguaacuacuguaacauugcauuuuaagcaauaugagugcgacucccccgcgagcaaccgaguaaugccgugugaaccaauaauaauagaaaggaacauaacagagauaguguauuugaauaacaccaccauagagaaagagauaugccccaaaguaguggaauacagaaauuggucaaagccgcaaugucaaauuacaggauuugcaccuuuuucuaaggacaauucaauccggcuuucugcugguggggacauuugggugacgagagaaccuuaugugucaugcgauccuggcaaguguuaucaauuugcacucgggcaggggaccacacuagacaacaaacauucaaaugacacaauacaugauagaaucccucaucgaacccuauuaaugaaugaguuggguguuccauuucauuuaggaaccaggcaaguguguauagcaugguccagcucaaguugucacgauggaaaagcauggcugcauguuuguaucacuggggaugacaaaaaugcaacugcuagcuucauuuaugacgggaggcuuguggacaguauugguucauggucucaaaauauccucagaacccaggagucggaaugcguuuguaucaaugggacuugcacaguaguaaugacugauggaagugcuucaggaagagccgauacuagaauacuauucauugaagaggggaaaauuguccauauuagcccauugucaggaagugcucagcauguagaagaguguuccuguuauccuagauauccuggcgucagauguaucugcagagacaacuggaaaggcucuaauaggcccgucguagacauaaauauggaagauuauagcauugauuccaguuaugugugcucagggcuuguuggcgacacaccuagaaacgacgacagaucuagcaauagcaauugcaggaauccuaacaaugagagagggaaucaaggagugaaaggcugggccuuugacaauggagaugacguguggaugggaagaacgaucagcaaggauuuacgcucagguuaugaaacuuucaaagucauuggugguugguccacaccuaauuccaaaucgcagaucaauagacaagucauaguugacagcgguaaucggucagguuacucugguauuuucucuguugagggcaaaagcugcaucaauaggugcuuuuauguggaguugauaaggggaaggaaacaggagacuagaguaugguggaccucaaacaguauuguuguguuuuguggcacuucaggcaccuauggaacaggcucauggccugauggggcgaacaucaauuucaugccuauauaa

SEQ ID NO: 46124 - RNA, 1410 nt, Artificial Sequence
  derived and/or modified CDS sequence (wt) from neuraminidase__InfluenzaA__AAO46481
augaauccaaaucaaaagauaauaacaauuggcucugucucucucaccauugcaacaguaugcuuccucaugcagauugccauccugguaacuacuguaacauugcauuucaagcaauaugagugcgacucccccgcgaacaaccaaguaaugccgugugaaccaauaauaauagaaaggaacauaacagagauaguguauuugacuaacaccaccauagagaaagagauaugccccaaauuaguggaauacagaaauuggucaaagccgcaauguaaaauuacaggauuugcaccuuuuucuaaggacaauucaauucggcuuucugcugguggggacauuugggugacgagagaaccuuaugugucaugcgauccuggcaaguguuaucaauuugcacucgggcaggggaccacacuagacaacaaacauucaaaugacacaauacaugauagaaucccucaucgaacccuauugaugaaugaguuggguguuccauuucauuuaggaaccaggcaaguguguauagcaugguccagcucaaguugucacgauggaaaagcauggcugcauguuugugucacuggggaugauaaaaaugcaacugcuagcuucauuuacgaugggaggcuuguggacaguauugguucauggucucaaaauauccucaggacccaggagucggaaugcguuuguaucaaugggacuuguacaguaguaaugacugauggaagugcuucaggaagagcugauacuagaauacuauucauugaagaggggaaaauuguccacauuagcccauugucaggaagugcucagcauguagaggaguguuccuguuauccucgauauccuggcgucagauguaucugcagagacaacuggaaaggcucuaauaggcccgucguagauauaaaugugaaagauuauagcauugauucccguuaugugugcucagggcuuguuggcgacacacccagaaacaacgacagaucuagcaauagcaauugcaggaauccuaacaaugagagagggaaucauggagugaaaggcugggccuuugacgauggaaaugacguguggaugggaagaacgaucagcaaggauucacgcucagguuaugaaaccuucaaagucauuggugguugguccacaccuaauuccaaaucgcagauaaauaggcaagucauaguugacagcgauaauaggucagguuauucugguauuuucucuguugagagcaaaagcugcaucaauaggugcuuuuacguggaguugauaaggggaagggaacaggagacuagaguaugguggaccucaaacaguauuguuguguuuuguggcacuucagguaccuaugggacaggcucauggccugauggggcggacaucaaucucaugccuauauaa

SEQ ID NO: 46125 - RNA, 1410 nt, Artificial Sequence
  derived and/or modified CDS sequence (wt) from neuraminidase__InfluenzaA__AAO46482
augaauccaaaucaaaagauaauaacaauuggcucugucucucucaccauugcaacaguaugcuuccucaugcagauugccauccugguaacuacuguaacauugcauuucaagcaauaugagugcgacucccccgcgaacaaccaaguaaugccgugugaaccaaugauaauagaaaggaacauaacagagauaguguauuugacuaacaccaccauagagaaagagauaugccccaaauuaguggaauacagaaauuggucaaagccgcaauguaaaauuacaggauuugcaccuuuuucuaaggacaauucaauucggcuuucugcugguggggacauuugggugacgagagaaccuuaugugucaugcgauccuggcaaguguuaucaauuugcacucgggcaggggaccacacuagacaacaaacauucaaaugacacaauacaugauagaaucccucaucgaacccuauugaugaaugaguuggguguuccauuucauuuaggaaccaggcaaguguguauagcaugguccagcucaaguugucacgauggaaaagcauggcugcauguuugugucacuggggaugauaaaaaugcaacugcuagcuucauuuacgaugggagacuuguggacaguauugguucauggucucaaaauauccucaggacccaggagucggaaugcguuuguaucaaugggacuuguacaguaguaaugacugauggaagugcuucaggaagagcugauacuagaauacuauucauugaagaggggaaaauuguccauauuagcccauugucaggaagugcucagcauguagaggaguguuccuguuauccucgauauccuggcgucagauguaucugcagagacaacuggaaaggcucuaauaggcccgucguagauauaaaugugaaagauuauagcauugauucccguuaugugugcucagggcuuguuggcgacacacccagaaacaacgacagaucuagcaauagcaauugcaggaauccuaacaaugauaaagggaaucauggagugaaaggcugggccuuugacgauggaaaugacguguggaugggaagaacgaucagcaaggauucacgcucagguuaugaaaccuucaaagucauuggugguugguccacaccuaauuccaaaucgcagauaaauaggcaagucauaguugacagcgauaauaggucagguuauucugguauuuucucuguugagggcaaaagcugcaucaauaggugcuuuuacguggaguugauaaggggaagggaacaggagacuagaguaugguggaccucaaacaguauuguuguguuuuguggcacuucagguaccuaugggacaggcucauggccugauggggcggacaucaaucucaugccuauauaa

SEQ ID NO: 46126 - RNA, 1410 nt, Artificial Sequence
  derived and/or modified CDS sequence (wt) from neuraminidase__InfluenzaA__AAO46483
augaauccaaaucaaaagauaauaacaauuggcucugucucucucaccauugcaacaguaugcuuccucaugcagauugccauccugguaacuacuguaacauugcauuucaggcaauaugagugcgacucccccgcgaacaaccaaguaaugccgugugaaccaauaauaauagaaaggaacauaacagagauaguguauuugaauaacaccaccauagagaaagagauaugccccaaauuaguggaauacagaaauuggucaaagccgcaauguaaaauuacaggauuugcaccuuuuucuaaggacaauucaauccggcuuucugcugguggggacauuugggugacgagagaaccuuaugugucaugcgauccuggcaaguguuaucaauuugcacucgggcaggggaccacacuagacaacaaacauucaaaugacacaauacaugauagaaucccucaucgaacccuauugaugaaugaguuggguguuccauuucauuuaggaaccaggcaaguguguauagcaugguccagcucaaguugucacgauggaaaagcauggcugcauguuugugucacuggggaugauaaaaaugcaacugcuagcuucauuuaugacgggaggcuuguggacaguauugguucauggucucaaaauauccucaggacccaggagucggaaugcguuuguaucaaugggacuuguacaguaguaaugacugauggaagugcuucaggaagagcugauacuagaauacuauucauugaagaggggaaaauuguccauauuagcccauugucaggaagugcucagcauguagaggaguguuccuguuauccucgauauccuggcgucagauguaucugcagagacaacuggaaaggcucuaauaggcccgucguagauauaaauguggaagauuauagcauugauuccaguuaugugugcucagggcuuguuggcgacacacccagaaacaacgacagaucuagcaauagcaauugcaggaauccuaacaaugagagagggaaucacggagugaaaggcugggccuuugacgauggaaaugacguguggaugggaagaacgaucagcaaggauuuacgcucagguuaugaaaccuucaaagucauuggugguugguccacaccuaauuccaaaucgcagauaaauaggcaagucauaguugacagcgauaauaggucagguuauucugguauuuucucuguugagggcaaaagcugcaucaauaggugcuuuuauguggaguuaauaaggggaagggaacaggagacuagaguaugguggaccucaaacaguauuguuguguuuuguggcacuucagguaccuaugggacaggcucauggccugauggggcggacaucaaucucaugccuauauaa

SEQ ID NO: 46127 - RNA, 1410 nt, Artificial Sequence
  derived and/or modified CDS sequence (wt) from neuraminidase__InfluenzaA__AAO46485
augaauccaaaucaaaagauaauaacaauuggcucugucucucucaccauugcaacaguaugcuuccucaugcagauugccauccugguaacuacuguaacauugcauuucaagcaauaugagugcgacucccccgcgaacaaccaaguaaugccgugugaaccaauaauaauagaaaggaacauaacagagauaguguauuugacuaacaccaccauagagaaagagauaugccccaaauuaguggaauacagaaauuggucaaagccgcaauguaaaauuacaggauuugcaccuuuuucuaaggacaauucaauucggcuuucugcugguggggacauuugggugacgagagaaccuuaugugucaugcgauccuggcaaguguuaucaauuugcacucgggcaggggaccacacuagacaacaaacauucaaaugacacaauacaugauagaaucccucaucgaacccuauugaugaaugaguuggguguuccauuucauuuaggaaccaggcaaguguguauagcaugguccagcucaaguugucacgauggaaaagcauggcugcauguuugugucacuggggaugauaaaaaugcaacugcuagcuucauuuacgaugggagacuuguggacaguauugguucauggucucaaaauauccucaggacccaggagucggaaugcguuuguaucaaugggacuuguacaguaguaaugacugauggaagugcuucaggaagagcugauacuagaauacuauucauugaagaggggaaaauuguccauauuagcccauugucaggaagugcucagcauguagaggaauguuccuguuauccucgauauccuggcgucagauguaucugcagagacaacuggaaaggcucuaauaggcccgucguagauauaaaugugaaagauuauagcauugauucccguuaugugugcucagggcuuguuggcgacacacccagaaacaacgacagaucuagcaauagcaauugcaggaauccuaacaaugauaaagggaaucauggagugaaaggcugggccuuugacgauggaaaugacguguggaugggaagaacgaucagcaaggauucacgcucagguuaugaaaccuucaaagucauuggugguugguccacaccuaauuccaaaucgcagauaaauaggcaagucauaguugacagcgauaauaggucagguuauucugguauuuucucuguugagggcaaaagcugcaucaauaggugcuuuuacguggaguugauaaggggaagggaacaggagacuagaguaugguggaccucaaacaguauuguuguguuuuguggcacuucagguaccuaugggacaggcucauggccugauggggcggacaucaaucucaugccuauauaa

SEQ ID NO: 46128 - RNA, 1410 nt, Artificial Sequence
  derived and/or modified CDS sequence (wt) from neuraminidase__InfluenzaA__AAO46486
augaauccaaaucaaaagauaauaacgauuggcucugucucucucaccauugcaacaauaugcuuccucaugcagauugccauccugguaacuacuguaacauugcauuucaagcaauaugagugcgacucccccgcgaacaaccaaguaaugccgugugaaccaauaauaauagaaaggaacauaacagagauaguguauuugacuaacaccaccauagagaaagagauaugccccaaauuaguggaauacaggaauuggucaaaaccgcaauguaaaauuacaggauuugcaccuuuuucuaaggacaauucaauucggcuuucugcugguggggacauuugggugacgagagaaccuuaugugucaugcgauccuggcaaguguuaucaauuugcacucgggcaggggaccacacuagacaacaaacauucaaaugacacaauacaugauagaaucccucaucgaacccuauugaugaaugaguuggguguuccauuucauuugggaaccaggcaaguguguauagcaugguccagcucaaguugucacgauggaaaagcauggcugcauguuugugucacuggggaugauaaaaaugcaacugcuagcuucauuuacgaugggaggcuuguggacaguauugguucauggucucaaaauauucucaggacccaggagucggaaugcguuuguaucaaugggacuuguacaguaguaaugacugauggaagugcuucaggaagagcugauacuagaauacuauucauugaagaggggaaaauuguucauauuagcccauugucaggaagugcucagcauguagaggaguguuccuguuauccucgauauccuggugucagauguaucugcagagacaacuggaaaggcucuaauaggcccgucguagauauaaaugugaaagauuauagcauugauuccaguuaugugugcucagggcuuguuggcgacacacccagaaacaacgacagaucuagcaauagcuauugccggaauccuaacaaugagagaggaaaucacggagugaaaggcugggccuuugacgauggaaaugacguguggaugggaagaacgaucagcaaggauucacgcucagguuaugaaaccuucaaagucauuggugguugguccacaccuaauuccaaaucgcagauaaauaggcaagucauaguugacagcgauaauaggucagguuauucugggauuuucucuguugagggcaaaagcugcaucaauaggugcuuuuauguggaguugauaaggggaagggaacaggagacuagaguaugguggaccucaaacaguauuguuguguuuuguggcacuucagguaccuaugggacaggcucauggccugauggggcggacaucaaucucaugccuauauaa

SEQ ID NO: 46129 - RNA, 1410 nt, Artificial Sequence
  derived and/or modified CDS sequence (wt) from neuraminidase__InfluenzaA__AAO46489
augaauccaaaucaaaagauaauaacaauuggcucugucucucucaccauugcaacaauaugcuuccucaugcagauugccauccugguaacuacuguaacauugcauuucaagcaauaugagugcgacucccccgcgaacaaccaaguaaugccgugugaaccaauaauaauagaaaggaacauaacagaaauaguguauuugacuaacaccaccauagagaaagagauaugccccaaauuaguggaauacaggaauuggucaaagccgcaauguaaaauuacaggauuugcaccuuuuucuaaggacaauucaauucggcuuucugcugguggggacauuugggugacgagagaaccuuaugugucaugcgauccuggcaaguguuaucaauuugcacucgggcaggggaccacacuaaacaacaaacauucaaaugacacaauacaugauagaaucccucaucgaacccuauugaugaaugaguuggguguuccauuucauuugggaaccaggcaaguguguauagcaugguccagcucaaguugucacgauggaaaagcauggcugcauguuugugucacuggggaugauaaaaaugcaacugcuagcuucauuuacgaugggaggcuuguggacaguauugguucauggucucaaaauauccucaggacccaggagucggaaugcguuuguaucaaugggacuuguacaguaguaaugacugauggaagugcuucaggaaaagcugauacuagaauacuauucauugaagaggggaaaauuguucauauuagcccauugucaggaagugcucagcauguagaggaguguuccuguuauccucgauauccuggugucagauguaucugcagagacaacuggaaaggcucuaauaggcccgucguagauauaaaugugaaagauuauagcauugauuccaguuaugugugcucagggcuuguuggcgacacacccagaaacaacgacagaucuagcaguagcuauugccggaauccuaacaaugagagagggaaucacggagugaaaggcugggccuuugacgauggaaaugacguguggaugggaagaacgaucagcaaggauucacgcucagguuaugaaaccuucaaagucauuggugguugguccacaccuaauuccaaaucgcagauaaauaggcaagucauaguugacagcgauaauaggucagguuauucugguauuuucucuguugagggcaaaagcugcaucaauaggugcuuuuacguggaguugauaaggggaagggaacaggagacuagaguaugguggaccucaaacaguauuguuguguuuuguggcacuucagguaccuaugggacaggcucauggccugauggggcggacaucaaucucaugccuauauaa

SEQ ID NO: 46130 - RNA, 1410 nt, Artificial Sequence
  derived and/or modified CDS sequence (wt) from neuraminidase__InfluenzaA__AAO46491
augaauccaaaucaaaagauaauaacaauuggcucugucucucucaccauugcaacaauaugcuuccucaugcagauugccauccugguaacuacuguaacauugcauuucaagcaauaugagugcgacucccccgcgaacaaccaaguaaugccgugugaaccaauaauaauagaaaggaacauaacagagauaguguauuugacuaacaccaccauagagaaagagauaugccccaaauuaguggaauacaggaauuggucaaagccgcaauguaaaauuacaggauuugcaccuuuuucuaaggacaauucaauucggcuuucugcugguggggacauuugggugacgagagaaccuuaugugucaugcgauccuggcaaguguuaucaauuugcacucgggcaggggaccacacuagacaacaaacauucaaaugacacaauacaugauagaaccccucaucgaacccuauugaugaaugaauuggguguuccauuucauuugggaaccaggcaaguguguauagcaugguccagcucaaguugucacgauggaaaagcauggcugcauguuugugucacuggguaugauaaaaaugcaacugcuagcuucauuuacgaugggaggcuuguagacaguauugguucauggucucaaaauauccucaggacccaggagucggaaugcguuuguaucaaugggacuuguacaguaguaaugacugauggaagugcuucaggaagagcugauacuaaaauacuauucauugaagaggggaaaauuguucauauuagcccauugucaggaagugcucagcauguagaggaguguuccuguuauccucgauauccuggugucagauguaucugcagagacaacuggaaaggcucuaauaggcccgucguagauauaaaugugaaagauuauagcauugauuccaguuaugugugcucagggcuuguuggcgacacacccagaaacaacgacagaucuagcaauagcuauugccggaauccuaacaaugagaaagggaaucacggagugaaaggcugggccuuugacgauggaaaugacguguggaugggaagaacgaucagcgaggauucacgcucagguuaugaaaccuucaaagucauuggugguugguccacaccuaauuccaaauugcagauaaauaggcaagucauaguugacagcgauaauaggucagguuauucugguauuuucucuguugagggcaaaagcugcaucaauaggugcuuuuauguggaguugauaaggggaagggaacaggaaacuagaguaugguggaccucaaacaguauuguuguguuuuguggcacuucagguaccuaugggacaggcucauggccugauggggcggacaucaaucucaugccuauauaa

SEQ ID NO: 46131 - RNA, 1410 nt, Artificial Sequence; identical to SEQ ID NO: 46130
  derived and/or modified CDS sequence (wt) from neuraminidase__InfluenzaA__AAO46492

SEQ ID NO: 46132 - RNA, 1410 nt, Artificial Sequence
  derived and/or modified CDS sequence (wt) from neuraminidase__InfluenzaA__AAO88264
augaauacaaaucaaagaauaauaaccauugggacagucugucugauagucggaauaguuagucuauuauugcagauaggaaauauagucucguuauggauaagccauucaauucagacuggaaagaaaaacuacucuaagauaugcaguaaaagugucauuacauaugaaaacaacacaugggugaaccaaacuuauguaaacauuagcaauaucaacauugcugauggacagggaguaaauucaauaauacuagccggcaauuccucucuuugcccaauaaguggaugggcuauauacagcaaagacaauagcauaaggaucgguuccaaaggagacauuuuugucauaagagaaccauucauuucaugcucucauuuggagugcaggaccuuuuuucugacccaaggugcuuugcugaaugacaggcauucuaauggaaccgucaaagacaggaguccuuauaggaccuuaaugaguugcccgauuggugaagcuccaucuccguacaauucaagguucgaaucaguugcuuggucagcaagugcaugccaugauggaaugggauggcuaacaaucgggauuuccgguccagauaauggagcaguggcuguuuugaaguacaaugggauaauaacagauacaauaaaaaguuggaggaacaaaauacuaagaacacaagagucagaaugugucuguaucaacgguucauguuuuacuauaaugacugauggcccaagcaaugggcaggccucauacaaaauauucaaaauggagaaaggaaagauuauuaaaucaguugagcuggaugcaccuaauuaccacuaugaggaaugcuccuguuacccugauacaggcaaaguggugugcgugugcagcgacaauuggcaugcuucgaaucgaccaugggucucuuucgaucagaaucuugauuaucagauaggguacauaugcagugggguuuuuggugauaacccgcguucuaaugaugggagaggcaauuguggcccagugcuuucuaauggagcgaauggagugaaaggauucucauuuagauauggcaauggugucuggauaggaagaacuaaaaguaucagcucuagaaguggauuugagaugauuugggauccaaauggauggacggaaacugauaguaguuucucuauaaagcaggauguuauagcauuaacugauuggucaggauacagugggagcuuuguccaacaucccgaauuaacaggaaugaacugcauaaggccuuguuucuggguagaguuaaucagaggacaacccaaggagagcacaaucuggacuaguggaagcagcauuucuuucuguggcguagacagugaaaccgcaagcuggucauggccagacggagcugaucugccauucacuauugacaaguag

SEQ ID NO: 46133 - RNA, 1410 nt, Artificial Sequence
  derived and/or modified CDS sequence (wt) from neuraminidase__InfluenzaA__AAQ10334
augaauccaaaucaaaagauaauaacaauuggcucuguuucucucacuauugccacaauaugcuuccuuaugcaaauugccauccugguaacuacuguaacauugcauuucaagcaauaugaaugcaacccccccccaaacaaccaaguaaugcugugugaaccaacaauaauagaaagaaacauaacagagauaguguaucugaccaacaccaccauagagaaagagauaugccccaaacuagcagaauacagaaauuggucaaagccgcaauguaaaauuacaggauuugcaccuuuuucuaaggacaauucaauucggcuuuccgcugguggagacauuugggugacaagagaaccuuaugugucaugcgauccuggcaaguguuaucaauuugcccuuggacagggaacaacacuaaacaacaggcauucaaaugacacaguacaugauaggaccccuuaucgaacccuauugaugaaugaguuggguguuccauuucauuugggaaccaagcaagugugcauagcaugguccagcucaaguugucacgauggaaaagcauggcugcauguuuguguaacugggcauaaugaaaaugcaacugcuagcuucauuuacaaugggaggcuuguagauaguauugguucaugguccaaaaauauccucaggacccaggagucggaaugcguuuguaucaauggaacuuguacaguaguaaugacugauggaagugcuucaggaagagcugauacuaaaauacuauucauugaagaggggaaaaucguucauauuagcccauugucaggaagugcucagcaugucgaggagugcuccuguuauccucgauauccuggugucagaugugucugcagagacaacuggaaaggcuccaauaggcccaucguagauauaaaugugaaagauuauagcauuguuuccaguuaugugugcucaggacuuguuggagacacacccagaaaaaacgacagcuccagcaguagcuauugccugaauccuaacaaugaggaagggggucauggagugaaaggcugggccuuugaugauggaaaugauguguggaugggaagaacgaucagcgagaaguuacgcucagguuaugaaaccuucaaagucauuggaggcugguccaaaccuaacuccaaauugcagauaaauaggcaagucauaguugacagagguaauagguccgguuauucugguauuuucucuguugaaggcaaaagcugcaucaaucggugcuuuuauguggaguugauaaggggaaggaaacaggaaacugaagucugguggaccucaaacaguauuguuguguuuuguggcaccucagguacauauggaacaggcucauggccugauggggcggacaucaaucucaugccuauauaa

SEQ ID NO: 46134 - RNA, 1410 nt, Artificial Sequence; identical to SEQ ID NO: 46133
  derived and/or modified CDS sequence (wt) from neuraminidase__InfluenzaA__AAQ10335

SEQ ID NO: 46135 - RNA, 1410 nt, Artificial Sequence
  derived and/or modified CDS sequence (wt) from neuraminidase__InfluenzaA__AAQ10336
augaauccaaaucaaaagauaauaacaauuggcucuguuucucucacuauugccacaauaugcuuccuuaugcaaauugccauccugguaacuacuguaacauugcauuucaagcaauaugaaugcaacccccccccaaacaaccaaguaaugcugugugaaccaacaauaauagaaagaaacauaacagagauaguguaucugaccaacaccaccauagagaaagagauaugccccaaacuagcagaauacagaaauuggucaaagccgcaauguaaaauuacaggauuugcaccuuuuucuaaggacaauucaauucggcuuuccgcugguggagacauuugggugacaagagaaccuuaugugucaugcgauccuggcaaguguuaucaauuugcccuuggacagggaacaacacuaaacaacaggcauucaaaugacacaguacaugauaggaccccuuaucgaacccuauugaugaaugaguuggguguuccauuucauuugggaaccaagcaagugugcauagcaugguccagcucaaguugucacgauggaaaagcauggcugcauguuuguguaacugggcauaaugaaaaugcaacugcuagcuucauuuacaaugggaggcuuguagauaguauugguucaugguccaaaaauauccucaggacccaggagucggaaugcguuuguaucaauggaacuuguacaguaguaaugacugauggaagugcuucaggaagagcugauacuaaaauacuauucauugaagaggggaaaaucguucauauuagcccauugucaggaagugcucagcaugucgaggagugcuccuguuauccucgauauccuggugucagaugugucugcagagacaacuggaaaggcuccaauaggcccaucguagauauaaaugugaaagauuauagcauuguuuccaguuaugugugcucaggacuuguuggagacacacccagaaaaaacgacagcuccagcaguagcuauugccugaauccuaacaaugaggaagggggucauggagugaaaggcugggccuuugaugauggaaaugauguguggaugggaagaacgaucagcgagaaguuacgcucagguuaugaaaccuucaaagucauuggaggcugguccaaaccuaacuccaaauugcagauaaauaggcaagucauaguugacagagguaauagguccgguuauucugguauuuucucuguugaaggcaaaagcugcaucaaucggugcuuuuauguggaguugauaaggggaaggaaacaggaaacugaagucugguggaccucaaacaguauuguuguguuuuguggcaccucagguacauauggaacaggcucauggccugauggggcggaaaucaaucucaugccuauauaa

SEQ ID NO: 46136 - RNA, 1410 nt, Artificial Sequence; identical to SEQ ID NO: 46133
  derived and/or modified CDS sequence (wt) from neuraminidase__InfluenzaA__AAQ10337

SEQ ID NO: 46137 - RNA, 1410 nt, Artificial Sequence
  derived and/or modified CDS sequence (wt) from neuraminidase__InfluenzaA__AAQ10339
augaauccaaaucaaaagauaauaacgauuggcucuguuucucucacuauugccacaauaugcuuccuuaugcaaauugccauccugguaacuacuguaacauugcauuucaagcaauaugaaugcaacucccccccaaacaaccaaguaaugcugugugaaccaacaauaauagaaagaaacauaacagagauaguguaucugaccaacaccaccauagagaaggaaauaugccccaaacuagcagaauacagaaauuggucaaagccgcaauguaaaauuacaggauuugcaccuuuuucuaaggacaauucaauucggcuuuccgcugguggggacauuugggugacaagagaaccuuaugugucaugcgauccugacaaguguuaucaauuugcccuuggacagggaacaacacuaaacaacaggcauucaaaugacacaguacaugauaggaccccuuaucgaacccuauugaugaaugaguuggguguuccauuucauuugggaaccaagcaagugugcauagcaugguccagcucaaguugucacgauggaaaagcauggcugcauguuuguguaacugggcaugaugaaaaugcaacugcuagcuucauuuacgaugggaggcuuguagauaguauugguucaugguccaaaaaaauccucaggacccaggagucggaaugcguuuguaucaauggaacuuguacaguaguaaugacugaugggagugcuucaggaagagcugauacuaaaauacuauucauugaggaggggaaaaucguucauauuagcccauugucaggaagugcucagcaugucgaggagugcuccuguuauccucgauacccuggugucagaugugucugcagagacaacuggaaaggcuccaauaggcccaucguagauauaaauguaaaggauuauagcauuguuuccaguuaugugugcucaggacuuguuggagacacacccagaaaaaacgacagcuccagcaguagccauugccugaauccuaacaaugaggaagggggucauggagugaaaggcugggccuuugaugauggaaaugacguguggaugggaagaacgaucagcgagacguuacgcucagguuaugaaaccuucaaagucauugaaggcugguccaaaccuaacuccaaauugcagauaaauaggcaagucauaguugacagagguaauagguccgguuauucugguauuuucucuguugaaggcaaaagcugcaucaaucggugcuuuuauguggaguugauaaggggaaggaaacaggaaacugaagucugguggaccucaaacaguauuguuguguuuuguggcaccucagguacauauggaacaggcucauggccugauggggcggacaucaaucucaugccuauauaa

SEQ ID NO: 46138 - RNA, 1410 nt, Artificial Sequence
  derived and/or modified CDS sequence (wt) from neuraminidase__InfluenzaA__AAQ10341
augaauccaaaucaaaagauaauaacgauuggcucuguuucucucacuauugccacaauaugcuuccuuaugcaaauugccauccugguaacuacuguaacauugcauuucaagcaauaugaaugcaacucccccccaaacaaccaaguaaugcugugugaaccaacaauaauagaaagaaacauaacagagauaguguaucugaccaacaccaccauagagaaggaaauaugccccaaacuagcagaauacagaaauuggucaaagccgcaauguaaaauuacaggauuugcaccuuuuucuaaggacaauucaauucggcuuuccgcugguggggacauuugggugacaagagaaccuuaugugucaugcgauccugacaaguguuaucaauuugcccuuggacagggaacaacacuaaacaacaggcauucaaaugacacaguacaugauaggaccccuuaucgaacccuauugaugaaugaguuggguguuccauuucauuugggaaccaagcaagugugcauagcaugguccagcucaaguugucacgauggaaaagcauggcugcauguuuguguaacugggcaugaugaaaaugcaacugcuagcuucauuuacgaugggaggcuuguagauaguauugguucaugguccaaaaaaauccucaggacccaggagucggaaugcguuuguaucaauggaacuuguacaguaguaaugacagaugggagugcuucaggaagagcugauacuaaaauacuauucauugaggaggggaaaaucguucauauuagcccauugucaggaagugcucagcaugucgaggagugcuccuguuauccucgguauccuggugucagaugugucugcagagacaacuggaaaggcuccaauaggcccaucguagauauaaauguaaaggauuauagcauuguuuccaguuaugugugcucaggacuuguuggagacacacccagaaaaaacgacagcuccagcaguagccauugccugaauccuaacaaugaggaagggggucauggagugaaaggcugggccuuugaugauggaaaugacguguggaugggaagaacgaucagcgagaaguuacgcucagguuaugaaaccuucaaagucauugaaggcugguccaaaccuaacuccaaauugcagauaaauaggcaagucauaguugacagagguaauagguccgguuauucugguauuuucucuguugaaggcaaaagcugcaucaaucggugcuuuuauguggaguugauaaggggaaggaaacaggaaacugaagucugguggaccucaaacaguauuguuguguuuuguggcaccucagguacauauggaacaggcucauggccugauggggcggacaucaaucucaugccuauauaa

SEQ ID NO: 46139 - RNA, 1410 nt, Artificial Sequence
  derived and/or modified CDS sequence (wt) from neuraminidase__InfluenzaA__AAQ10343
augaauccaaaucaaaagauaauaacgauuggcucuguuucucucacuauugccacaauaugcuuccuuaugcaaauugccauccugguaacuacuguaacauugcauuucaagcaauaugaaugcagcucucccccaaacaaccaaguaaugcugugugaaccaacaauaauagaaagaaacauaacagagauaguguaucugaccaacaccaccauagagaaggaaauaugccccaaacuagcagaauacagaaauuggucaaagccgcaauguaaaauuacaggauuugcaccuuuuucuaaggacaauucaauucggcuuuccgcugguggggacauuugggugacaagggaaccuuaugugucaugcgauccugacaaguguuaucaauuugcccuuggacagggaacaacacuaaacaacaggcauucaaaugacacaguacaugauaggaccccuuaucgaacccuauugaugaaugaguuggguguuccauuucauuugggaaccaagcaagugugcauagcaugguccagcucaaguugucacgauggaaaagcauggcugcauguuuguguaacugggcaugaugaaaaugcaacugcuagcuucauuuacgaugggaggcuuguagauaguauugguucaugguccaaaaaaauccucaggacccaggagucggaaugcguuuguaucaauggaacuuguacaguaguaaugacugaugggagugcuucaggaagagcugauacuaaaauacuauucauugaggaggggaaaaucguucauaucagcccacugucaggaagugcucagcaugucgaggagugcuccuguuauccucgauauccuggugucagaugugucugcagagacaacuggaaaggcuccaauaggcccaucguagauauaaauguaaaggauuauagcauuguuuccaguuaugugugcucaggacuuguuggagacacacccagaaaaaacgacagcuccagcaguagucauugccugaauccuaacaaugaggaagggggucauggagugaaaggcugggccuuugaugauggaaaugacguguggaugggaagaacaaucagcgagaaguuccgcucagguuaugaaaccuucaaagucauugaaggcugguccaaaccuaacuccaaacugcagauaaauaggcaagucauaguugacagagguaauagguccgguuauucugguauuuucucuguugaaggcaaaagcugcaucaaucggugcuuuuauguggaguugauaaggggaaggaaacaggaaacugaagucugguggaccucaaacaguauuguugcguuuuguggcaccucagguacauauggaacaggcucauggccugauggggcggacaucaaucucaugccuauauaa

SEQ ID NO: 46140 - RNA, 1191 nt, Artificial Sequence
  derived and/or modified CDS sequence (wt) from neuraminidase__InfluenzaA__AAQ10344
augaauccaaaucaaaagauaauaacgauuggcucuguuucucucacuauugccacaauaugcuuccuuaugcaaauagccauccugguaacuacuguaacauugcauuucaagcaauaugaaugcaacucccccccaaacaaccaagcaaugcugugugaaccaacaauaauagaaagaaacauaacagagauaguguaucugaccaacaccaccauagagaaggaaauaugccccaaacuagcagaauacagaaauuggucaaagccgcaauguaaaauuacaggauuugcaccuuuuucuaaggauaauucaauucggcuuuccgcugguggggacauuugggugacaagagaaccuuaugugucaugcgauccugacaaguguuaucaauuugcccuuggacagggaacaacacuaaacaacaggcauucaaaugacacaguacaugauaggaccccuuaucgaacccuauugaugaaugaguugggugucccauuucauuugggaaccaagcaaguguguauagcaugguccagcucaaguugucacgauggaaaagcauggcugcauguuuguguaacugggcaugaugaaaaugcaacugcuagcuucauuuacgaugggagacuuguagauaguauugguucaugguccaaaaaaauccucaggacccaggagucggaaugcguuuguaucaauggaacuuguacaguaguaaugacugaugggagugcuucaggaagagcugauacuaaaauacuauucauugaggaggggaaaaucguucauacuagcaaauugucaggaagugcucagcaugucgaggagugcuccuguuauccccgauauccuggugucagaugugucugcagagacaacuggaaaggcuccaauaggcccaucguagauauaaauguaaaggauuauagcauuguuuccaguuaugugugcucaggacuuguuggagauacacccagaaaaaacgacagcuccagcaguagucauugccugaauccuaacaaugaggaagggggucauggagugaaaggcugggccuuugaugauggaaaugacguguggaugggaagaacgaucagcgagaaguuccgcucagguuaugaaaccuucaaagucauugaaggcugguccaaaccuaacuccaaauugcagauaaauagcaagucauag

SEQ ID NO: 46141 - RNA, 1416 nt, Artificial Sequence
  derived and/or modified CDS sequence (wt) from neuraminidase__InfluenzaA__AAR11366
augaauccaaaucagaaacuauuugcauuaucuggaguggcaauagcacuuaguguacugaacuuauugauaggaaucucaaacgucggauugaacguaucucuacaucuaaaggaaaaaggacccaaacaggaggagaauuuaacaugcacgaccauuaaucaaaacaacacuacuguaguagaaaacacauacguaaauaauacaacaauaauuaccaagggaacugauuugaaaacaccaagcuaucugcuguugaacaagagccugugcaauguugaagggugggucgugauagcaaaagacaaugcaguaagauuuggggaaagugaacaaaucauuguuaccagggagccauauguaucaugcgacccaacaggaugcaaaauguaugccuugcaccaagggacuaccauuaggaacaaacauucaaauggaacgauucaugacagaacagcuuucagaggucucaucuccacuccauugggcacuccaccaaccguaaguaacagugacuuuauguguguuggauggucaagcacaacuugccaugaugggauugcuaggaugacuaucuguauacaaggaaauaaugacaaugcuacagcaacgguuuauuacaacagaaggcugaccacuaccauuaagaccugggccagaaacauucugaggacucaagaaucagaaugugugugccacaauggcacaugugcaguuguaaugaccgacggaucggcuaguagucaagccuauacaaaaguaauguauuuccacaagggauuaguaguuaaggaggaggaguuaaggggaucagccagacauauugaggaaugcuccuguuauggacacaaucaaaaggugaccugugugugcagagauaacuggcagggagcaaacaggccuauuauagaaauugauaugaacacauuggagcacacaaguagauacgugugcacuggaauucucacagacaccagcagaccuggggacaaaucuaguggugauuguuccaauccaauaacugggagucccggcgcuccgggagugaagggauucggguuucuaaauggggauaacacauggcuugguaggaccaucagccccagaucaagaaguggauucgaaauguugaaaauaccuaaugcagguacugaucccaauucuagaauagcagaacgacaggaaauugucgacaauaacaauuggucaggcuauuccggaagcuuuauugacuauuggaaugauaacagugaaugcuacaauccaugcuuuuacguagaguuaauuagaggaagacccgaagaggcuaaauacguaugguggacaaguaacagucuaauugcccuauguggaagcccauucccaguugggccugguuccuuccccgauggggcacaaauccaauacuuuucguaa

SEQ ID NO: 46142 - RNA, 1350 nt, Artificial Sequence
  derived and/or modified CDS sequence (wt) from neuraminidase__InfluenzaA__AAS89005
augaauccaaauaagaagauaauaaccaucggaucaaucuguaugguaacuggaaugguuagcuuaauguuacaaauugggaacuugaucucaauaugggucagucauucaauucacacagggaaucaacagaaagcugaaccaauuagcaauacuaauuuucuuacugagaaagcuguggcuucaguaaaauuagcgggcaauucaucucuuugcccuauuaauggaugggcuguauacaguaaggacaacaguauaaggaucgguuccaagggggauguguuuguuauaagagagccauucaucucaugcucccacuuggaaugcagaacuuucuuuuugacucagggagccuugcugaaugacaagcacuccaaugggacugucaaagacagaagcccucacagaacauuaaugaguuguccugugggugaggcucccuccccauauaacucaagguuugagucuguugcuuggucagcaagugcuugccaugauggcaccaguugguugacaauuggaauuucuggcccagacaguggggcuguggcuguauugaaauacaauggcauaauaacagacacuaucaagaguuggaggaauaacauacugagaacucaagagucugaaugugcauguguaaauggcucuugcuuuacuguaaugacugacggaccaaguaauggucaggcaucacauaagaucuucaaaauggaaaaagggaaagugguuaaaucagucgaauuggaugcuccuaauuaucacuaugaggaaugcuccuguuauccugaugccggcgaaaucacaugugugugcagggauaauuggcauggcucaaaucggccauggguaucuuucaaucaaaauuuggaguaucaaauaggauauauaugcaguggaguuuucggagacaauccacgccccaaugauggaacagguaguugugguccgguguccucuaacggggcauaugggguaaaaggguuuucauuuaaauacggcaauggugucuggaucgggagaacaaaaagcacuaauuccaggagcggcuuugaaaugauuugggauccaaauggguggauugaaacggacaguagcuuuucagugaaacaagauaucguagcaauaacugauuggucaggauauagcgggaguuuuguccagcauccagaacugacaggacuagauugcauaagaccuuguuucuggguugaguugaucagagggcggcccaaagagagcacaauuuggacuagugggagcagcauaucuuuuugugguguaaauagugacacuguggguuggucuuggccagacggugcugaguugccauucaccauugacaaguag

SEQ ID NO: 46143 - RNA, 1350 nt, Artificial Sequence
  derived and/or modified CDS sequence (wt) from neuraminidase__InfluenzaA__AAS89006
augaauccaaauaagaagauaauaaccaucggaucaaucuguaugguaacuggaaugguuagcuuaauguuacaaauugggaacuugaucucaauaugggucagucauucaauucacacagggaaucaacacaaagcugaaccaaucagcaauacuaauuuucuuacugagaaagcuguggcuucaguaaaauuagcgggcaauucaucucuuugccccauuaauggaugggcuguauacaguaaggacaacaguauaaggaucgguuccaagggggauguguuuguuauaagagagccauucaucucaugcucccacuuggaaugcagaacuuucuuuuugacucagggagccuugcugaaugacaagcacuccaaugggaccgucaaagacagaagcccucacagaacauuaaugaguuguccugugggugaggcucccuccccauauaacucaagguuugagucuguugcuuggucagcaagugcuugccaugauggcaccaguugguugacaauuggaauuucuggcccagacaauggggcuguggcuguauugaaauacaauggcauaauaacagacacuaucaagaguuggaggaauaacauacugagaacucaagagucugaaugugcauguguaaauggcucuugcuuuacuguaaugacugacggaccaaguaauggucaggcaucacauaagaucuucaaaauggaaaaagggaaagugguuaaaucagucgaauuggaugcuccuaauuaucacuaugaggaaugcuccuguuauccugaugccggcgaaaucacaugugugugcagggauaauuggcauggcucaaaucggccauggguaucuuucaaucaaaauuuggaguaucaaauaggauauauaugcaguggaguuuucggagacaauccacgccccaaugauggaacagguaguugugguccgguguccucuaacggggcauaugggguaaaaggguuuucauuuaaauacggcaauggugucuggaucgggagaacaaaaagcacuaauuccaggagcggcuuugaaaugauuugggauccaaauggguggacugaaacggacaguagcuuuucagugaaacaagauaucguagcaauaacugauuggucaggauauagcgggaguuuuguccagcauccagaacugacaggacuagauugcauaagaccuuguuucuggguugaguugaucagagggcggcccaaagagagcacaauuuggacuagugggagcagcauaucuuuuugugguguaaauagugacacuguggguuggucuuggccagacggugcugaguugccauucaccauugacaaguag

SEQ ID NO: 46144 - RNA, 1410 nt, Artificial Sequence
  derived and/or modified CDS sequence (wt) from neuraminidase__InfluenzaA__AAT38822
augaauccgaaucagaagauaauaacaaucgggguagugaauaccacucugucaacaauagcccuuuucauuggagugggaaacuuaguuuucaacacagucauacaugagaaaauaggagaccaucaaauagugacccauccaacaauaaugaccccugaaguaccgaacugcagugacacuauaauaacauacaauaacacuguuauaaacaacauaacaacaacaauaauaacugaagcagaaaggccuuucaagucuccacuaccgcugugccccuucagaggauucuucccuuuucacaaggacaaugcaauacgacugggugaaaacaaagacgucauagucacaagggagccuuauguuagcugcgauaaugacaacugcugguccuuugcucucgcacaaggagcauugcuagggacuaaacauagcaaugggaccauuaaagacagaacaccauauaggucucuaauucguuucccaauaggaacagcuccaguacuaggaaauuacaaagagauaugcauugcuuggucgagcagcaguugcuuugacgggaaagaguggaugcaugugugcaugacagggaaugauaaugaugcaagugcccagauaauauauggaggacgaaugacagacuccauuaaaucauggaggaaggacauacuaagaacccaggagucugaaugucaaugcauugacgggacuuguguuguugcugucacagauggcccugcugcuaauagugcagaucacaggguuuacuggauacgggagggaagaauaauaaaguaugaaaauguucccaaaacaaagauacaacacuuagaagaauguuccugcuauguggacauugauguuuacuguauauguagggacaauuggaagggcucuaacagaccuuggaugagaaucaacaacgagacuauacuggaaacaggauauguauguaguaaauuucacucagacacccccaggccagcugacccuucaauaaugucaugugacuccccaagcaaugucaauggaggacccggagugaagggguuugguuucaaagcuggcaaugauguaugguuagguagaacagugucaacuagugguagaucgggcuuugaaauuaucaaaguuacagaaggguggaucaacucuccuaaccaugucaaaucaauuacacaaacacuaguguccaacaaugacuggucaggcuauucagguagcuucauugucaaagccaaggacuguuuucagcccuguuuuuauguugagcuuauacgagggaggcccaacaagaaugaugacgucucuuggacaaguaauaguauaguuacuuucuguggacuagacaaugaaccuggaucgggaaauuggccagaugguucuaacauuggguuuaugcccaaguaa

SEQ ID NO: 46145 - RNA, 1350 nt, Artificial Sequence
  derived and/or modified CDS sequence (wt) from neuraminidase__InfluenzaA__AAV65827
augaauccaaauaagaagauaauaaccaucggaucaaucuguaugguaacuggaaugguuagcuuaauguuacaaauugggaacuugaucucaauaugggucagucauucaauucacacagggaaucaacacaaagcugaaccaaucagcaauacuaauuuucuuacugagaaagcuguggcuucaguaaaauuagcgggcaauucaucucuuugccccauuaauggaugggcuguauacaguaaggacaacaguauaaggaucgguuccaagggggauguguuuguuauaagagagccauucaucucaugcucccacuuggaaugcagaacuuucuuuuugacucagggagccuugcugaaugacaagcacuccaaugggacugucaaagacagaagcccucacagaacauuaaugaguuguccugugggugaggcucccuccccauauaacucaagguuugagucuguugcuuggucagcaagugcuugccaugauggcaccaguugguugacaauuggaauuucuggcccagacaauggggcuguggcuguauugaaauacaauggcauaauaacagacacuaucaagaguuggaggaauaacauacugagaacucaagagucugaaugugcauguguaaauggcucuugcuuuacuguaaugacugacggaccaaguaauggucaggcaucacauaagaucuucaaaauggaaaaagggaaagugguuaaaucagucgaauuggaugcuccuaauuaucacuaugaggaaugcuccuguuauccugaugccggcgaaaucacaugugugugcagggauaauuggcauggcucaaaucggccauggguaucuuucaaucaaaauuuggaguaucaaauaggauauauaugcaguggaguuuucggagacaauccacgccccaaugauggaacagguaguugugguccgguguccucuaacggggcauaugggguaaaaggguuuucauuuaaauacggcaauggugucuggaucgggagaacaaaaagcacuaauuccaggagcggcuuugaaaugauuugggauccaaauggguggacugaaacggacaguagcuuuucagugaaacaagauaucguagcaauaacugauuggucaggauauagcgggaguuuuguccagcauccagaacugacaggacuagauugcauaagaccuuguuucuggguugaguugaucagagggcggcccaaagagagcacaauuuggacuagugggagcagcauaucuuuuugugguguaaauagugacacuguggguuggucuuggccagacggugcugaguugccauucaccauugacaaguag

SEQ ID NO: 46146 - RNA, 1410 nt, Artificial Sequence
  derived and/or modified CDS sequence (wt) from neuraminidase__InfluenzaA__AAX11488
augaauccaaaucaaaagauaauaacaauuggcucuguuucucucaccauugccgcaauaugcuuccuuaugcaaauugccauccugguaacuacuguaacauugcauuucaagcagcaugaaugcaacucccccccaaacaaccaaguaaugcugugugaaccaacaauaauagaaagaaacauaacagagauaguguaucugaccaacaccaccauagagaaggaaauaugccccaaacuagcagaauacagaaauuggucaaagccgcaauguaacauuacaggauuugcaccuuuuucuaaggacaauucgauucggcuuuccgcugguggggacaucugggugacaagagaaccuuaugugucaugcgauccugacaaguguuaucaauuugcccuugggcagggaacaacacuaaacaacgggcauucaaaugacacaguacaugauaggaccccuuaccggacccuauugaugaaugaauuggguguuccauuucauuugggaaccaggcaagugugcauagcaugguccagcucaaguugucacgauggaaaagcguggcugcauguuuguguaacuggggaugauaaaaaugcaacugcuagcuucauuuacaaugggaggcuuguagauaguauugguucaugguccaaaaaaauacucagaacccaggagucagaaugcguuuguaucaauggaacuuguacagugguaaugacugauggaagcgcuucaggaaaagcugauacuaaaauacuauucauugaggaggggaaaaucguucauauuagcgcauugucaggaagugcucagcaugucgaggagugcuccuguuauccucgauauccuggugucagaugugucugcagagacaacuggaaaggcuccaauaggcccauuguagauauaaauguaaaggauuauagcauuguuuccaguuaugugugcucaggacuuguuggagacacacccagaaaaaacgacagcuucagcaguagccauugccuagauccuaacaaugaggaagguggucauggagugaaaggcugggccuuugaugauggaaaugacguguggaugggaagaacgaucagcgagaaguuacgcucagguuaugaaaccuucaaagucaucgaaggcugguccaaaccuaacuccaaauuacagauaaauaggcaaguuauaguugaaagagguaacagguccgguuauucugguauuuucuccguugaaggcaaaagcugcaucaaucggugcuuuuauguggaguugauaaggggaaggaaagaggaaacugaagucugguggaccucaaacaguauuguuguguuuuguggcaccucagguacauauggaacaggcucauggccugauggggcggauaucaaucucaugccuauauaa

SEQ ID NO: 46147 - RNA, 1410 nt, Artificial Sequence
  derived and/or modified CDS sequence (wt) from neuraminidase__InfluenzaA__AAX11508
augaauccaaaucaaaagauaauaacaauuggcucuguuucucucaccauugccacaauaugcuuccuuaugcaaauugccauccugguaacuacuguaacauugcauuucaagcagcaugaaugcaacucccccccaaacaaccaaguaaugcugugugaaccaacaauaauagaaagaaacauaacagagauaguguaucugaccaacaccacuauagagaaggaaauaugccccaaacuagcagaauacagaaauuggucaaagccgcaauguaacauuacaggauuugcaccuuuuucuaaggacaauucgauucggcuuuccgcugguggggacaucugggugacaagagaaccuuaugugucaugcgauccugacaaguguuaucaauuugcccuugggcagggaacaacacuaaacaacgggcauucaaauaacacaguacaugauaggaccccuuaccggacccuauugaugaaugaauuggguguuccauuucauuugggaaccaggcaagugugcauagcaugguccagcucaaguugucacgauggaaaagcauggcugcauguuuguguaacuggggaugauaaaaaugcaacugcuagcuucauuuacaaugggaggcuuguagauaguauugguucaugguccaaaaaaauacucagaacccaggagucggaaugcguuuguaucaauggaacuuguacaguaguaaugacugaugggagcgcuucaggaaaagcugauacuaaaauacuauucauugaggaggggaaaaucguucauauuagcacauugucaggaagugcucagcaugucgaggagugcuccuguuauccucgauauccuggugucagaugugucugcagagacaacuggaaaggcuccaauaggcccauuguagauauaaauguaaaggauuauagcauuguuuccaguuaugugugcucaggacuuguuggagacacacccagaaaaaacgacagcuucagcaguagccauugccuagauccuaacaaugaggaagguggucauggagugaaaggcugggccuuugaugauggaaaugacguguggaugggaagaacgaucagcgagaaguuacgcucagguuaugaaaccuucaaagucaucgaaggcugguccaaaccuaacuccaaauuacagauaaauaggcaaguuauaguugaaagagguaacagguccgguuauucugguauuuucuccguugaaggcaaaagcugcaucaaucggugcuuuuauguggaguugauaaggggaaggaaagaggaaacugaagucugguggaccucaaacaguauuguuguguuuuguggcaccucagguacauauggaacaggcucauggccugauggggcggauaucaaucucaugccuauauaa

SEQ ID NO: 46148 - RNA, 1410 nt, Artificial Sequence
  derived and/or modified CDS sequence (wt) from neuraminidase__InfluenzaA__AAX11538
augaauccaaaucaaaagauaauaacaauuggcucuguuucucucaccauugccacaauaugcuuccuuaugcaaauugccauccugguaacuacuguaacauugcauuucaagcagcaugaaugcaacucccccccaaacaaccaaguaaugcugugugaaccaacaauaauagaaagaaacauaacagagauaguguaucugaccaacaccaccauagagaaggaaauaugccccaaacuagcagaauacagaaauuggucaaagccgcaauguaacauuacaggauuugcaccuuuuucuaaggacaauucgauucggcuuuccgcugguggugacaucugggugacaagagaaccuuaugugucaugcgauccugacaaguguuaucaauuugcccuugggcagggaacaacacuaaacaacgggcauucaaaugacacaguacaugagaggaccccuuaccggacccuauugaugaaugaauuggguguuccauuucauuugggaaccaggcaagugugcauagcaugguccagcucaaguugucacgauggaaaagcauggcugcauguuuguguaacuggggaugauaaaaaugcaacugcuagcuucauuuacaaugggaggcuuguagauaguauugguucaugguccaaaaaaauacucagaacccaggagucggaaugcguuuguaucaaugggacuuguacaguaguaaugacugaugggagcgcuucaggaaaagcugauacuaaaauacuauucauugaggaggggaaaaucguucauauuagcacauugucaggaagugcucagcaugucgaggaauguuccuguuauccucgauauccuggugucagaugugucugcagagacaacuggaaaggcuccaauaggcccauuguagauauaaauguaaaggauuauagcauuguuuccaguuaugugugcucaggacuuguuggagacacacccagaaaaaacgacagcuccagcaguagccauugccuagauccuaacaaugaggaagguggucauggagugaaaggcugggccuuugaugauggaaaugacguguggaugggaagaacgaucagcgagaaguuacgcucagguuaugaaaccuucaaagucaucgaaggcugguccaaaccuaacuccaaauuacagauaaauaggcaaguuauaguugaaagagguaacagguccgguuauucugguauuuucuccguugaaggcaaaagcugcaucaaucggugcuuuuauguggaguugauaaggggaaggaaagaggaaacugaagucugguggaccucaaacaguauuguuguguuuuguggcaccucagguacauauggaacaggcucauggccugauggggcggacaucaaucucaugccuauauaa

SEQ ID NO: 46149 - RNA, 1410 nt, Artificial Sequence
  derived and/or modified CDS sequence (wt) from neuraminidase__InfluenzaA__AAX11548
augaauccaaaucaaaagauaauaacaauuggcucuguuucucucaccauugccacaauaugcuuccuuaugcaaauugccauccugguaacuacuguaacauugcauuucaagcagcaugaaugcaacucccccccaaacaaccaaguaaugcugugugaaccaacaauaauagaaagaaacauaacagagauaguguaucugaccaacaccaccauagagaaggaaauaugccccaaacuagcagaauacagaaauuggucaaagccgcaauguaacauuacaggauuugcaccuuuuucuaaggacaauucgauucggcuuuccgcugguggugacaucugggugacaagagaaccuuaugugucaugcgauccugacaaguguuaucaauuugcccuugggcagggaacaacacuaaacaacgggcauucaaaugacacaguacaugauaggaccccuuaccggacccuauugaugaaugaauuggguguuccauuucauuugggaaccaggcaagugugcauagcaugguccagcucaaguugucacgauggaaaagcauggcugcauguuuguguaacuggggaugauaaaaaugcaacugcuagcuucauuuacaaugggaggcuuguagauaguauugguucaugguccaaaaaaauacucagaacccaggagucggaaugcguuuguaucaauggaacuuguacaguaguaaugacugaugggagcgcuucaggaaaagcugauacuaaaauacuauucauugaggaggggaaaaucguucauauuagcacauugucaggaagugcucagcaugucgaggaguguuccuguuauccucgauauccuggugucagaugugucugcagagacaacuggaaaggcuccaauaggcccauuguagauauaaauguaaaggauuauagcauuguuuccaguuaugugugcucaggacuuguuggagacacacccagaaaaaacgacagcuccagcaguagccauugccuagauccuaacaaugaggaagguggucauggagugaaaggcugggccuuugaugauggaaaugacguguggaugggaagaacgaucagcgagaaguuacgcucagguuaugaaaccuucaaagucaucgaaggcugguccaaaccuaacuccaaauuacagauaaauaggcaaguuauaguugaaagagguaacagguccgguuauucugguauuuucuccguugaaggcaaaagcugcaucaaucggugcuuuuauguggaguugauaaggggaaggaaagaggaaacugaagucugguggaccucaaacaguauuguuguguuuuguggcaccucagguacauauggaacaggcucauggccugauggggcggacaucaaucucaugccuauauaa

SEQ ID NO: 46150 - RNA, 1410 nt, Artificial Sequence; identical to SEQ ID NO: 46147
  derived and/or modified CDS sequence (wt) from neuraminidase__InfluenzaA__AAX11558

SEQ ID NO: 46151 - RNA, 1410 nt, Artificial Sequence
  derived and/or modified CDS sequence (wt) from neuraminidase__InfluenzaA__AAX11568
augaauccaaaucaaaagauaauaacaauuggcucuguuucucucaccauugccacaauaugcuuccuuaugcaaauugccaucuugguaacuacuguaacauugcauuucaagcagcaugaaugcuacucccccccaaacaaccaaguaaugcugugugaaccaacaauaauagaaagaaacauaacagagauaguguaucugaccaacaccaccauagagaaggaaauaugccccaaacuagcagaauacagaaauuggucaaagccgcaauguaacauuacaggauuugcaccuuuuucuaaggacaauucgauucggcuuuccgcugguggggacaucugggugacaagagaaccuuaugugucaugcgauccugacaaguguuaucaauuugcccuugggcagggaacaacacuaaacaacgggcauucaaaugacacaguacaugauaggaccccuuaccggacccuauugaugaaugaauuggguguuccauuucauuugggaaccaggcaagugugcauagcaugguccagcucaaguugucacgauggaaaagcauggcugcauguuuguguaacuggggaugauaaaaaugcaacugcuagcuucauuuacaaugggaggcuuguagauaguauugguucaugguccaaaaaaauacucagaacccaggagucggaaugcguuuguaucaauggaacuuguacaguaguaaugacugaugggagcgcuucaggaaaagcugauacuaaaauacuauucauugaggaggggaaaaucguucauauuagcacauugucaggaagugcucagcaugucgaggagugcuccuguuauccucgauauccuggugucagaugugucugcagagacaacuggaaaggcuccaauaggcccauuguagauauaaauguaaaggauuauagcauuguuuccaguuaugugugcucaggacuuguuggagacacacccagaaaaaacgacagcuucagcaguagccauugccuagauccuaacaaugaggaagguggucauggagugaaaggcugggccuuugaugauggaaaugacguguggaugggaagaacgaucagcgagaaguuacgcucagguuaugaaaccuucaaagucaucgaaggcugguccaaaccuaacuccaaauuacagauaaauaggcaaguuauaguugaaagagguaacagguccgguuauucuggcauuuucuccguugaaggcaaaagcugcaucaaucggugcuuuuauguggaguugauaaggggaaggaaagaggaaacugaagucugguggaccucaaacaguauuguuguguuuuguggcaccucagguacauauggaacaggcucauggccugauggggcggacaucaaucucaugccuauauaa

SEQ ID NO: 46152 - RNA, 1410 nt, Artificial Sequence
  derived and/or modified CDS sequence (wt) from neuraminidase__InfluenzaA__AAX11578
augaauccaaaucaaaagauaauaacaauuggcucuguuucucucaccauugccacaauaugcuuccuuaugcaaauugccauccugguaacuacuguaacauugcauuucaagcagcaugaaugcaacucccccccaaacaaccaaguaaugcugugugaaccaacaauaauagaaagaaacauaacagagauaguguaucugaccaacaccaccauagagaaggaaauaugccccaaacuagcagaauacagaaauuggucaaagccgcaauguaacauuacaggauuugcaccuuuuucuaaggacaauucgauucggcuuuccgcugguggggacaucugggugacaagagaaccuuaugugucaugcgauccugacaaguguuaucaauuugcccuugggcagggaacaacacuaaacaacgggcauucaaauaacacaguacaugauaggaccccuuaccggacccuauugaugaaugaauuggguguuccauuucauuugggaaccaggcaagugugcauagcaugguccagcucaaguugucacgauggaaaagcauggcugcauguuuguguaacuggggaugauaaaaaugcaacugcuagcuucauuuacaaugggaggcuuguagauaguauugguucaugguccaaaaaaauacucagaacccaggagucggaaugcguuuguaucaauggaacuuguacaguaguaaugacugaugggagcgcuucaggaaaagcugauacuaaaauacuauucauugaggaggggaaaaucguucauauuagcacauugucaggaagugcucagcaugucgaggagugcuccuguuauccucgauauccuggugucagaugugucugcagagacaacuggaaaggcuccaauaggcccauuguagauauaaauguaaaggauuauagcauuguuuccaguuaugugugcucaggacuuguuggagacacacccagaaaaaacgacagcuucagcaguagccauugccuagauccuaacaaugaggaagguggucauggagugaaaggcugggccuuugaugauggaaaugacguguggaugggaagaacgaucagcgagaaguuacgcucagguuaugaaaccuucaaagucaucgaaggcugguccaaaccuaacuccaaauuacagauaaauaggcaaguuauaguugaaagagguaacagguccgguuauucugguauuuucuccguugaaggcaaaagcugcaucaaucggugcuuuuauguggaguugauaaggggaaggaaagaggaaacugaagucugguggaccucaaacaguauuguuguguuuuguggcaccucagguacauauggaacaggcucauggccugauggggcggauaucaaucucaugccuauauaa

SEQ ID NO: 46153 - RNA, 1410 nt, Artificial Sequence
  derived and/or modified CDS sequence (wt) from neuraminidase__InfluenzaA__AAX11588
augaauccaaaucaaaagauaauaacaauuggcucuguuucucucaccauugccgcaauaugcuuccuuaugcaaauugccauccugguaaccacuguaacauugcauuucaagcagcaugaaugcaacucccccccaaacaaccaaguaaugcugugugaaccaacaauaauagaaagaaacauaacagagauaguguaucugaccaacaccaccauagagaaggaaauaugccccaaacuagcagaauacagaaauuggucaaagccgcaauguaacauuacaggauuugcaccuuuuucuaaggacaauucgauucggcuuuccgcugguggggacaucugggugacaagagaaccuuaugugucaugcgauccugacaaguguuaucaauuugcccuugggcagggaacaacacuaaacaacgggcauucaaaugacacaguacaugauaggaccccuuaccggacccuauugaugaaugaauuggguguuccauuucauuugggaaccaggcaagugugcauagcaugguccagcucaaguugucacgauggaaaagcguggcugcauguuuguguaacuggggaugauaaaaaugcaacugcuagcuucauuuacaaugggaggcuuguagauaguauugguucaugguccaaaaaaauacucagaacccaggagucggaaugcauuuguaucaauggaacuuguacagugguaaugacugauggaagcgcuucaggaaaagcugauacuaaaauacuauucauugaggaggggaaaaucguucauauuagcacauugucaggaagugcucagcaugucgaggagugcuccuguuauccucgauauccuggugucagaugugucugcagagacaacuggaaaggcuccaauaggcccauuguagauauaaauguaaaggauuauagcauuguuuccaguuaugugugcucaggacuuguuggagacacacccagaaaaaacgacagcuucagcaguagccauugccuagauccuaacaaugaggaagguggucauggagugaaaggcugggccuuugaugauggaaaugacguguggaugggaagaacgaucagcgagaaguuacgcucagguuaugaaaccuucaaagucaucgaaggcugguccaaaccuaacuccaaauuacagauaaauaggcaaguuauaguugaaagagguaacagguccgguuauucugguauuuucuccguugaaggcaaaagcugcaucaaucggugcuuuuauguggaguugauaaggggaaggaaagagaaaacugaagucugguggaccucaaacaguauuguuguguuuuguggcaccucagguacauauggaacaggcucauggccugauggggcggauaucaaucucaugccuauauaa

SEQ ID NO: 46154 - RNA, 1410 nt, Artificial Sequence
  derived and/or modified CDS sequence (wt) from neuraminidase__InfluenzaA__AAX11598
augaauccaaaucaaaagauaauaacaauuggcucuguuucucucaccauugccacaauaugcuuccuuaugcaaauugccauccugguaacuacuguaacauugcauuucaagcagcaugaaugcaacucccccccaaacaaccaaguaaugcugugugaaccaacaauaauagaaagaaacauaacagagauaguguaucugaccaacaccaccauagagaaggaaauaugccccaaacuagcagaauacagaaauuggucaaagccgcaauguaacauuacaggauuugcaccuuuuucuaaggacaauucgauucggcuuuccgcugguggugacaucugggugacaagagaaccuuaugugucaugcgauccugacaaguguuaucaauuugcccuugggcagggaacaacacuaaacaacgggcauucaaaugacacaguacaugauaggaccccuuaccggacccuauugaugaaugaauuggguguuccauuucauuugggaaccaggcaagugugcauagcaugguccagcucaaguugucacgauggaaaagcauggcugcauguuuguguaacuggggaugauaaaaaugcaacugccagcuucauuuacaaugggaggcuuguagauaguauugguucaugguccaaaaaaauacucagaacccaggagucggaaugcguuuguaucaauggaacuuguacaguaguaaugacugaugggagcgcuucaggaaaagcugauacuaaaauacuauucauugaggaggggaaaaucguucauauuagcacauugucaggaagugcucagcaugucgaggaguguuccuguuauccucgauauccuggugucagaugugucugcagagacaacuggaaaggcuccaauaggcccauuguagauauaaauguaaaggauuauagcauuguuuccaguuaugugugcucaggacuuguuggagacacacccagaaaaaacgacagcuccagcaguagccauugccuagauccuaacaaugaggaagguggucauggagugaaaggcugggccuuugaugauggaaaugacguguggaugggaagaacgaucagcgagaaguuacgcucagguuaugaaaccuucaaagucaucgaaggcugguccaaaccuaacuccaaauuacagauaaauaggcaaguuauaguugaaagagguaacagguccgguuauucugguauuuucuccguugaaggcaaaagcugcaucaaucggugcuuuuauguggaguugauaaggggaaggaaagaggaaacugaagucugguggaccucaaacaguauuguuguguuuuguggcaccucagguacauauggaacaggcucauggccugauggggcggacaucaaucucaugccuauauaa

SEQ ID NO: 46155 - RNA, 1410 nt, Artificial Sequence
  derived and/or modified CDS sequence (wt) from neuraminidase__InfluenzaA__AAX11608
augaauccaaaucaaaagauaauaacaauuggcucuguuucucucaccauugccacaauaugcuuccuuaugcaaauugccauccugguaacuacuguaacauugcauuucaagcagcaugaaugcaacucccccccaaacaaccaaguaaugcugugugaaccaacaauaauagaaagaaacauaacagagauaguguaucugaccaacaccaccauagagaaggaaauaugucccaaacuagcagaauacagaaauuggucaaagccgcaauguaacauuacaggauuugcaccuuuuucuaaggacaauucgauucggcuuuccgcugguggugacaucugggugacaagagaaccuuaugugucaugcgauccugacaaguguuaucaauuugcccuuggacagggaacaacacuaaacaacgggcauucaaaugacacaguacaugauaggaccccuuaccggacccuauugaugaaugaauuggguguuccauuucauuugggaaccaggcaagugugcauagcaugguccagcucaaguugucacgauggaaaagcauggcugcauguuuguguaacuggggaugauaaaaaugcaacugccagcuucauuuacaaugggaggcuuguagauaguauugguucaugguccaaaaaaauacucagaacccaggagucggaaugcguuuguaucaauggaacuuguacaguaguaaugacugaugggagcgcuucaggaaaagcugauacuaaaauacuauucauugaggaggggaaaaucguucauauuagcacauugucaggaagugcucagcaugucgaggaauguuccuguuauccucgauauccuggugucagaugugucugcagagacaacuggaaaggcuccaauaggcccauuguagauauaaauguaaaggauuauagcauuguuuccaguuaugugugcucaggacuuguuggagacacacccagaaaaaacgacagcuccagcaguagccauugccuagauccuaacaaugaggaagguggucauggagugaaaggcugggccuuugaugauggaaaugacguguggaugggaagaacgaucagcgagaaguuacgcucagguuaugaaaccuucaaagucaucgaaggcugguccaaaccuaacuccaaauuacagauaaauaggcaaguuauaguugaaagagguaacagguccgguuauucugguauuuucuccguugaaggcaaaagcugcaucaaucggugcuuuuauguggaguugauaaggggaaggaaagaggaaacugaagucugguggaccucaaacaguauuguuguguuuuguggcaccucagguacauauggaacaggcucauggccugauggggcggacaucaaucucaugccuauauaa

SEQ ID NO: 46156 - RNA, 1410 nt, Artificial Sequence
  derived and/or modified CDS sequence (wt) from neuraminidase__InfluenzaA__AAX11618
augaauccaaaucaaaagauaauaacaauuggcucuguuucucucaccauugccacaauaugcuuccuuaugcaaauugccauccugguaacuacuguaacauugcauuucaagcagcaugaaugcaacucccccccaaacaaccaaguaaugcugugugaaccaacaauaauagaaagaaacauaacagagauaguguaucugaccaacaccaccauagagaaggaaauaugccccaaacuagcagaauacagaaauuggucaaagccgcaauguaacauuacaggauuugcaccuuuuucuaaggacaauucgauucggcuuuccgcugguggugacaucugggugacaagagaaccuuaugugucaugcgauccugacaaguguuaucaauuugcccuugggcagggaacaacacuaaacaacgggcauucaaaugacacaguacaugauaggaccccuuaccggacccuauugaugaaugaauuggguguuccauuucauuugggaaccaggcaagugugcauagcaugguccagcucaaguugucacgauggaaaagcauggcugcauguuuguguaacuggggaugauaaaaaugcaacugcuagcuucauuuacaaugggaggcuuguagauaguauugguucaugguccaaaaaaauacucagaacccaggagucggaaugcguuuguaucaauggaacuuguacaguaguaaugacugaugggagcgcuucaggaaaagcugauacuaaaauacuauucauugaggaggggaaaaucguucauauuagcgcauugucaggaagugcucagcaugucgaggaguguuccuguuauccucgauauccuggugucagaugugucugcagagacaacuggaaaggcuccaauaggcccauuguagauauaaauguaaaggauuauagcauuguuuccaguuaugugugcucaggacuuguuggagacacacccagaaaaaacgacagcuccagcaguagccauugccuagauccuaacaaugaggaagguggucauggagugaaaggcugggccuuugaugauggaaaugacguguggaugggaagaacgaucagcgagaaguuacgcucagguuaugaaaccuucaaagucaucgaaggcugguccaaaccuaacuccaaauuacagauaaauaggcaaguuauaguugaaagagguaacagguccgguuauucugguauuuucuccguugaaggcaaaagcugcaucaaucggugcuuuuauguggaguugauaaggggaaggaaagaggaaacugaagucugguggaccucaaacaguauuguuguguuuuguggcaccucagguacauauggaacaggcucauggccugauggggcggacaucaaucucaugccuauauaa

SEQ ID NO: 46157 - RNA, 1410 nt, Artificial Sequence
  derived and/or modified CDS sequence (wt) from neuraminidase__InfluenzaA__AAX12744
augaauccaaaucaaaagauaauaacaauuggcucuguuucucucaccauugccacaauaugcuuccuuaugcaaauugccaucuugguaacuacuguaacauugcauuucaagcagcaugaaugcaacucccccccaaacaaccaaguaaugcugugugaaccaacaauaauagaaagaaacauaacagagauaguguaucugaccaacaccaccauagagaaggaaauaugccccaaacuagcagaauacagaaauuggucaaagccgcaauguaacauuacaggauuugcaccuuuuucuaaggacaauucgauucggcuuuccgcugguggggacaucugggugacaagagaaccuuaugugucaugcgauccugacaaguguuaucaauuugcccuugggcagggaacaacacuaaacaacgggcauucaaaugacacaguacaugauaggaccccuuaccggacccuauugaugaaugaauuggguguuccauuucauuugggaaccaggcaagugugcauagcaugguccagcucaaguugucacgauggaaaagcauggcugcauguuuguguaacuggggaugauaaaaaugcaacugcuagcuucauuuacaaugggaggcuuguagauaguauugguucaugguccaaaaaaauacucagaacccaggagucggaaugcguuuguaucaauggaacuuguacaguaguaaugacugaugggagcgcuucaggaaaagcugauacuaaaauacuauucauugaggaggggaaaaucguucauauuagcacauugucaggaagugcucagcaugucgaggagugcuccuguuauccucgauauccuggugucagaugugucugcagagacaacuggaaaggcuccaauaggcccauuguagauauaaauguaaaggauuauagcauuguuuccaguuaugugugcucaggacuuguuggagacacacccagaaaaaacgacagcuucagcaguagccauugccuagauccuaacaaugaggaagguggucauggagugaaaggcugggccuuugaugauggaaaugacguguggaugggaagaacaaucagcgagaaguuacgcucagguuaugaaaccuucaaagucaucgaaggcugguccaaaccuaacuccaaauuacagauaaauaggcaaguuauaguugaaagagguaacagguccgguuauucuggcauuuucuccguugaaggcaaaagcugcaucaaucggugcuuuuauguggaguugauaaggggaaggaaagaggaaacugaagucugguggaccucaaacaguauuguuguguuuuguggcaccucagguacauauggaacaggcucauggccugauggggcggacaucaaucucaugccuauauaa

SEQ ID NO: 46158 - RNA, 1410 nt, Artificial Sequence; identical to SEQ ID NO: 46149
  derived and/or modified CDS sequence (wt) from neuraminidase__InfluenzaA__AAX12754

SEQ ID NO: 46159 - RNA, 1410 nt, Artificial Sequence
  derived and/or modified CDS sequence (wt) from neuraminidase__InfluenzaA__AAX12774
augaauccaaaucaaaagauaauaacaauuggcucuguuucucucaccauugccacaauaugcuuccuuaugcaaauugccauccugguaacuacuguaacauugcauuucaagcaguaugaaugcaacucccccccaaacaaccaaguaaugcugugugaaccagcaauaauagaaagaaacauaacagagauaguguaucugaccaacaccaccauagagaaggaaauaugccccaaauuagcagaauacagaaauuggucaaagccgcaauguaacauuacaggauuugcaccuuuuuccaaggacaauucgauucggcuuuccgcugguggggacaucugggugacaagagaaccuuauguuucaugcgauccugacaaguguuaucaauuugcccuuggacagggaacaacacuaaacaacgggcauucaaaugacacaguacaugauaggaccccuuaccggacccuauugaugaaugaauuggguguuccauuucauuugggaaccaggcaagugugcauagcaugguccagcucaaguugucacgauggaaaagcauggcugcauguuuguguaacuggggaugauaaaaaugcaacugcuagcuucauuuacaaugggaggcuuguagauaguauugguucaugguccaaaaaaauacucagaacccaggagucggaaugcguuuguaucaauggaacuuguacaguaguaaugacugaugggagcgcuucaggaaaagcugauacuaaaauacuauucauugaggaggggaaaaucguuaauauuagcacauugucaggaagugcucagcaugucgaggagugcuccuguuauccucgauauccuggugucagaugugucugcagagacaacuggaaaggcuccaauaggcccaucguagauauaaauguaaaggauuauagcauuguuuccaguuaugugugcucaggacuuguuggagacacacccagaaaaaacgacagcuucagcaguagccauugccuagauccuaacaaugaggaagguggucauggagugaaaggcugggccuuugaugauggaaaugacguguggaugggaagaacgaucagcgagaaguuacgcucagguuaugaaaccuucaaagucaucgaaggcugguccaaaccuaacuccaaauuacagauaaauaggcaagucauaguugaaagagguaacagguccgguuauucugguauuuucuccguugaaggcaaaagcugcaucaaucggugcuuuuauguggaguugauaaggggaaggaaagaggaaacugaaguuugguggaccucaaacaguauuguuguguuuuguggcaccucagguacauauggaacaggcucauggccugauggggcggauaucaaucucaugccuauauaa

SEQ ID NO: 46160 - RNA, 1410 nt, Artificial Sequence
  derived and/or modified CDS sequence (wt) from neuraminidase__InfluenzaA__AAX12804
augaauccaaaucaaaagauaauaacaauuggcucuguuucucucaccauugccacaauaugcuuccuuaugcaaauugccauccugguaacuacuguaacauugcauuucaagcaguaugaaugcaacucccccccaaacaaccaaguaaugcugugugaaccaacaauaauagaaagaaacauaacagagauaguguaucugaccaacaccaccauagagaaggaaauaugccccaaauuagcagaauacagaaauuggucaaagccgcaauguaacauuacaggauuugcaccuuuuucuaaggacaauucgauucggcuuuccgcugguggggacaucugggugacaagagaaccuuaugugucaugcgauccugacaaguguuaucaauuugcccuugggcagggaacaacacuaaacaacgggcauucaaaugacacaguacaugauaggaccccuuaccggacccuauugaugaaugaauuggguguuccauuucauuugggaaccaggcaagugugcauagcaugguccagcucaaguugucacgauggaaaagcauggcugcauguuuguguaacuggggaugaugaaaaugcaacugcuagcuucauuuacaaugggaggcuuguagauaguauugguucaugguccaaaaaaauacucagaacccaggagucggaaugcguuuguaucaauggaacuuguacaguaguaaugacugaugggagcgcuucaggaaaagcugauacuaaaauacuauucauugaggaggggaaaaucguucauauuagcacauugucaggaagugcucagcaugucgaggagugcuccuguuauccucgauauccuggugucagaugugucugcagagacaacuggaaaggcuccaauaggcccaucguagauauaaauguaaaggauuauagcauuguuuccaguuaugugugcucaggacuuguuggagacacacccagaaaaaacgacaacuucagcaguagccauugccuagauccuaacaaugaggaagguggucauggagugaaaggcugggccuuugaugauggaaaugacguguggaugggaagaacgaucagcgagaaguuacgcucagguuaugaaaccuucaaagucaucgaaggcugguccaaaccuaacuccaaauuacagacaaauaggcaagucauaguugaaagagguaacagguccgguuauucugguauuuucuccguugaaggcaaaagcugcaucaaucggugcuuuuauguggaguugauaaggggaaggaaagaggaaacugaagucugguggaccucaaacaguauuguuguguuuuguggcaccucagguacauauggaacaggcucauggccugauggggcggauaucaaucucaugccuauauaa

SEQ ID NO: 46161 - RNA, 1410 nt, Artificial Sequence
  derived and/or modified CDS sequence (wt) from neuraminidase__InfluenzaA__AAX12814
augaauccaaaucaaaagauaauaacaauuggcucuguuucucucaccauugccacaauaugcuuccuuaugcaaauugccauccugguaacuacuguaacauugcauuucaagcaguaugaaugcaacucccccccaaacaaccaaguaaugcugugugaaccagcaauaauagaaagaaacauaacagagauaguguaucugaccaacaccaccauagagaaggaaauaugccccaaauuagcagaauacagaaauuggucaaagccgcaauguaacauuacaggauuugcaccuuuuuccaaggacaauucgauucggcuuuccgcugguggggacaucugggugacaagagaaccuuaugugucaugcgauccugacaaguguuaucaauuugcccuuggacagggaacaacacuaaacaacgggcauucaaaugacacaguacaugauaggaccccuuaccggacccuauugaugaaugaauuggguguuccauuucauuugggaaccaggcaagugugcauagcaugguccagcucaaguugucacgauggaaaagcauggcugcauguuuguguaacuggggaugaugaaaaugcaacugcuagcuucauuuacaaugggaggcuuguagauaguauugguucaugguccaaaaaaauacucagaacccaggaaucggaaugcguuuguaucaauggaacuuguacaguaguaaugacugauggaagcgcuucaggaaaagcugauacuaaaauacuauucauugaggaggggaaaaucguuaauauuagcacauugucaggaagugcucagcaugucgaggagugcuccuguuauccucgauauccuggugucagaugugucugcagagacaacuggaaaggcuccaauaggcccaucguagauauaaauguaaaggauuauagcauuguuuccaguuaugugugcucaggacuuguuggagacacacccagaaaaaacgacagcuucagcaguagccauugccuagauccuaacaaugaggaagguggucauggagugaaaggcugggccuuugaugauggaaaugacguguggaugggaagaacgaucagcgagaaguuacgcucagguuaugaaaccuucaaagucaucgaaggcugguccaaaccuaacuccaaauuacagauaaauaggcaagucauaguugaaagagguaauagguccgguuauucugguauuuucuccguugaaggcaaaagcugcaucaaucggugcuuuuauguggaguugauaaggggaaggaaagaggaaacugaaguuugguggaccucaaacaguauuguuguguuuuguggcaccucagguacauauggaacaggcucauggccugauggggcggauaucaaucucaugccuauauaa

SEQ ID NO: 46162 - RNA, 1410 nt, Artificial Sequence
  derived and/or modified CDS sequence (wt) from neuraminidase__InfluenzaA__AAX34064
augaauccaaaucaaaagauaauaacaauuggcucuguuucucucaccauugccacaauaugcuuccuuaugcaaauugccauccugguaacuacuguaacauugcauuucaagcagcaugaaugcaacucccccccaaacaaccaaguaaugcugugugaaccaacaauaauagaaagaaacauaacagagauaguguaucugaccaacaccaccauagagagggaaauaugccccaaacuagcagaauacagaaauuggucaaagccgcaauguaacauuacaggauuugcaccuuuuucuaaggacaauucgauucgacuuuccgcugguggugacaucugggugacaagagaaccuuaugugucaugcgauccugacaaguguuaucaauuugcccuugggcagggaacaacacuaaacaacgggcauucaaaugacacaguacaugauaggaccccuuaucggacccuauugaugaaugaauuggguguuccauuucauuugggaaccaggcaagugugcauagcaugguccagcucaaguugucacgauggaaaagcauggcugcauguuuguguaacuggggaugauaaaaaugcaacugcuagcuucauuuacaaugggaggcuuguagauaguauugguucaugguccaaaaaaauacucagaacccaggagucggaaugcguuuguaucaauggaacuuguacaguaguaaugacugaugggagcgcuucaggaaaagcugauacuaaaauacuauucauugaggaggggaaaaucguucauauuagcacauugucaggaagugcucagcaugucgaggaguguuccuguuauccucgauauccuggugucagaugugucugcagagacaacuggaaaggcuccaauaggcccauuguagauauaaauguaaaggauuauagcauuguuuccaguuaugugugcucaggacuuguuggagacacacccagaaaaaacgacagcuccagcaguagccauugccuagauccuaacaaugaggaagguggucauggagugaaaggcugggccuuugaugauggaaaugacguguggaugggaagaacgaucagcgagaaguuacgcucagguuaugaaaccuucaaagucaucgaaggcugguccaaaccuaacuccaaauuacagauaaauaggcaaguuauaguugaaagagguaacagguccgguuauucugguauuuucuccguugaaggcaaaagcugcaucaaucggugcuuuuauguggaguugauaaggggaaggaaagaggaaacugaagucugguggaccucaaacaguauuguuguguuuuguggcaccucagguacauauggaacaggcucauggccugauggggcggacaucaaucucaugccuauauaa

SEQ ID NO: 46163 - RNA, 1410 nt, Artificial Sequence
  derived and/or modified CDS sequence (wt) from neuraminidase__InfluenzaA__AAX35824
augaauccaaaucaaaagauaauaacaauuggcucuguuucucucaccauugccacaauaugcuuccuuaugcaaauugccauccugguaacuacuguaacauugcauuucaagcaguaugaaugcaacucccccccaaacaaccaaguaaugcugugugaaccaacaauaauagaaagaaacauaacagagauaguguaucuggccaauaccacuauagagaaggaaauaugccccaaauuagcagaauacagaaauuggucaaagccgcaauguaacauuacaggauuugcaccuuuuucuaaggacaauucgauucggcuuuccgcugguggggacaucugggugacaagagagcccuaugugucaugcgauccugacaaguguuaucaauuugcccuugggcagggaacaacacuaaacaacggacauucaaaugacacaguacaugauaggaccccuuaccggacccuauugaugaaugaauuggguguuccauuucauuugggaaccaggcaaguguguauagcaugguccagcucaaguugucacgauggaaaagcauggcugcauguuuguguaacuggggaugauaaaaaugcaacugcuaguuucauuuacaaugggaggcuuguagauaguauugguucaugguccaaaaaaauacucagaacccaggagucggaaugcguuuguaucaauggaacuuguacaguaguaaugacugaugggagcgcuucaggaaaagcugauacuaaaauacuauucauugaggaggggaaaaucauucauauuagcacauugucaggaagugcucagcaugucgaggagugcuccuguuauccucgauauccuggugucagauguguaugccgagacaacuggaaaggcuccaauaggcccaucguagauauaaauguaaaggauuauagcauuguuuccaguuaugugugcucaggacuuguuggagacacacccagaaaaaacgacagcuccagcaguagccauugccuagauccuaacaaugaggaagguggucauggagugaaaggcugggccuuugaugauggaaaugacguguggaugggaagaacgaucagcgagaaguuacgcucagguuaugaaaccuucaaagucaucgaaggcugguccaaaccuaacuccaaauuacagauaaauaggcaagucauaguugaaagagguaacagguccgguuauucugguauuuucuccguugaaggcaaaagcugcaucaaucggugcuuuuauguggaguugauaaggggaaggaaagaggaaacugaagucugguggaccucaaacaguauuguuguguuuuguggcaccucagguacauauggaacaggcucauggccugauggggcggauaucaaucucaugccuauauaa

SEQ ID NO: 46164 - RNA, 1410 nt, Artificial Sequence; identical to SEQ ID NO: 46147
  derived and/or modified CDS sequence (wt) from neuraminidase__InfluenzaA__AAX35834

SEQ ID NO: 46165 - RNA, 1410 nt, Artificial Sequence
  derived and/or modified CDS sequence (wt) from neuraminidase__InfluenzaA__AAX35844
augaauccaaaucaaaagauaauaacaauuggcucuguuucucucaccauugccacaauaugcuuccuuaugcaaauugccauccugguaacuacuguaacauugcauuucaagcaguaugaaugcaacucccccccaaacaaccaaguaaugcugugugaaccaacaauaauagaaagaaacauaacagagauaguguaucugaccaacaccaccauagagaaggaaauaugccccaaacuagcagaauacagaaauuggucaaagccgcaauguaacauuacaggauuugcaccuuuuucuaaggacaauucgauucggcuuuccgcugguggggacaucugggugacaagagaaccuuaugugucaugcgauccugacaaguguuaucaauuugcccuugggcagggaacaacacuaaacaacgggcauucaaaugacacaguacaugauaggaccccuuaccggacccuauugaugaaugaauuggguguuccauuucauuugggaaccaggcaagugugcauagcaugguccagcucaaguugucacgauggaaaagcauggcugcauguuuguguaacuggggaugaugaaaaugcaacugcuagcuucauuuacaaugggaggcuuguagauaguauugguucaugguccaaaaaaauacucagaacccaggagucggaaugcguuuguaucaauggaacuuguacaguaguaaugacugaugggagcgcuucaggaaaagcugauacuaaaauacuauucauugaggaggggaaaaucguucauauuagcacauugucaggaagugcccagcaugucgaggagugcuccuguuauccucgauauccuggugucagaugugucugcagagacaacuggaaaggcuccaauaggcccaucguagauauaaauguaaaggauuauagcauuguuuccaguuaugugugcucaggacuuguuggagacacacccagaaaaaacgacagcuucagcaauagccauugccuagauccuaacaaugaggaagguggucauggagugaaaggcugggccuuugaugauggaaaugacguguggaugggaagaacgaucagcgagaaguuacgcucagguuaugaaaccuucaaagucaucgaaggcugguucaaaccuaacuccaaauuacagauaaauaggcaagucauaguugaaagagguaacagguccgguuauucugguauuuucuccguugaaggcaaaagcugcaucaaucggugcuuuuauguggaguugauaaggggaaggaaagaggaaacugaagucugguggaccucaaacaguauuguuguguuuuguggcaccucagguacauauggaacaggcucauggccugauggggcggauaucaaucucaugccuauauaa

SEQ ID NO: 46166 - RNA, 1410 nt, Artificial Sequence
  derived and/or modified CDS sequence (wt) from neuraminidase__InfluenzaA__AAX35854
augaauccaaaucaaaagauaauaacaauuggcucuguuucucucaccauugccacaauaugcuuccuuaugcaaauugccauccugguaacuacuguaacauugcauuucaagcaguaugaaugcaacucccccccaaacaaccaaguaaugcugugugaaccaacaauaauagaaagaaacauaacagagauaguguaucugaccaacaccaccauagagaaggaaauaugccccaaacuagcagaauacagaaauuggucaaagccgcaauguaacauuacaggauuugcaccuuuuucuaaggacaauucgauucggcuuuccgcugguggggacaucugggugacaagagaaccuuaugugucaugcgauccugacaaguguuaucaauuugcccuugggcagggaacaacacuaaacaacgggcauucaaaugacacaguacaugauaggaccccuuaccggacccuauugaugaaugaauuggguguuccauuucacuugggaaccaggcaagugugcauagcaugguccagcucaaguugucacgauggaaaagcauggcugcauguuuguguaacuggggaugaugaaaaugcaacugcuagcuucauuuacaaugggaggcuuguagauaguauugguucaugguccaaaaaaauacucagaacccaggagucggaaugcguuuguaucaauggaacuuguacaguaguaaugacugaugggagcgcuucaggaaaagcugauacuaaaauacuauucauugaggaggggaaaaucguucauauuagcacauugucaggaagugcucagcaugucgaggagugcuccuguuauccucgauauccuggugucagaugugucugcagagacaacuggaaaggcuccaauaggcccaucguagauauaaauguaaaggauuauagcauuguuuccaguuaugugugcucaggacuuguuggagacacacccagaaaaaacgacagcuucagcaguagccauugccuagauccuaacaaugaggaagguggucauggagugaaaggcugggccuuugaugauggaaaugacguguggaugggaagaacgaucagcgagaaguuacgcucagguuaugaaaccuucaaagucaucgaaggcugguccaaaccuaacuccaaauuacagauaaauaggcaagucauaguugaaagagguaacagguccgguuauucugguauuuucuccguugaaggcaaaagcugcaucaaucggugcuuuuauguggaguugauaaggggaaggaaagaggaaacugaagucugguggaccucaaacaguauuguuguguuuuguggcaccucagguacauauggaacaggcucauggccugauggggcggauaucaaucucaugccuauauaa

SEQ ID NO: 46167 - RNA, 1410 nt, Artificial Sequence
  derived and/or modified CDS sequence (wt) from neuraminidase__InfluenzaA__AAX35864
augaauccaaaucaaaagauaauaacaauuggcucuguuucucucaccauugccacaauaugcuuccuuaugcaaauugccauccugguaacuacuguaacauugcauuucaagcaguaugaaugcaacucccccccaaacaaccaaguaaugcugugugaaccagcaauaauagaaagaaacauaacagagauaguguaucugaccaacaccaccauagagaaggaaauaugccccaaauuagcagaauacagaaauuggucaaagccgcaauguaacauuacaggauuugcaccuuuuuccaaggacaauucgauucggcuuuccgcugguggggacaucugggugacaagagaaccuuaugugucaugcgauccugacaaguguuaucaauuugcccuuggacagggaacaacacuaaacaacgggcauucaaaugacacaguacaugauaggaccccuuaccggacccuauugaugaaugaauuggguguuccauuucauuugggaaccaggcaagugugcauagcaugguccagcucaaguugucacgauggaaaagcauggcugcauguuuguguaacuggggaugaugaaaaugcaacugcuagcuucauuuacaaugggaggcuuguagauaguauugguucaugguccaaaaauauacucagaacccaggagucggaaugcguuuguaucaauggaacuuguacaguaguaaugacugaugggagcgcuucaggaaaagcugauacuaaaauacuauucauugaggaggggaaaaucguuaauauuagcacauugucaggaagugcucagcaugucgaggagugcuccuguuauccucgauauccuggugucagaugugucugcagagacaacuggaaaggcuccaauaggcccaucguagauauaaauguaaaggauuauagcauuguuuccaguuaugugugcucaggacuuguuggagacacacccagaaaaaacgacagcuucagcaguagccauugccuagauccuaacaaugaggaagguggucauggagugaaaggcugggccuuugaugauggaaaugacguguggaugggaagaacgaucagcgagaaguuacgcucagguuaugaaaccuucaaagucaucgaaggcugguccaaaccuaacuccaaauuacagauaaauaggcaagucauaguugaaagagguaacagguccgguuauucugguauuuucuccguugaaggcaaaagcugcaucaaucggugcuuuuauguggaguugauaaggggaaggaaagaggaaacugaaguuugguggaccucaaacaguauuguuguguuuuguggcaccucagguacauauggaacaggcucauggccugauggggcggauaucaaucucaugccuauauaa

SEQ ID NO: 46168 - RNA, 1410 nt, Artificial Sequence
  derived and/or modified CDS sequence (wt) from neuraminidase__InfluenzaA__AAX47538
augaauccaaaucaaaagauaauaacaauuggcucuguuucucucaccauugccacaauaugcuuccuuaugcaaauugccauccugguaacuacuguaacauugcauuucaagcaguaugaaugcaacucccccccaaacaaccaaguaaugcugugugaaccagcaauaauagaaagaaacauaacagagauaguguaucugaccaacaccaccauagaggaggaaauaugccccaaauuagcagaauacagaaauuggucaaagccgcaauguaacauuacaggauuugcaccuuuuuccaaggacaauucgauucggcuuuccgcugguggggacaucugggugacaagagaaccuuauguuucaugcgauccugacaaguguuaucaauuugcccuuggacagggaacaacacuaaacaacgggcauucaaaugacacaguacaugauaggaccccuuaccggacccuauugaugaaugaauuggguguuccauuucauuugggaaccaggcaagugugcauagcaugguccagcucaaguugucacgauggaaaagcauggcugcauguuuguguaacuggggaugauaaaaaugcaacugcuagcuucauuuacaauggaaggcuuguagauaguauugguucaugguccaaaaaaauacucagaacccaggagucggaaugcguuuguaucaauggaacuuguacaguaguaaugacugaugggagcgcuucaggaaaagcugauacuaaaauacuauucauugaggaggggaaaaucguuaauauuagcacauugucaggaagugcucagcaugucgaggagugcuccuguuauccucgauauccuggugucagaugugucugcagagacaacuggaaaggcuccaauaggcccaucguagauauaaauguaaaggauuauagcauuguuuccaguuaugugugcucaggacuuguuggagacacacccagaaaaaacgacagcuucagcaguagccauugccuagauccuaacaaugaggaagguggucauggagugaaaggcugggccuuugaugauggaaaugacguguggaugggaagaacgaucagcgagaaguuacgcucagguuaugaaaccuucaaagucaucgaaggcugguccaaaccuaacuccaaauuacagauaaauaggcaagucauaguugaaagagguaacagguccgguuauucugguauuuucuccguugaaggcaaaagcugcaucaaucggugcuuuuauguggaguugauaaggggaaggaaagaggaaacugaaguuugguggaccucaaacaguauuguuguguuuuguggcaccucagguacauauggaacaggcucauggccugauggggcggauaucaaucucaugccuauauaa

SEQ ID NO: 46169 - RNA, 1410 nt, Artificial Sequence; identical to SEQ ID NO: 46152
  derived and/or modified CDS sequence (wt) from neuraminidase__InfluenzaA__AAX56383

SEQ ID NO: 46170 - RNA, 1410 nt, Artificial Sequence
  derived and/or modified CDS sequence (wt) from neuraminidase__InfluenzaA__AAX56393
augaauccaaaucaaaagauaauaacaauuggcucuguuucucucaccauugccacaauaugcuuccuuaugcaaauugccauccugguaacuacuguaacauugcauuucaagcagcaugaaugcaacucccccccaaacaaccaaguaaugcugugugaaccaacaauaauagaaagaaacauaacagagauaguguaucugaccaacaccacuauagagaaggaaauaugccccaaacuagcagaauacagaaauuggucaaagccgcaauguaacauuacaggauuugcaccuuuuucuaaggacaauucgauucggcuuuccgcugguggggacaucugggugacaagagaaccuuaugugucaugcgauccugacaaguguuaucaauuugcccuugggaagggaacaacacuaaacaacgggcauucaaauaacacaguacaugauaggaccccuuaccggacccuauugaugaaugaauuggguguuccauuucauuugggaaccaggcaagugugcauagcaugguccagcucaaguugucacgauggaaaagcauggcugcauguuuguguaacuggggaugauaaaaaugcaacugcuagcuucauuuacaaugggaggcuuguagauaguauugguucaugguccaaaaaaauacucagaacccaggagucggaaugcguuuguaucaauggaacuuguacaguaguaaugacugaugggagcgcuucaggaaaagcugauacuaaaauacuauucauugaggaggggaaaaucguucauauuagcacauugucaggaagugcucagcaugucgaggagugcuccuguuauccucgauauccuggugucagaugugucugcagagacaacuggaaaggcuccaauaggcccauuguagauauaaauguaaaggauuauagcauuguuuccaguuaugugugcucaggacuuguuggagacacacccagaaaaaacgacagcuucagcaguagccauugccuagauccuaacaaugaggaagguggucauggagugaaaggcugggccuuugaugauggaaaugacguguggaugggaagaacgaucagcgagaaguuacgcucagguuaugaaaccuucaaagucaucgaaggcugguccaaaccuaacuccaaauuacagauaaauaggcaaguuauaguugaaagagguaacagguccgguuauucugguauuuucuccguugaaggcaaaagcugcaucaaucggugcuuuuauguggaguugauaaggggaaggaaagaggaaacugaagucugguggaccucaaacaguauuguuguguuuuguggcaccucagguacauauggaacaggcucauggccugauggggcggauaucaaucucaugccuauauaa

SEQ ID NO: 46171 - RNA, 1410 nt, Artificial Sequence; identical to SEQ ID NO: 46152
  derived and/or modified CDS sequence (wt) from neuraminidase__InfluenzaA__AAX56413

SEQ ID NO: 46172 - RNA, 1410 nt, Artificial Sequence
  derived and/or modified CDS sequence (wt) from neuraminidase__InfluenzaA__AAX56423
augaauccaaaucaaaagauaauaacaauuggcucuguuucucucaccauugccacaauaugcuuccuuaugcaaauugccauccugguaacuacuguaacauugcauuucaagcagcaugaaugcaacucccccccaaacaaccaaguaaugcugugugaaccaacaauaauagaaagaaacauaacagagauaguguaucugaccaacaccaccauagagaaggaaauaugccccaaacuagcagaauacagaaauuggucaaagccacaauguaacauuacaggauuugcaccuuuuucuaaggacaauucgauucggcuuuccgcugguggugacaucugggugacaagagaaccuuaugugucaugcgauccugacaaguguuaucaauuugcccuugggcagggaacaacacuaaacaacgggcauucaaaugacacaguacaugauaggaccccuuaccggacccuauugaugaaugaauuggguguuccauuucauuugggaaccaggcaagugugcauagcaugguccagcucaaguugucacgauggaaaagcauggcugcauguuuguguaacuggggaugauaaaaaugcaacugcuagcuucauuuacaaugggaggcuuguagauaguauugguucaugguccaaaaaaauacucagaacccaggagucggaaugcguuuguaucaauggaacuuguacaguaguaaugacugaugggagcgcuucaggaaaagcugauacuaaaauacuauucauugaggaggggaaaaucguucauauuagcacauugucaggaagugcucagcaugucgaggaguguuccuguuauccucgauauccuggugucagaugugucugcagagacaacuggaaaggcuccaauaggcccauuguagauauaaauguaaaggauuauagcauuguuuccaguuaugugugcucaggacuuguuggagacacacccagaaaaaacgacagcuccagcaguagccauugccuagauccuaacaaugaggaagguggucauggagugaaaggcugggccuuugaugauggaaaugacguguggaugggaagaacgaucagcgagaaguuacgcucagguuaugaaaccuucaaagucaucgaaggcugguccaaaccuaacuccaaauuacagauaaauaggcaaguuauaguugaaagagguaacagguccgguuauucugguauuuucuccguugaaggcaaaagcugcaucaaucggugcuuuuauguggaguugauaaggggaaggaaagaggaaacugaagucugguggaccucaaacaguauuguuguguuuuguggcaccucagguacauauggaacaggcucauggccugauggggcggacaucaaucucaugccuauauaa

SEQ ID NO: 46173 - RNA, 1410 nt, Artificial Sequence; identical to SEQ ID NO: 46147
  derived and/or modified CDS sequence (wt) from neuraminidase__InfluenzaA__AAX56433

SEQ ID NO: 46174 - RNA, 1410 nt, Artificial Sequence
  derived and/or modified CDS sequence (wt) from neuraminidase__InfluenzaA__AAX56443
augaauccaaaucaaaagauaauaacaauuggcucuguuucucucaccauugccacaauaugcuuccuuaugcaaauugccauccugguaacuacuguaacauugcauuucaagcaguaugaaugcaacucccccccaaacaaccaaguaaugcugugugaaccaacaauaauagaaagaaacauaacagagauaguguaucugaccaacaccaccauagagaaggaaauaugccccaaacuagcagaauacagaaauuggucaaagccgcaauguaacauuacaggauuugcaccuuuuucuaaggacaauucgauucggcuuuccgcugguggggacaucugggugacaagagaaccuuaugugucaugcgauccugacaaguguuaucaauuugcccuugggcagggaacaacacuaaacaacgggcauucaaaugacacaguacaugauaggaccccuuaccggacccuauugaugaaugaauuggguguuccauuucauuugggaaccaggcaagugugcauagcaugguccagcucaaguugucaugauggaaaagcauggcugcauguuuguguaacuggggaugaugaaaaugcaacugcuagcuucauuuacaaugggaggcuuguagauaguauugguucaugguccaaaaaaauacucagaacccaggagucggaaugcguuuguaucaauggaacuuguacaguaguaaugacugaugggagcgcuucaggaaaagcugauacuaaaauacuauucauugaggaggggaaaaucguucauauuagcacauugucaggaagugcucagcaugucgaggagugcuccuguuauccucgauauccuggugucagaugugucugcagagacaacuggaaaggcuccaauaggcccaucguagauauaaauguaaaggauuauagcauuguuuccaguuaugugugcucaggacuuguuggagacacacccagaaaaaacgacagcuucagcaguagccauugccuagauccuaacaaugaggaagguggucauggagugaaaggcugggccuuugaugauggaaaugacguguggaugggaagaacgaucagcgagaaguuacgcucagguuaugaaaccuucaaagucaucgaaggcugguccaaaccuaacuccaaauuacagauaaauaggcaagucauaguugaaagagguaacagguccgguuauucugguauuuucuccguugaaggcaaaagcugcaucaaucggugcuuuuauguggaguugauaaggggaaggaaagaggaaacugaagucugguggaccucaaacaguauuguuguguuuuguggcaccucagguacauauggaacaggcucauggccugauggggcggauaucaaucucaugccuauauaa

SEQ ID NO: 46175 - RNA, 1410 nt, Artificial Sequence
  derived and/or modified CDS sequence (wt) from neuraminidase__InfluenzaA__AAX56473
augaauccaaaucaaaagauaauaacaauuggcucuguuucucucaccauugccacaauaugcuuccuuaugcaaauugccauccugguaacuacuguaacauugcauuucaagcaguaugaaugcaacucccccccaaacaaccaaguaaugcugugugaaccaacaauaauagaaagaaacauaacagagauaguguaccugaccaacaccaccauagagaaggaaauaugccccaaacuagcagaauacagaaauuggucaaagccgcaguguaacauuacaggauuugcaccuuuuucuaaggacaauucgauucggcuuuccgcugguggggacaucugggugacaagagaaccuuaugugucaugcgauccugacaaguguuaucaauuugcccuugggcagggaacaacacuaaacaacgggcauucaaaugacacaguacaugauaggaccccuuaccggacccuauugaugaaugaauuggguguuccauuucauuugggaaccaggcaagugugcauagcaugguccagcucaaguugucacgauggaaaagcauggcugcauguuuguguaacuggggaugaugaaaaugcaacugcuagcuucauuuacaaugggaggcuuguagauaguauugguucaugguccaaaaaaauacucagaacccaggagucggaaugcguuuguaucaauggaacuuguacaguaguaaugacugaugggagcgcuucaggaaaagcugauacuaaaauacuauucauugaagaggggaaaaucguucauauuagcacauugucaggaagugcucagcaugucgaggagugcuccuguuauccucgauauccuggugucagaugugucugcagagacaacuggaaaggcuccaauaggcccaucguagauauaaauguaaaggauuauagcauuguuuccaguuaugugugcucaggacuuguuggagacacacccagaaaaaacgacagcuucagcaguagccauugccuagauccuaacaaugaggaagguggucauggagugaaaggcugggccuuugaugauggaaaugacguguggaugggaagaacgaucagcgagaaguuacgcucagguuaugaaaccuucaaagucaucgaaggcugguccaaaccuaacuccaaauuacagauaaauaggcaagucauaguugaaagagguaacagguccgguuauucugguauuuucuccguugaaggcaaaaacugcaucaaucggugcuuuuauguggaguugauaaggggaaggaaagaggaaacugaagucugguggaccucaaacaguauuguuguguuuuguggcaccucagguacauauggaacaggcucauggccugauggggcggauaucaaucucaugccuauauaa

SEQ ID NO: 46176 - RNA, 1410 nt, Artificial Sequence
  derived and/or modified CDS sequence (wt) from neuraminidase__InfluenzaA__AAX56483
augaauccaaaucaaaagauaauaacaauuggcucuguuucucucaccauugccacaauaugcuuccuuaugcaaauugccauccugguaacuacuguaacauugcauuucaagcaguaugaaugugacucccccccaaacaaccaaguaaugcugugugaaccaacaauaauagaaagaaacauaacagagauaguguaucugaccaacaccaccauagagaaggaaauaugccccaaacuagcagaauacagaaauuggucaaagccgcaauguaacauuacaggauuugcaccuuuuucuaaggacaauucgauucggcuuuccgcugguggggacaucugggugacaagagaaccuuaugugucaugcgauccugacaaguguuaucaauuugcccuugggcagggaacaacacuaaacaacggacauucaaaugacacaguacaugauaggaccccuuaccggacccuauugaugaaugaauuggguguuccauuucauuugggaaccaggcaagugugcauagcaugguccagcucaaguugucacgauggaaaagcauggcugcauguuuguguaacuggggaugaugaaaaugcaacugcuagcuucauuuacaaugggaggcuuguagauaguauugguucaugguccaaaaaaauacucagaacccaggagucggaaugcguuuguaucaauggaacuuguacaguaguaaugacugaugggagcgcuucaggaaaagcugauacuaaaauacuauucauugaggaggggaaaaucguucauauuagcacauugucaggaagugcucagcaugucgaggagugcuccuguuauccucgauauccuggugucagaugugucugcagagacaacuggaaaggcuccaauaggcccaucguagauauaaauguaaaggauuauagcauuguuuccaguuaugugugcucaggacuuguuggagacacacccagaaaaaacgacagcuucagcaguagccauugccuagauccuaacaaugaggaagguggucauggagugaaaggcugggccuuugaugauggaaaugacguguggaugggaagaacgaucagcgagaaguuacgcucagguuaugaaaccuucaaagucaucgaaggcugguccaaaccuaacuccaaauuacagauaaauaggcaagucauaguugaaagagguaacagguccgguuauucugguauuuucuccguugaaggcaaaagcugcaucaaucggugcuuuuauguggaguugauaaggggaaggaaagaggaaacugaagucugguggaccucaaacaguauuguuguguuuuguggcaccucagguacauauggaacaggcucauggccugauggggcggauaucaaucucaugccuauauaa

SEQ ID NO: 46177 - RNA, 1410 nt, Artificial Sequence
  derived and/or modified CDS sequence (wt) from neuraminidase__InfluenzaA__AAX56503
augaauccaaaucaaaagauaauaacaauuggcucuguuucucucaccauugccacaauaugcuuccuuaugcaaauugccauccugguaacuacuguaacauugcauuucaagcaguaugaaugugacucccccccaaacaaccaaguaaugcugugugaaccaacaauaauagaaagaaacauaacagagauaguguaucugaccaacaccaccauagagaaggaaauaugccccaaacuagcagaauacagaaauuggucaaagccgcaauguaacauuacaggauuugcaccuuuuucuaaggacaauucgauucggcuuuccgcugguggggacaucugggugacaagagaaccuuaugugucaugcgauccugacaaguguuaucaauuugcccuugggcagggaacaacacuaaacaacgggcauucaaaugacacaguacaugauaggaccccuuaccggacccuauugaugaaugaauuggguguuccauuucauuugggaaccaggcaagugugcauagcaugguccagcucaaguugucacgauggaaaagcauggcugcauguuuguguaacuggggaugaugaaaaugcaacugcuagcuucauuuacaaugggaggcuuguagauaguauugguucaugguccaaaaaaauacucagaacccaggagucggaaugcguuuguaucaauggaacuuguacaguaguaaugacugaugggagcgcuucaggaaaagcugauacuaaaauacuauucauugaggaggggaaaaucguucauauuagcacauugucaggaagugcucagcaugucgaggagugcuccuguuauccucgauauccuggugucagaugugucugcagagacaacuggaaaggcuccaauaggcccaucguagauauaaauguaaaggauuauagcauuguuuccaguuaugugugcucaggacuuguuggagacacacccagaaaaaacgacagcuucagcaguagccauugccuagauccuaacaaugaggaagguggucauggagugaaaggcugggccuuugaugauggaaaugacguguggaugggaagaacgaucagcgagaaguuacgcucagguuaugaaaccuucaaagucaucgaaggcugguccaaaccuaacuccaaauuacagauaaauaggcaagucauaguugaaagagguaacagguccgguuauucugguauuuucuccguugaaggcaaaagcugcaucaaucggugcuuuuauguggaguugauaaggggaaggaaagaggaaacugaagucugguggaccucaaacaguauuguuguguuuuguggcaccucagguacauauggaacaggcucauggccugauggggcggauaucaaucucaugccuauauaa

SEQ ID NO: 46178 - RNA, 1410 nt, Artificial Sequence
  derived and/or modified CDS sequence (wt) from neuraminidase__InfluenzaA__AAX56513
augaauccaaaucaaaagauaauaacaauuggcucuguuucucucaccauugccacaauaugcuuccuuaugcaaauugccauccugguaacuacuguaacauugcauuucaagcaguaugaaugcaacucccccccaaacaaccaaguaaugcugugugaaccaacaauaauagaaagaaacauaacagagauaguguaucugaccaacaccaccauagagaaggaaauaugccccaaauuagcagaauacagaaauuggucaaagccgcaauguaacauuacaggauuugcaccuuuuucuaaggacaauucgauucggcuuuccgcugguggggacaucugggugacaagagaaccuuaugugucaugcgauccugacaaguguuaucaauuugcccuugggcagggaacaacacuaaacaacgggcauucaaaugacacaguacaugauaggaccccuuaccggacccuauugaugaaugaauuggguguuccauuucauuugggaaccaggcaagugugcauagcaugguccagcucaaguugucacgauggaaaagcauggcugcauguuuguguaacuggggaugaugaaaaugcaacugcuagcuucauuuacaaugggaggcuuguagauaguauugguucaugguccaaaaaaauacucagaacccaggagucggaaugcguuuguaucaauggaacuuguacaguaguaaugacugaugggagcgcuucaggaaaagcugauacuaaaauacuauucauugaggaggggaaaaucguucauauuagcacauugucaggaagugcucagcaugucgaggagugcuccuguuauccucgauauccuggugucagaugugucugcagagacaacuggaaaggcuccaauaggcccaucguagauauaaauguaaaggauuauagcauuguuuccaguuaugugugcucaggacuuguuggagacacacccagaaaaaacgacagcuucagcaguagccauugccuagauccuaacaaugaggaagguggucauggagugaaaggcugggccuuugaugauggaaaugacguguggaugggaagaacgaucagcgagaaguuacgcucagguuaugaaaccuucaaagucaucgaaggcugguccaaaccuaacuccaaauuacagacaaauaggcaagucauaguugaaagagguaacagguccgguuauucugguauuuucuccguugaaggcaaaagcugcaucaaucggugcuuuuauguggaguugauaaggggaaggaaagaggaaacugaagucugguggaccucaaacaguauuguuguguuuuguggcaccucagguacauauggaacaggcucauggccugauggggcggauaucaaucucaugccuauauaa

SEQ ID NO: 46179 - RNA, 1413 nt, Artificial Sequence
  derived and/or modified CDS sequence (wt) from neuraminidase__InfluenzaA__AAX56533
augaauccaaaucaaaaaauaauaaccauuggaucaaucaguguggcaaucggaauaauuagucuaauauugcaaauaggaaauauuauuucaauaugggcuagccacucaauccaaacuggaagucaaaacuacacuggaauaugcaaccaaagaaucauuacauaugaaaauagaaccuggguaaaucaaacauauguuaauauuaacaacacuaauguuguugcuggaaaggacaaaaccucgaugacauuggccggcaauucaucucuuugcccuauccguggaugggcaauauacacaaaagacaacagcauaagaauugguuccaaaggagauguuuuugucauaagagagccuuuuauaucauguucucacuuggaaugcagaaccuuuuuucugacccaaggugcucuauuaaaugacaagcauucaaaugggaccauuaaggacagaagcccuuuuagggccuuaaugagcuguccucugggugaagcuccgucuccauacaauucaagauuugaaucaguugcuuggucagcaagcgcaugccaugauggccugggcuggcuaacaaucggaauuucugguccagauaauggagcaguggcuguacuaaaauacaacggcauaauaacugaaaccauaaaaaguuggaaaaagcaaauccuaagaacacaagagucugaaugugucugugugaacgguucauguuuuaccauaaugaccgauggcccgaguaacagggccgcaucguacagaaucuucaaaauugagaaggggagaguuacuaaaucaauagaguuggaugcacccaauuaucauuacgaggaauguuccuguuauccagacaccggcacaguaaugugugugugcagggacaauuggcacgguucaaaucgaccuuggguguccuuuaaucaaaaccuggauuaucaaauaggauacaucugcagugggguguucggugacaauccgcgucccaaagauggagaaggcagcuguaauccagugacuguugauggagcagacggaguaaagggguuuucauacagauaugguaaugguguuuggauaggaaggacuaaaaguaacagacuaagaaagggauuugagaugauuugggauccuaauggauggacagauaccgacagugauuucucaaugaaacaggaugucguggcaaugaaugauuggucaggguacagcggaaguuuuguucaacauccugagcuaacaggauuggacuguaugagaccuugcuucuggguugaauuagucagagggcuaccuagagaaaauacaacaaucuggacuagugggagcagcauuucuuuuuguggcgugaauagcgagacugcaaacuggucuuggccagacggugcugaguugccauucaccauugacaaguag

SEQ ID NO: 46180 - RNA, 1410 nt, Artificial Sequence
  derived and/or modified CDS sequence (wt) from neuraminidase__InfluenzaA__AAX56543
augaauccaaaucaaaagauaauaacgauuggcucuguuucucucaccauugccacaauaugcuuccuuaugcaaauugccauccugguaacuacuguaacauugcauuucaagcaauaugaaugcaacucccccccaaacaaccaagugaugcugugugaaccaacaauaauagaaagaaacauaacagagauaguauaucugaccaacaccaccauagagaaggaaauaugccccaaacuagcagaauacagaaauuggucaaagccgcaauguaacauuacaggauuugcaccuuuuucuaaggacaauucgauucggcuuuccgcuaguggggacaucugggugacaagagaaccuuaugugucaugcgauccugacaaguguuaucaauuugcccuuggacagggaacaacacuaaacaacgggcauucaaaugacacaguacaugauaggaccccuuaucgaacccuauugaugaaugaguuggguguuccauuucauuugggaaccaagcaagugugcauagcaugguccagcucaaguugucacgauggaaaagcauggcugcauguuuguguaacgggggaugaugaaaaugcaacugcuagcuucauuuacaaugggaggcuuguagauaguauugguucaugguccaaaaaaauccucaggacccaggagucggaaugcguuuguaucaauggaacuuguacaguaguaaugacugaugggagugcuucaggaaaagcugauacuaaaauacuauucauugaggaggggaaaaucguucauacuagcucauugucaggaagugcucagcaugucgaggagugcuccuguuauccucgauauccuggugucagaugugucugcagagacaacuggaaaggcuccaauaggcccaucguagauauaaauguaaaggauuauagcauuguuuccaguuaugugugcucaggacuuguuggagacacacccagaaaaaacgacagcuccagcaguagccauugcuuggauccuaacaaugaggaagguggucauggagugaaaggcugggccuuugaugauggaaaugacguguggaugggaagaacgaucagcgaggaguuacgcucaggauaugaaaccuucaaagucauugaaggcugguccaaaccuaacuccaaauugcagauaaauaggcaagucauaguugacagagguaauagguccgguuauucugguauuuucucuguugaaggcaaaagcugcaucaaucggugcuuuuauguggaguugauaaggggaaggaaacaggaaacugaagucuuguggaccucaaacaguauuguuguguuuuguggcaccucagguacauauggaacaggcucauggccugauggggcggacaucaaucucaugccuauauaa

SEQ ID NO: 46181 - RNA, 1410 nt, Artificial Sequence
  derived and/or modified CDS sequence (wt) from neuraminidase__InfluenzaA__AAX56553
augaauccaaaucaaaagauaauaacgauuggcucuguuucucucaccauugccacaauaugcuuccuuaugcaaauugccauccugguaacuacuguaacauugcauuucaagcaauaugaaugcaacucccccccaaacaaccaagugaugcugugugaaccaacaauaauagaaagaaacauaacagagauaguguaucugaccaacaccaccauagagaaggaaauaugccccaaacuagcagaauacagaaauuggucaaagccgcaauguaacauuacaggauuugcaccuuuuucuaaggacaauucgauucggcuuuccgcugguggggacaucugggugacaagagaaccuuaugugucaugcgauccugacaaguguuaucaauuugcccuuggacagggaacaacacuaaacaacggacauucaaaugacacaguacaugauaggaccccuuaucggacccuauugaugaaugaguuggguguuccauuucauuugggaaccaagcaagugugcauagcaugguccagcucaaguugucacgauggaaaagcauggcugcauguuuguguaacgggggaugaugaaaaugcaacugcuagcuucauuuacaaugggaggcuuguagauaguauugguucaugguccaaaaaaauccucaggacccaggagucggaaugcguuuguaucaauggaacuuguacaguaguaaugacugaugggagugcuucaggaaaagcugauacuaaaauacuauucauugaggaggggaaaaucguucauacuagccuauugucaggaagugcucagcaugucgaggagugcuccuguuauccucgauacccuggugucagaugugucugcagagacaacuggaaaggcuccaauaggcccaucguagauauaaauguaaaggauuauagcauuguuuccaguuaugugugcucaggacuuguuggagacacacccagaaaaaacgacagcuccagcaguagccauugcuuggauccuaacaaugaggaagguggucauggagugaaaggcugggccuuugaugauggaaaugacguguggaugggaagaacgaucagcgagaaguuacgcucaggauaugaaaccuucaaagucauugaaggcugguccaaaccuaacuccaaauugcagauaaauaggcaagucauaguugacagagguaauagguccgguuauucugguauuuucucuguugaaggcaaaagcugcaucaaucggugcuuuuauguggaguugauaaggggaaggaaacaggaaacugaagucuuguggaccucaaacaguauuguuguguuuuguggcaccucagguacauauggaacaggcucauggccugauggggcggacaucaaucucaugccuauauaa

SEQ ID NO: 46182 - RNA, 1410 nt, Artificial Sequence
  derived and/or modified CDS sequence (wt) from neuraminidase__InfluenzaA__AAX56563
augaauccaaaucaaaagauaauaacaauuggcucuguuucucucaccauugccgcaauaugcuuccuuaugcaaauugccauccugguaacuacuguaacauugcauuucaagcagcaugaaugcaacucccccccaaacaaccaaguaaugcugugugaaccaacaauaauagaaagaaacauaacagagauaguguaccugaccaacaccaccauagagaaggaaauaugccccaaacuagcagaauacagaaauuggucaaagccgcaauguaacauuacaggauuugcaccuuuuucuaaggacaauucgauucggcuuuccgcugguggggacaucugggugacaagagaaccuuaugugucaugcgauccugacaaguguuaucaauuugcccuugggcagggaacaacacuaaacaacgggcauucaaaugacacaguacaugauaggaccccuuaccggacccuauugaugaaugaauuggguguuccauuucauuugggaaccaggcaagugugcauagcaugguccagcucaaguugucacgauggaaaagcguggcugcauguuuguguaacuggggaugauaaaaaugcaacugcuagcuucauuuacaaugggaggcuuguagauaguauugguucaugguccaaaaaaauacucagaacccaggagucagaaugcguuuguaucaauggaacuuguacagugguaaugacugauggaagcgcuucaggaaaagcugauacuaaaauacuauucauugaggaggggaaaaucguucauauuagcgcauugucaggaagugcucagcaugucgaggagugcuccuguuauccucgauauccuggugucagaugugucugcagagacaacuggaaaggcuccaauaggcccauuguagauauaaauguaaaggauuauagcauuguuuccaguuaugugugcucaggacuuguuggagacacacccagaaaaaacgacagcuucagcaguagccauugccuagauccuaacaaugaggaagguggucauggagugaaaggcugggccuuugaugauggaaaugacguguggaugggaagaacgaucagcgagaaguuacgcucagguuaugaaaccuucaaagucaucgaaggcugguccaaaccuaacuccaaauuacagauaaauaggcaaguuauaguugaaagagauaacagguccgguuauucugguauuuucuccguugaaggcaaaagcugcaucaaucggugcuuuuauguggaguugauaaggggaaggaaagaggaaacugaagucugguggaccucaaacaguauuguuguguuuuguggcaccucagguacauauggaacaggcucauggccugauggggcggauaucaaucucaugccuauauaa

SEQ ID NO: 46183 - RNA, 1410 nt, Artificial Sequence
  derived and/or modified CDS sequence (wt) from neuraminidase__InfluenzaA__AAX56573
augaauccaaaucaaaagauaauaacaauuggcucuguuucucucaccauugccacaauaugcuuccuuaugcaaauugccauccugguaacuacuguaacauugcauuucaagcaguaugaaugcaacucccccccaaacaaccaaguaaugcugugugaaccagcaauaauagaaagaaacauaacagagauaguguaucugaccaacaccaccauagagaaggaaauaugccccaaauuagcagaauacagaaauuggucaaagccgcaauguaacauuacaggauuugcaccuuuuucuaaggacaauucgauucggcuuuccgcugguggggacaucugggugacaagagaaccuuaugugucaugcgauccugacaaguguuaucaauuugcccuuggacagggaacaacacuaaacaacgggcauucaaaugacacaguacaugauaggaccccuuaccggacccuauugaugaaugaauuggguguuccauuucauuugggaaccaggcaagugugcauagcaugguccagcucaaguugucacgauggaaaagcauggcugcauguuuguguaacuggggaugaugaaaaugcaacugcuagcuucauuuacaaugggaggcuuguagauaguauugguucaugguccaaaaaaauacucagaacccaggagucggaaugcguuuguaucaauggaacuuguacaguaguaaugacugaugggagcgcuucaggaaaagcugauacuaaaauacuauucauugaggaggggaaaaucguucauauuagcacauugucaggaagugcucagcaugucgaggagugcuccuguuauccucgauauccuggugucagaugugucugcagagauaacuggaaaggcuccaauaggcccaucguagauauaaauguaaaggauuauagcauuguuuccaguuaugugugcucaggacuuguuggagacacacccagaaaaaacgacagcuucagcaguagccauugccuagauccuaacaaugaggaagguggucauggagugaaaggcugggccuuugaugauggaaaugacguguggaugggaagaacgaucagcgagaaguuacgcucagguuaugaaaccuucaaagucaucgaaggcugguccaaaccuaacuccaaauuacagauaaauaggcaagucauaguugaaagagguaacagguccgguuauucugguauuuucuccguugaaggcaaaagcugcaucaaucggugcuuuuauguggaguugauaaggggaaggaaagaggaaacugaagucugguggaccucaaacaguauuguuguguuuuguggcaccucagguacauauggaacaggcucauggccugauggggcggauaucaaucucaugccuauauaa

SEQ ID NO: 46184 - RNA, 1410 nt, Artificial Sequence
  derived and/or modified CDS sequence (wt) from neuraminidase__InfluenzaA__AAX56583
augaauccaaaucaaaagauaauaacaauuggcucuguuucucucaccauugccacaauaugcuuccuuaugcaaauugccauccugguaacuacuguaacauugcauuucaagcaguaugaaugcaacucccccccaaacaaccaaguaaugcugugugaaccaacaauaauagaaagaaacauaacagagauaguguaucugaccaacaccaccauagagaaggaaauaugccccaaauuagcagaauacagaaauuggucaaagccgcaauguaacauuacgggauuugcaccuuuuucuaaggacaauucgauucggcuuuccgcugguggggacaucugggugacaagagaaccuuauguaucaugcgauccugacaaguguuaucaauuugcccuugggcagggaacaacacuaaacaacgggcauucaaaugacacaguacaugauaggaccccuuaccggacccuauugaugaaugaauuggguguuccauuucauuugggaaccaggcaagugugcauagcaugguccagcucaaguugucacgauggaaaagcauggcugcauguuuguguaacuggggaugaugaaaaugcaacugcuagcuucauuuacaaugggaggcuuguagauaguauugguucaugguccaaaaaaauacucagaacccaggagucggaaugcguuuguaucaauggaacuuguacaguaguaaugacugaugggagcgcuucaggaaaagcugauacuaaaauacuauucauugaggaggggaaaaucguucauauuagcacauugucaggaagugcucagcaugucgaggagugcuccuguuauccucgauauccuggugucagaugugucugcagagaccacuggaaaggcuccaauaggcccaucguagauauaaauguaaaggauuauagcauuguuuccaguuaugugugcucaggacuuguuggagacacacccagaaaaaacgacagcuucagcaguagccauugccuagauccuaacaaugaggaagguggucauggagugaaaggcugggccuuugaugauggaaaugacguguggaugggaagaacgaucagcgagaaguuacgcucagguuaugaaaccuucaaagucaucgaaggcugguccaaaccuaacuccaaauuacagacaaauaggcaagucauaguugaaagagguaacagguccgguuauucugguauuuucuccguugaaggcaaaagcugcaucaaucggugcuuuuauguggaguugauaaggggaaggaaagaggaaacugaagucugguggaccucaaacaguauuguuguguuuuguggcaccucagguacauauggaacaggcucauggccugauggggcggauaucaaucucaugccuauauaa

SEQ ID NO: 46185 - RNA, 1410 nt, Artificial Sequence
  derived and/or modified CDS sequence (wt) from neuraminidase__InfluenzaA__AAX56593
augaauccaaaucaaaagauaauaacaauuggcucuguuucucucaccauugccacaauaugcuuccuuaugcaaauugccauccugguaacuacuguaacauugcauuucaagcaguaugaaugcaacucccccccaaacaaccaaguaaugcugugugaaccagcaauaauagaaagaaacauaacagagauaguguaucugaccaacaccaccauagagaaggaaauaugccccaaauuagcagaauacagaaauuggucaaagccgcaauguaacauuacaggauuugcaccuuuuuccaaggacaauucgauucggcuuuccgcugguggggacaucugggugacaagagaaccuuaugugucaugcgauccugacaaguguuaucaauuugcccuuggacagggaacaacacuaaacaacgggcauucaaaugacacaguacaugauaggaccccuuaccggacccuauugaugaaugaauuggguguuccauuucauuugggaaccaggcaagugugcauagcaugguccagcucaaguugucacgauggaaaagcauggcugcauguuuguguaacuggggaugaugaaaaugcaacugcuagcuucauuuacaaugggaggcuuguagauaguauugguucaugguccaaaaaaauacucagaacccaggagucggaaugcguuuguaucaauggaacuuguacaguaguaaugacugaugggagcgcuucaggaaaagcugauacuaaaauacuauucauugaggaggggaaaaucguuaauauuagcacauugucaggaagugcucagcaugucgaggagugcuccuguuauccucgauauccuggugucagaugugucugcagagacaacuggaaaggcuccaauaggcccaucguagauauaaauguaaaggauuauagcauuguuuccaguuaugugugcucaggacuuguuggagacacacccagaaaaaacgacagcuucagcaguagccauugccuagauccuaacaaugaggaagguggucauggagugaaaggaugggccuuugaugauggaaaugacguguggaugggaagaacgaucagcgagaaguuucgcucagguuaugaaaccuucaaagucaucgaaggcugguccaaaccuaacuccaaauuacagauaaauaggcaagucauaguugaaagagguaacagguccgguuauucugguauuuucuccguugaaggcaaaagcugcaucaaucggugcuuuuauguggaguugauaaggggaaggaaagaggaaacugaaguuugguggaccucaaacaguauuguuguguuuuguggcaccucagguacauauggaacaggcucauggccugauggggcggauaucaaucucaugccuauauaa

SEQ ID NO: 46186 - RNA, 1410 nt, Artificial Sequence
  derived and/or modified CDS sequence (wt) from neuraminidase__InfluenzaA__AAX56603
augaauccaaaucaaaagauaauaacaauuggcucuguuucucucaccauugccgcaauaugcuuccuuaugcaaauugccauccugguaacuacuguaacauugcauuucaagcagcaugaaugcaacucccccccaaacaaccaaguaaugcugugugaaccaacaauaauagaaagaaacauaacagagauaguguaucugaccaacaccaccauagagaaggaaauaugccccaaacuagcagaauacagaaauuggucaaagccgcaauguaacauuacaggauuugcaccuuuuucuaaggacaauucgauucggcuuuccgcugguggggacaucugggugacaagagaaccuuaugugucaugcgauccugacaaguguuaucaauuugcccuugggcagggaacaacacuaaacaacgggcauucaaaugacacagcacaugauaggaccccuuaccggacccuauugaugaaugaauuggguguuccauuucauuugggaaccaggcaagugugcauagcaugguccagcucaaguugucacgauggaaaagcguggcugcauguuuguguaacuggggaugauaaaaaugcaacugcuagcuucauuuacaaugggaggcuuguagauaguauugguucaugguccaaaaaaauacucagaacccaggagucggaaugcguuuguaucaauggaacuuguacagugguaaugacugauggaagcgcuucaggaaaagcugauacuaaaauacuauucauugaggaggggaaaaucguucauauuagcacauugucaggaagugcucagcaugucgaggagugcuccuguuauccucgauauccuggugucagaugugucugcagagacaacuggaaaggcuccaauaggcccauuguagauauaaauguaaaggauuauagcauuguuuccaguuaugugugcucaggacuuguuggagacacacccagaaaaaacgacagcuucagcaguagccauugccuagauccuaacaaugaggaagguggucauggagugaaaggcugggccuuugaugauggaaaugacguguggaugggaagaacgaucagcgagaaguuacgcucagguuaugaaaccuucaaagucaucgaaggcugguccaaaccuaacuccaaauuacagauaaauaggcaaguuauaguugaaagagguaacagguccgguuauucugguauuuucuccguugaaggcaaaagcugcaucaaucggugcuuuuauguggaguugauaaggggaaggaaagaggaaacugaagucugguggaccucaaacaguauuguuguguuuuguggcaccucagguacauauggaacaggcucauggccugauggggcggauaucaaucucaugccuauauaa

SEQ ID NO: 46187 - RNA, 1410 nt, Artificial Sequence
  derived and/or modified CDS sequence (wt) from neuraminidase__InfluenzaA__AAX57647
augaauccaaaucaaaagauaauaacaauuggcucuguuucucucaccauugccacaauaugcuuccuuaugcaaauugccauccugguaacuacuguaacauugcauuucaagcagcaugaaugcaacucccccccaaacaaccaaguaaugcugugugaaccaacaauaauagaaagaaacauaacagagauaguguaucugaccaacaccaccauagagaaggaaauaugccccaaacuagcagaauacagaaauuggucaaagccgcaauguaacauuacaggauuugcaccuuuuucuaaggacaauucgauucggcuuuccgcugguggggacaucugggugacaagagaaccuuaugugucaugcgauccugauaaguguuaucaauuugcccuugggcagggaacaacacuaaacaacgggcauucaaaugacacaguacaugauaggaccccuuaccggacccuguugaugaaugaauuggguguuccauuucauuugggaaccaggcaagugugcauagcaugguccagcucaaguugucacgauggaaaagcauggcugcauguuuguguaacuggggaugauaaaaaugcaacugcuagcuucauuuacaaugggaggcuuguagauaguauugguucaugguccaaaaaaauacucagaacccaggagucggaaugcguuuguaucaauggaacuuguacaguaguaaugacugaugggagcgcuucaggaaaagcugauacuaaaauacuauucauugaggaggggaaaaucguucauauuagcacauugucaggaagugcucagcaugucgaggagugcuccuguuauccucgauauccuggugucagaugugucugcagagacaacuggaaaggcuccaauaggcccauuguagauauaaauguaaaggauuauagcauuguuuccaguuaugugugcucaggacuuguuggagacacacccagaaaaaacgacagcuucagcaguagccauugccuagauccuaacaaugaggaagguggucauggagugaaaggcugggccuuugaugauggaaaugacguguggaugggaagaacgaucagcgagaaguuacgcucagguuaugaaaccuucaaagucaucgaaggcugguccaaaccuaacuccaaauuacagauaaauaggcaaguuauaguugaaagagguaacagguccgguuauucugguauuuucuccguugaaggcaaaagcugcaucaaucggugcuuuuauguggaguugauaaggggaaggaaagaggaaacugaagucugguggaccucaaacaguauuguuguguuuuguggcaccucagguacauauggaacaggcucauggccugauggggcggauaucaaucucaugccuauauaa

SEQ ID NO: 46188 - RNA, 1410 nt, Artificial Sequence; identical to SEQ ID NO: 46147
  derived and/or modified CDS sequence (wt) from neuraminidase__InfluenzaA__AAX57657

SEQ ID NO: 46189 - RNA, 1410 nt, Artificial Sequence; identical to SEQ ID NO: 46185
  derived and/or modified CDS sequence (wt) from neuraminidase__InfluenzaA__AAX57667

SEQ ID NO: 46190 - RNA, 1410 nt, Artificial Sequence; identical to SEQ ID NO: 46174
  derived and/or modified CDS sequence (wt) from neuraminidase__InfluenzaA__AAX57677

SEQ ID NO: 46191 - RNA, 1410 nt, Artificial Sequence
  derived and/or modified CDS sequence (wt) from neuraminidase__InfluenzaA__AAX57687
augaauccaaaucaaaagauaauaacaauuggcucuguuucucucaccauugccacaauaugcuuccuuaugcaaauugccauccugguaacuacuguaacauugcauuucaagcaguaugaaugcaacucccccccaaacaaccaaguaaugcugugugaaccagcaauaauagaaagaaacauaacagagauaguguaucugaccaacaccaccauagagaaggaaauaugccccaaauuagcagaauacagaaauuggucaaagccgcaauguaacauuacaggauuugcaccuuuuuccaaggacaauucgauucggcuuuccgcugguggggacaucugggugacaagagaaccuuaugugucaugcgauccugacaaguguuaucaauuugcccuuggacagggaacaacacuaaacaacgggcauucaaaugacacaguacaugauaggaccccuuaccggacccuauugaugaaugaauuggguguuccauuucauuugggaaccaggcaagugugcauagcaugguccagcucaaguugucacgauggaaaagcauggcugcauguuuguguaacuggggaugaugaaaaugcaacugcuagcuucauuuacgaugggaggcuuguagauaguauugguucaugguccaaaaaaauacucagaacccaggagucggaaugcguuuguaucaauggaacuuguacaguaguaaugacugaugggagcgcuucaggaaaagcugauacuaaaauacuauucauugaggaggggaaaaucguuaauauuagcacauugucaggaagugcucagcaugucgaggagugcuccuguuauccucgauauccuggugucagaugugucugcagagacaacuggaaaggcuccaauaggcccaucguagauauaaauguaaaggauuauagcauuguuuccaguuaugugugcucaggacuuguuggagacacacccagaaaaaacgacagcuucagcaguagccauugccuagauccuaacaaugaggaagguggucauggagugaaaggcugggccuuugaugauggaaaugacguguggaugggaagaacgaucagcgagaaguuacgcucagguuaugaaaccuucaaagucaucgaaggcugguccaaaccuaacuccaaauuacagauaaauaggcaagucauaguugaaagagguaacagguccgguuauucugguauuuucuccguugaaggcaaaagcugcaucaaucggugcuuuuauguggaguugauaaggggaaggaaagaggaaacugaaguuugguggaccucaaacaguauuguuguguuuuguggcaccucagguacauauggaacaggcucauggccugauggggcggauaucaaucucaugccuauauaa

SEQ ID NO: 46192 - RNA, 1410 nt, Artificial Sequence
  derived and/or modified CDS sequence (wt) from neuraminidase__InfluenzaA__AAX57697
augaauccaaaucaaaagauaauaacaauuggcucuguuucucucaccauugccacaauaugcuuccuuaugcaaauugccauccugguaacuacuguaacauugcauuucaagcaguaugaaugcaacucccccccaaacaaccaaguaaugcugugugaaccaacaauaauagaaagaaacauaacagagauaguguaucugaccaacaccaccauagagaaggaaauaugccccaaacuagcagaauacagaaauuggucaaagccgcaauguaacauuacaggauuugcaccuuuuucuaaggacaauucgauucggcuuuccgcugguggggacaucugggugacaagagaaccuuaugugucaugcgauccugacaaguguuaucaauuugcccuugggcagggaacaacacuaaacaacgggcauucaaaugacacaguacaugauaggaccccuuaccggacccuauugaugaaugaauuggguguuccauuucauuugggaaccaggcaagugugcauagcaugguccagcucaaguugucacgauggaaaagcauggcugcauguuuguguaacuggggaugaugaaaaugcaacugcuagcuucauuuacaaugggaggcuuguagauaguauugguucaugguccaaaaaaauacucagaacccaggagucggaaugcguuuguaucaauggaacuuguacaguaguaaugacugaugggagcgcuucaggaaaagcugauacuaaaauacuauucauugaggaggggaaaaucguucauauuagcacauugucaggaagugcucagcaugucgaggagugcuccuguuauccucgauauccuggugucagaugugucugcagagacaacuggaaaggcuccaauaggcccaucguagauauaaauguaaaggaucauagcauuguuuccaguuaugugugcucaggacuuguuggagacacacccagaaaaaacgacagcuucagcaguagccauugccuagacccuaacaaugaggaagguggucauggagugaaaggcugggccuuugaugauggaaaugacguguggaugggaagaacgaucagcgagaaguuacgcucagguuaugaaaccuucaaagucaucgaaggcugguccaaaccuaacuccaaauuacagauaaauaggcaagucauaguugaaagagguaacagguccgguuauucugguauuuucuccguugaaggcaaaagcugcaucaaucggugcuuuuauguggaguugauaaggggaaggaaagaggaaacugaagucugguggaccucaaacaguauuguuguguuuuguggcaccucagguacauauggaacaggcucauggccugauggggcggauaucaaucucaugccuauauaa

SEQ ID NO: 46193 - RNA, 1410 nt, Artificial Sequence
  derived and/or modified CDS sequence (wt) from neuraminidase__InfluenzaA__AAX57707
augaauccaaaucaaaagauaauaacaauuggcucuguuucucucaccauugccgcaauaugcuuccuuaugcaaauugccauccugguaacuacuguaacauugcauuucaagcagcaugaaugcaacucccccccaaacaaccaaguaaugcugugugaaccaacaauaauagaaagaaacauaacagagauaguguaucugaccaacaccaccauagagaaggaaauaugccccaaacuagcagaauacagaaauuggucaaagccgcaauguaacauuacaggauuugcaccuuuuucuaaggacaauucgauucggcuuuccgcugguggggacaucugggugacaagagaaccuuaugugucaugcgauccugacaaguguuaucaauuugcccuugggcagggaacaacacuaaacaacgggcauucaaaugacacaguacaugauaggaccccuuaccggacccuauugaugaaugaauuggguguuccauuucauuugggaaccaggcaagugugcauagcaugguccagcucaaguugucacgauggaaaagcguggcugcauguuuguguaacuggggaugauaaaaaugcaacugcuagcuucauuuacaaugggaggcuuguagauaguauugguucaugguccaaaaaaauacucagaacccaggagucggaaugcguuuguaucaauggaacuuguacagugguaaugacugauggaagcgcuucaggaaaagcugauacuaaaauacuauucauugaggaggggaaaaucguucauauuagcacauugucaggaagugcucagcaugucgaggagugcuccuguuauccucgauauccuggugucagaugugucugcagagacaacuggaaaggcuccaauaggcccauuguagauauaaauguaaaggauuauagcauuguuuccaguuaugugugcucaggacuuguuggagacacacccagaaaaaacgacagauucagcaguagccauugccuagauccuaacaaugaggaagguggucauggggugaaaggcugggccuuugaugauggaaaugauguguggaugggaagaacgaucagcgagaaguuacgcucagguuaugaaaccuucaaagucaucgaaggcugguccaaaccuaacuccaaauuacagauaaauaggcaaguuauaguugaaagagguaacagguccgguuauucugguauuuucuccguugaaggcaaaagcugcaucaaucggugcuuuuauguggaguugauaaggggaaggaaagaggaaacugaagucugguggaccucaaacaguauuguuguguuuuguggcaccucagguacauauggaacaggcucauggccugauggggcggauaucaaucucaugccuauauaa

SEQ ID NO: 46194 - RNA, 1410 nt, Artificial Sequence
  derived and/or modified CDS sequence (wt) from neuraminidase__InfluenzaA__AAX57717
augaauccaaaucaaaagauaauaacaauuggcucuguuucucucaccauugccacaauaugcuuccuuaugcaaauugccauccugguaacuacuguaacauugcauuucaagcaguaugaaugcaacucccccccaaacaaccaaguaaugcugugugaaccaacaauaauagaaagaaacauaacagagauaguguaucugaccaacaccaccauagagaaggaaauaugccccaaacuagcagaauacagaaauuggucaaagccgcaauguaacauuacaggauuugcaccuuuuucuaaggacaauucgauucggcuuuccgcugguggggacaucugggugacaagagaaccuuaugugucaugcgauccugacaaguguuaucaauuugcccuugggcagggaacaacacuaaacaacgggcauucaaaugacacaguacaugauaggaccccuuaccggacccuauugaugaaugaauuggguguuccauuucauuugggaaccaggcaagugugcauagcaugguccagcucaaguugucacgauggaaaagcauggcugcauguuuguguaacuggggaugaugaaaaugcaacugcuagcuucauuuacaaugggaggcuuguagauaguauugguucaugguccaaaaaaauacucagaacccaggagucggaaugcguuuguaucaauggaacuuguacaguaguaaugacugaugggagcgcuucaggaaaagcugauacuaaaauacuauucauugaggaggggaaaaucguucauauuagcacauugucaggaagugcucagcaugucgaggagugcuccuguuauccucgauauccuggugucagaugugucugcagagacaacuggaaaggcuccaauaggcccaucguagauauaaauguaaaggauuauagcauuguuuccaguuaugugugcucaggacuuguuggagacacacccagaaaaaacgacagcuucagcaguagccauugccuagauccuaacaaugaggaagguggucauggagugaaaggcugggccuuugaugauggaaaugacguguggaugggaagaacgaucagcgagaaguuacgcucagguuaugaaaccuucaaagucaucgaaggcugguccaaaccuaacuccaaauuacagauaaauaggcaagucauaguugaaagagguaacagguccgguuauucugguauuuucuccguugaaggcaaaagcugcaucaaucggugcuuuuauguggaguugauaaggggaaggaaagaggaaacugaagucugguggaccucaaacaguauuguuguguuuuguggcaccucagguacauauggaacaggcucauggccugauggggcggauaucaaucucaugccuauauaa

SEQ ID NO: 46195 - RNA, 1410 nt, Artificial Sequence; identical to SEQ ID NO: 46185
  derived and/or modified CDS sequence (wt) from neuraminidase__InfluenzaA__AAX57726

SEQ ID NO: 46196 - RNA, 1410 nt, Artificial Sequence
  derived and/or modified CDS sequence (wt) from neuraminidase__InfluenzaA__AAX57737
augaauccaaaucaaaagauaauaacaauuggcucuguuucucucaccauugccacaauaugcuuccuuaugcaaauugccauccugguaacuacuguaacauugcauuucaagcaguaugaaugcaacucccccccaaacaaccaaguaaugcugugugaaccagcaauaauagaaagaaacauaacagagauaguguaucugaccaacaccaccauagagaaggaaauaugccccaaauuagcagaauacagaaauuggucaaagccgcaauguaacauuacaggauuugcaccuuuuuccaaggacaauucgauucggcuuuccgcugguggggacaucugggugacaagagaaccuuaugugucaugcgauccugacaaguguuaucaauuugcccuuggacagggaacaacacuaaacaacgggcauucaaaugacacaguacaugauaggaccccuuaccggacccuauugaugaaugaauuggguguuccauuucauuugggaaccaggcaagugugcauagcaugguccagcucaaguugucacgauggaaaagcauggcugcauguuuguguaacuggggaugaugaaaaugcaacugcuagcuucauuuacaaugggaggcuuguagauaguauugguucaugguccaaaaaaauacucagaacccaggagucggaaugcguuuguaucaauggaacuuguacaguaguaaugacugaugggagcgcuucaggaaaagcugauacuaaaauacuauucauugaggaggggaaaaucguuaauauuagcacauugucaggaagugcucagcaugucgaggaaugcuccuguuauccucgauauccuggugucagaugugucugcagagacaacuggaaaggcuccaauaggcccaucguagauauaaauguaaaggauuauagcauuguuuccaguuaugugugcucaggacuuguuggagacacacccagaaaaaacgacagcuucagcaguagccauugccuagauccuaacaaugaggaagguggucauggagugaaaggaugggccuuugaugauggaaaugacguguggaugggaagaacgaucagcgagaaguuucgcucagguuaugaaaccuucaaagucaucgaaggcugguccaaaccuaacuccaaauuacagauaaauaggcaagucauaguugaaagagguaacagguccgguuauucugguauuuucuccguugaaggcaaaagcugcaucaaucggugcuuuuauguggaguugauaaggggaaggaaagaggaaacugaaguuugguggaccucaaacaguauuguuguguuuuguggcaccucagguacauauggaacaggcucauggccugauggggcggauaucaaucucaugccuauauaa

SEQ ID NO: 46197 - RNA, 1410 nt, Artificial Sequence; identical to SEQ ID NO: 46181
  derived and/or modified CDS sequence (wt) from neuraminidase__InfluenzaA__AAX57747

SEQ ID NO: 46198 - RNA, 1410 nt, Artificial Sequence
  derived and/or modified CDS sequence (wt) from neuraminidase__InfluenzaA__AAX57757
augaauccaaaucaaaagauaauaacgauuggcucuguuucucucaccauugccacaauaugcuuccuuaugcaaauugccauccugguaacuacuguaacauugcauuucaagcaauaugaaugcaacucccccccaaacaaccaagugaugcugugugaaccaacaauaauagaaagaaacauaacagagauaguguaucugaccaacaccaccauagagaaggaaauaugccccaaacuagcagaauacagaaauuggucaaagccgcaauguaacauuacaggauuugcaccuuuuucuaaggacaauucgauucggcuuuccgcugguggggacaucugggugacaagagaaccuuaugugucaugcgauccugacaaguguuaucaauuugcccuuggacagggaacaacacuaaacaacggacauucaaaugacacaguacaugauaggaccccuuaucggacccuauugaugaaugaguuggguguuccauuucauuugggaaccaagcaagugugcauagcaugguccagcucaaguugucacgauggaaaagcauggcugcauguuuguguaacgggggaugaugaaaaugcaacugcuagcuucauuuacaaugggaggcuuguagauaguauugguucaugguccaaaaaaauccucaggacccaggagucggaaugcguuuguaucaauggaacuuguacaguaguaaugacugaugggagugcuucaggaaaagcugauacuaaaauacuauucauugaggaggggaaaaucguucauacuagccuauugucaggaagugcucagcaugucgaggagugcuccuguuauccucgauacccuggugucagaugugucugcagagacaacuggaaaggcuccaauaggcccaucguagauauaaauguaaaggauuauagcauuguuuccaguuaugugugcucaggacuuguuggagacacacccagaaaaaacgacagcuccagcaguagccauugcuuggauccuaacaaugaggaagguggucauggagugaaaggcugggccuucgaugauggaaaugacguguggaugggaagaacgaucagcgagaaguuacgcucaggauaugaaaccuucaaagucauugaaggcugguccaaaccuaacuccaaauugcagauaaauaggcaagucauaguugacagagguaauagguccgguuauucugguauuuucucuguugaaggcaaaagcugcaucaaucggugcuuuuauguggaguugauaaggggaaggaaacaggaaacugaagucuuguggaccucaaacaguauuguuguguuuuguggcaccucagguacauauggaacaggcucauggccugauggggcggacaucaaucucaugccuauauaa

SEQ ID NO: 46199 - RNA, 1410 nt, Artificial Sequence
  derived and/or modified CDS sequence (wt) from neuraminidase__InfluenzaA__AAX57767
augaauccaaaucaaaagauaauaacgauuggcucuguuucucucaccauugccacaauaugcuuccuuaugcaaauugccauccugguaacuacuguaacauugcauuucaagcaauaugaaugcaacccccccccaaacaaccaagugaugcugugugaaccaacaauaauagaaagaaacauaacagagauaguguaucugaccaacaccaccauagagaaggaaauaugccccaaacuagcagaauacagaaauuggucaaagccgcaauguaacauuacaggauuugcaccuuuuucuaaggacaauucgauucggcuuuccgcugguggggacaucugggugacaagagaaccuuaugugucaugcgauccugacaaguguuaucaauuugcccuuggacagggaacaacacuaaacaauggacauucaaaugacacaguacaugauaggaccccuuaucggacccuauugaugaaugaguuggguguuccauuucauuugggaaccaagcaagugugcauagcaugguccagcucaaguugucacgauggaaaagcauggcugcauguuuguguaacgggggaugaugaaaaugcaacugcuagcuucauuuacaaugggaggcuuguagauaguauugguucaugguccaaaaaaauccucaggacccaggagucggaaugcguuuguaucaauggaacuuguacaguaguaaugacugaugggagugcuucaggaaaagcugauacuaaaauacuauucauugaggaggggaaaaucguucauacuagccuauugucaggaagugcucagcaugucgaggagugcuccuguuauccucgauacccuggugucagaugugucugcagagacaacuggaaaggcuccaauaggcccaucguagauauaaauguaaaggauuauagcauuguuuccaguuaugugugcucaggacuuguuggagacacacccagaaaaaacgacagcuccagcaguagccauugcuuggauccuaacaaugaggaagguggucauggagugaaaggcugggccuuugaugauggaaaugacguguggaugggaagaacgaucagcgagaaguuacgcucaggauaugaaaccuucaaagucauugaaggcugguccaaaccuaacuccaaauugcagauaaauaggcaagucauaguugacagagguaauagguccgguuauucugguauuuucucuguugaaggcaaaagcugcaucaaucggugcuuuuauguggaguugauaaggggaaggaaacaggaaacugaagucuuguggaccucaaacaguauuguuguguuuuguggcaccucagguacauauggaacaggcucauggccugauggggcggacaucaaucucaugccuauauaa

SEQ ID NO: 46200 - RNA, 1410 nt, Artificial Sequence
  derived and/or modified CDS sequence (wt) from neuraminidase__InfluenzaA__AAX57777
augaauccaaaucaaaagauaauaacgauuggcucuguuucucucaucauugcuacaauaugcuuccuuaugcaaauugccauccugguaacuacuguaacauugcauuucaagcaauaugaaugcaacucccccccaaacaaccaagugaugcugugugaaccaacaauaauagaaagaaacauaacagagauaguauaucugaccaacaccaccauagagaaggaaauaugccccaaacuagcagaauacagaaauuggucaaagccgcaauguaacauuacaggauuugcaccuuuuucuaaggacaauucgauucggcuuuccgcugguggggacaucugggugacaagagaaccuuaugugucaugcgauccugacaaguguuaucaauuugcccuuggacaaggaacaacacuaaacaacgggcauucaaaugacacaguacaugauaggaccccuuaucgaacccuauugaugaaugaguuggguguuccauuucauuugggaaccaaacaagugugcauagcaugguccagcucaaguugucacgauggaaaagcauggcugcauguuuguguaacgggggaugaugaaaaugcaacugcuagcuucauuuacaaugggaggcuuguagauaguauugguucaugguccaaaaaaauccucaggacccaggagucggaaugcguuuguaucaauggaacuuguacaguaguaaugacugaugggagugcuucaggaaaagcugauacuaaaauacuauucauugaggaggggaaaaucguucauacuagcucauugucaggaagugcucagcaugucgaggagugcuccuguuauccucgauauccuggugucagaugugucugcagagacaacuggaaaggcuccaauaggcccaucguagauauaaauguaaaggauuauagcauuguuuccaguuaugugugcucaggacuuguuggagacacacccagaaaaaacgacagcuccagcaguagccauugcuuggauccuaacaaugaggaagguggucauggagugaaaggcugggccuuugaugauggaaaugacguguggaugggaagaacgaucagcgagaaguuacgcucaggauaugaaaccuucaaagucauugaaggcugguccaaaccuaacuccaaauugcagauaaauaggcaagucauaguugacagagguaauagguccgguuauucugguauuuucucuguugaaggcaaaagcugcaucaaucggugcuuuuauguggaguugauaaggggaaggaaacaggaaacugaagucuuguggaccucaaacaguauuguuguguuuuguggcaccucagguacauauggaacaggcucauggccugauggggcggacaucaaucucaugccuauauaa

SEQ ID NO: 46201 - RNA, 1410 nt, Artificial Sequence
  derived and/or modified CDS sequence (wt) from neuraminidase__InfluenzaA__AAX57787
augaauccaaaucaaaagauaauaacaauuggcucuguuucucucaccauugccacaauaugcuuccuuaugcaaauugccauccugguaacuacuguaacauugcauuucaagcaguaugaaugcaacucccccccaaacaaccaaguaaugcugugugaaccagcaauaauagaaagaaacauaacagagauaguguaucugaccaacaccaccauagagaaggaaauaugccccaaauuagcagaauacagaaauuggucaaagccgcaauguaacauuacaggauuugcaccuuuuuccaaggacaauucgauucggcuuuccgcugguggggacaucugggugacaagagaaccuuaugugucaugcgauccugacaagugcuaucaauuugcccuuggacagggaacaacacuaaacaacgggcauucaaaugacacaguacaugauaggaccccuuaccggacccuauugaugaaugaauuggguguuccauuucauuugggaaccaggcaagugugcauagcaugguccagcucaaguugucacgauggaaaagcauggcugcauguuuguguaacuggggaugaugaaaaugcaacugcuagcuucauuuacaaugggaggcuuguagauaguauugguucaugguccaaaaaaauacucagaacccaggagucggaaugcguuuguaucaauggaacuuguacaguaguaaugacugaugggagcgcuucaggaaaagcuaauacuaaaauacuauucauugaggaggggaaaaucguuaauauuagcacauugucaggaagugcucagcaugucgaggagugcuccuguuauccucgauauccuggugucagaugugucugcagagacaacuggaaaggcuccaauaggcccaucguagauauaaauguaaaggauuauagcauuguuuccaguuaugugugcucaggacuuguuggagacacacccagaaaaaacgacagcuucagcaguagccauugccuagauccuaacaaugaggaagguggucauggagugaaaggaugggccuuugaugauggaaaugacguguggaugggaagaacgaucagcgagaaguuucgcucagguuaugaaaccuucaaagucaucgaagguugguccaaaccuaacuccaaauuacagauaaauaggcaagucauaguugaaagagguaacagguccgguuauucugguauuuucuccguugaaggcaaaagcugcaucaaucggugcuuuuauguggaguugauaaggggaaggaaagaggaaacugaaguuugguggaccucaaacaguauuguuguguuuuguggcaccucagguacauauggaacaggcucauggccugauggggcggauaucaaucucaugccuauauaa

SEQ ID NO: 46202 - RNA, 1410 nt, Artificial Sequence; identical to SEQ ID NO: 46181
  derived and/or modified CDS sequence (wt) from neuraminidase__InfluenzaA__AAX57797

SEQ ID NO: 46203 - RNA, 1410 nt, Artificial Sequence; identical to SEQ ID NO: 46181
  derived and/or modified CDS sequence (wt) from neuraminidase__InfluenzaA__AAX57807

SEQ ID NO: 46204 - RNA, 1410 nt, Artificial Sequence
  derived and/or modified CDS sequence (wt) from neuraminidase__InfluenzaA__AAX57817
augaauccaaaucaaaagauaauaacgauuggcucuguuucucucaccauugccacaauaugcuuccuuaugcaaauugccauccugguaacuacuguaacauugcauuucaagcaauaugaaugcaacucccccccaaacaaccaagugaugcugugugaaccaacaauaauagaaagaaacauaacagagauaguauaucugaccaacaccaccauagagaaggaaauaugccccaaacuagcagaauacagaaauuggucaaagccgcaauguaacauuacaggauuugcaccuuuuucuaaggacaauucgauucggcuuuccgcugguggggacaucugggugacaagagaaccuuaugugucaugcgauccugacaaguguuaucaauuugcccuuggacagggaacaacacuaaacaacgggcauucaaaugacacaguacaugauaggaccccuuaucgaacccuauugaugaaugaguuggguguuccauuucauuugggaaccaagcaagugugcauagcaugguccagcucaaguugucacgauggaaaagcauggcugcauguuuguguaacgggggaugaugaaaaugcaacugcuagcuucauuuacaaugggaggcuuguagauaguauuaguucaugguccaaaaaaauccucaggacccaggagucggaaugcguuuguaucaauggaacuuguacaguaguaaugacugaugggagugcuucaggaaaagcugauacuaaaauacuauucauugaggaggggaaaaucguucauacuagcucauugucaggaagugcucagcaugucgaggagugcuccuguuauccucgauauccuggugucagaugugucugcagagacaacuggaaaggcuccaauaggcccaucguagauauaaauguaaaggauuauagcauuguuuccaguuaugugugcucaggacuuguuggagacacacccagaaaaaacgacagcuccagcaguagccauugcuuggauccuaacaaugaggaagguggucauggagugaaaggcugggccuuugaugauggaaaugacguguggaugggaagaacgaucagcgagaaguuacgcucaggauaugaaaccuucaaagucauugaaggcugguccaaaccuaacuccaaauugcagauaaauaggcaagucauaguugacagagguaauagguccgguuauucugguauuuucucuguugaaggcaaaagcugcaucaaucggugcuuuuauguggaguugauaaggggaaggaaacaggaaacugaagucuuguggaccucaaacaguauuguuguguuuuguggcaccucagguacauauggaacaggcucauggccugauggggcggacaucaaucucaugccuauauaa

SEQ ID NO: 46205 - RNA, 1410 nt, Artificial Sequence
  derived and/or modified CDS sequence (wt) from neuraminidase__InfluenzaA__AAX57837
augaauccaaaucaaaagauaauaacgauuggcucuguuucucucaccauugccacaauaugcuuccuuaugcaaauugccauccugguaacuacuguaacauugcauuucaagcaauaugaaugcaacucccccccaaacaaccaagugaugcugugugaaccaacaauaauagaaagaaacauaacagagauaguguaucugaccaacaccaccauagagaaggaaauaugccccaaacuagcagaauacagaaauuggucaaagccgcaauguaacauuacaggauuugcaccuuuuucuaaggacaauucgauucggcuuuccgcugguggggacaucugggugacaagagaaccuuaugugucaugcgauccugacaaguguuaucaauuugcccuuggacagggaacaacacuaaacaacggacauucaaaugacacaguacaugauaggaccccuuaucggacccuauugaugaaugaguuggguguuccauuucauuugggaaccaagcaagugugcauagcaugguccagcucaaguugucacgauggaaaagcauggcugcauguuuguguaacgggggaugaugaaaaugcaacugcuagcuucauuuacaaugggaggcuuguagauaguauugguucaugguccaaaaaaauccucaggacccaggagucggaaugcguuuguaucaauggaacuuguacaguaguaaugacugaugggagugcuucaggaaaagcugauacuaaaauacuauucauugaggaggggaaaaucguucauacuagccuauugucaggaagugcucagcacgucgaggagugcuccuguuauccucgauacccuggugucagaugugucugcagagacaacuggaaaggcuccaauaggcccaucguagauauaaauguaaaggauuauagcauuguuuccaguuaugugugcucaggacuuguuggagacacacccagaaaaaacgacagcuccagcaguagccauugcuuggauccuaacaaugaggaagguggucauggagugaaaggcugggccuuugaugauggaaaugacguguggaugggaagaacgaucagcgagaaguuacgcucaggauaugaaaccuucaaagucauugaaggcugguccaaaccuaacuccaaauugcagauaaauaggcaagucauaguugacagagguaauagguccgguuauucugguauuuucucuguugaaggcaaaagcugcaucaaucggugcuuuuauguggaguugauaaggggaaggaaacaggaaacugaagucuuguggaccucaaacaguauuguuguguuuuguggcaccucagguacauauggaacaggcucauggccugauggggcggacaucaaucucaugccuauauaa

SEQ ID NO: 46206 - RNA, 1410 nt, Artificial Sequence
  derived and/or modified CDS sequence (wt) from neuraminidase__InfluenzaA__AAX57847
augaauccaaaucaaaagauaauaacgauuggcucuguuucucucaccauugccacaauaugcuuccuuaugcaaauugccauccugguaacuacuguaacauugcauuucaagcaauaugaaugcaacucccccccaaacaaccaagugaugcugugugaaccaacaauaauagaaagaaacauaacagagauaguguaucugaccaacaccaccauagagaaggaaauaugccccaaacuagcagaauacagaaauuggucaaagccgcaauguaacauuacaggauuugcaccuuuuucuaaggacaauucgauucggcuuuccgcugguggggacaucugggugacaagagaaccuuaugugucaugcgauccugacaaguguuaucaauuugcccuuggacagggaacaacacuaaacaacggacauucaaaugacacaguacaugauaggaccccuuaucggacccuauugaugaaugaguuggguguuccauuucauuugggaaccaagcaagugugcauagcaugguccagcucaaguugucacgauggaaaagcauggcugcauguuuguguaacgggggaugaugaaaaugcaacugcuagcuucauuuacaaugggaggcuuguagauaguauugguucaugguccaaaaaaauccucaggacccaggaaucggaaugcguuuguaucaauggaacuuguacaguaguaaugacugaugggagugcuucaggaaaagcugauacuaaaauacuauucauugaggaggggaaaaucguucauacuagccuauugucaggaagugcucagcaugucgaggagugcuccuguuauccucgauauccuggugucagaugugucugcagagacaacuggaaaggcuccaauaggcccaucguagauauaaauguaaaggauuauagcauuguuuccaguuaugugugcucaggacuuguuggagacacacccagaaaaaacgacagcuccagcaguagccauugcuuggauccuaacaaugaggaagguggucauggagugaaaggcugggccuuugaugauggaaaugacguguggaugggaagaacgaucagcgagaaguuacgcucaggauaugaaaccuucaaagucauugaaggcugguccaaaccuaacuccaaauugcagauaaauaggcaagucauaguugauagagguaauagguccgguuauucugguauuuucucuguugaaagcaaaagcugcaucaaucggugcuuuuauguggaguugauaaggggaaggaaacaggaaacugaagucuuguggaccucaaacaguauuguuguguuuuguggcaccucagguacauauggaacaggcucauggccugauggggcggacaucaaucucaugccuauauaa

SEQ ID NO: 46207 - RNA, 1410 nt, Artificial Sequence
  derived and/or modified CDS sequence (wt) from neuraminidase__InfluenzaA__AAX57857
augaauccaaaucaaaagauaauaacgauuggcucuguuucucucaccauugccacaauaugcuuccuuaugcaaauugccauccugguaacuacuguaacauugcauuucaagcaauaugaaugcaacucccccccaaacaaccaagugaugcugugugaaccaacaacaauagaaagaaacauaacagagauaguauaucugaccaacaccaccauagagaaggaaauaugccccaaacuagcagaauacagaaauuggucaaagccgcaauguaacauuacaggauuugcaccuuuuucuaaggacaauucgauucggcuuuccgcugguggggacaucugggugacaagagaaccuuaugugucaugcgauccugacaaguguuaucaauuugcccuuggacagggaacaacacuaaacaacgggcauucaaaugacacaguacaugauaggaccccuuaucgaacccuauugaugaaugaguuggguguuccauuucauuugggaaccaagcaagugugcauagcaugguccagcucaaguugucacgauggaaaagcauggcugcauguuuguguaacgggggaugaugaaaaugcaacugcuagcuucauuuacaaugggaggcuuguagauaguauugguucaugguccaaaaaaauccucaggacccaggagucggaaugcguuuguaucaauggaacuuguacaguaguaaugacugaugggagugcuucaggaaaagcugauacuaaaauacuauucauugaggaggggaaaaucguucauacuagcucauugucaggaagugcucagcaugucgaggagugcuccuguuauccucgauauccuggugucagaugugucugcagagacaacuggaaaggcuccaauaggcccaucguagauauaaauguaaaggauuauagcauuguuuccaguuaugugugcucaggacuuguuggagacacacccagaaaaaacgacagcuccagcaguagccauugcuuggauccuaacaaugaggaagguggucauggagugaaaggcugggccuuugaugauggaaaugacguguggaugggaagaacgaucagcgagaaguuacgcucaggauaugaaaccuucaaagucauugaaggcugguccaaaccuaacuccaaauugcagauaaauaggcaagucauaguugacagagguaauagguccgguuauucugguauuuucucuguugaaggcaaaagcugcaucaaucggugcuuuuauguggaguugauaaggggaaggaaacaggaaacugaagucuuguggaccucaaacaguauuguuguguuuuguggcaccucagguacauauggaacaggcucauggccugauggggcggacaucaaucucaugccuauauaa

SEQ ID NO: 46208 - RNA, 1410 nt, Artificial Sequence; identical to SEQ ID NO: 46181
  derived and/or modified CDS sequence (wt) from neuraminidase__InfluenzaA__AAX57867

SEQ ID NO: 46209 - RNA, 1410 nt, Artificial Sequence
  derived and/or modified CDS sequence (wt) from neuraminidase__InfluenzaA__AAX57877
augaauccaaaucaaaagauaauaacgauuggcucuguuucucucaccauugcuacaauaugcuuccuuaugcaaauugccauccugguaacuacuguaacauugcauuucaagcaauaugaaugcaacucccccccaaacaaccaagugaugcugugugaaccaacaauaauagaaagaaacauaacagagauaguauaucugaccaacaccaccauagagaaggaaauaugccccaaacuagcagaauacagaaauuggucaaagccgcaauguaacauuacaggauuugcaccuuuuucuaaggacaauucgauucggcuuuccgcugguggggacaucugggugacaagagaaccuuaugugucaugcgauccugacaaguguuaucaauuugcccuuggacaaggaacaacacuaaacaacgggcauucaaaugacacaguacaugauaggaccccuuaucgaacccuauugaugaaugaguuggguguuccauuucauuugggaaccaaacaagugugcauagcaugguccagcucaaguugucacgauggaaaagcauggcugcauguuuguguaacgggggaugaugaaaaugcaacugcuagcuucauuuacaaugggaggcuuguagauaguauugguucaugguccaaaaaaauccucaggacccaggagucggaaugcguuuguaucaauggaacuuguacaguaguaaugacugaugggagugcuucaggaaaagcugauacuaaaauacuauucauugaggaggggaaaaucguucauacuagcucauugucaggaagugcucagcaugucgaggagugcuccuguuauccucgauauccuggugucagaugugucugcagagacaacuggaaaggcuccaauaggcccaucguagauauaaauguaaaggauuauagcauuguuuccaguuaugugugcucaggacuuguuggagacacacccagaaaaaacgacagcuccagcaguagccauugcuuggauccuaacaaugaggaagguggucauggagugaaaggcugggccuuugaugauggaaaugacguguggaugggaagaacgaucagcgagaaguuacgcucaggauaugaaaccuucaaagucauugaaggcugguccaaaccuaacuccaaauugcagauaaauaggcaagucauaguugacagagguaauagguccgguuauucugguauuuucucuguugaaggcaaaagcugcaucaaucggugcuuuuauguggaguugauaaggggaaggaaacaggaaacugaagucuuguggaccucaaacaguauuguuguguuuuguggcaccucagguacauauggaacaggcucauggccugauggggcggacaucaaucucaugcauauauaa

SEQ ID NO: 46210 - RNA, 1410 nt, Artificial Sequence
  derived and/or modified CDS sequence (wt) from neuraminidase__InfluenzaA__AAX57887
augaauccaaaucaaaagauaauaacgauuggcucuguuucucucaccauugccacaauaugcuuccuuaugcaaauugccauccugguaacuacuguaacauugcauuucaagcaauaugaaugcaacucccccccaaacaaccaagugaugcugugugaaccaacaauaauagaaagaaacauaacagagauaguguaucugaccaacaccaccauagagaaggaaauaugccccaaacuagcagaauacagaaauuggucaaagccgcaauguaacauuacaggauuugcaccuuuuucuaaggacaauucgauucggcuuuccgcugguggggacaucugggugacaagagaaccuuaugugucaugcgauccugacaaguguuaucaauuugcccuuggacagggaacaacacuaaacaacggacauucaaaugacacaguacaugauaggaccccuuaucggacccuauugaugaaugaguuggguguuccauuucauuugggaaccaagcaagugugcauagcaugguccagcucaaguugucacgauggaaaagcauggcugcauguuuguguaacgggggaugaugaaaaugcaacugcuagcuucauuuacaaugggaggcuuguagauaguauugguucaugguccaaaaaaauccucaggacccaggagucggaaugcguuuguaucaauggaacuuguacaguaguaaugacugaugggagugcuucaggaaaagcugauacuaaaauacuauucauugaggaggggaaaaucguucauacuagccuauugucaggaagugcucagcaugucgaggagugcuccuguuauccucgauacccuggugucagaugugucugcagagacaacuggaaaggcuccaauaggcccaucguagauauaaauguaaaggauuauagcaucguuuccaguuaugugugcucaggacuuguuggagacacacccagaaaaaacgacagcuccagcaguagccauugcuuggauccuaacaaugaggaagguggucauggagugaaaggcugggccuuugaugauggaaaugacguguggaugggaagaacgaucagcgagaaguuacgcucaggauaugaaaccuucaaagucauugaaggcugguccaaaccuaacuccaaauugcagauaaauaggcaagucauaguugacagagguaauagguccgguuauucugguauuuucucuguugaaggcaaaagcugcaucaaucggugcuuuuauguggaauugauaaggggaaggaaacaggaaacugaagucuuguggaccucaaacaguauuguuguguuuuguggcaccucagguacauauggaacaggcucauggccugauggggcggacaucaaucucaugccuauauaa

SEQ ID NO: 46211 - RNA, 1410 nt, Artificial Sequence
  derived and/or modified CDS sequence (wt) from neuraminidase__InfluenzaA__AAX57897
augaauccaaaucaaaagauaauaacgauuggcucuguuucucucaccauugccacaauaugcuuccuuaugcaaauugccauccugguaacuacuguaacauugcauuucaagcaauaugaaugcaacucccccccaaacaaccaagugaugcugugugaaccaacaauaauagaaagaaacauaacagagauaguauaucugaccaacaccaccauagagaaggaaauaugccccaaacuagcagaauacagaaauuggucaaagccgcaauguaacauuacaggauuugcaccuuuuucuaaggacaauucgauucggcuuuccgcugguggggacaucugggugacaagagaaccuuaugugucaugcgauccugacaaguguuaucaauuugcccuuggacagggaacaacacuaaacaacgggcauucaaaugacacaguacaugauagaaccccuuaucgaacccuauugaugaaugaguuggguguuccauuucauuugggaaccaagcaagugugcauagcaugguccagcucaaguugucacgauggaaaagcauggcugcauguuuguguaacgggggaugaugaaaaugcaacugcuagcuucauuuacaaugggaggcuuguagauaguauugguucaugguccaaaaaaauccucaggacccaggagucggaaugcguuuguaucaauggaacuuguacaguaguaaugacugaugggagugcuucaggaaaagcugauacuaaaauacuauucauugaggaggggaaaaucguucauacuagcucauugucaggaagugcucagcauguugaggagugcuccuguuauccucgauauccuggugucagaugugucugcagagacaacuggaaaggcuccaauaggcccaucguagauauaaauguaaaggauuauagcauuguuuccaguuaugugugcucaggacuuguuggagacacacccagaaaaaacgacagcuccagcaguagccauugcuuggauccuaacaaugaggaagguggucauggagugaaaggcugggccuuugauaguggaaaugacguguggaugggaagaacgaucagcgagaaguuacgcucaggauaugaaaccuucaaagucauugaaggcugguccaaaccuaacuccaaauugcagauaaauaggcaagucauaguugacagagguaauagguccgguuauucugguauuuucucuguugaaggcaaaagcugcaucaaucggugcuuuuauguggaguugauaaggggaaggaaacaggaaacugaagucuuguggaccucaaacaguauuguuguguuuuguggcaccucagguacauauggaacaggcucauggccugauggggcggacaucaaucucaugccuauauaa

SEQ ID NO: 46212 - RNA, 1410 nt, Artificial Sequence
  derived and/or modified CDS sequence (wt) from neuraminidase__InfluenzaA__AAX57907
augaauccaaaucaaaagauaauaacgauuggcucuguuucucucaccauugccacaauaugcuuccuuaugcaaauugccauccugguaacuacuguaacauugcauuucaagcaauaugaaugcaacucccccccaaacaaccaagugaugcugugugaaccaacaauaauagaaagaaacauaacagagauaguguaucugaccaacaccaccauagagaaggaaauaugccccaaacuagcagaauacagaaauuggucaaagccgcaauguaacauuacaggauuugcaccuuuuucuaaggacaauucgauucggcuuuccgcugguggggacaucugggugacaagagaaccuuaugugucaugcgauccugacaaguguuaucaauuugcccuuggacagggaacaacacuaaacaacgggcauucaaaugacacaguacaugauaggaccccuuaucgaacccuauugaugaaugaguuggguguuccauuucauuugggaaccaagcaagugugcauagcaugguccagcucaaguugucacgauggaaaagcauggcugcauguuuguguaacgggggaugaugaaaaugcaacugcuagcuucauuuacaaugggaggcuuguagauaguauugguucaugguccaaaaaaauccucaggacccaggagucggaaugcguuuguaucaauggaacuuguacaguaguaaugacugaugggagugcuucaggaaaagcugauacuaaaauacuauucauugaggaggggaaaaucguucauacuagcucauugucaggaagugcucagcaugucgaggagugcuccuguuauccucgauauccuggugucagaugugucugcagagacaacuggaaaggcuccaauaggcccaucguagauauaaauguaaaggauuauagcauuguuuccaguuaugugugcucaggacuuguuggagacacacccagaaaaaacgacagcuccagcaguagccauugcuuggauccuaacaaugaggaagguggucauggagugaaaggcugggccuuugaugauggaaaugacguguggaugggaagaacgaucagcgagaaguuacgcucaggauaugaaaccuucaaagucauugaaggcugguccaaaccuaacuccaaauugcagaugaauaggcaagucauaguugacagagguaauagguccgguuauucugguauuuucucuguugaaggcaaaagcugcaucaaucggugcuuuuauguggaguugauaaggggaaggaaacaggaaacugaagucuuguggaccucaaacaguauuguuguguuuuguggcaccucagguacauauggaacaggcucauggccugauggggcggacaucaaucucaugccuauauaa

SEQ ID NO: 46213 - RNA, 1410 nt, Artificial Sequence; identical to SEQ ID NO: 46181
  derived and/or modified CDS sequence (wt) from neuraminidase__InfluenzaA__AAX57917

SEQ ID NO: 46214 - RNA, 1410 nt, Artificial Sequence; identical to SEQ ID NO: 46181
  derived and/or modified CDS sequence (wt) from neuraminidase__InfluenzaA__AAX57927

SEQ ID NO: 46215 - RNA, 1410 nt, Artificial Sequence
  derived and/or modified CDS sequence (wt) from neuraminidase__InfluenzaA__AAX57937
augaauccaaaucaaaagauaauaacgauuggcucuguuucucucaccauugccacaauaugcuuccuuaugcaaauugccauccugguaacuacuguaacauugcauuucaagcaauaugaaugcaacucccccccaaacaaccaagugaugcugugugaaccaacaauaauagaaagaaacauaacagagaugguguaucugaccaacaccaccauagagaaggaaauaugccccaaacuagcagaauacagaaauuggucaaagccgcaauguaacauuacaggauuugcaccuuuuucuaaggacaauucgauucggcuuuccgcugguggggacaucugggugacaagagaaccuuaugugucaugcgauccugacaaguguuaucaauuugcccuuggacagggaacaacacuaaacaacggacauucaaaugacacaguacaugauaggaccccuuaucggacccuauugaugaaugaguuggguguuccauuucauuugggaaccaagcaagugugcauagcaugguccagcucaaguugucacgauggaaaagcauggcugcauguuuguguaacgggggaugaugaaaaugcaacugcuagcuucauuuacaaugggaggcuuguagauaguauugguucaugguccaaaaaaauccucaggacccaggagucggaaugcguuuguaucaauggaacuuguacaguaguaaugacugaugggagugcuucaggaaaagcugauacuaaaauacuauucauugaggaggggaaaaucguucauacuagccuauugucaggaagugcucagcaugucgaggagugcuccuguuauccucgauacccuggugucagaugugucugcagagacaacuggaaaggcuccaauaggcccaucguagauauaaauguaaaggauuauagcauuguuuccaguuaugugugcucaggacuuguuggagacacacccagaaaaaacgacagcuccagcaguagccauugcuuggauccuaacaaugaggaagguggucauggagugaaaggcugggccuuugaugauggaaaugacguguggaugggaagaacgaucagcgagaaguuacgcucaggauaugaaaccuucaaagucauugaaggcugguccaaaccuaacuccaaauugcagauaaauaggcaagucauaguugacagagguaauagguccgguuauucugguauuuucucuguugaaggcaaaagcugcaucaaucggugcuuuuauguggaguugauaaggggaaggaaacaggaaacugaagucuuguggaccucaaacaguauuguuguguuuuguggcaccucagguacauauggaacaggcucauggccugauggggcggacaucaaucucaugcguauauaa

SEQ ID NO: 46216 - RNA, 1410 nt, Artificial Sequence
  derived and/or modified CDS sequence (wt) from neuraminidase__InfluenzaA__AAX57947
augaauccaaaucaaaagauaauaacaauuggcucuguuucucucaccauugccacaauaugcuuccuuaugcaaauugccauccugguaacuacuguaacauugcauuucaagcaguaugaaugcaacucccccccaaacaaccaaguaaugcugugugaaccaacaauaauagaaagaaacauaacagagauaguguaucugaccaauaccaccauagagaaggaaauaugccccaaauuagcagaauacagaaauuggucaaagccgcaauguaacauuacaggauuugcaccuuuuucuaaggacaauucgauucggcuuuccgcugguggggacaucugggugacaagagaaccuuaugugucaugcgauccugacaaguguuaucaauuugcccuugggcagggaacaacacuaaacaacgggcauucaaaugacacaguacaugauaggaccccuuaccggacccuauugaugaaugaauuggguguuccauuucauuugggaaccaggcaagugugcauagcaugguccagcucaaguugucacgauggaaaagcauggcugcauguuuguguaacuggggaugaugaaaaugcaacugcuagcuucauuuacaaugggaggcuuguagauaguauugguucaugguccagaaaaauacucagaacccaggagucggaaugcguuuguaucaauggaacuuguacaguaguaaugacugaugggagcgcuucaggaaaagcugauacuaaaauacuauucauugaggaggggaaaaucguucauauuagcacauugucaggaagugcucagcaugucgaggagugcuccuguuauccucgauauccuggugucagaugugucugcagagacaacuggaaaggcuccaauaggcccaucguagauauaaauguaaaggauuauagcauugcuuccaguuauaugugcucaggacuuguuggagacacacccagaaaaaacgacagcuucagcaguagccauugccuagauccuaacaaugaggaagguggucauggagugaaaggcugggccuuugaugauggaaaugacguguggaugggaagaacgaucagcgagaaguuacgcucagguuaugaaaccuucaaagucaucgaaggcugguccaaaccuaacuccaaauuacagauaaauaggcaagucauaguugaaagagguaacagguccgguuauucugguauuuucuccguugaaggcaaaagcugcaucaaucggugcuuuuauguggaguugauaaggggaaggaaagaggaaacugaagucugguggaccucaaacaguauuguuguguuuuguggcaccucagguacauauggaacaggcucauggccugauggggcggauaucaaucucaugccuauauaa

SEQ ID NO: 46217 - RNA, 1410 nt, Artificial Sequence
  derived and/or modified CDS sequence (wt) from neuraminidase__InfluenzaA__AAX76626
augaauccaaaucaaaagauaauaacaauuggcucuguuucucucaccauugccacaauaugcuuccuuaugcaaauugccaucuugguaacuacuguaacauugcauuucaagcagcaugaaugcaacucccccccaaacaaccaaguaaugcugugugaaccaacaauaauagaaagaaacauaacagagauaguguaucugaccaacaccaccauagagaaggaaauaugccccaaacuagcagaauacagaaauuggucaaagccgcaauguaacauuacaggauuugcaccuuuuucuaaggacaauucgauucggcuuuccgcugguggggacaucugggugacaagagaaccuuaugugucaugcgauccugacaaguguuaucaauuugcccuugggcagggaacaacacuaaacaacgggcauucaaaugacacaguacaugauaggaccccuuaccggacccuauugaugaaugaauuggguguuccauuucauuugggaaccaggcaagugugcauagcaugguccagcucaaguugucacgauggaaaagcauggcugcauguuuguguaacuggggaugauaaaaaugcaacugcuagcuucauuuacaaugggaggcuuguagauaguauugguucaugguccaaaaaaauacucagaacccaggagucggaaugcguuuguaucaauggaacuuguacaguaguaaugacugaugggagcgcuucaggaaaagcugauacuaaaauacuauucauugaggaggggaaaaucguucauauuagcacauugucaggaagugcucagcaugucgaggagugcuccuguuauccucgauauccuggugucagaugugucugcagagacaacuggaaaggcuccaauaggcccauuguagauauaaauguaaaggauuauagcauuguuuccaguuaugugugcucaggacuuguuggagacacacccagaaaaaacgacagcuucagcaguagccauugccuagauccuaacaaugaggaagguggucauggagugaaaggcugggccuuugaugauggaaaugacguguggaugggaagaacgaucagcgagaaguuacgcucagguuaugaaaccuucaaagucaucgaaggcugguccaaaccuaacuccaaauuacagauaaauaggcaaguuauaguugaaagagguaacagguccgguuauucuggcauuuucuccguugaaggcaaaagcugcaucaaucggugcuuuuauguggaguugauaaggggaaggaaagaggaaacugaagucugguggaccucaaacaguauuguuguguuuuguggcaccucagguacauauggaacaggcucauggccugauggggcggacaucaaucucaugccuauauaa

SEQ ID NO: 46218 - RNA, 1410 nt, Artificial Sequence
  derived and/or modified CDS sequence (wt) from neuraminidase__InfluenzaA__AAX76646
augaauccaaaucaaaagauaauaacaauuggcucuguuucucucaccauugccacaauaugcuuccuuaugcaaauugccauccugguaacuacuguaacauugcauuucaagcagcaugaaugcaacucccccccaaacaaccaaguaaugcugugugaaccaacaauaauagaaagaaacauaacagagauaguguaucugaccaacaccaccauagagaaggaaauaugccccaaacuagcagaauacagaaauuggucaaagccgcaauguaacauuacaggauuugcaccuuuuucuaaggacaauucgauucggcuuuccgcugguggggacaucugggugacaagagaaccuuaugugucaugcgauccugacaaguguuaucaauuugcccuugggcagggaacaacacuaaacaacgggcauucaaauaacacaguacaugauaggaccccuuaccggacccuauugaugaaugaauuggguguuccauuucauuugggaaccaggcaagugugcauagcaugguccagcucagguugucacgauggaaaagcauggcugcauguuuguguaacuggggaugauaaaaaugcaacugcuagcuucauuuacaaugggaggcuuguagauaguauugguucaugguccaaaaaaauacucagaacccaggagucggaaugcguuuguaucaauggaacuuguacaguaguaaugacugaugggagcgcuucaggaaaagcugauacuaaaauacuauucauugaggaggggaaaaucguucauauuagcacauugucaggaagugcucagcaugucgaggagugcuccuguuauccucgauauccuggugucagaugugucugcagagacaacuggaaaggcuccaauaggcccauuguagauauaaauguaaaggauuauagcauuguuuccaguuaugugugcucaggacuuguuggagacacacccagaaaaaacgacagcuucagcaguagccauugccuagauccuaacaaugaggaagguggucauggagugaaaggcugggccuuugaugauggaaaugacguguggaugggaagaacgaucagcgagaaguuacgcucagguuaugaaaccuucaaagucaucgaaggcugguccaaaccuaacuccaaauuacagauaaauaggcaaguuauaguugaaagagguaacagguccgguuauucugguauuuucuccguugaaggcaaaagcugcaucaaucggugcuuuuauguggaguugauaaggggaaggaaagaggaaacugaagucugguggaccucaaacaguauuguuguguuuuguggcaccucagguacauauggaacaggcucauggccugauggggcggauaucaaucucaugccuauauaa

SEQ ID NO: 46219 - RNA, 1410 nt, Artificial Sequence; identical to SEQ ID NO: 46152
  derived and/or modified CDS sequence (wt) from neuraminidase__InfluenzaA__AAX76656

SEQ ID NO: 46220 - RNA, 1410 nt, Artificial Sequence; identical to SEQ ID NO: 46192
  derived and/or modified CDS sequence (wt) from neuraminidase__InfluenzaA__AAX76666

SEQ ID NO: 46221 - RNA, 1410 nt, Artificial Sequence; identical to SEQ ID NO: 46181
  derived and/or modified CDS sequence (wt) from neuraminidase__InfluenzaA__AAX76696

SEQ ID NO: 46222 - RNA, 1410 nt, Artificial Sequence
  derived and/or modified CDS sequence (wt) from neuraminidase__InfluenzaA__AAX76736
augaauccaaaucaaaagauaauaacaauuggcucuguuucucucaccauugccacaauaugcuuccuuaugcaaauugccauccugguaacuacuguaacauugcauuucaagcaguaugaaugcaacucccccccaaacaaccaaguaaugcugugugaaccaacaauaauagaaagaaacauaacagagauaguguaucugaccaacaccaccauagagaaggaaauaugccccaaacuaucagaauacagaaauuggucaaagccgcaauguaacaucacaggauuugcaccuuuuucuaaggacaauucgauucggcuuuccgcugguggggacaucugggugacaagagaaccuuaugugucaugcgauccugacaaguguuaucaauuugcccuuggacagggaacaacacuaaacaacgggcauucaaaugacacaguacaugauaggaccccuuaccggacccuauugaugaaugaguuggguguuccauuucauuugggaaccaagcaagugugcauagcaugguccagcucaaguugucacgauggaaaagcauggcugcauguuuguguaacuggggaugaugaaaaugcaacugcuagcuucauuuauaaugggaggcuuguagauaguauugguucaugguccaaaaaaauacucaggacccaggagucggaaugcguuuguaucaauggaacuuguacaguaguaaugacugaugggagugcuucaggaaaagcugauacuaaaauacuauucauugaggaggggaaaaucguucauauuagcacauugucaagaagugcucagcaugucgaggagugcuccuguuauccucgauauccuggugucagaugugucugcagggacaacuggaaaggcuccaauaggcccaucguagauauaaauguaaaggaccauagcauuguuuccaguuaugugugcucaggacuuguuggagacacacccagaaaaaaugacagcuucagcaguagccauugccuagauccuaacaaugaggaagguggucauggagugaaaggcugggccuuugaugauggaaaugacguguggaugggaagaacgaucagcgagaaguuacgcucagguuaugaaaccuucaaagucaucgaaggcugguccaaaccuaacuccaaauugcagauaaauaggcaagucauaguugaaagagguaacagguccgguuauucugguauuuucuccguugaaggcaaaagcugcaucaaucggugcuuuuauguggaguugauaaggggaaggaaagaggaaacugaagucugguggaccucaaacaguauuguuguguuuuguggcaccucagguacauauggaacaggcucauggccugauggggcggauaucaaucucaugccuauauaa

SEQ ID NO: 46223 - RNA, 1410 nt, Artificial Sequence
  derived and/or modified CDS sequence (wt) from neuraminidase__InfluenzaA__AAX76766
augaauccaaaucaaaagauaauaacaauuggcucuguuucucucaccauugccacaauaugcuuccuuaugcaaauugccaucuugguaacuacuguaacauugcauuucaagcagcaugaaugcaacucccccccaaacaaccaaguaaugcugugugaaccaacaauaauagaaagaaacauaacagagauaguguaucugaccaacaccaccauagagaaggaaauaugccccaaacuagcagaauacagaaauuggucaaagccgcaauguaacauuacaggauuugcaccuuuuucuaaggacaauucgauucggcuuuccguugguggggacaucugggugacaagagaaccuuaugugucaugcgauccugacaaguguuaucaauuugcccuugggcagggaacaacacuaaacaacgggcauucaaaugacacaguacaugauaggaccccuuaccggacccuauugaugaaugaauuggguguuccauuucauuugggaaccaggcaagugugcauagcaugguccagcucaaguugucacgauggaaaagcauggcugcauguuuguguaacuggggaugauaaaaaugcaacugcuagcuucauuuacaaugggaggcuuguagauaguauugguucaugguccaaaaaaauacucagaacccaggagucggaaugcguuuguaucaauggaacuuguacaguaguaaugacugaugggagcgcuucaggaaaagcugauacuaaaauacuauucauugaggaggggaaaaucguucauauuagcacauugucaggaagugcucagcaugucgaggagugcuccuguuauccucgauauccuggugucagaugugucugcagagacaacuggaaaggcuccaauaggcccauuguagauauaaauguaaaggauuauagcauuguuuccaguuaugugugcucaggacuuguuggagacacacccagaaaaaacgacagcuucagcaguagccauugccuagauccuaacaaugaggaagguggucauggagugaaaggcugggccuuugaugauggaaaugacguguggaugggaagaacgaucagcgagaaguuacgcucagguuaugaaaccuucaaagucaucgaaggcugguccaaaccuaacuccaaauuacagauaaauaggcaaguuauaguugaaagagguaacagguccgguuauucuggcauuuucuccguugaaggcaaaagcugcaucaaucggugcuuuuauguggaguugauaaggggaaggaaagaggaaacugaaguuugguggaccucaaacaguauuguuguguuuuguggcaccucagguacauauggaacaggcucauggccugauggggcggacaucaaucucaugccuauauaa

SEQ ID NO: 46224 - RNA, 1410 nt, Artificial Sequence; identical to SEQ ID NO: 46149
  derived and/or modified CDS sequence (wt) from neuraminidase__InfluenzaA__AAY18089

SEQ ID NO: 46225 - RNA, 1410 nt, Artificial Sequence
  derived and/or modified CDS sequence (wt) from neuraminidase__InfluenzaA__AAY18099
augaauccaaaucaaaagauaauaacaauuggcucuguuucucucaccauugccacaauaugcuuccuuaugcaaauugccauccugguaacuacuguaacauugcauuucaagcagcaugaaugcaacucccccccaaacaaccaaguaaugcugugugaaccaacaauaauagaaagaaacauaacagagauaguguaucugaccaacaccacuauagagaaggaaauaugccccaaacuagcagaauacagaaauuggucaaagccgcaauguaacauuacaggauuugcaccuuuuucuaaggacaauucgauucggcuuuccgcugguggggacaucugggugacaagagaaccuuaugugucaugcgauccugacaaguguuaucaauuugcccuugggcagggaacaacacuaaacaacgggcauucaaauaacacaguacaugauaggaccccuuaccggacccuauugaugaaugaauuggguguuccauuucauuugggaaccaggcaagugugcauagcaugguccagcucaaguugucacgauggaaaagcauggcugcauguuuguguaacuggggaugauaaaaaugcaacugcuagcuucauuuacaaugggaggcuuguagauaguauugguucaugguccaaaaaaauacucagaacccaggagucggaaugcguuuguaucaauggaacuuguacaguaguaaugacugaugggagcgcuucaggaaaagcugauacuaaaauacuauucguugaggaggggaaaaucguucauauuagcacauugucaggaagugcucagcaugucgaggagugcuccuguuauccucgauauccuggugucagaugugucugcagagacaacuggaaaggcuccaauaggcccauuguagauauaaauguaaaggauuauagcauuguuuccaguuaugugugcucaggacuuguuggagacacacccagaaaaaacgacagcuucagcaguagccauugccuagauccuaacaaugaggaagguggucauggagugaaaggcugggccuuugaugauggaaaugacguguggaugggaagaacgaucagcgagaaguuacgcucagguuaugaaaccuucaaagucaucgaaggcugguccaaaccuaacuccaaauuacagauaaauaggcaaguuauaguugaaagagguaacagguccgguuauucugguauuuucuccguugaaggcaaaagcugcaucaaucggugcuuuuauguggaguugauaaggggaaggaaagaggaaacugaagucugguggaccucaaacaguauuguuguguuuuguggcaccucagguacauauggaacaggcucauggccugauggagcggauaucaaucucaugccuauauaa

SEQ ID NO: 46226 - RNA, 1410 nt, Artificial Sequence
  derived and/or modified CDS sequence (wt) from neuraminidase__InfluenzaA__AAY18109
augaauccaaaucaaaagauaauaacaauuggcucuguuucucucaccauugccacaauaugcuuccuuaugcaaauugccauccugguaacuacuuuaacauugcauuucaagcaguaugaaugcaacucccccccaaacaaccaaguaaugcugugugaaccagcaauaauagaaagaaacauaacagagauaguguaucugaccaacaccaccauagagaaggaaaaaugccccaaauuagcagaauacagaaauuggucaaagccgcaauguaacauuacaggauuugcaccuuuuuccaaggacaauucgauucggcuuuccgcugguggggacaucugggugacaagagaaccuuaugugucaugcgauccugacaaguguuaucaauuugcccuuggacagggaacaacacuaaacaacgggcauucaaaugacacaguacaugauaggaccccuuaccggacccuauugaugaaugaauuggguguuccauuucauuugggaaccaggcaagugugcauagcaugguccagcucaaguugucacgauggaaaagcauggcugcauguuuguguaacuggggaugaugaaaaugcaacugcuagcuucauuuacaaugggaggcuuguagauaguauugguucaugguccaaaaaaauacucagaacccaggagucggaaugcguuuguaucaauggaacuuguacaguaguaaugacugaugggagcgcuucaggaaaagcugauacuaaaauacuauucauugaggaggggaaaaucguuaauauuagcacauugucaggaagugcucagcaugucgaggagugcuccuguuauccucgauauccuggugucagaugugucugcagagacaacuggaaaggcuccaauaggcccaucguagauauaaauguaaaggauuauagcauuguuuccaguuaugugugcucaggacuuguuggagacacacccagaaaaaacgacagcuucagcaguagccauugccuagauccuaacaaugaggaagguggucauggagugaaaggcugggccuuugaugauggaaaugacguguggaugggaagaacgaucagcgagaaguuacgcucagguuaugaaaccuucaaagucaucgaaggcugguccaaaccuaacuccaaauuacagauaaauaggcaagucauaguugaaagagguaacagguccgguuauucugguauuuucuccguugaaggcaaaagcugcaucaaucggugcuuuuauguggaguugauaaggggaaggaaagaggaaacugaaguuugguggaccucaaacaguauuguuguguuuuguggcacuucagguacauauggaacaggcucauggccugauggggcagauaucaaucucaugccuauauaa

SEQ ID NO: 46227 - RNA, 1410 nt, Artificial Sequence; identical to SEQ ID NO: 46185
  derived and/or modified CDS sequence (wt) from neuraminidase__InfluenzaA__AAY18119

SEQ ID NO: 46228 - RNA, 1410 nt, Artificial Sequence
  derived and/or modified CDS sequence (wt) from neuraminidase__InfluenzaA__AAY18129
augaauccaaaucaaaagauaauaacaauuggcucuguuucucucaccauugccacaauaugcuuccuuaugcaaauuaccauccugguaacuacuguaacauugcauuucaagcaguaugaaugcaacucccccccaaacaaccaaguaaugcugugugaaccaacaauaauagaaagaaacauaacagagauaguguaucugaccaauaccacuauagaaaaggaaauaugccccaaauuagcagaauacagaaauuggucaaagccgcaauguaacauuacaggauuugcaccuuuuucuaaggacaauucgauucggcuuuccgcugguggggacaucugggugacaagagagccuuaugugucaugcgauccugacaaguguuaucaauuugcccuugggcagggaacaacacuaaacaacgggcauucaaaugacacaguacaugauaggaccccuuaccggacccuauugaugaaugaauuggguguuccauuucauuugggaaccaggcaagugugcauagcaugguccagcucaaguugucacgauggaaaagcauggcugcauguuuguguaacuggggaugauaaaaaugcaacugcuaguuucauuuacaaugggaggcuuguagauaguauugguucaugguccaaaaaaauacucagaacccaggagucggaaugcguuuguaucaauggaacuuguacaguaguaaugacugaugggagcgcuucaggaaaagcugauacuaaaauacuauucauugaggaggggaaaaucauucauauuagcacauugucaggaagugcucagcaugucgaggagugcuccuguuauccucgauauccuggugucagauguguaugccgagacaacuggaaaggcuccaauaggcccaucguagauauaaauguaaaggauuauagcauuguuuccaguuaugugugcucaggccuuguuggagacacacccagaaaaaacgacagcuccagcaguagccauugccuagauccuaacaaugaggaagguggucauggagugaaaggcugggccuuugaugauggaaaugacguguggaugggaagaacgaucagcgagaaguuacgcucagguuaugaaaccuucaaagucaucgaaggcugguccaaaucuaacuccaaauuacagauaaauaggcaagucauaguugaaagagguaacagguccgguuauucugguauuuucuccguugaaggcaaaagcugcaucaaucggugcuuuuauguggaguugauaaggggaaggaaagaggaaacugaagucugguggaccucaaacaguauuguuguguuuuguggcaccucagguacauauggaacaggcucauggccugauggggcggauaucaaucucaugccuauauaa

SEQ ID NO: 46229 - RNA, 1410 nt, Artificial Sequence
  derived and/or modified CDS sequence (wt) from neuraminidase__InfluenzaA__AAY18139
augaauccaaaucaaaagauaauaacaauuggcucuguuucucucaccauugccacaauaugcuuccuuaugcaaauugccauccugguaacuacuguaacauugcauuucaagcagcaugaaugcaacucccccccaaacaaccaaguaaugcugugugaaccaacaauaauagaaagaaacauaacagagauaguguaucugaccaacaccaccauagagagggaaauaugccccaaacuagcagaauacagaaauuggucaaagccgcaauguaacauuacaggauuugcaccuuuuucuaaggacaauucgauucgacuuuccgcugguggugacaucugggugacaagagaaccuuaugugucaugcgauccugacaaguguuaucaauuugcccuugggcagggaacaacacuaaacaacaggcauucaaaugacacaguacaugauaggaccccuuaccggacccuauugaugaaugaauuggguguuccauuucauuugggaaccaggcaagugugcauagcaugguccagcucaaguugucacgauggaaaagcauggcugcauguuuguguaacuggggaugauaaaaaugcaacugcuagcuucauuuacaaugggaggcuuguagauaguauugguucaugguccaaaaaaauacucagaacccaggagucggaaugcguuuguaucaauggaacuuguacaguaguaaugacugaugggagcgcuucaggaaaagcugauacuaaaauacuauucauugaggaggggaaaaucguucauauuagcacauugucaggaagugcucagcaugucgaggaguguuccuguuauccucgauauccuggugucagaugugucugcagagacaacuggaaaggcuccaauaggcccauuguagauauaaauguaaaggauuauagcauuguuuccaguuaugugugcucaggacuuguuggagacacacccagaaaaaacgacagcuccagcaguagccauugccuagauccuaacaaugaggaagguggucauggagugaaaggcugggccuuugaugauggaaaugacguguggaugggaagaacgaucagcgagaaguuacgcucagguuaugaaaccuucaaagucaucgaaggcugguccaaaccuaacuccaaauuacagauaaauaggcaaguuauaguugaaagagguaacagguccgguuauucugguauuuucuccguugaaggcaaaagcugcaucaaucggugcuuuuauguggaguugauaaggggaaggaaagaggaaacugaagucugguggaccucaaacaguauuguuguguuuuguggcaccucagguacauauggaacaggcucauggccugauggggcggacaucaaucucaugccuauauaa

SEQ ID NO: 46230 - RNA, 1410 nt, Artificial Sequence
  derived and/or modified CDS sequence (wt) from neuraminidase__InfluenzaA__AAY18149
augaauccaaaucaaaagauaauaacaauuggcucuguuucucucaccauugccacaauaugcuuccuuaugcaaauugccauccugguaacuacuguaacauugcauuucaagcagcaugaaugcaacucccccccaaacaaccaaguaaugcugugugaaccaacaauaauagaaagaaacauaacagagauaguguaucugaccaacaccaccauagagaaggaaauaugccccaaacuagcagaauacagaaauuggucaaagccgcaauguaacauuacaggauuugcaccuuuuucuaaggacaauucgauucggcuuuccgcugguggugacaucugggugacaagagaaccuuaugugucaugcgauccugacaaguguuaucaauuugcccuugggcagggaacaacacuaaacaacgggcauucaaaugacacaguacaugauaggaccccuuaccggacccuauugaugaaugaauuggguguuccauuucauuugggaaccaggcaagugugcauagcaugguccagcucaaguugucacgauggaaaagcauggcugcauguuuguguaacuggggaugauaaaaaugcaacugccagcuucauuuacaaugggaggcuuguagauaguauugguucaugguccaaaaaaauacucagaacccaggagucggaaugcguuuguaucaauggaacuuguacaguaguaaugacugaugggagcgcuucaggaaaagcugauacuaaaauacuauucauugaggaggggaaaaucguucauauuagcacauugucaggaagugcucagcaugucgaggaguguuccuguuauccucgauauccuggugucagaugugucugcagagacaacuggaagggcuccaauaggcccacuguagauauaaauguaaaggauuauagcauuguuuccaguuaugugugcucaggacuuguuggagacacacccagaaaaaacgacagcuccagcaguagccauugccuagauccuaacaaugaggaagguggucauggagugaaaggcugggccuuugaugauggaaaugacguguggaugggaagaacgaucagcgagaaguuacgcucagguuaugaaaccuucaaagucaucgaaggcugguccaaaccuaacuccaaauuacagauaaauaggcaaguuauaguugaaagagguaacagguccgguuauucugguauuuucuccguugaaggcaaaagcugcaucaaucggugcuuuuauguggaguugauaaggggaaggaaagaggaaacugaagucugguggaccucaaacaguauuguuguguuuuguggcaccucagguacauauggaacaggcucauggccugauggggcggacaucaaucucaugccuauauaa

SEQ ID NO: 46231 - RNA, 1410 nt, Artificial Sequence
  derived and/or modified CDS sequence (wt) from neuraminidase__InfluenzaA__AAY18159
augaauccaaaucaaaagauaauaacgauuggcucuguuucucucaucauugcuacaauaugcuuccuuaugcaaauugccauccugguaacuacuguaacauugcauuucaagcaauaugaaugcaacucccccccaaacaaccaagugaugcugugugaaccaacaauaauagaaagaaacauaacagagauaguauaucugaccaacaccaccauagagaaggaaauaugccccaaacuagcagaauacagaaauuggucaaagccgcaauguaacauuacaggauuugcaccuuuuucuaaggacaauucgauucggcuuuccgcugguggggacaucugggugacaagagaaccuuaugugucaugcgauccugacaaguguuaucaauuugcccuuggacaaggaacaacacuaaacaacgggcauucaaaugacacaguacaugauaggaccccuuaucgaacccuauugaugaaugaguuggguguuccauuucauuugggaaccaaacaagugugcauagcaugguccagcucaaguugucacgauggaaaagcauggcugcauguuuguguaacgggggaugaugaaaaugcaacugcuagcuucauuuacaaugggaggcuuguagauaguauugguucaugguccaaaaaaauccucaggacccaggagucggaaugcguuuguaucaauggaacuuguacaguaguaaugacugaugggagugcuucaggaaaagcugauacuaaaauacuauucauugaggaggggaaaaucguucauacuagcucauugucaggaagugcucagcaugucgaggagugcuccuguuauccucgauauccuggugucagaugugucugcagagacaacuggaaaggcuccaauaggcccaucguagauauaaauguaaaggauuauagcauuguuuccaguuaugugugcucaggacuuguuggagacacacccagaaaaaacgacagcuccagcaguagccauugcuuggauccuaacaaugaggaagguggucauggagugaaaggcugggccuuugaugauggaaaugacguguggaugggaagaacgaucagcgagaaguuacgcucaggauaugaaaccuucaaagucauugaaggcugguccaaaccuaacuccaaauugcagauaaauaggcaagucauaguugacagagguaauagguccgguuauucugguauuuucucuguugaaggcaaaaacugcaucaaucggugcuuuuauguggaguugauaaggggaaggaaacaggaaacugaagucuuguggaccucaaacaguauuguuguguuuuguggcaccucagguacauauggaacaggcucauggccugauggggcggacaucaaucucaugccuauauaa

SEQ ID NO: 46232 - RNA, 1410 nt, Artificial Sequence
  derived and/or modified CDS sequence (wt) from neuraminidase__InfluenzaA__AAY18179
augaauccaaaucaaaagauaauaacgauuggcucuguuucucucaccauugccacaauaugcuuccuuaugcaaauugccauccugguaacuacuguaacauugcauuucaagcaauaugaaugcaacucccccccaaacaaccaagugaugcugugugaaccaacaauaauagaaagaaacauaacagagauaguguaucugaccaacaccaccauagagaaggaaauaugccccaaacuagcagaauacagaaauuggucaaagccgcaauguaacauuacaggauuugcaccuuuuucuaaggacaauucgauucggcuuuccgcugguggggacaucugggugacaagagaaccuuaugugucaugcgauccugacaaguguuaucaauuugcccuuggacagggaacaacacuaaacaacggacauucaaaugacacaguacaugauaggaccccuuaucggacccuauugaugaaugaguuggguguuccauuucauuugggaaccaagcaagugugcauagcaugguccagcucaaguugucacgauggaaaagcauggcugcauguuuguguaacgggggaugaugaaaaugcaacugcuagcuucauuuacaaugggaggcuuguagauaguauugguucaugguccaaaaagauccucaggacccaggagucggaaugcguuuguaucaauggaacuuguacaguaguaaugacugaugggagugcuucaggaaaagcugauacuaaaauacuauucauugaggaggggaaaaucguucauacuagccuauugucaggaagugcucagcaugucgaggagugcuccuguuauccucgauacccuggugucagaugugucugcagagacaacuggaaaggcuccaauaggcccaucguagauauaaauguaaaggauuauagcauuguuuccaguuaugugugcucaggacuuguuggagacacacccagaaaaaacgacagcuccagcaguagccauugcuuggauccuaacaaugaggaagguggucauggagugaaaggcugggccuuugaugauggaaaugacguguggaugggaagaacgaucagcgagaaguuacgcucaggauaugaaaccuucaaagucauugaaggcugguccaaaccuaacuccaaauugcagauaaauaggcaagucauaguugacagagguaauagguccgguuauucugguauuuucucuguugaaggcaaaagcugcaucaaucggugcuuuuauguggaguugauaaggggaaggaaacaggaaacugaagucuuguggaccucaaacaguauuguuguguuuuguggcaccucagguacauauggaacaggcucauggccugauggggcggacaucaaucucaugccuauauaa

SEQ ID NO: 46233 - RNA, 1410 nt, Artificial Sequence
  derived and/or modified CDS sequence (wt) from neuraminidase__InfluenzaA__AAY18189
augaauccaaaucaaaagauaauaacgauuggcucuguuucucucaccauugccacaauaugcuuccuuaugcaaauugccauccugguaacuacuguaacauugcauuucaagcaauaugaaugcaacucccccccaaacaaccaagugaugcugugugaaccaacaauaauagaaagaaacauaacagagauaguguaucugaccaacaccaccauagagaaggaaauaugccccaaacuagcagaauacagaaauuggucaaagccgcaauguaacauuacaggauuugcaccuuuuucuaaggacaauucgauucggcuuuccgcugguggggacaucugggugacaagagaaccuuaugugucaugcgauccugacaaguguuaucaauuugcccuuggacagggaacaacacuaaacaacggacauucaaaugacacaguacaugauaggaccccuuaucggacccuauugaugaaugaguuggguguuccauuucauuugggaaccaagcaagugugcauagcaugguccagcucaaguugucacgauggaaaagcauggcugcauguuuguguaacgggggaugaugaaaaugcaacugcuagcuucauuuacaaugggaggcuuguagauaguauugguucaugguccaaaaaaauccucaggacccaggagucggaaugcguuuguaucaauggaacuuguacaguaguaaugacugaugggagugcuucaggaaaagcugauacuaaaauacuauucauugaggaggggaaaaucguucauacuagccuauugucaggaagugcucagcaugucgaggagugcuccuguuauccucgauacccuggugucagaugugucugcagagacaacuggaaaggcuccaauaggcccaucguagauauaaauguaaaggauuauagcauuguuuccaguuaugugugcucaggacuuguuggagacacacccagaaaaaacgacagcuccagcaguagccauugcuuggauccuaacaaugaggaagguggucauggagugaaaggcugggccuuugaugauggaaaugacguguggaugggaagaacgaucagcgagaaguuacgcucaggauaugaaaccuucaaagucauugaaggcugguccaaaccuaacuccaaauugcagauaaauaggcaagucauaguugacagagguaauagguccgguuauucugguauuuucucuguugaaggcaaaagcugcaucaaucggugcuuuuauguggaguugauaaggggaaggaaacaggaaacugaagucuuguggaccucaaacaguauuguuguguuuuguggcaccucagguacauauggaacaggcucauggccugauggggcggauaucaaucucaugccuauauaa

SEQ ID NO: 46234 - RNA, 1410 nt, Artificial Sequence
  derived and/or modified CDS sequence (wt) from neuraminidase__InfluenzaA__AAY18199
augaauccaaaucaaaagauaauaacgauuggcucuguuucccucaccauuuccacaauaugcuucuucaugcaaauugccauccugauaacuacuguaacauugcauuucaagcaauaugaauucaacucccccccaaacaaccaagugaugcugugugaaccaacaauaauagaaagaaacauaacagagauaguguaucugaccaacaccaccauagagaaggaaauaugccccaaacuagcagaauacagaaauuggucaaagccgcaauguaacauuacaggauuugcaccuuuuucuaaggacaauucgauucggcuuuccgcugguggggacaucugggugacaagagaaccuuaugugucaugcgauccugacaaguguuaucaauuugcccuuggacagggaacaacacuaaacaacgugcauucaaaugacacaguacaugauaggaccccuuaucggacccuauugaugaaugaguuggguguuccauuucaucuggggaccaagcaagugugcauagcaugguccagcucaaguugucacgauggaaaagcauggcugcauguuuguguaacgggggaugaugaaaaugcaacugcuagcuucauuuacaaugggaggcuuguagauaguauuguuucaugguccaaaaaaauccucaggacccaggagucagaaugcguuuguaucaauggaacuuguacaguaguaaugacugaugggagugcuucaggaaaagcugauacuaaaauacuauucauugaggaggggaaaauuguucauacuagcacauuaucaggaagugcucagcaugucgaggagugcuccuguuauccucgauauccuggugucagaugugucugcagagacaacuggaaaggcuccaauaggcccaucguagauauaaacauaaaggauuauagcauuguuuccaguuaugugugcucaggacuuguuggagacacacccagaaaaaacgacagcuccaguaguagccauugcuuggauccaaacaaugaggaagguggucagggagugaaaggcugggccuuugaugauggaaaugacguguggaugggaagaacgaucagcgagaaguuacacucaggauaugaaaccuucaaagucauugaaggcugguccaacccuaacuccaaauugcagauaaauaggcaagucauaguugacagagguaacagguccgguuauucugguauuuucucuguugaaggcaaaagcugcaucaaucggugcuuuuauguggaguugauaaggggaagaaaacaggaaacugaagucuuguggaccucaaacaguauuguuguguuuuguggcaccucagguacauauggaacaggcucauggccugauggggcggacaucaaucucaugccuauauaa

SEQ ID NO: 46235 - RNA, 1410 nt, Artificial Sequence; identical to SEQ ID NO: 46177
  derived and/or modified CDS sequence (wt) from neuraminidase__InfluenzaA__AAY18588

SEQ ID NO: 46236 - RNA, 1410 nt, Artificial Sequence; identical to SEQ ID NO: 46217
  derived and/or modified CDS sequence (wt) from neuraminidase__InfluenzaA__AAY18614

SEQ ID NO: 46237 - RNA, 1410 nt, Artificial Sequence
  derived and/or modified CDS sequence (wt) from neuraminidase__InfluenzaA__AAY27846
augaauccaaaucaaaagauaauaacaauuggcucuguuucucucaccauugccgcaauaugcuuccuuaugcaaauugccauccugguaacuacuguaacauugcauuucaagcagcaugaaugcaacucccccccaaacaaccaaguaaugcugugugaaccaacaauaauagaaagaaacauaacagagauaguguaucugaccaacaccaccauagagaaggaaauaugccccaaacuagcagaauacagaaauuggucaaagccgcaauguaacauuacaggauuugcaccuuuuucuaaggacaauucgauucggcuuuccgcugguggggacaucugggugacaagagaaccuuaugugucaugcgauccugacaaguguuaucaauuugcccuugggcagggaacaacacuaaacaacgggcauucaaaugacacaguacaugauaggaccccuuaccggacccuauugaugaaugaauuggguguuccauuucauuugggaaccaggcaagugugcauagcaugguccagcucaaguugucacgauggaaaagcguggcugcauguuuguguaacuggggaugauaaaaaugcaacugcuagcuucauuuacaaugggaggcuuguagauaguauugguucaugguccaaaaaaauacucagaacccaggagucagaaugcguuuguaucaauggaacuuguacagugguaaugacugauggaagcgcuucaggaaaagcugauacuaaaauacuauucauugaggaggggaaaaucguucauauuagcacauugucaggaagugcucagcaugucgaggagugcuccuguuauccucgauauccuggugucagaugugucugcagagacaacuggaaaggcuccaauaggcccauuguagauauaaauguaaaggauuauagcauuguuuccaguuaugugugcucaggacuuguuggagacacacccagaaaaaacgacagcuucagcaguagccauugccuagauccuaacaaugaggaagguggucauggagugaaaggcugggccuuugaugauggaaaugacguguggaugggaagaacgaucagcgagaaguuacgcucagguuaugaaaccuucaaagucaucgaaggcugguccaaaccuaacuccaaauuacagauaaauaggcaaguuauaguugaaagagguaacagguccgguuauucugguauuuucuccguugaaggcaaaagcugcaucaaucggugcuuuuauguggaguugauaaggggaaggaaagaggaaacugaagucugguggaccucaaacaguauuguuguguuuuguggcaccucagguacauauggaacaggcucauggccugauggggcggauaucaaucucaugccuauauaa

SEQ ID NO: 46238 - RNA, 1410 nt, Artificial Sequence
  derived and/or modified CDS sequence (wt) from neuraminidase__InfluenzaA__AAY27856
augaauccaaaucaaaagauaauaacaauuggcucuguuucucucaccauugccacaauaugcuuccuuaugcaaauugccauccugguaacuacuguaacauugcauuucaagcagcaugaaugcaacucccccccaaacaaccaaguaaugcugugugaaccaacaauaauagaaagaaacauaacagagauaguguaucugaccaacaccaccauagagaaggaaauaugccccaaacuagcagaauacagaaauuggucaaagccgcaauguaacauuacaggauuugcaccuuuuucuaaggacaauucgauucggcuuuccgcugguggugacaucugggugacaagagaaccuuaugugucaugcgauccuggcaaguguuaucaauuugcccuugggcagggaacaacacuaaacaacgggcauucaaaugacacaguacaugauaggaccccuuaccggacccuauugaugaaugaauuggguguuccauuucauuugggaaccaggcaagugugcauagcaugguccagcucgaguugucacgauggaaaagcauggcugcauguuuguguaacuggggaugauaaaaaugcaacugcuagcuucauuuacaaugggaggcuuguagauaguauugguucaugguccaaaaaaauacucagaacccaggagucggaaugcguuuguaucaauggaacuuguacaguaguaaugacugaugggagcgcuucaggaaaagcugauacuaaaauacuauucauugaggaggggaaaaucguucauauuagcacauugucaggaagugcucagcaugucgaggaguguuccuguuauccucgauauccuggugucagaugugucugcagagacaacuggaaaggcuccaauaggcccauuguagauauaaauguaaaggauuauagcauuguuuccaguuaugugugcucaggacuuguuggagacacacccagaaaaaacgacagcuccagcaguagccauugccuagauccuaacaaugaggaagguggucauggagugaaaggcugggccuuugaugauggaaaugacguguggaugggaagaacgaucagcgagaaguuacgcucagguuaugaaaccuucaaagucaucgaaggcugguccaaaccuaacuccaaauuacagauaaauaggcaaguuauaguugaaagagguaacagguccgguuauucugguauuuucuccguugaaggcaaaagcugcaucaaucggugcuuuuauguggaguugauaaggggaaggaaagaggaaacugaagucugguggaccucaaacaguauuguuguguuuuguggcaccucagguacauauggaacaggcucauggccugauggggcggacaucaaucucaugccuauauaa

SEQ ID NO: 46239 - RNA, 1410 nt, Artificial Sequence; identical to SEQ ID NO: 46149
  derived and/or modified CDS sequence (wt) from neuraminidase__InfluenzaA__AAY27866

SEQ ID NO: 46240 - RNA, 1410 nt, Artificial Sequence
  derived and/or modified CDS sequence (wt) from neuraminidase__InfluenzaA__AAY27962
augaauccaaaucaaaagauaauaacaauuggcucuguuucucucaccauugccacaauaugcuuccuuaugcaaauugccauccugguaacuacuguaacauugcauuucaagcaguaugaaugcaacucccccccaaacaaccaaguaaugcugugugaaccaacaauaauagaaagaaacauaacagagauaguguaucugaccaacaccaccauagagaaggaaauaugccccaaauuagcagaauacagaaauuggucaaagccgcaauguaacaucacaggauuugcaccuuuuucuaaggacaauucgauucggcuuuccgcugguggggacaucugggugacaagagaaccuuaugugucaugcgauccugacaaguguuaucaauuugcccuugggcagggaacaacacuaaacaacgggcauucaaaugacacaguacaugauaggaccccuuaccggacccuauugaugaaugaauuggguguuccauuucauuugggaaccaggcaagugugcauagcaugguccagcucaaguugucacgauggaaaagcauggcugcauguuuguguaacuggggaugaugaaaaugcaacugcuagcuucauuuacaaugggaggcuuguagauaguauugguucaugguccaaaaaaauacucagaacccaggagucggaaugcguuuguaucaauggaacuuguacaguaguaaugacugaugggagcgcuucaggaaaagcugauacuaaaauacuauucauugaggaggggaaaaucguucauauuagcacauugucaggaagugcucagcaugucgaggagugcuccuguuauccucgauauccuggugucagaugugucugcagagacaacuggaaaggcuccaauaggcccaucguagauauaaauguaaaggauuauagcauuguuuccaguuaugugugcucaggacuuguuggagacacacccagaaaaaacgacagcuucagcaguagccauugccuagauccuaacaaugaggaagguggucauggagugaaaggcugggccuuugaugauggaaauaacguguggaugggaagaacgaucagcgagaaguuacgcucagguuaugaaaccuucaaagucaucgaaggcugguccaaaccuaacuccaaauuacagacaaauaggcaagucauaguugaaagagguaacagguccgguuauucugguauuuucuccguugaaggcaaaagcugcaucaaucggugcuuuuauguggaguugauaaggggaaggaaagaggaaacugaagucugguggaccucaaacaguauuguuguguuuuguggcaccucagguacauauggaacaggcucauggccugauggggcggauaucaaucucaugccuauauaa

SEQ ID NO: 46241 - RNA, 1410 nt, Artificial Sequence
  derived and/or modified CDS sequence (wt) from neuraminidase__InfluenzaA__AAY27997
augaauccaaaucaaaagauaauaacaauuggcucuguuucucucaccauugccacaauaugcuuccuuaugcaaauugccauccugguaacuacuguaacauugcauuucaagcagcaugaaugcaacucccccccaaacaaccaaguaaugcugugugaaccaacaauaauagaaagaaacauaacagagauaguguaucugaccaacaccacuauagagaaggaaauaugccccaaacuagcagaauacagaaauuggucaaagccgcaauguaacauuacaggauuugcaccuuuuucuaaggacaauucgauucggcuuuccgcugguggggacaucugggugacaagagaaccuuaugugucaugcgauccugacaaguguuaucaauuugcccuugggcagggaacaacacuaaacaacgggcauucaaauaacacaguacaugauaggaccccuuaccggacccuauugaugaaugaaauggguguuccauuucauuugggaaccaggcaagugugcauagcaugguccagcucaaguugucacgauggaaaagcauggcugcauguuuguguaacuggggaugauaaaaaugcaacugcuagcuucauuuacaaugggaggcuuguagauaguauugguucaugguccaaaaaaauacucagaacccaggagucggaaugcguuuguaucaauggaacuuguacaguaguaaugacugaugggagcgcuucaggaaaagcugauacuaaaauacuauucauugaggaggggaaaaucguucauauuagcacauugucaggaagugcucagcaugucgaggagugcuccuguuauccucgauauccuggugucagaugugucugcagagacaacuggaaaggcuccaauaggcccauuguagauauaaauguaaaggauuauagcauuguuuccaguuaugugugcucaggacuuguuggagacacacccagaaaaaacgacagcuucagcaguagccauugccuagauccuaacaaugaggaagguggucauggagugaaaggcugggccuuugaugauggaaaugacguguggaugggaagaacgaucagcgagaaguuacgcucagguuaugaaaccuucaaagucaucgaaggcugguccaaaccuaacuccaaauuacagauaaauaggcaaguuauaguugaaagagguaacagguccgguuauucugguauuuucuccguugaaggcaaaagcugcaucaaucggugcuuuuauguggaguugauaaggggaaggaaagaggaaacugaagucugguggaccucaaacaguauuguuguguuuuguggcaccucagguacauauggaacaggcucauggccugauggggcggauaucaaucucaugccuauauaa

SEQ ID NO: 46242 - RNA, 1410 nt, Artificial Sequence; identical to SEQ ID NO: 46147
  derived and/or modified CDS sequence (wt) from neuraminidase__InfluenzaA__AAY28007

SEQ ID NO: 46243 - RNA, 1410 nt, Artificial Sequence
  derived and/or modified CDS sequence (wt) from neuraminidase__InfluenzaA__AAY28017
augaauccaaaucaaaagauaauaacaauuggcucuguuucccucaccauugccacaauaugcuuccuuaugcaaauugccauccugguaacuacuguaacauugcauuucaagcaguaugaaugcaacucccccccaaacaaccaaguaaugcugugugaaccaacaauaauagaaagaaacauaacagagauaguguaucugaccaacaccaccauagagaaggaaauaugccccaaacuagcagaauacagaaauuggucaaagccgcaauguaacauuacaggauuugcaccuuuuucuaaggacaauucgauucggcuuuccgcugguggggacaucugggugacaagagaaccuuaugugucaugcgauccugacaaguguuaucaauuugcccuugggcagggaacaacacuaaacaacgggcauucaaaugacacaguacaugauaggaccccuuaccggacccuauugaugaaugaauuggguguuccauuucauuugggaaccaggcaagugugcauagcaugguccagcucaaguugucacgauggaaaagcauggcugcauguuuguguaacuggggaugaugaaaaugcaacugcuagcuucauuuacaaugggaggcuuguagauaguauugguucaugguccaaaaaaauacucagaacccaggagucggaaugcguuuguaucaauggaacuuguacaguaguaaugacugaugggagcgcuucaggaaaagcugauacuaaaauacuauucauugaggaggggaaaaucguucauauuagcacauugucaggaagugcucagcaugucgaggagugcuccuguuauccucgauauccuggugucagaugugucugcagagacaacuggaaaggcuccaauaggcccaucguagauauaaauguaaaggaucauagcauuguuuccaguuaugugugcucaggacuuguuggagacacacccagaaaaaacgacagcuucagcaguagccauugccuagacccuaacaaugaggaagguggucauggagugaaaggcugggccuuugaugauggaaaugacguguggaugggaagaacgaucagcgagaaguuacgcucagguuaugaaaccuucaaagucaucgaaggcugguccaaaccuaacuccaaauuacagauaaauaggcaagucauaguugaaagagguaacagguccgguuauucugguauuuucuccguugaaggcaaaagcugcaucaaucggugcuuuuauguggaguugauaaggggaaggaaagaggaaacugaagucugguggaccucaaacaguauuguuguguuuuguggcaccucagguacauauggaacaggcucauggccugauggggcggauaucaaucucaugccuauauaa

SEQ ID NO: 46244 - RNA, 1410 nt, Artificial Sequence; identical to SEQ ID NO: 46147
  derived and/or modified CDS sequence (wt) from neuraminidase__InfluenzaA__AAY28268

SEQ ID NO: 46245 - RNA, 1410 nt, Artificial Sequence
  derived and/or modified CDS sequence (wt) from neuraminidase__InfluenzaA__AAY28278
augaauccaaaucaaaagauaauaacgauuggcucuguuucucucacuauugccacaauaugcuuccuuaugcaaauagccauccugguaacuacuguaacauugcauuucaagcaauaugaaugcaacucccccccaaacaaccaaguaaugcugugugaaccaacaauaauagaaagaaacauaacagagauaguguaucugaccaacaccaccauagagaaggaaauaugccccaaacuagcagaauauagaaauuggucaaagccgcaauguaaaauuacaggauuugcaccuuuuucuaaggacaauucaauucggcuuuccgcugguggggacauuugggugacaagagaaccuuaugugucaugcgauccugacaaguguuaucaauuugcccuuggacagggaacaacacuaaacaacaggcauucaaaugacacaguacaugauaggaccccuuaccgaacccuauugaugaaugaguuggguguuccauuucauuugggaaccaagcaaguaugcauagcaugguccagcucaaguugucacgauggaaaagcauggcugcauguuuguguaacugggcaugaugaaaaugcaacugcuagcuucauuuacgaugggagacuuguagauaguauugguucaugguccaaaaaaauccucaggacccaggagucggaaugcguuuguaucaauggaacuuguacaguaguaaugacugaugggagugcuucaggaagagcugauaccaaaauacuauucauugaggaggggaaaaucguucauacuagcaaauugucaggaagugcucagcaugucgaggagugcuccuguuauccucgauauccuggugucagaugugucugcagagacaacuggaaaggcuccaauaggcccaucguagauauaaauguaaaggauuauagcauuguuuccaguuaugugugcucaggacuuguuggagacacacccagaaaaaacgacagcuccagcaguagccauugccuggauccuaacaaugaagaagggggucauggagugaaaggcugggccuuugaugauggaaaugacguguggaugggaagaacgaucagcgagaagucacgcucagguuaugaaaccuucaaggucauugaaggcugguccaaacccaacuccaaauugcagauaaauaggcaagucauaguugaaagagguaauaggucugguuauucugguauuuucucuguugaaggcaaaagcugcaucaaucggugcuuuuauguggaguugauaaggggaaggaaaccggaaacugaagucugguggaccucaaacaguauuguuguguucuguggcaccucagguacauauggaacaggcucauggccugauggggcggacaucaaucucaugccuauauaa

SEQ ID NO: 46246 - RNA, 1410 nt, Artificial Sequence
  derived and/or modified CDS sequence (wt) from neuraminidase__InfluenzaA__AAY28288
augaauccaaaucaaaagauaauaacaauuggcucuguuucucucaccauugccacaauaugcuuccuuaugcaaauugccauccugguaacuacuguaacauugcauuucaagcaguaugaaugcaacucccccccaaacaaccaaguaaugcugugugaaccagcaauaauagaaagaaacauaacagagauaguguaucugaccaacaccaccauagagaaggaaauaugccccaaauuagcagaauacagaaauuggucaaagccgcaauguaacauuacaggauuugcaccuuuuuccaaggacaauucgauucggcuuuccgcugguggggacaucugggugacaagagaaccuuaugugucaugcgauccugacaaguguuaucaauuugcccuuggacagggaacaacacuaaacaacgggcauucaaaugacacaguacaugauaggaccccuuaccggacccuauugaugaaugaauuggguguuccauuucauuugggaaccaggcaagugugcauagcaugguccagcucaaguugucacgauggaaaagcauggcugcauguuuguguaacuggggaugaugaaaaugcaacugcuagcuucauuuacaaugggaggcuuguagauaguauugguucaugguccaaaaaaauacucagaacccaggagucggaaugcguuuguaucaauggaacuuguacaguaguaaugacugaugggagcgcuucaggaaaagcugauacuaaaauacuauucauugaggaggggaaaaucguuaauauuagcacauugucaggaagugcucagcaugucgaggagugcuccuguuauccucgauauccuggugucagaugugucugcagagacaacuggaaaggcuccaauaggcccaucguagauauaaauguaaaggauuauagcauuguuuccaguuaugugugcucaggacuuguuggagacacacccagaaaaaacgacagcuucagcaguagccauugccuagauccuaacaaugaggaagguggucauggagugaaaggcugggccuuugaugauggaaaugacguguggaugggaagaacgaucagcgagaaguuacgcucagguuaugaaaccuucaaagucaucgaaggcugguccaaaccuaacuccaaauuacagauaaauaggcaagucauaguugaaagagguaacagguccgguuauucugguauuuucuccguugaaggcaaaagcugcaucaaucggugcuuuuauguggaguugauaaggggaaggaaagaggaaacugaaguuugguggaccucaaacaguauuguuguguuuuguggcaccucagguacauauggaacaggcucauggccugauggggcggauaucaaucucaugccuauauaa

SEQ ID NO: 46247 - RNA, 1410 nt, Artificial Sequence
  derived and/or modified CDS sequence (wt) from neuraminidase__InfluenzaA__AAY28298
augaauccaaaucaaaagauaauaacaauuggcucuguuucucucaccauugccacaauaugcuuccuuaugcaaauugccauccugguaacuacuguaacauugcauuucaagcagcaugaaugcaacucccccccaaacaaccaaguaaugcugugugaaccaacaauaauagaaagaaacauaacagagauaguguaucugaccaacaccaccauagagaaggaaauaugccccaaacuagcagaauacagaaauuggucaaagccgcaauguaacauuacaggauuugcaccuuuuucuaaggacaauucgauucggcuuuccgcugguggugacaucugggugacaagagaaccuuaugugucaugcgauccugacaaguguuaucaauuugcccuugggcagggaacaacacuaaacaacgggcauucaaaugacacaguacaugauaggaccccuuaccggacccuauugaugaaugaauuggguguuccauuucauuugggaaccaggcaagugugcauagcaugguccagcucaaguugucacgauggaaaagcauggcugcauguuuguguaacuggggaugauaaaaaugcaacugcuagcuucauuuacaaugggaggcuuguagauaguauugguucaugguccaaaaaaauacucagaacccaggagucggaaugcguuuguaucaauggaacuuguacaguaguaaugacugaugggagcgcuucaggaaaagcugauacuaaaauacuauucauugaggaggggaaaaucguucauauuagcacauugucaggaagugcucagcaugucgaggaguguuccuguuauccucgauauccuggugucagaugugucugcagagacaacuggaaaggcuccaauaggcccauuguagauauaaauguaaaggauuauagcauuguuuccaguuaugugugcucaggacuuguuggagacacacccagaaaaaacgacagcuccagcaguagccauugccuagauccuaacaaugaggaagguggucauggagugaaaggcugggccuuugaugauggaaaugacguguggaugggaagaacgaucagcgagaaguuacgcucagguuaugaaaccuucaaagucaucgaaggcugguccagaccuaacuccaaauuacagauaaauaggcaaguuauaguugaaagagguaacagguccgguuauucugguauuuucuccguugaaggcaaaagcugcaucaaucggugcuuuuauguggaguugauaaggggaaggaaagaggaaacugaagucugguggaccucaaacaguauuguuguguuuuguggcaccucagguacauauggaacaggcucauggccugauggggcggacaucaaucucaugccuauauaa

SEQ ID NO: 46248 - RNA, 1410 nt, Artificial Sequence
  derived and/or modified CDS sequence (wt) from neuraminidase__InfluenzaA__AAY28308
augaauccaaaucaaaagauaauaacaauuggcucuguuucucucaccauugccacaauaugcuuccuuaugcaaauugccauccugguaacuacuguaacauugcauuucaagcaguaugaaugcaacucccccccaaacaaccaaguaaugcugugugaaccaacaauaauagaaagaaacauaacagagauaguguaucugaccaacaccaccauagagaaggaaauaugccccaaauuagcagaauacagaaauuggucaaagccgcaauguaacauuacaggauuugcaccuuuuucuaaggacaauucgauucggcuuuccgcugguggggacaucugggugacaagagaaccuuauguaucaugcgauccugacaaguguuaucaauuugcccuugggcagggaacaacacuaaacaacgggcauucaaaugacacaguacaugauaggaccccuuaccggacccuauugaugaaugaauuggguguuccauuucauuugggaaccaggcaagugugcauagcaugguccagcucaaguugucacgauggaaaagcauggcugcauguuuguguaacuggggaugaugaaaaugcaacugcuagcuucauuuacaaugggaggcuuguagauaguauugguucaugguccaaaaaaauacucagaacccaggagucggaaugcguuuguaucaauggaacuuguacaguaguaaugacugaugggagcgcuucaggaaaagcugauacuaaaauauuauucauugaggaggggaaaaucguucauauuagcacauugucaggaagugcucagcaugucgaggagugcuccuguuauccucgauauccuggugucagaugugucugcagagacaacuggaaaggcuccaauaggcccaucguagauauaaauguaaaggauuauagcauuguuuccaguuaugugugcucaggacuuguuggagacacacccagaaaaaacgacagcuucagcaguagccauugccuagauccuaacaaugaggaagguggucauggagugaaaggcugggccuuugaugauggaaaugacguguggaugggaagaacgaucagcgagaaguuacgcucagguuaugaaaccuucaaagucaucgaaggcugguccaaaccuaacuccaaauuacagacaaauaggcaagucauaguugaaagagguaacagguccgguuauucugguauuuucuccguugaaggcaaaagcugcaucaaucggugcuuuuauguggaguugauaaggggaaggaaagaggaaacugaagucugguggaccucaaacaguauuguuguguuuuguggcaccucagguacauauggaacaggcucauggccugauggggcggauaucaaucucaugccuauauaa

SEQ ID NO: 46249 - RNA, 1410 nt, Artificial Sequence
  derived and/or modified CDS sequence (wt) from neuraminidase__InfluenzaA__AAY28318
augaauccaaaucaaaagauaauaacaauuggcucuguuucucucaccauugccacaauaugcuuccuuaugcaaauugccauccugguaacuacuguaacauugcauuucaagcaguaugaaugcaacucccccccaaacaaccaaguaaugcugugugaaccaacaauaauagaaagaaacauaacagagauaguguaucugaccaacaccaccauagagaaggaaauaugccccaaauuagcagaauacagaaauuggucaaagccgcaauguaacauuacaggauuugcaccuuuuucuaaggacaauucgauucggcuuuccgcugguggggacaucugggugacaagagaaccuuaugugucaugcgauccugacaaguguuaucaauuugcccuugggcagggaacaacacuaaacaacgggcauucaaaugacacaguacaugauaggaccccuuaccggacccuauugaugaaugaauuggguguuccauuucauuugggaaccaggcaagugugcauagcaugguccagcucaaguugucacgacggaaaagcauggcugcauguuuguguaacuggggaugaugaaaaugcaacugcuagcuucauuuacaaugggaggcuuguagauaguauugguucaugguccaaaaaaauacucagaacccaggagucggaaugcguuuguaucaauggaacuugugcaguaguaaugacugaugggagcgcuucaggaaaagcugauacuaaaauacuauucauugaggaggggaaaaucguucauauuagcacauugucaggaagugcucagcaugucgaggagugcuccuguuauccucgauauccuggugucagaugugucugcagagacaacuggaaaggcuccaauaggcccaucguagauauaaauguaaaggauuauagcauuguuuccaguuaugugugcucaggacuuguuggagacacacccagaaaaaacgacagcuucagcaguagccauugccuagauccuaacaaugaggaagguggucauggagugaaaggcugggccuuugaugauggaaaugacguguggaugggaagaacgaucagcgagaaguuacgcucagguuaugaaacuuucaaagucaucgaaggcugguccaaaccuaacuccaaauuacagacaaauaggcaagucauaguugaaagagguaacagguccgguuauucugguauuuucuccguugaaggcaaaagcugcaucaaucggugcuuuuauguggaguugauaaggggaaggaaagaggaaacugaagucugguggaccucaaacaguauuguuguguuuuguggcaccucagguacauauggaacaggcucauggccugauggggcggauaucaaucucaugccuauauaa

SEQ ID NO: 46250 - RNA, 1410 nt, Artificial Sequence
  derived and/or modified CDS sequence (wt) from neuraminidase__InfluenzaA__AAY28338
augaauccaaaucaaaagauaauaacaauuggcucuguuucucucaccauugccacaauaugcuuccuuaugcaaauugccauccugguaacuacuguaacauugcauuucaagcaguaugaaugcaacucccccccaaacaaccaaguaaugcugugugaaccagcaauaauagaaagaaacauaacagagauaguguaucugaccaacaccaccauagagaaggaaauacgccccaaauuagcagaauacagaaauuggucaaagccgcaauguaacauuacaggauuugcaccuuuuuccaaggacaauucgauucggcuuuccgcugguggggacaucugggugacaagagaaccuuaugugucaugcgauccugacaaguguuaucaauuugcccuuggacagggaacaacacuaaacaacgggcauucaaaugacacaguacaugauaggaccccuuaccggacccuauugaugaaugaauuggguguuccauuucauuugggaaccaggcaagugugcauagcaugguccagcucaaguugucacgauggaaaagcauggcugcauguuuguguaacuggggaugaugaaaaugcaacugcuagcuucauuuacaaugggaggcuuguagauaguauugguucaugguccaaaaaaauacucagaacccaggaaucggaaugcguuuguaucaauggaacuuguacaguaguaaugacugaugggagcgcuucaggaaaagcugauacuaaaauacuauucauugaggaggggaaaaucguuaauauuagcacauugucaggaagugcucagcaugucgaggagugcuccuguuauccucgauauccuggugucagaugugucugcagagacaacuggaaaggcuccaauaggcccaucguagauauaaauguaaaggauuauagcauuguuuccaguuaugugugcucaggacuuguuggagacacacccagaaaaaacgacagcuucagcaguagccauugccuagauccuaacaaugaggaagguggucauggagugaaaggcugggccuuugaugauggaaaugacguguggaugggaagaacgaucagcgagaaguuacgcucagguuaugaaaccuucaaagucauugaaggcugguccaaaccuaacuccaaauuacagauaaauaggcaagucauaguugaaagaggcaacagguccgguuauucugguauuuucuccguugaaggcaaaagcugcaucaaucggugcuuuuauguggaguugauaaggggaaggaaagaggaaacugaaguuugguggaccucaaacaguauuguuguguuuuguggcaccucagguacauauggaacaggcucauggccugauggggcggauaucaaucucaugccuauauaa

SEQ ID NO: 46251 - RNA, 1410 nt, Artificial Sequence; identical to SEQ ID NO: 46217
  derived and/or modified CDS sequence (wt) from neuraminidase__InfluenzaA__AAY28348

SEQ ID NO: 46252 - RNA, 1410 nt, Artificial Sequence; identical to SEQ ID NO: 46181
  derived and/or modified CDS sequence (wt) from neuraminidase__InfluenzaA__AAY28358

SEQ ID NO: 46253 - RNA, 1410 nt, Artificial Sequence; identical to SEQ ID NO: 46217
  derived and/or modified CDS sequence (wt) from neuraminidase__InfluenzaA__AAY28388

SEQ ID NO: 46254 - RNA, 1410 nt, Artificial Sequence
  derived and/or modified CDS sequence (wt) from neuraminidase__InfluenzaA__AAY28398
augaauccaaaucaaaagauaauaacaauuggcucuguuucucucaccauugccacaauaugcuuccuuaugcaaauugccauccugguaacuacuguaacauugcauuucaagcagcaugaaugcaacucccccccaaacaaccaaguaaugcugugugaaccaacaauaauagaaagaaacauaacagagauaguguaucugaccaacaccaccauagagagggaaauaugccccaaacuagcagaauacagaaauuggucaaagccgcaauguaacauuacaggauuugcaccuuuuucuaaggacaauucgauucgacuuuccgcugguggugacaucugggugacaagagaaccuuaugugucaugcgauccugacaaguguuaucaauuugcccuugggcagggaacaacacuaaacaacgggcauucaaaugacacaguacaugauaggaccccuuaccggacccuauuaaugaaugaauuggguguuccauuucauuugggaaccaggcaagugugcauagcaugguccagcucaaguugucacgauggaaaagcauggcugcauguuuguguaacuggggaugauaaaaaugcaacugcuagcuucauuuacaaugggaggcuuguagauaguauugguucaugguccaaaaaaauacucagaacccaggagucggaaugcguuuguaucaauggaacuuguacaguaguaaugacugaugggagcgcuucaggaaaagcugauacuaaaauacuauucauugaggaggggaaaaucguucauauuagcacauugucaggaagugcucagcauguugaggaguguuccuguuauccucgauauccuggugucagaugugucugcagagacaacuggaaaggcuccaauaggcccauuguagauauaaauguaaaggauuauagcauuguuuccaguuaugugugcucaggacuuguuggagacacacccagaaaaaacgacagcuccagcaguagccauugccuagauccuaacaaugaggaagguggucauggagugaaaggcugggccuuugaugacggaaaugacguguggaugggaagaacgaucagcgagaaguuacgcucagguuaugaaaccuucaaagucaucgaaggcugguccaaaccuaacuccaaauuacagauaaauaggcaaguuauaguugaaagagguaacagguccgguuauucugguauuuucuccguugaaggcaaaagcugcaucaaucggugcuuuuauguggaguugauaaggggaaggaaagaggaaacugaagucugguggaccucaaacaguauuguuguguuuuguggcaccucagguacauauggaacaggcucauggccugauggggcggacaucaaucucaugccuauauaa

SEQ ID NO: 46255 - RNA, 1410 nt, Artificial Sequence; identical to SEQ ID NO: 46177
  derived and/or modified CDS sequence (wt) from neuraminidase__InfluenzaA__AAY28408

SEQ ID NO: 46256 - RNA, 1410 nt, Artificial Sequence; identical to SEQ ID NO: 46154
  derived and/or modified CDS sequence (wt) from neuraminidase__InfluenzaA__AAY28505

SEQ ID NO: 46257 - RNA, 1410 nt, Artificial Sequence
  derived and/or modified CDS sequence (wt) from neuraminidase__InfluenzaA__AAY28524
augaauccaaaucaaaagauaauaacaauuggcucuguuucucucaccauugccacaauaugcuuccuuaugcaaauugccauccugguaacuacuguaacauugcauuucaagcagcaugaaugcaacucccccccaaacaaccaaguaaugcugugugaaccaacaauaauagaaagaaacauaacagagauaguguaucugaccaacaccaccauagagaaggaaauaugccccaaacuagcagaauacagaaauuggucaaagccgcaauguaacauuacaggauuugcaccuuuuucuaaggacaauucgauucggcuuuccgcugguggugacaucugggugacaagagaaccuuaugugucaugcgauccugacaaguguuaucaauuugcccuugggcagggaacaacacuaaacaacgggcauucaaauuacacaguacaugauaggaccccuuaccggacccuauugaugaaugaauuggguguuccauuucauuugggaaccaggcaagugugcauagcaugguccagcucaaguugucacgauggaaaagcauggcugcauguuuguguaacuggggaugauaaaaaugcaacugcuagcuucauuuacaaugggaggcuuguagauaguauugguucaugguccaaaaaaauacucagaacccaggagucggaaugcguuuguaucaauggaacuuguacaguaguaaugacugaugggagcgcuucaggaaaagcugauacuaaaauacuauucauugaggaggggaaaaucguucauauuagcacauugucaggaagugcucagcaugucgaggaguguuccuguuauccucgauauccuggugucagaugugucugcagagacaacuggaaaggcuccaauaggcccauuguagauauaaauguaaaggauuauagcauuguuuccaguuaugugugcucaggacuuguuggagacacacccagaaaaaacgacagcuccagcaguagccauugccuagauccuaacaaugaggaagguggucauggagugaaaggcugggccuuugaugauggaaaugacguguggaugggaagaacgaucagcgagaaguuacgcucagguuaugaaaccuucaaagucaucgaaggcugguccaaaccuaacuccaaauuacagauaaauaggcaaguuauaguugaaagagguaacagguccgguuauucugguauuuucuccguugaaggcaaaagcugcaucaaucggugcuuuuauguggaguugauaaggggaaggaaagaggaaacugaagucugguggaccucaaacaguauuguuguguuuuguggcaccucagguacauauggaacaggcucauggccugauggggcggacaucaaucucaugccuauauaa

SEQ ID NO: 46258 - RNA, 1410 nt, Artificial Sequence; identical to SEQ ID NO: 46147
  derived and/or modified CDS sequence (wt) from neuraminidase__InfluenzaA__AAY28534

SEQ ID NO: 46259 - RNA, 1410 nt, Artificial Sequence
  derived and/or modified CDS sequence (wt) from neuraminidase__InfluenzaA__AAY28544
augaauccaaaucaaaagauaauaacaauuggcucuguuucucucaccauugccacaauaugcuuccuuaugcaaauugccaucuugguaacuacuguaacauugcauuucaagcagcaugaaugcaacucccccccaaacaaccaaguaaugcugugugaaccaacaauaauagaaagaaacauaacagagauaguguaucugaccaacaccaccauagagaaggaaauaugccccaaacuagcagaauacagaaauuggucaaagccgcaauguaacauuacaggauuugcaccuuuuucuaaggacaauucgauucggcuuuccgcugguggggacaucugggugacaagagaaccuuaugugucaugcgauccuaacaaguguuaucaauuugcccuugggcagggaacaacacuaaacaacgggcauucaaaugacacaguacaugauaggaccccuuaccggacccuauugaugaaugaauuggguguuccauuucauuugggaaccaggcaagugugcauagcaugguccagcucaaguugucacgauggaaaagcauggcugcauguuuguguaacuggggaugauaaaaaugcaacugcuagcuucauuuacaaugggaggcuuguagauaguauugguucaugguccaaaaaaauacucagaacccaggagucggaaugcguuuguaucaauggaacuuguacaguaguaaugacugaugggagcgcuucaggaaaagcugauacuaaaauacuauucauugaggaggggaaaaucguucauauuagcacauugucaggaagugcucagcaugucgaggagugcuccuguuauccucgauauccuggugucagaugugucugcagagacaacuggaaaggcuccaauaggcccauuguagauauaaauguaaaggauuauagcauuguuuccaguuaugugugcucaggacuuguuggagacacacccagaaaaaacgacagcuucagcaguagccauugccuagauccuaacaaugaggaagguggucauggagugaaaggcugggccuuugaugauggaaaugacguguggaugggaagaacgaucagcgagaaguuacgcucagguuaugaaaccuucaaagucaucgaaggcugguccaaaccuaacuccaaauuacagauaaauaggcaaguuauaguugaaagagguaacagguccgguuauucuggcauuuucuccguugaaggcaaaagcugcaucaaucggugcuuuuauguggaguugauaaggggaaggaaagaggaaacugaagucugguggaccucaaacaguauuguuguguuuuguggcaccucagguacauauggaacaggcucauggccugauggggcggacaucaaucucaugccuauauaa

SEQ ID NO: 46260 - RNA, 1410 nt, Artificial Sequence; identical to SEQ ID NO: 46181
  derived and/or modified CDS sequence (wt) from neuraminidase__InfluenzaA__AAY28554

SEQ ID NO: 46261 - RNA, 1410 nt, Artificial Sequence
  derived and/or modified CDS sequence (wt) from neuraminidase__InfluenzaA__AAY28564
augaauccaaaucaaaagauaauaacaauuggcucuguuucucucaccauugccacaauaugcuuccuuaugcaaauugccauccugguaacuacuguaacauugcauuucaagcagcaugaaugcaacucccccccaaacaaccaaguaaugcugugugaaccaacaauaauagaaagaaacauaacagagauaguguaucugaccaacaccaccauagagaaggaaauaugccccaaacuagcagaauacagaaauuggucaaagccgcaauguaacauuacaggauuugcaccuuuuucuaaggacaauucgauucggcuuuccgcugguggugacaucugggugacaagagaaccuuaugugucaugcgauccugacaaguguuaucaauuugcccuugggcagggaacaacacuaaacaacgggcauucaaaugacacaguacaugauaggaccccuuaccggacccuauugaugaaugaauuggguguuccauuucauuugggaaccaggcaagugugcauagcaugguccagcucaaguugucacgauggaaaagcauggcugcauguuuguguaacuggggaugauaaaaaugcaacugcuagcuucauuuacaaugggaggcuuguagauaguauugguucaugguccaaaaaaauacucagaacccaggagucggaaugcguuuguaucaauggaacuuguacaguaguaaugacugaugggagcgcuucaggaaaagcugauacuaaaauacuauucauugaggaggggaaaaucguucauauuagcacauugucaggaagugcucagcaugucgaggaguguuccuguuauccucgauauccuggugucagaugugucugcagagacaacuggaaaggcuccaauaggcccauuguagauauaaauguaaaggauuauagcauuguuuccaguuaugugugcucaggacuuguuggagacacacccagaaaaaacgacagcuccagcaguagccauugccuagauccuaacaaugaggaagguggucauggagugaaaggcugggccuuugaugauggaaaugacguguggaugggaagaacgaucagcgagaaguuacgcucagguuaugaaaccuucaaagucaucgaaggcugguccagaccuaacuccaaauuacagauaaauaggcaaguuauaguugaaagagguaacagguccgguuauucugguauuuucuccguugaaagcaaaagcugcaucaaucggugcuuuuauguggaguugauaaggggaaggaaagaggaaacugaagucugguggaccucaaacaguauuguuguguuuuguggcaccucagguacauauggaacaggcucauggccugauggggcggacaucaaucucaugccuauauaa

SEQ ID NO: 46262 - RNA, 1410 nt, Artificial Sequence
  derived and/or modified CDS sequence (wt) from neuraminidase__InfluenzaA__AAY28574
augaauccaaaucaaaagauaauaacaauuggcucuguuucucucaccauugccacaauaugcuuccuuaugcaaauugccauccugguaacuacuguaacauugcauuucaagcagcaugaaugcaacucccccccaaacaaccaaguaaugcugugugaaccaacaauaauagaaagaaacauaacagagauaguguaucugaccaacaccaccauagagaaggaaauaugccccaaauuagcagaauacagaaauuggucaaagccgcaauguaacauuacaggauuugcaccuuuuucuaaggacaauucgauucggcuuuccgcugguggggacaucugggugacaagagaaccuuaugugucaugcgauccugacaaguguuaucaauuugcccuugggcagggaacaacacuaaacaacgggcauucaaauaacacaguacaugauaggaccccuuaccggacccuauugaugaaugaauuggguguuccauuucauuugggaaccaggcaagugugcauagcaugguccagcucaaguugucacgauggaaaagcauggcugcauguuuguguaacuggggaugauaaaaaugcaacugcuagcuucauuuacaaugggaggcuuguagauaguauugguucaugguccaaaaaaauacucagaacccaggagucggaaugcguuuguaucaauggaacuuguacaguaguaaugacugaugggagcgcuucaggaaaagcugauacuaaaauacuauucauugaggaggggaaaaucguucauauuagcacauugucaggaagugcucagcaugucgaggagugcuccuguuauccucgauauccuggugucagaugugucugcagagacaacuggaaaggcuccaauaggcccauuguagauauaaauguaaaggauuauagcauuguuuccaguuaugugugcucaggacuuguuggagacacacccagaaaaaacgacagcuucagcaguagccauugccuagauccuaacaaugaggaagguggucauggagugaaaggcugggccuuugaugauggaaaugacguguggaugggaagaacgaucagcgagaaguuacgcucagguuaugaaaccuucaaagucaucgaaggcugguccaaaccuaacuccaaauuacagauaaauaggcaaguuauaguugaaagagguaacagguccgguuauucugguauuuucuccguugaaggcaaaagcugcaucaaucggugcuuuuauguggaguugauaaggggaaggaaagaggaaacugaagucugguggaccucaaacaguauuguuguguuuuguggcaccucagguacauauggaacaggcucauggccugauggggcggauaucaaucucaugccuauauaa

SEQ ID NO: 46263 - RNA, 1410 nt, Artificial Sequence
  derived and/or modified CDS sequence (wt) from neuraminidase__InfluenzaA__AAY28584
augaauccaaaucaaaagauaauaacaauuggcucuguuucucucaccauugccacaauaugcuuccuuaugcaaauugccauccugguaacuacuguaacauugcauuucaagcaguaugaaugcaacucccccccaaacaaccaaguaaugcugugugaaccagcaauaauagaaagaaacauaacagagauaguguaucugaccaacaccaccauagagaaggaaauaugccccaaauuagcagaauacagaaauuggucaaagccgcaauguaacauuacaggauuugcaccuuuuuccaaggacaauucgauucggcuuuccgcugguggggacaucugggugacaagagaaccuuaugugucaugcgauccugacaaguguuaucaauuugcccuuggacagggaacaacacuaaacaacgggcauucaaaugacacaguacaugauaggaccccuuaccggacccuauugaugaaugaauuggguguuccauuucauuugggaaccaggcaagugugcauagcaugguccagcucaaguugucacgauggaaaagcauggcugcauguuuguguaacuggggaugaugaaaaugcaacugcuagcuucauuuacaaugggaggcuuguagauaguauugguucaugguccaaaaaaauacucagaacccaggagucggaaugcguuuguaucaauggaacuuguacaguaguaaugacugaugggagcgcuucaggaaaagcugauacuaaaauacuauucauugaggaggggaaaaucguuaauauuagcacauugucaggaagugcucagcaugucgaggagugcuccuguuauccucgauauccuggugucagaugugucugcagagacaacuggaaaggcuccaauaggcccaucguagauauaaauguaaaggauuauagcauuguuuccaguuaugugugcucaggacuuguuggagacacacccagaaaaaacgacagcuucagcaguagccauugccuagauccuaacaaugaggaagguggucauggagugaaaggcugggccuuugaugauggaaaugacguguggaugggaagaacgaucagcgagaaauuacgcucagguuaugaaaccuucaaagucaucgaaggcugguccaaaccuaacuccaaauuacagauaaauaggcaagucauaguugaaagagguaacagguccgguuauucugguauuuucuccguugaaggcaaaagcugcaucaaucggugcuuuuauguggaguugauaaggggaaggaaagaggaaacugaaguuugguggaccucaaacaguauuguuguguuuuguggcaccucagguacauauggaacaggcucauggccugauggggcggauaucaaucucaugccuauauaa

SEQ ID NO: 46264 - RNA, 1410 nt, Artificial Sequence; identical to SEQ ID NO: 46181
  derived and/or modified CDS sequence (wt) from neuraminidase__InfluenzaA__AAY28594

SEQ ID NO: 46265 - RNA, 1410 nt, Artificial Sequence
  derived and/or modified CDS sequence (wt) from neuraminidase__InfluenzaA__AAY28611
augaauccaaaucaaaagauaauaacgauuggcucuguuucucucaccauugccacaauaugcuuccuuaugcaaauugccauccugguaacuacuguaacauugcauuucaagcaauaugaaugcaacucccccccaaacaaccaagugaugcugugugaaccaacaauaauagaaagaaacauaacagagauaguauaucugaccaacaccaccauagagaaggaaauaugccccaaacuagcagaauacagaaauuggucaaagccgcaauguaacauuacaggauuugcaccuuuuucuaaggacaauucgauucggcuuuccgcugguggggacaucugggugacaagagaaccuuaugugucaugcgauccugacaaguguuaucaauuugcccuuggacagggaacaacacuaaacaacgggcauucaaaugacacaguacaugauaggaccccuuaucgaacccuauugaugaaugaguuggguguuccauuucauuugggaaccaagcaagugugcauagcaugguccagcucaaguugucacgauggaaaagcauggcugcauguuuguguaacgggggaugaugaaaaugcaacugcuagcuucauuuacaaugggaggcuuguagauaguauugguucaugguccaaaaaaauccucaggacccaggagucggaaugcguuuguaucaauggaacuuguacaguaguaaugacugaugggagugcuucaggaaaagcugauacuaaaauacuauucauugaggaggggaaaaucguucauacuagcucauugucaggaagugcucagcaugucgaggagugcuccuguuauccucgauauccuggugucagaugugucugcagagacaacuggaaaggcuccaauaggcccaucguagauauaaauguaaaggauuauagcauuguuuccaguuaugugugcucaggacuuguuggagacacacccagaaaaaacgacagcuccagcaguagccauugcuuggauccuaacaaugaggaagguggucauggagugaaaggcugggccuuugaugauggaaaugacguguggaugggaagaacgaucagcgagaaguuacgcucaggauaugaaaccuucaaagucauugaaggcugguccaaaccuaacuccaaauugcagauaaauaggcaagucauaguugacagagguaauagguccgguuauucugguauuuucucuguugaaggcaaaagcugcaucaaucggugcuuuuauguggaguugauaaggggaaggaaacaggaaacugaagucuuguggaccucaaacaguauuguuguguuuuguggcaccucagguacauauggaacaggcucauggccugauggggcggacaucaaucucaugccuauauaa

SEQ ID NO: 46266 - RNA, 1410 nt, Artificial Sequence
  derived and/or modified CDS sequence (wt) from neuraminidase__InfluenzaA__AAY28651
augaauccaaaucaaaagauaauaacaauuggcucuguuucucucaccauugccacaauaugcuuccuuaugcaaauugccauccugguaacuacuguaacauugcauuucaagcaguaugaaugcaacucccccccaaacaaccaaguaaugcugugugaaccaacaauaauagaaagaaacauaacagagauaguguaucugaccaacaccaccauagagaaggaaauaugccccaaauuagcagaauacagaaauuggucaaagccgcaauguaacauuacaggauuugcaccuuuuucuaaggacaauucgauucggcuuuccgcugguggggacaucugggugacaagagaaccuuaugugucaugcgauccugacaaguguuaucaauuugcccuugggcagggaacaacacuaaacaacgggcauucaaaugacacaguacaugauaggaccccuuaccggacccuauugaugaaugaauuggguguuccauuucacuugggaaccaggcaagugugcauagcaugguccagcucaaguugucacgauggaaaagcauggcugcauguuuguguaacuggggaugaugaaaaugcaacugcuagcuucauuuacaaugggaggcuuguagauaguauugguucaugguccaaaaaaauacucagaacccaggagucggaaugcguuuguaucaauggaacuuguacaguaguaaugacugaugggagcgcuucaggaaaagcugauacuaaaauacuauucauugaggaggggaaaaucguucauauuagcacauugucaggaagugcucagcaugucgaggagugcuccuguuauccucgauauccuggugucagaugugucugcagagacaacuggaaaggcuccaauaggcccaucguagauauaaauguaaaggauuauagcauuguuuccaguuaugugugcucaggacuuguuggagacacacccagaaaaaacgacagcuucagcaguagccauugccuagauccuaacaaugaggaagguggucauggagugaaaggcugggccuuugaugauggaaaugacguguggaugggaagaacgaucagcgagaaguuacgcucagguuaugaaaccuucaaagucaucgaaggcugguccaaaccuaacuccaaauuacagacaaauaggcaagucauaguugaaagagguaacagguccgguuauucugguauuuucuccguugaaggcaaaagcugcaucaaucggugcuuuuauguggaguugauaaggggaaggaaagaggaaacugaagucugguggaccucaaacaguauuguuguguuuuguggcaccucagguacauauggaacaggcucauggccugauggggcggauaucaaucucaugccuauauaa

SEQ ID NO: 46267 - RNA, 1410 nt, Artificial Sequence
  derived and/or modified CDS sequence (wt) from neuraminidase__InfluenzaA__AAY44613
augaauccaaaucaaaagauaauaacaauuggcucuguuucucucaccauugccacaauaugcuuccuuaugcaaauugccauccugguaacuacuguaacauugcauuucaagcagcaugaaugcaacucccccccaaacaaccaaguaaugcugugugaaccaacaauaauagaaagaaacauaacagagauaguguaucugaccaacaccaccauagagaaggaaauaugccccaaaauagcagaauacagaaauuggucaaagccgcaauguaacauuacaggauuugcaccuuuuucuaaggacaauucgauucggcuuuccgcugguggugacaucugggugacaagagaaccuuaugugucaugcgauccugacaaguguuaucaauuugcccuugggcagggaacaacacuaaacaacgggcauucaaaugacacaguacaugauaggaccccuuaccggacccuauugaugaaugaauuggguguuccauuucauuugggaaccaggcaagugugcauagcaugguccagcucaaguugucacgauggaaaagcauggcugcauguuuguguaacuggggaugauaaaaaugcaacugcuagcuucauuuacaaugggaggcuuguagauaguauugguucaugguccaaaaaaauacucagaacccaggagucugaaugcguuuguaucaauggaacuuguacaguaguaaugacugaugggagcgcuucaggaaaagcugauacuaaaauacuauucauugaggaggggaaaaucguucauauuagcacauugucaggaagugcucagcaugucgaggaguguuccuguuauccucgauauccuggugucagaugugucugcagagacaacuggaaaggcuccaauaggcccauuguagauauaaauguaaaggauuauagcauuguuuccaguuaugugugcucaggacuuguuggagacacacccagaaaaaacgacagcuccagcaguagccauugccuagauccuaacaaugaggaagguggucauggagugaaaggcugggccuuugaugauggaaaugacguguggaugggaagaacgaucagcgagaaguuacgcucagguuaugaaaccuucaaagucaucgaaggcugguccaaaccuaacuccaaauuacagauaaauaggcaaguuauaguugaaagagguaacagguccgguuauucugguauuuucuccguugaaggcaaaagcugcaucaaucggugcuuuuauguggaguugauaaggggaaggaaagaggaaacugaagucugguggaccucaaacaguauuguuguguuuuguggcaccucagguacauauggaacaggcucauggccugauggggcggacaucaaucucaugccuauauaa

SEQ ID NO: 46268 - RNA, 1410 nt, Artificial Sequence; identical to SEQ ID NO: 46246
  derived and/or modified CDS sequence (wt) from neuraminidase__InfluenzaA__AAY44624

SEQ ID NO: 46269 - RNA, 1410 nt, Artificial Sequence
  derived and/or modified CDS sequence (wt) from neuraminidase__InfluenzaA__AAY44634
augaauccaaaucaaaagauaauaacaauuggcucuguuucucucaccauugccacaauaugcuuccuuaugcaaauugccauccugguaacuacuguaacauugcauuucaagcaguaugaaugcaacucccccccaaacaaccaaguaaugcugugugaaccagcaauaauagaaagaaacauaacagagauaguguaucugaccaacaccaccauagagaaggaaauaugccccaaauuagcagaauacagaaauuggucaaagccgcaauguaacauuacaggauuugcaccuuuuucuaaggacaauucgauucggcuuuccgcugguggggacaucugggugacaagagaaccuuaugugucaugcgauccugacaaguguuaucaauuugcccuuggacagggaacaacacuaaacaacgggcauucaaaugacacaguacaugauaggaccccuuaccggacccuauugaugaaugaauuggguguuccauuucauuugggaaccaggcaagugugcauagcaugguccagcucaaguugucacgauggaaaagcauggcugcauguuuguguaacuggggaugaugaaaaugcaacugcuagcuucauuuacaaugggaggcuuguagauaguauugguucaugguccaaaaaaauacucagaacccaggagucggaaugcguuuguaucaauggaacuuguacaguaguaaugacugaugggagcgcuucaggaaaagcugauacuaaaauacuauucauugaggaggggaaaaucguucauauuagcacauugucaggaagugcucagcaugucgaggagugcuccuguuauccucgauauccuggugucagaugugucugcagagacaacuggaaaggcuccaauaggcccaucguagauauaaauguaaaggauuauagcauuguuuccaguuaugugugcucaggacuuguuggagacacacccagaaaaaacgacagcuucagcaguagccauugccuagauccuaacaaugaggaagguggucauggagugaaaggcugggccuuugaugauggaaaugacguguggaugggaagaacgaucagcgagaaguuacgcucagguuaugaaaccuucaaagucaucgaaggcugguccaaaccuaacuccaaauuacagauaaauaggcaagucauaguugaaagagguaacagguccgguuauucugguauuuucuccguugaaggcaaaagcugcaucaaucggugcuuuuauguggaguugauaaggggaaggaaagaggaaacugaagucugguggaccucaaacaguauuguuguguuuuguggcaccucagguacauauggaacaggcucauggccugauggggcggauaucaaucucaugccuauauaa

SEQ ID NO: 46270 - RNA, 1410 nt, Artificial Sequence
  derived and/or modified CDS sequence (wt) from neuraminidase__InfluenzaA__AAY44644
augaauccaaaucaaaagauaauaacaauuggcucuguuucucucaccauugccacaauaugcuuccuuaugcaaauugccauccugguaacuacuguaacauugcauuucaagcaguaugaaugugacucccccccaaacaaccaaguaaugcugugugaaccaacaauaauagaaagaaacauaacagagauaguguaucugaccaacaccaccauagagaaggaaauaugccccaaacuagcagaauacagaaauuggucaaagccgcaauguaacauuacaggauuugcaccuuuuucuaaggacaauucgauucggcuuuccgcugguggggacaucugggugacaagagaaccuuaugugucaugcgauccugacaaguguuaucaauuugcccuugggcagggaacaacacuaaacaacgggcauucaaaugacacaguacaugauaggaccccuuaccggacccuauugaugaaugaauuggguguuccauuucauuugggaaccaggcaagugugcauagcaugguccagcucaaguugucacgauggaaaagcauggcugcauguuuguguaacuggggaugaugaaaaugcaacugcuagcuucauuuacaaugggaggcuuguagauaguauugguucaugguccaaaaaaauacucagaacccaggagucggaaugcguuuguaucaauggaacuuguacaguaguaaugacugaugggagcgcuucaggaaaagcugauacuaaaauacuauucauugaggaggggaaaaucguucauauuagcacauugucaggaagugcucagcaugucgaggagugcuccuguuauccucgauauccuggugucagaugugucugcagagacaacuggaaaggcuccaauaggcccaucguagauauaaauguaaaggauuauagcauuguuuccaguuaugugugcucaggacuuguuggagacacacccagaaaaaacgacagcuucagcaguagccauugccuagauccuaacaaugaggaagguggucauggagugaaaggcugggccuuugaugauggaaaugacguguggaugggaagaacgaucagcgagaaguuacgcucagguuaugaaaccuucaaagucaucgaaggcugguccaaaccuaacuccaaauuacagauaaauaggcaagucauaguugaaagagguaacagguccgguuauucugguauuuucuccguugaagguaaaagcugcaucaaucggugcuuuuauguggaguugauaaggggaaggaaagaggaaacugaagucugguggaccucaaacaguauuguuguguuuuguggcaccucagguacauauggaacaggcucauggccugauggggcggauaucaaucucaugccuauauaa

SEQ ID NO: 46271 - RNA, 1410 nt, Artificial Sequence
  derived and/or modified CDS sequence (wt) from neuraminidase__InfluenzaA__AAY44654
augaauccaaaucaaaagauaauaacgauuggcucuguuucucucaccauugccacaauaugcuuccuuaugcaaauugccauccugguaacuacuguaacauugcauuucaagcaauaugaaugcaacucccccccaaacaaccaagugaugcugugugaaccaacaauaauagaaagaaacauaacagagauaguauaucugaccaacaccaccauagagaaggaaauaugccccaaacuagcagaauacagaaauuggucaaagccgcaauguaacauuacaggauuugcaccuuuuucuaaggacaauucgauucggcuuuccgcugguggggacaucugggugacaagagaaccuuaugugucaugcgauccugacaaguguuaucaauuugcccuuggacagggaacaacacuaaacaacgggcauucaaaugacacaguacaugauaggaccccuuaucgaacccuauugaugaaugaguuggguguuccauuucauuugggaaccaagcaagugugcauagcaugguccagcucaaguugucacgauggaaaagcauggcugcauguuuguguaacgggggaugaugaaaaugcaacugcuagcuucauuuacaaugggaggcuuguagauaguauugguucaugguccaaaaaaauccucaggacccaggagucggaaugcguuuguaucaauggaacuuguacaguaguaaugacugaugggagugcuucaggaaaagcugauacuaaaauacuauucauugaggaggggaaaaucguucauacuagcucauugucaggaagugcucagcaugucgaggagugcuccuguuauccucgauauccuggugucagaugugucugcagagacaacuggaaaggcuccaauaggcccaucguagauauaaauguaaaggauuauagcauuguuuccaguuaugugugcucaggacuuguuggagacacacccagaaaaaacgacagcuccagcaguagccauugcuuggauccuaacaaugaggaagguggucauggagugaaaggcugggccuuugaugauggaaaugacguguggaugggaagaacgaucagcgagaaguuacgcucaggauaugaaaccuucaaagucauugaaggcugguccaaaccuaacuccaaauugcagauacauaggcaagucauaguugacagagguaauagguccgguuauucugguauuuucucuguugaaggcaaaagcugcaucaaucggugcuuuuauguggaguugauaaggggaaggaaacaggaaacugaagucuuguggaccucaaacaguauuguuguguuuuguggcaccucagguacauauggaacaggcucauggccugauggggcggacaucaaucucaugccuauauaa

SEQ ID NO: 46272 - RNA, 1410 nt, Artificial Sequence
  derived and/or modified CDS sequence (wt) from neuraminidase__InfluenzaA__AAY44758
augaauccaaaucaaaagauaauaacgauuggcucuguuucucucacuauugccacaauaugcuuccuuaugcaaauagccauccugguaacuacuguaacauugcauuucaagcaauaugaaugcaacucccccucaaacaaccaaguaaugcugugugaaccaacaauaauagaaagaaacauaacagagauaguguaucugaccaacaccaccauagagaaggaaauaugccccaaacuagcagaauauagaaauuggucaaagccgcaauguaaaauuacaggauuugcaccuuuuucuaaggacaauucaauucggcuuuccgcugguggggacauuugggugacaagagaaccuuaugugucaugcgauccugacaaguguuaucaauuugcccuuggacagggaacaacacuaaacaacaggcauucaaaugacacaguacaugauaggaccccuuaccgaacccuauugaugaaugaguuggguguuccauuucauuugggaaccaagcaaguaugcauagcaugguccagcucaaguugucacgauggaaaagcauggcugcauguuuguguaacugggcaugaugaaaaugcaacugcuagcuucauuuacgaugggagacuuguagauaguauugguucaugguccaaaaaaauccucaggacccaggagucggaaugcguuuguaucaauggaacuuguacaguaguaaugacugaugggagugcuucaggaagagcugauaccaaaauacuauucauugaggaggggaaaaucguucauacuagcaaauugucaggaagugcucagcaugucgaggagugcuccuguuauccucgauauccuggugucagaugugucugcagagacaacuggaaaggcuccaauaggcccaucguagauauaaauguaaaggauuauagcauuguuuccaguuaugugugcucaggacuuguuggagacacacccagaaaaaacgacagcuccagcaguagccauugccuggauccuaacaaugaagaagggggucauggagugaaaggcugggccuuugaugauggaaaugacguguggaugggaagaacgaucagcgagaagucacgcucagguuaugaaaccuucaaggucauugaaggcugguccaaacccaacuccaaauugcagauaaauaggcaagucauaguugaaagagguaauaggucugguuauucugguauuuucucuguugaaggcaaaagcugcaucaauaggugcuuuuauguggaguugauaaggggaaggaaaccggaaacugaagucugguggaccucaaacaguauuguuguguucuguggcaccucagguacauauggaacaggcucauggccugauggggcggacaucaaucucaugccuauauaa

SEQ ID NO: 46273 - RNA, 1410 nt, Artificial Sequence
  derived and/or modified CDS sequence (wt) from neuraminidase__InfluenzaA__AAY44778
augaauccaaaucaaaagauaauaacgauuggcucuguuucucucaccauugccacaauaugcuuccuuaugcaaauugccauccugguaacuacuguaacauugcauuucaagcaauaugaaugcaacucccccccaaacaaccaagugaugcugugugaaccaacaauaauagaaagaaacauaacagagauaguguaucugaccaacaccaccauagagaaggaaauaugccccaaacuagcagaauacagaaauuggucaaagccgcaauguaacauuacaggauuugcaccuuuuucuaaggacaauucgauucggcuuuccgcugguggggacaucugggugacaagagaaccuuaugugucaugcgauccugacaaguguuaucaauuugcccuuggacagggaacaacacuaaacaacggacauucaaaugacacaguacaugauaggaccccuuaucggacccuauugaugaaugaguuggguguuccauuucauuugggaaccaagcaagugugcauagcaugguccagcucaaguugucacgauggaaaagcauggcugcauguuuguguaacgggggaugaugaaaaugcaacugcuagcuucauuuacaaugggaggcuuguagauaguauugguucaugguccaaaaaaauccucaggacccaggagucggaaugcguuuguaucaauggaacuuguacaguaguaaugacugaugggagugcuucaggaaaagcugauacuaaaauacuauucauugaggaggggaaaaucguucauacuagccuguugucaggaagugcucagcaugucgaggagugcuccuguuauccucgauacccuggugucagaugugucugcagagacaacuggaaaggcuccaauaggcccaucguagauauaaauguaaaggauuauagcauuguuuccaguuaugugugcucaggacuuguuggagacacacccagaaaaaacgacagcuccagcaguagccauugcuuggauccuaacaaugaggaagguggucauggagugaaaggcugggccuuugaugauggaaaugacguguggaugggaagaacgaucagcgagaaguuacgcucaggauaugaaaccuucaaagucauugaaggcugguccaaaccuaacuccaaauugcagauaaauaggcaagucauaguugacagagguaauagguccgguuauucugguauuuucucuguugaaggcaaaagcugcaucaaucggugcuuuuauguggaguugauaaggggaaggaaacaggaaacugaagucuuguggaccucaaacaguauuguuguguuuuguggcaccucagguacauauggaacaggcucauggccugauggggcggacaucaaucucaugccuauauaa

SEQ ID NO: 46274 - RNA, 1410 nt, Artificial Sequence
  derived and/or modified CDS sequence (wt) from neuraminidase__InfluenzaA__AAY44788
augaauccaaaucaaaagauaauaacgauuggcucuguuucucucaccauugccacaauaugcuuccuuaugcaaauugccauccugguaacuacuguaacauugcauuucaagcaauaugaaugcaacucccccccaaacaaccaagugaugcugugugaaccaacaauaauagaaagaaacauaacagagauaguguaucugaccaacaccaccauagagaaggaaauaugccccaaacuagcagaauacagaaauuggucaaagccgcaauguaacauuacaggauuugcaccuuuuucuaaggacaauucgauucggcuuuccgcugguggggacaucugggugacaagagaaccuuaugugucaugcgauccugacaaguguuaucaauuugcccuuggacagggaacaacacuaaacaacggacauucaaaugacacaguacaugauaggaccccuuaucggacccuauugaugaaugaguuggguguuccauuucauuugggaaccaagcaagugugcauagcaugguccagcucaaguugucacgauggaaaagcauggcugcauguuuguguaacgggggaugaugaaaaugcaacugcuagcuucauuuacaaugggaggcuuguagauaguauugguucaugguccaaaaaaauccucaggacccaggagucggaaugcguuuguaucaauggaacuuguacaguaguaaugacugaugggagugcuucaggaaaagcugauacuaaaauacuauucauugaggaggggaaaaucguucauacuagccuauugucaggaagugcucagcaugucgaggagugcuccuguuauccucgauacccuggugucagaugugucugcagagacaacuggaaaggcuccaauaggcccaucguagauauaaauguaaaggauuauagcauuguuuccaguuaugugugcucaggacuuguuggagacacacccagaaaaaacgacagcuccagcaguagccauugcuuggauccuaacaaugaggaagguggucauggagugaaagguugggccuuugaugauggaaaugacguguggaugggaagaacgaucagcgagaaguuacgcucaggauaugaaaucuuuaaagucauugaaggcugguccaaaccuaacuccaaauugcagauaaauaggcaagucauaguugacagagguaauagguccgguuauucugguauuuucucuguugaaggcaaaagcugcaucaaucggugcuuuuauguggaguugauaaggggaaggaaacaggaaacugaagucuuguggaccucaaacaguauuguuguguuuuguggcaccucagguacauauggaacaggcucauggccugauggggcggacaucaaucucaugccuauauaa

SEQ ID NO: 46275 - RNA, 1410 nt, Artificial Sequence; identical to SEQ ID NO: 46149
  derived and/or modified CDS sequence (wt) from neuraminidase__InfluenzaA__AAY44909

SEQ ID NO: 46276 - RNA, 1410 nt, Artificial Sequence; identical to SEQ ID NO: 46177
  derived and/or modified CDS sequence (wt) from neuraminidase__InfluenzaA__AAY45649

SEQ ID NO: 46277 - RNA, 1410 nt, Artificial Sequence
  derived and/or modified CDS sequence (wt) from neuraminidase__InfluenzaA__AAY46374
augaauccaaaucaaaagauaauaacgauuggcucuguuucucucacuauugccacaauaugcuuccuuaugcaaauagccauccugguaacuacuguaacauugcauuucaagcaauaugaaugcaacucccccccaaacaaccaaguaaugcugugugaaccaacaauaauagaaagaaacauaacagagauaguguaucugaccaacaccaccauagagaaggaaauaugccccaaacuagcagaauacagaaauuggucaaagccgcaauguaaaauuacaggauuugcaccuuuuucuaaggauaauucaauucggcuuuccgcugguggggacauuugggugacaagagaaccuuaugugucaugcgauccuuacaaguguuaucaauuugcccuuggacagggaacaacacuaaacaacaggcauucaaaugacacaguacaugauaggaccccuuaucgaacccuauugaugaaugaguuggguguuccauuucauuugggaaccaagcaaguguguauagcaugguccagcucaaguugucacgauggaaaagcauggcugcauguuuguguaacugggcaugaugaaaaugcaacugcuagcuucauuuacgaugggagacuuguagauaguauugguucaugguccaaaaaaauccucaggacccaggagucggaaugcguuuguaucaauggaacuuguacaguaguaaugacugaugggagugcuucaggaagagcugauacuaaaauacuauucauugaggaggggaaaaucguucauacuagcaaauugucaggaagugcucagcaugucgaggagugcuccuguuauccucgauauccuggugucagaugugucugcagagacaacuggaaaggcuccaauaggcccaucguagauauaaauguaaaggauuauagcauuguuuccaguuaugugugcucaggacuuguuggagacacaccuagaaaaaacgacagcuccagcaguagccauugccuggauccuaacaaugaagaagggggucauggagugaaaggcugggccuuugaugauggaaaugacguguggaugggaagaacgaucagcgagaagucacgcucugguuaugaaaccuucaaggucauugaaggcugguccaaaccuaacuccaaauugcagauaaauaggcaagucauaguugaaagagguaauauguccgguuauucugguauuuucucuguugaaggcaaaagcugcaucaaucggugcuuuuauguggaguugauaaggggaaggaaacaggaaacugaagucugguggaccucaaacaguauuguuguguuuuguggcaccucagguacauauggaacaggcucauggccugauggggcggacaucaaucucaugccuauauaa

SEQ ID NO: 46278 - RNA, 1410 nt, Artificial Sequence
  derived and/or modified CDS sequence (wt) from neuraminidase__InfluenzaA__AAY46384
augaauccaaaucaaaagauaauaacaauuggcucuguuucccucaccauugccacaauaugcuuccuuaugcaaauugccaucuugguaacuacuguaacauugcauuucaagcagcaugaaugcaacucccccccaaacaaccaaguaaugcugugugaaccaacaauaauagaaagaaacauaacagagauaguguaucugaccaacaccaccauagagaaggaaauaugccccaaacuagcagaauacagaaauuggucaaagccgcaauguaacauuacaggauuugcaccuuuuucuaaggacaauucgauucggcuuuccgcugguggggacaucugggugacaagagaaccuuaugugucaugcgauccugacaaguguuaucaauuugcccuugggcagggaacaacacuaaacaacgggcauucaaaugacgcaguacaugauaggaccccuuaccggacccuauugaugaaugaauuggguguuccauuucauuugggaaccaggcaagugugcauagcaugguccagcucaaguugucacgauggaaaagcauggcugcauguuuguguaacuggggaugauaaaaaugcaacugcuagcuucauuuacaaugggaggcuuguagauaguauugguucaugguccaaaaaaauacucagaacccaggagucggaaugcguuuguaucaauggaacuuguacaguaguaaugacugaugggagcgcuucaggaaaagcugauacuaaaauacuauucauugaggaggggaaaaucguucauauuagcacauugucaggaagugcucagcaugucgaggagugcuccuguuauccucgauauccuggugucagaugugucugcagagacaacuggaaaggcuccaauaggcccauuguagauauaaauguaaaggauuauagcauuguuuccaguuaugugugcucaggacuuguuggagacacacccagaaaaaacgacagcuucagcaguagccauugccuagauccuaacaaugaggaagguggucauggagugaaaggcugggccuuugaugauggaaaugacguguggaugggaagaacgaucagcgagaaguuacgcucagguuaugaaaccuucaaagucaucgaaggcugguccaaaccuaacuccaaauuacagauaaauaggcaaguuauaguugaaagagguaacagguccgguuauucuggcauuuucuccguugaaggcaaaagcugcaucaaucggugcuuuuauguggaguugauaaggggaaggaaagaggaaacugaagucugguggaccucaaacaguauuguuguguuuuguggcaccucagguacauauggaacaggcucauggccugauggggcggacaucaaucucaugccuauauaa

SEQ ID NO: 46279 - RNA, 1410 nt, Artificial Sequence
  derived and/or modified CDS sequence (wt) from neuraminidase__InfluenzaA__AAY46394
augaauccaaaucaaaagauaauaacgauuggcucuguuucucucaccauugccacaauaugcuuccuuaugcaaauugccauccugauaacuacuguaacauugcauuucaagcaauaugaaugcaacucccccccaaacaaccaagugaugcugugugaaccaacaauaauagaaagaaacauaacagagauaguauaucugaccaacaccaccauagagaaggaaauaugccccaaacuagcagaauacagaaauuggucaaagccgcaauguaacauuacaggauuugcaccuuuuucuaaggacaauucgauucggcuuuccgcugguggggacaucugggugacaagagaaccuuaugugucaugcgauccugacaaguguuaucaauuugcccuuggacagggaacaacacuaaacaacgggcauucaaaugacacaguacaugauaggaccccuuaucgaacccuauugaugaaugaguuggguguuccauuucauuugggaaccaagcaagugugcauagcaugguccagcucaaguugucacgauggaaaagcauggcugcauguuuguguaacgggggaugaugaaaaugcaacugcuagcuucauuuacaaugggaggcuuguagauaguauugguucaugguccaaaaaaauccucaggacccaggagucggaaugcguuuguaucaauggaacuuguacaguaguaaugacugaugggagugcuucaggaaaagcugauacuaaaauacuauucauugaggaggggaaaaucguucauacuagcucauugucaggaagugcucagcaugucgaggagugcuccuguuauccucgauauccuggugucagaugugucugcagagacaacuggaaaggcuccaauagacccaucguagauauaaauguaaaggauuauagcauuguuuccaguuaugugugcucaggacuuguuggagacacacccagaaaaaacgacagcuccagcaguagccauugcuuggauccuaacaaugaggaagguggucauggagugaaaggcugggccuuugaugauggaaaugacguguggaugggaagaacgaucagcgagaaguuacgcucaggauaugaaaccuucaaagucauugaaggcugguccaaaccuaacuccaaauugcagauaaauaggcaagucauaguugacagagguaauagguccgguuauucugguauuuucucuguugaaggcaaaagcugcaucaaucggugcuuuuauguggaguugauaaggggaaggaaacaggaaacugaagucuuguggaccucaaacaguauuguuguguuuuguggcaccucagguacauauggaacaggcucauggccugauggggcggacauugaucucaugccuauauaa

SEQ ID NO: 46280 - RNA, 1410 nt, Artificial Sequence
  derived and/or modified CDS sequence (wt) from neuraminidase__InfluenzaA__AAY46419
augaauccaaaucaaaagauaauaacgauuggcucuguuucucucacuauugccacaauaugcuuccuuaugcaaauugccauccugguaacuacuguaacauugcauuucaagcaauaugaaugcaacucucucccaaacaaccaaguaaugcugugugaaccaacaauacuagaaagaaacauaacagagauaguguaucugaccaacaccaccauagagaaggaaauaugccccaaacuagcagaauacagaaauuggucaaagccgcaauguaaaauuacaggauuugcaccuuuuucuaaggacaauucaauucggcuuuccgcugguggggacauuugggugacaagagaaccuuaugugucaugcgauccugacaaguguuaucaauuugcccuuggacagggaacaacacuaaacaacaggcauucaaaugacacaguacaugauaggaccccuuaucgaacccuauugaugaaugaguuggguguuccauuucauuugggaaccaagcaagugugcauagcaugguccagcucaaguugucacgauggaaaagcauggcugcauguuuguguaacugggcacaaugaaaaugcaacugcuagcuucauuuacggugggaggcuuguagauaguauugguucaugguccaaaaaaauccucaggacccaggagucggaaugcguuuguaucaauggaacuuguacaguaguaaugacugaugggagugcuucaggaagagcugauacuaaaauacuauucauugaggaggggaaaaucauucauauuagccaauugucaggaagugcucagcaugucgaggagugcucauguuauccucgauauccuggugucagaugugucugcagagacaacuggaaaggcuccaauaggcccauuguagauauaaauguaaaggauuauagcauuguuuccaguuaugugugcucaggacuuguuggagacacacccagaaaaaacgacagcuccagcaguagccauugccugaauccuaacaaugaggaagggggucauggaguaaaaggcugggcauuugaugauggaaaugacguguggaugggaagaacgaucagcgagaaauuccgcucagguuaugaaaccuucaaagucauugaaggcugguccaaaccuaacuccaaauugcagauaaauaggcaagucauaguugacagagauaauagguccgguuauucugguauuuucucuguugaaggcaaaagcugcaucaaucggugcuuuuauguggaguugauaaggggaaggaaacaggaaacugaagucugguggaccucaaacaguauuguuguguuuuguggcaccucagguacauauggaacaggcucauggccugauggggcggacaucaaucucaugccuauauaa

SEQ ID NO: 46281 - RNA, 1410 nt, Artificial Sequence
  derived and/or modified CDS sequence (wt) from neuraminidase__InfluenzaA__AAY47016
augaauccaaaucaaaagauaauaacaauuggcucuguuucucucaccauugccacaauaugcuuccuuaugcaaauugccauccugguaacuacuguaacauugcauuucaagcaguaugaaugcaacucccccccaaacaaccaaguaaugcugugugaaccaacaauaauagaaagaaacauaacagagauaguguaucugaccaacaccaccauagagaaggaaauaugccccaaacuagcagaauacagaaauuggucaaagccgcaauguaacauuacaggauuugcaccuuuuucuaaggacaauucgauucggcuuuccgcugguggggacaucugggugacaagagaaccuuaugugucaugcgauccugacaaguguuaucaauuugcccuugggcagggaacaacacuaaacaacgggcauucaaaugacacaguacaugauaggaccccuuaccggacccuauugaugaaugaauuggguguuccauuucauuugggaaccaggcaagugugcauagcaugguccagcucaaguugucacgauggaaaagcauggcugcauguuuguguaacuggggaugaugaaaaugcaacugcuagcuucauuuacaaugggaggcuuguagauaguauugguucaugguccaaaaaaauacucagaacccaggagucggaaugcguuuguaucaauggaacuuguacaguaguaaugacugaugggagcgcuucaggaaaagcugauacuaaaauacuauucauugaggaggggaaaaucguucauauuagcacauugucaggaaaugcucagcaugucgaggagugcuccuguuauccucgauauccuggugucagaugugucugcagagacaacuggaaaggcuccaauaggcccaucguagauauaaauguaaaggauuauagcauuguuuccaguuaugugugcucaggacuuguuggagacacacccagaaaaaacgacagcuucagcaguagccauugccuagauccuaacagugaggaagguggucauggagugaaaggcugggccuuugaugauggaaaugacguguggaugggaagaacgaucagcgagaaguuacgcucagguuaugaaaccuucaaagucaucgaaggcugguccaaaccuaacuccaaguuacagauaaacaggcaagucauaguugaaagaggcaacagguccgguuauucugguauuuucuccguugaaggcaaaagcugcaucaaucggugcuuuuauguggaguugauaaggggaaggaaagaggaaacugaagucugguggaccucaaacaguauuguuguguuuuguggcaccucagguacauauggaacaggcucauggccugauggggcggauaucaaucucaugccuauauaa

SEQ ID NO: 46282 - RNA, 1410 nt, Artificial Sequence
  derived and/or modified CDS sequence (wt) from neuraminidase__InfluenzaA__AAY47055
augaauccaaaucaaaagauaauaacgauuggcucuguuucucucaccauugccacaauaugcuuccuuaugcaaauugccauccugguaacuacuguaacauugcauuucaagcaauaugaaugcaacucccccccaaacaaccaagugaugcugugugaaccaacaauaauagaaagaaacauaacagagauaguguaucugaccaacaccaccauagagaaggaaauaugccccaaacuagcagaauacagaaauuggucaaagccgcaauguaacauuacaggauuugcaccuuuuucuaaggacaauucgauucggcuuuccgcugguggggacaucugggugacaagagaaccuuaugugucaugcgauccugacaaguguuaucaauuugcccuuggacagggaacaacacuaaacaacggacauucaaaugacacaguacaugauaggaccccuuaucggacccuauugaugaaugaguuggguguuccauuucauuugggaaccaagcaagugugcauagcaugguccagcucaaguugucacgauggaaaagcauggcugcauguuuguguaacgggggaugaugaaaaugcaacugcuagcuucauuuacaaugggaggcuuguagauaguauugguucaugguccaaaaaaauccucaggacccaggaaucggaaugcguuuguaucaauggaacuuguacaguaguaaugacugaugggagugcuucaggaaaagcugauacuaaaauacuauucauugaggaggggaaaaucguucauacuagccuauugucaggaagugcucagcaugucgaggagugcuccuguuauccucgauacccuggugucagaugugucugcagagacaacuggaaaggcuccaauaggcccaucguagauauaaauguaaaggauuauagcauuguuuccaguuaugugugcucaggacuuguuggagacacacccagaaaaaacgacagcuccagcaguagccauugcuuggauccuaacaaugaggaagguggucauggagugaaaggcugggccuuugaugauggaaaugacguguggaugggaagaacgaucagcgagaaguuacgcucaggauaugaaaccuucaaagucauugaaggcugguccaaaccuaacuccaaauugcagauaaauaggcaagucauaguugacagagguaauagguccgguuauucugguauuuucucuguugaaggcaaaagcugcaucaaucggugcuuuuauguggaguugauaaggggaaggaaacaggaaacugaagucuuguggaccucaaacaguauuguuguguuuuguggcaccucagguacauauggaacaggcucauggccugauggggcggacaucaaucucuuuccuauauaa

SEQ ID NO: 46283 - RNA, 1410 nt, Artificial Sequence
  derived and/or modified CDS sequence (wt) from neuraminidase__InfluenzaA__AAY47078
augaauccaaaucaaaagauaauaacaauuggcucuguuucucucaccauugccacaauaugcuuccuuaugcaaauugccauccugguaacuacuguaacauugcauuucaagcaguaugaaugcaacucccccccaaacaaccaaguaaugcugugugaaccaacaauaauagaaagaaacauaacagagauaguguaucugaccaacaccaccauagagaaggaaauaugccccaaacuagcagaauacagaaauuggucaaagccgcaauguaacaucacaggauuugcaccuuuuucuaaggacaauucgauucggcuuuccgcugguggggacaucugggugacaagagaaccuuaugugucaugcgaucaugacaaguguuaucaauuugcccuuggacagggaacaacacuaaacaacgggcauucgaaugacacaguacaugauaggaccccuuaccggacccuauugaugaaugaguuggguguuccauuucauuugggaaccaagcaagugugcauagcaugguccagcucaaguugucacgauggaaaagcauggcugcauguuuguguaacuggggaugaugaaaaugcaacugcuagcuucauuuacaaugggaggcuuguagauaguauugguucaugguccaaaaaaauacucaggacccaggagucggaaugcguuuguaucaauggaacuuguacaguaguaaugacugaugggagcgcuucaggaaaagcugauacuaaaauacuauucauugaggaggggaaaaucguucauauuagcacauugucaggaagugcccagcaugucgaggagugcuccuguuauccucgauauccuggugucagaugugucugcagggacaacuggaaaggcuccaauaggcccaucguagauauaaauguaaaggauuauagcauuguuuccaguuaugugugcucaggacuuguuggagacacacccagaaaaaaugacagcuucagcaguagccauugccuagauccuaacaaugaggaagguggucacggagugaagggcugggccuuugaugauggaaaugacguuuggaugggaagaacgaucagcgagaaguuacgcucagguuaugaaaccuucaaagucaucgaaggcugguccaaaccuaacuccaaauugcagauaaauaggcaagucauaguugaaagaggaaacagguccgguuauucugguauuuucuccguugaaggcaaaagcugcaucaaucggugcuuuuauguggaguugauaaggggaaggaaagaggaaacugaagucugguggaccucaaacaguauuguuguguuuuguggcaccucagguacauauggaacaggcucauggccugauggggcggauaucaaucucaugccuauauaa

SEQ ID NO: 46284 - RNA, 1410 nt, Artificial Sequence
  derived and/or modified CDS sequence (wt) from neuraminidase__InfluenzaA__AAY47088
augaauccaaaucaaaagauaauaacgauuggcucuguuucccucaccauuuccacaauaugcuucuucaugcaaauugccauccugauaacuacuguaacauugcauuucaagcaauaugaauucaacucccccccaaacaaccaagugaugcugugugaaccaacaauaauagaaagaaacauaacagagauaguguaucugaccaacaccaccauagagaaggaaauaugccccaaacuagcagaauacagaaauuggucaaagccgcaauguaacauuacaggauuugcaccuuuuucuaaggacaauucgauucggcuuuccgcugguggggacaucugggugacaagagaaccuuaugugucaugcgauccugacaaguguuaucaauuugcccuuggacagggaacaacacuaaacaacgugcauucaaaugacacaguacaugauaggaccccuuaucggacccuauugaugaaugaguuggguguuccauuucaucuggggaccaagcaagugugcauagcaugguccagcucaaguugucacgauggaaaagcauggcugcauguuuguguaacgggggaugaugaaaaugcaacugcuagcuucauuuacaaugggaggcuuguagauaguauuguuucaugguccaaaaaaauccucaggacccaggagucagaaugcguuuguaucaauggaacuuguacaguaguaaugacugaugggagugcuucaggaaaagcugauacuaaaauacuauucauugaggaggggaaaauuguucauacuagcacauuaucaggaagugcucagcaugucgaggagugcuccuguuauccucgauauccuggugucagaugugucugcagagacaacuggaaaggcuccaauaggcccaucguagauauaaacauaaaggaucauagcauuguuuccaguuaugugugcucaggacuuguuggagacacacccagaaaaaacgacagcuccaguaguagccauugcuuggacccaaacaaugaggaagguggucauggagugaaaggcugggccuuugaugauggaaaugacguguggaugggaagaacgaucagcgagaaguuacgcucaggauaugaaaccuucaaagucauugaaggcugguccaacccuaacuccaaauugcagauaaauaggcaagucauaguugacagagguaacagguccgguuauucugguauuuucucuguugaaggcaaaagcugcaucaaucggugcuuuuauguggaguugauaaggggaagaaaacaggaaacugaagucuuguggaccucaaacaguauuguuguguuuuguggcaccucagguacauauggaacaggcucauggccugauggggcggacaucaaucucaugccuauauaa

SEQ ID NO: 46285 - RNA, 1410 nt, Artificial Sequence; identical to SEQ ID NO: 46149
  derived and/or modified CDS sequence (wt) from neuraminidase__InfluenzaA__AAY58319

SEQ ID NO: 46286 - RNA, 1392 nt, Artificial Sequence
  derived and/or modified CDS sequence (wt) from neuraminidase__InfluenzaA__AAY59038
augaauccaaaucaaaagauaauaacgauuggcucuguuucucucaccauugccacaauaugcuuccuuaugcaaauugccauccugguaacuacuguaacauugcauuucaagcaauaugaaugcaacucccccccaaacaaccaagugaugcugugugaaccaacaauaauagaaagaaacauaacagagauaguguaucugaccaacaccaccauagagaaggaaauaugccccaaacuagcagaauacagaaauuggucaaagccgcaauguaacauuacaggauuugcaccuuuuucuaaggacaauucgauucggcuuuccgcugguggggacaucugggugacaagagaaccuuaugugucaugcgauccugacaaguguuaucaauuugcccuuggacagggaacaacaaaugacacaguacaugauaggaccccuuaucggacccuauugaugaaugaguuggguguuccauuucauuugggaaccaagcaagugugcauagcaugguccagcucaaguugucacgauggaaaagcauggcugcauguuuguguaacgggggaugaugaaaaugcaacugcuagcuucauuuacaaugggaggcuuguagauaguauugguucaugguccaaaaaaauccucaggacccaggagucggaaugcguuuguaucaauggaacuuguacaguaguaaugacugaugggagugcuucaggaaaagcugauacuaaaauacuauucauugaggaggggaaaaucguucauacuagcccauugucaggaagugcucagcaugucgaggagugcuccuguuauccucgauauccuggugucagaugugucugcagagacaacuggaaaggcuccaauaggcccaucguagauauaaauguaaaggauuauagcauuguuuccaguuaugugugcucaggacuuguuggagacacacccagaaaaaacgacagcuccagcaguagccauugcuuggauccuaacaaugaggaagguggucauggagugaaaggcugggccuuugaugauggaaaugacguguggaugggaagaacgaucagcgagaaguuacgcucaggauaugaaaccuucaaagucauugaaggcugguccaaaccuaacuccaaauugcagauaaauaggcaagucauaguugacagagguaauagguccgguuauucugguauuuucucuguugaaggcaaaagcugcaucaaucggugcuuuuauguggaguugauaaggggaaggaaacaggaaacugaagucuuguggaccucaaacaguauuguuguguuuuguggcaccucagguacauauggaacaggcucauggccugauggggcggacaucaaucucaugccuauauaa

SEQ ID NO: 46287 - RNA, 1410 nt, Artificial Sequence
  derived and/or modified CDS sequence (wt) from neuraminidase__InfluenzaA__AAY64195
augaauccaaaucaaaagauaauaacgauuggcucuguuucucucacuauugccacaauaugcuuccuuaugcaaauugccauccugguaacuacuguaacauugcauuucaagcaauaugaaugcaacucucucccaaacaaccaaguaaugcugugugaaccaacaauaauagaaagaaacauaacagagauaguguaccugaccaacaccaccauagagaaggaaauaugccccaaacuagcagaauacagaaauuggucaaagccgcaauguaaaauuacaggauuugcaccuuuuucuaaggacaauucaauucggcuuuccgcugguggggacauuugggugacaagagaaccuuaugugucaugcgauccugacaaguguuaucaauuugcccuuggacagggaacaacacuaaacaacaggcauucaaaugacacaguacaugauaggaccccuuaucgaacccuauugaugaaugaguuggguguuccauuucauuugggaaccaagcaagugugcauagcaugguccagcucaaguugucacgauggaaaagcauggcugcauguuuguguaacugggcacgaugaaaaugcaacugcuagcuucauuuacgaugggaggcuuguagauaguauugguucaugguccaaaaaaauccucaggacccaggagucggaaugcguuuguaucaauggaacuuguacaguaguaaugacugaugggagugcuucaggaagagcugauacuaaaauacuauucauugaggaggggaaaaucauucauauuagccaauugucaggaagugcucagcaugucgaggagugcucauguuauccucgauauccuggugucagaugugucugcagagacaacuggaaaggcuccaauaggcccauuguagauauaaauguaaaggauuauagcauuguuuccaguuaugugugcucaggacuuguuggagacacacccagaaaaaacgacagcuccagcaguagccauugccugaauccuaacaaugaggaagggggucauggagugaaaggcugggccuuugaugauggaaaugacguguggaugggaagaacgaucagcgagaaauuccgcucagguuaugaaaccuucaaagucauugaaggcugguccaaaccuaacucuaaauugcagauaaauaggcaagucauaguugacagagauaauagguccgguuauucugguauuuucucuguugaaggcaaaagcugcaucaaucggugcuuuuauguggaguugauaaggggaaggaaacaggaagcugaaguaugguggaccucaaacaguauuguuguguuuuguggcaccucagguacauauggaacaggcucauggccugauggggcggacaucaaucucaugccuauauaa

SEQ ID NO: 46288 - RNA, 1410 nt, Artificial Sequence; identical to SEQ ID NO: 46152
  derived and/or modified CDS sequence (wt) from neuraminidase__InfluenzaA__AAY64205

SEQ ID NO: 46289 - RNA, 1410 nt, Artificial Sequence; identical to SEQ ID NO: 46181
  derived and/or modified CDS sequence (wt) from neuraminidase__InfluenzaA__AAY64215

SEQ ID NO: 46290 - RNA, 1410 nt, Artificial Sequence
  derived and/or modified CDS sequence (wt) from neuraminidase__InfluenzaA__AAY64225
augaauccaaaucaaaagauaauaacaauuggcucuguuucucucaccauugccacaauaugcuuccucaugcaaauuaccauccugguaacuacuguaacauugcauuucaagcaguaugaaugcaacccccccccaaacaaccaaguaaugcugugugaaccaacaauaauagaaagaaacauaacagagauaguguaucugaccaacaccaccauagagaaggaaauaugcccaaaacuagcagaauacagaaauuggucaaagccgcaauguaacauuacaggauuugcaccuuuuucuaaggacaauucgauucggcuuuccgcugguggggacaucugggugacaagagaaccuuaugugucaugcgauccugacaaguguuaucaauuugcccuugggcagggaacaacacuaaacaacggacauucgaaugacacaguacaugauaggaccccuuaccggacccuauugaugaaugaauuggguguuccauuucauuugggaaccaggcaagugugcauagcaugguccagcucaaguugucacgauggaaaagcauggcugcauguuuguguaacuggggaugaugaaaaugcaacugcuagcuucauuuacaaugggaggcuuguagauaguauugguucaugguccaaaaaaauacucagaacccaggagucggaaugcguuuguaucaauggaacuuguacaguaguaaugacugaugggagcgcuucaggaaaagcugacacuaaaauacuauucauugaggaggggaaaaucguucauauuagcacauugucaggaagugcucagcaugucgaggagugcuccuguuauccucgauauccuggugucagaugugucugcagagacaacuggaaaggcuccaauaggcccauuguagauauaaauguaaaggauuauagcauuguuuccaguuaugugugcucaggacuuguuggagacacacccagaaaaaacgacagcuucagcaguagccauugccuagauccuaacaaugaggaagguggucauggagugaaaggcugggccuuugaugauggaaaugacguguggaugggaagaacgaucagcgagaaguuacgcucagguuaugaaaccuucaaagucaucgaaggcugguccaaaccuaacuccaaauuacagauaaauaggcaagucauaguugaaagagguaacagguccgguuauucugguauuuucuccguugaaggcaaaagcugcaucaaucggugcuuuuauguggaguugauaaggggaaggaaagaggaaaaugaagucugguggaccucaaacaguauuguuguguuuuguggcaccucagguacauauggaacaggcucauggccugauggggcggauaucaaucucaugccuauauaa

SEQ ID NO: 46291 - RNA, 1410 nt, Artificial Sequence
  derived and/or modified CDS sequence (wt) from neuraminidase__InfluenzaA__AAY64245
augaauccaaaucaaaagauaauaacgauuggcucuguuucucucacuauugccacaauaugcuuccuuaugcaaauugccauccugguaacuacuguaacauugcauuucaagcaauaugaaugcaacucucucccaaacaaccaaguaaugcugugugaaccaacaauacuagaaagaaacauaacagagauaguguaucugaccaacaccaccauagagaaggaaauaugccccaaacuagcagaauacagaaauuggucaaagccgcaauguaaaauuacaggauuugcaccuuuuucuaaggacaauucaauucggcuuuccgcugguggggacauuugggugacaagagaaccuuaugugucaugcgauccugacaaguguuaucaauuugcccuuggacagggaacaacacuaaacaacaggcauucaaaugacacaguacaugauaggaccccuuaucgaacccuauugaugaaugaguuggguguuccauuucauuugggaaccaagcaagugugcauagcaugguccagcucaaguugucacgauggaaaagcauggcugcauguuuguguaacugggcacgaugaaaaugcaacugcuagcuucauuuacggugggaggcuuguagauaguauugguucaugguccaaaaaaauccucaggacccaggagucggaaugcguuuguaucaauggaacuuguacaguaguaaugacugaugggagugcuucaggaagagcugauacuaaaauacuauucauugaggaggggaaaaucauucauauuagccaauugucaggaagugcucagcaugucgaggagugcucauguuauccucgauauccuggugucagaugugucugcagagacaacuggaaaggcuccaauaggcccauuguagauauaaauguaaaggauuauagcauuguuuccaguuaugugugcucaggacuuguuggagacacacccagaaaaaacgacagcuccagcaguagccauugccugaauccuaacaaugaggaagggggucauggaguaaaaggcugggcauuugaugauggaaaugacguguggaugggaagaacgaucagcgagaaauuccgcucagguuaugaaaccuucaaagucauugaaggcugguccaaaccuaacuccaaauugcagauaaauaggcaggucauaguugacagagauaauagguccgguuauucugguauuuucucuguugaaggcaaaagcugcaucaaucggugcuuuuauguggaguugauaaggggaaggaaacaggaaacugaagucugguggaccucaaacaguauuguuguguuuuguggcaccucagguacauauggaacaggcucauggccugauggggcggacaucaaucucaugccuauauaa

SEQ ID NO: 46292 - RNA, 1410 nt, Artificial Sequence
  derived and/or modified CDS sequence (wt) from neuraminidase__InfluenzaA__AAY64255
augaauccaaaucaaaagauaauaacgauuggcucuguuucucucaccauugccacaauaugcuuccuuaugcaaauugccauccugguaacuacuguaacauugcauuucaagcaauaugaaugcaacucccccccaaacaaccaagugaugcugugugaaccaacaauaauagaaagaaacauaacagagauaguguaucugaccaacaccaccauagagaaggaaauaugccccaaacuagcagaauacagaaauuggucaaagccgcaauguaacauuacaggauuugcaccuuuuucuaaggacaauucgauucggcuuuccgcugguggggacaucugggugacaagagaaccuuaugugucaugcgauccugacaaguguuaucaauuugcccuuggacagggaacaacacuaaacaacggacauucaaaugacacaguacaugauaggaccccuuaucggacccuauugaugaaugaguuggguguuccauuucauuugggaaccaagcaagugugcauagcaugguccagcucaaguugucacgauggaaaagcauggcugcauguuuguguaacaggggaugaugaaaaugcaacugcuagcuucauuuacaaugggaggcuuguagauaguauugguucaugguccaaaaaaauccucaggacccaggagucggaaugcguuuguaucaauggaacuuguacaguaguaaugacugaugggagugcuucaggaaaagcugauacuaaaauacuauucauugaggaggggaaaaucguucauacuagccuauugucaggaagugcucagcaugucgaggagugcuccuguuauccucgauacccuggugucagaugugucugcagagacaacuggaaaggcuccaauaggcccaucguagauauaaauguaaaggauuauagcauuguuuccaguuaugugugcucaggacuuguuggagacacacccagaaaaaacgacagcuccagcaguagccauugcuuggauccuaacaaugaggaagguggucauggagugaagggcugggccuuugaugauggaaaugacguguggaugggaagaacgaucagcgagaaguuacgcucaggauaugaaaccuucaaagucauugaaggcugguccaaaccuaacuccaaauugcagauaaauaggcaagucauaguugacagagguaauagguccgguuauucugguauuuucucuguugaaggcaaaagcugcaucaaucggugcuuuuauguggaguugauaaggggaaggaaacaggaaacugaagucuuguggaccucaaacaguauuguuguguuuuguggcaccucagguacauauggaacaggcucauggccugauggggcggacaucaaucucaugccuauauaa

SEQ ID NO: 46293 - RNA, 1410 nt, Artificial Sequence
  derived and/or modified CDS sequence (wt) from neuraminidase__InfluenzaA__AAY64265
augaauccaaaucaaaagauaauaacgauuggcucuguuucucucacuauugccacaauaugcuuccuuaugcaaauugccauccugguaacuacuguaacauugcauuucaagcaauaugaaugcaacucucucccaaacaaccaaguaaugcugugugaaccaacaauacuagaaagaaacauaacagagauaguguaucugaccaacaccaccauagagaaggaaauaugccccaaacuagcagaauacagaaauuggucaaagccgcaauguaaaauuacaggauuugcaccuuuuucuaaggacaauucaauucggcuuuccgcugguggggacauuugggugacaagagaaccuuaugugucaugcgauccugacaaguguuaucaauuugcccuuggacagggaacaacacuaaacaacaggcauucaaaugacacaguacaugauaggaccccuuaucgaacccuauugaugaaugaguuggguguuccauuucauuugggaaccaagcaagugugcauagcaugguccagcucaaguugucacgauggaaaagcauggcugcauguuuguguaacugggcacgaugaaaaugcaacugcuagcuucauuuacggugggaggcuuguagauaguauugguucaugguccaaaaaaauccucaggacccaggagucggaaugcguuuguaucaauggaacuuguacaguaguaaugacugaugggagugcuucaggaagagcugauacuaaaauacuauucauugaggaggggaaaaucauucauauuagccaauugucaggaagugcucagcaugucgaggagugcucauguuauccucgauauccuggugucagaugugucugcagagacaacuggaaaggcuccaauaggcccauuguagauauaaauguaaaggauuauagcauuguuuccaguuaugugugcucaggacuuguuggagacacacccagaaaaaacgacagcuccagcaguagccauugccugaauccuaacaaugaggaagggggucauggaguaaaaggcugggcauuugaugauggaaaugacguguggaugggaagaacgaucagcgagaaauuccgcucagguuaugaaaccuucaaagucauugaaggcugguccaaaccuaacuccaaauugcagauaaauaggcaagucauaguugacagagauaauagguccgguuauucugguauuuucucuguugaaggcaaaagcugcaucaaucggugcuuuuauguggaguugauaaggggaaggaaacaggaaacugaagucugguggaccucaaacaguauuguuguguuuuguggcaccucagguacauauggaacaggcucauggccugauggggcggacaucaaucucaugccuauauaa

SEQ ID NO: 46294 - RNA, 1410 nt, Artificial Sequence
  derived and/or modified CDS sequence (wt) from neuraminidase__InfluenzaA__AAY64285
augaauccaaaucaaaagauaauaacgauuggcucuguuucucucacuauugccacaauaugcuuccuuaugcaaauugccauccugguaacuacuguaacauugcauuucaagcaauaugaaugcaacucucucccaaacaaccaaguaaugcugugugaaccaacaauacuagaaagaaacauaacagagauaguguaucugaccaacaccaccauagagaaggaaauaugccccaaacuagcagaauacagaaauuggucaaagccgcaauguaaaauuacaggauuugcaccuuuuucuaaggacaauucaauucggcuuuccgcugguggggacauuugggugacaagagaaccuuaugugucaugcgauccugacaaguguuaucaauuugcccuuggacagggaacaacacuaaacaacaggcauucaaaugacacaguacaugauaggaccccuuaucgaacccuauugaugaaugaguuggguguuccauuucauuugggaaccaagcaagugugcauagcaugguccagcucaaguugucacgauggaaaagcauggcugcauguuuguguaacugggcacgaugaaaaugcaacugcuagcuucauuuacggugggaggcuuguagauaguauugguucaugguccaaaaaaauccucaggacccaggagucggaaugcguuuguaucaauggaacuuguacaguaguaaugacugaugggagugcuucaggaagagcugauacuaaaauauuauucauugaggaggggaaaaucauucauauuagccaauugucaggaagugcucagcaugucgaggagugcucauguuauccucgauauccuggugucagaugugucugcagagacaacuggaaaggcuccaauaggcccauuguagauauaaauguaaaggauuauagcauuguuuccaguuaugugugcucaggacuuguuggagacacacccagaaaaaacgacagcuccagcaguagccauugccugaauccuaacaaugaggaagggggucauggaguaaaaggcugggcauuugaugauggaaaugacguguggaugggaagaacgaucagcgagaaauuccgcucagguuaugaaaccuucaaagucauugaaggcugguccaaaccuaacuccaaauugcagauaaauaggcaagucauaguugacagagauaauagguccgguuauucugguauuuucucuguugaaggcaaaagcugcaucaaucggugcuuuuauguggaguugauaaggggaaggaaacaggaaacugaagucugguggaccucaaacaguauuguuguguuuuguggcaccucagguacauauggaacaggcucauggccugauggggcggacaucaaucucaugccuauauaa

SEQ ID NO: 46295 - RNA, 1410 nt, Artificial Sequence
  derived and/or modified CDS sequence (wt) from neuraminidase__InfluenzaA__AAY64295
augaauccaaaucaaaagauaauaacaauuggcucuguuucucucaccauugccacaauaugcuuccuuaugcaaauugccauccugguaacuacuguaacauugcauuucaagcaguaugaaugcaacucccccccaaacaaccaaguaaugcugugugaaccaacaauaauagaaagaaacauaacagagauaguguaucugaccaacaccaccauagagaaggaaauaugccccaaacuaucagaauacagaaauuggucaaagccgcaauguaacaucacaggauuugcaccuuuuucuaaggacaauucgauucggcuuuccgcugguggggacaucugggugacaagagaaccuuaugugucaugcgauccugacaaguguuaucaauuugcccuuggacagggaacaacacuaaacaacgggcauucaaaugacacaguacaugauaggaccccuuaccggacccuauugaugaaugaguuggguguuccauuucauuugggaaccaagcaagugugcauagcaugguccagcucaaguugucacgauggaaaagcauggcugcauguuuguguaacuggggaugaugaaaaugcaacugcuagcuucauuuauaaugggaggcuuguagauaguauugguucaugguccaaaaaaauacucaggacccaggagucggaaugcguuuguaucaauggaacuuguacaguaguaaugacugaugggagugcuucaggaaaagcugauacuaaaauacuauucauugaggaggggaaaaucguucauauuagcacauugucaggaagugcucagcaugucgaggagugcuccuguuauccucgauauccuggugucagaugugucuguagggacaauuggaaaggcuccaauaggcccaucguagauauaaauguaaaggaccauagcauuguuuccaguuaugugugcucaggacuuguuggagacacacccagaaaaaaugacagcuucagcaguagccauugccuagauccuaacaaugaggaagguggucauggagugaaaggcugggccuuugaugauggaaaugacguguggaugggaagaacgaucagcgagaaguuacgcucagguuaugaaaccuucaaagucaucgaaggcugguccaaaccuaacuccaaauugcagauaaauaggcaagucauaguugaaagagguaacagguccgguuauucugguauuuucuccguugaaggcaaaagcugcaucaaucggugcuuuuauguggaguugauaaggggaaggaaagaggaaacugaagucugguggaccucaaacaguauuguuguguuuuguggcaccucggguacauauggaacaggcucauggccugauggggcggauaucaaucucaugccuauauaa

SEQ ID NO: 46296 - RNA, 1410 nt, Artificial Sequence
  derived and/or modified CDS sequence (wt) from neuraminidase__InfluenzaA__AAY64305
augaauccaaaucaaaagauaauaacgauuggcucuguuucucucacuauugccacaauaugcuuccuuaugcaaauagccauccugguaacuacuguaacauugcauuucaagcaauaugaaugcaacucccccccaaacaaccaaguaaugcugugugaaccaacaauaauagaaagaaacauaacagagauaguguaucugaccaacaccaccauagagaaggaaauaugccccaaacuagcagaauacagaaauuggucaaagccgcaauguaaaauuacaggauuugcaccuuuuucuaaggauaauucaauucggcuuuccgcugguggggacauuugggugacaagagaaccuuaugugucaugcgauccugacaaguguuaucaauuugcccuuggacagggaacaacacuaaacaacaggcauucaaaugacacaguacaugauaggaccccuuaucgaacccuauugaugaaugaguuggguguuccauuucauuugggaaccaagcaaguguguauagcaugguccagcucaaguugucacgauggaaaagcauggcugcauguuuguguaacugggcaugaugaaaaugcaacugcuagcuucauuuacgaugggagacuuguagauaguauugguucaugguccaaaaaaauccucaggacccaggagucggaaugcguuuguaucaauggaacuuguacaguaguaaugacugaugggagugcuucaggaagagcugauacuaaaauacuauucauugaggaggggaaaaucguucauacuagcaaauugucaggaagugcucagcaugucgaggagugcuccuguuauccucgauauccuggugucagaugugucugcagagacaacuggaaaggcuccaauaggcccaucguagauauaaauguaaaggauuauagcauuguuuccaguuaugugugcucaggacuuguuggagacacacccagaaaaaacgacagcuccagcaguagccauugccuggauccuaacaaugaagaagggggucauggagugaaaggcugggccuuugaugauggaaaugacguguggaugggaagaacgaucagcgagaagucacgcucagguuaugaaaccuucaaggucauugaaggcugguccaaaccuaacuccaaauugcagauaaauaggcaagucauaguugaaagagguaauauguccgguuauucugguauuuucucuguugaaggcaaaagcugcaucaaucggugcuuuuauguggaguugauaaggggaaggaaacaggaaacugaagucugguggaccucaaacaguauuguuguguuuuguggcaccucagguacauauggaacaggcucauggccugauggggcggacaucaaucucaugccuauauaa

SEQ ID NO: 46297 - RNA, 1410 nt, Artificial Sequence; identical to SEQ ID NO: 46262
  derived and/or modified CDS sequence (wt) from neuraminidase__InfluenzaA__AAY64335

SEQ ID NO: 46298 - RNA, 1410 nt, Artificial Sequence
  derived and/or modified CDS sequence (wt) from neuraminidase__InfluenzaA__AAY64365
augaauccaaaucaaaagauaauaacaauuggcucuguuucucucaccauugccacaauaugcuuccuuaugcaaauugccauccugguaacuacuguaacauugcauuucaagcagcaugaaugcaacucccccccaaacaaccaaguaaugcugugugaaccaacaauaauagaaagaaacauaacagagauaguguaucugaccaacaccaccauagagagggaaauaugccccaaacuagcagaauacagaaauuggucaaagccgcaauguaacauuacaggauuugcaccuuuuucuaaggacaauucgauucgacuuuccgcugguggugacaucugggugacaagagaaccuuaugugucaugcgauccugacaaguguuaucaauuugcccuugggcagggaacaacacuaaacaacgggcauucaaaugacacaguacaugauaggaccccuuaccggacccuauugaugaaugaauuggguguuccauuucauuugggaaccaggcaagugugcauagcaugguccagcucaaguugucacgauggaaaagcauggcugcauguuuguguaacuggggaugauaaaaaugcaacugcuagcuucauuuacaaugggaggcuuguagauaguauugguucaugguccaaaaaaauacucagaacccaggagucggaaugcguuuguaucaauggaacuuguacaguaguaaugacugaugggagcgcuucaggaaaagcugauacuaaaauacuauucauugaggaggggaaaaucguucauauuagcacauugucaggaagugcucagcaugucgaggaguguuccuguuauccucgauauccuggugucagaugugucugcagagacaacuggaaaggcuccaauaggcccauuguagauauaaauguaaaggauuauagcauuguuuccaguuaugugugcucaggacuuguuggagacacacccagaaaaaacgacagcuccagcaguagccauugccuagauccuaacaaugaggaagguggucauggagugaaaggcugggccuuugaugauggaaaugacguguggaugggaagaacgaucagcgagaaguuacgcucagguuaugaaaccuucaaagucaucgaaggcugguccaaaccuaacuccaaauuacagauaaauaggcaaguuauaguugaaagagguaacagguccgguuauucugguauuuucuccguugaaggcaaaagcugcaucaaucggugcuuuuauguggaguugauaaggggaaggaaagaggaaacugaagucugguggaccucaaacaguauuguuguguuuuguggcaccucagguacauauggaacaggcucauggccugauggggcggacaucaaucucaugccuauauaa

SEQ ID NO: 46299 - RNA, 1410 nt, Artificial Sequence
  derived and/or modified CDS sequence (wt) from neuraminidase__InfluenzaA__AAY64385
augaauccaaaucaaaagauaauaacgauuggcucuguuucucucacuauugccacaauaugcuuccuuaugcaaauugccauccugguaacuacuguaacauugcauuucaagcaauaugaaugcaacucucucccaaacaaccaaguaaugcugugugaaccaacaauacuagaaagaaacauaacagagauaguguaucuaaccaacaccaccauagagaaggaaauaugccccaaacuagcagaauacagaaauuggucaaagccgcaauguaaaauuacaggauuugcaccuuuuucuaaggacaauucaauucggcuuuccgcugguggggacauuugggugacaagagaaccuuaugugucaugcgauccugacaaguguuaucaauuugcccuuggacagggaacaacacuaaacaacaggcauucaaaugacacaguacaugauaggaccccuuaucgaacccuauugaugaaugaguuggguguuccauuucauuugggaaccaagcaagugugcauagcaugguccagcucaaguugucacgauggaaaagcauggcugcauguuuguguaacugggcacgaugaaaaugcaacugcuagcuucauuuacggugggaggcuuguagauaguauugguucaugguccaaaaaaauccucaggacccaggagucggaaugcguuuguaucaauggaacuuguacaguaguaaugacugaugggagugcuucaggaagagcugauacuaaaauacuauucauugaggaggggaaaaucauucauauuagccaauugucaggaagugcucagcaugucgaggagugcucauguuauccucgauauccuggugucagaugugucugcagagacaacuggaaaggcuccaauaggcccauuguagauauaaauguaaaggauuauagcauuguuuccaguuaugugugcucaggacuuguuggagacacacccagaaaaaacgacagcuccagcaguagccauugccugaauccuaacaaugaggaagggggucauggaguaaaaggcugggcauuugaugauggaaaugacguguggaugggaagaacgaucagcgagaaaucccgcucagguuaugaaaccuucaaagucauugaaggcugguccaaaccuaacuccaaauugcagauaaauaggcaagucauaguugacagagauaauagguccgguuauucugguauuuucucuguugaaggcaaaagcugcaucaaucggugcuuuuauguggaguugauaaggggaaggaaacaggaaacugaagucugguggaccucaaacaguauuguuguguuuuguggcaccucagguacauauggaacaggcucauggccugauggggcggacaucaaucucaugccuauauaa

SEQ ID NO: 46300 - RNA, 1410 nt, Artificial Sequence
  derived and/or modified CDS sequence (wt) from neuraminidase__InfluenzaA__AAY64395
augaauccaaaucaaaagauaauaacgauuggcucuguuucucucaucauuuccacaauaugcuucuucaugcaaauugccaucuugauaacuacuguaacauugcauuucaagcaauaugaauucaacucccccccaaacaaccaagugaugcugugugaaccaacaauaauagaaagaaacauaacagagauaguguaucugaccaacaccaccauagagaaggaaauaugccccaaacuagcagaauacagaaauuggucaaagccgcaaugugacauuacaggauuugcaccuuuuucuaaggacaauucgauucggcuuuccgcugguggggacaucugggugacaagagaaccuuaugugucaugcgauccugacaaguguuaucaauuugcccuuggacagggaacaacacuaaacaacgugcauucaaaugacacaguacaugauaggaccccuuaucggacccuauugaugaaugaguuagguguuccauuucaucuggggaccaagcaagugugcauagcaugguccagcucaaguugucacgauggaaaagcauggcugcauguuuguguaacgggggaugaugaaaaugcaacugcuagcuucauuuacaaugggaggcuuguagauaguauuguuucaugguccaaaaaaauccucaggacccaggagucagaaugcguuuguaucaauggaacuuguacaguaguaaugacugaugggagugcuucaggaaaagcugauacuaaaauacuauucauuaaggaggggaaaaucguucauacuagcacauugucaggaagugcucagcaugucgaggagugcuccuguuauccucgauauccuggugucagaugugucugcagagacaauuggaaaggcuccaauaggcccaucguagauauaaacauaaaggauuauagcauuguuuccaguuaugugugcucaggacuuguuggagacacacccagaaaaaacgacagcuccagcagcagccauugcuuggauccuaacaaugaagaagguggucauggagugaaaggcugggccuuugaugauggaaaugacguguggaugggaagaacgaucagcgaaaaguuacgcucaggauaugaaaccuucaaagucauugaaggcugguccaacucuaauuccaaauugcagauaaauaggcaagucauaguugacagggguaauagguccgguuauucugguauuuucucuguugaaggcaaaagcugcaucaaucggugcuuuuauguggaguugauaaggggaagaaaagaggaaacugaagucuuguggaccucaaacaguauuguuguguuuuguggcaccucagguacauauggaacaggcucauggccugauggggcggacaucaaucucaugccuauauaa

SEQ ID NO: 46301 - RNA, 1410 nt, Artificial Sequence
  derived and/or modified CDS sequence (wt) from neuraminidase__InfluenzaA__AAY64405
augaauccaaaccaaaagauaauaacgauuggcucuguuucucucacuauugccacaauaugcuuccuuaugcaaauagccauccugguaacuacuguaacauugcauuucaagcaauaugaaugcaacucccccccaaacaaccaaguaaugcugugugaaccaacaauaauagaaagaaacauaacagagauaguguaucugaccaacaccaccauagagaaggaaauaugccccaaacuagcagaauacagaaauuggucaaagccgcaauguaaaauuacaggauuugcaccuuuuucuaaggauaauucaauucggcuuuccgcugguggggacauuugggugacaagagaaccuuaugugucaugcgauccugacaaguguuaucaauuugcccuuggacagggaacaacacuaaacaacaggcauucaaaugacacaguacaugauaggaccccuuaucgaacccuauugaugaaugaguuggguguuccauuucauuugggaaccaagcaaguguguauagcaugguccagcucaaguugucacgauggaaaagcauggcugcauguuuguguaacugggcaugaugaaaaugcaacugcuagcuucauuuacgaugggagacuuguagauaguauugguucaugguccaaaaaaauccucaggacccaggagucggaaugcguuuguaucaauggaacuuguacaguaguaaugacugaugggagugcuucaggaagagcugauacuaaaauacuauucauugaggaggggaaaaucguucauacuagcaaauugucaggaagugcucagcaugucgaggagugcuccuguuauccucgauauccuggugucagaugugucugcagagacaacuggaaaggcuccaauaggcccaucguagauauaaauguaaaggauuauagcauuguuuccaguuaugugugcucaggacuuguuggagacacacccagaaaaaacgacagcuccagcaguagccauugccuggauccuaacaaugaagaagggggucauggagugaaaggcugggccuuugaugauggaaaugacguguggaugggaagaacgaucagcgagaagucacgcucagguuaugaaaccuucaaggucauugaaggcugguccaaaccuaacuccaaauugcagauaaauaggcaagucauaguugaaagagguaauauguccgguuauucugguauuuucucuguugaaggcaaaagcugcaucaaucggugcuuuuauguggaguugauaaggggaaggaaacaggaaacugaagucugguggaccucaaacaguauuguuguguuuuguggcaccucagguacauauggaacaggcucauggccugauggggcggacaucaaucucaugccuauauaa

SEQ ID NO: 46302 - RNA, 1410 nt, Artificial Sequence; identical to SEQ ID NO: 46293
  derived and/or modified CDS sequence (wt) from neuraminidase__InfluenzaA__AAY98040

SEQ ID NO: 46303 - RNA, 1410 nt, Artificial Sequence
  derived and/or modified CDS sequence (wt) from neuraminidase__InfluenzaA__AAY98050
augaauccaaaucaaaagauaauaacgauuggcucuguuucucucacuauugccacaauaugcuuccuuaugcaaauugccauccugguaacuacuguaacauugcauuucaagcaauaugaaugcaacucucucccaaacaaccaaguaaugcugugugaaccaacaauacuagaaagaaacauaacagagauaguguaucugaccaacaccaccauagagaaggaaauaugccccaaacuagcagaauacagaaauuggucaaagccgcaauguaaaauuacaggauuugcaccuuuuucuaaggacaauucaauucggcuuuccgcugguggggacauuugggugacaagagaaccuuaugugucaugcgauccugacaaguguuaucaauuugcccuuggacagggaacaacacuaaacaacaggcauucaaaugacacaguacaugauaggaccccuuaucgaacccuauugaugaaugaguugggaguuccauuucauuugggaaccaagcaagugugcauagcaugguccagcucaaguugucacgauggaaaagcauggcugcauguuuguguaacugggcacgaugaaaaugcaacugcuagcuucauuuacggugggaggcuuguagauaguauugguucaugguccaaaaaaauccucaggacccaggagucggaaugcguuuguaucaauggaacuuguacaguaguaaugacugaugggagugcuucaggaagagcugauacuaaaauacuauucauugaggaggggaaaaucauucauauuagccaauugucaggaagugcucagcaugucgaggagugcucauguuauccucgauauccuggugucagaugugucugcagagacaacuggaaaggcuccaauaggcccauuguagauauaaauguaaaggauuauagcauuguuuccaguuaugugugcucaggacuuguuggagacacacccagaaaaaacgacagcuccagcaguagccauugccugaauccuaacaaugaggaagggggucauggaguaaaaggcugggcauuugaugauggaaaugacguguggaugggaagaacgaucagcgagaaauuccgcucagguuaugaaaccuucaaagucauugaaggcugguccaaaccuaacuccaaauugcagauaaauaggcaagucauaguugacagagauaauagguccgguuauucugguauuuucucuguugaaggcaaaagcugcaucaaucggugcuuuuauguggaguugauaaggggaaggaaacaggaaacugaagucugguggaccucaaacaguauuguuguguuuuguggcaccucagguacauauggaacaggcucauggccugauggggcggacaucaaucucaugccuauauaa

SEQ ID NO: 46304 - RNA, 1410 nt, Artificial Sequence; identical to SEQ ID NO: 46269
  derived and/or modified CDS sequence (wt) from neuraminidase__InfluenzaA__AAY98060

SEQ ID NO: 46305 - RNA, 1410 nt, Artificial Sequence
  derived and/or modified CDS sequence (wt) from neuraminidase__InfluenzaA__AAY98070
augaauccaaaucaaaagauaauaacaauuggcucuguuucucucaccauugccacaauaugcuuccuuaugcaaauugccauccugguaacuacuguaacauugcauuucaagcaguaugaaugcaacucccccccaaacaaccaaguaaugcugugugaaccaacaauaauagaaagaaacauaacagagauaguguaucugaccaacaccaccauagagaaggaaauaugccccaaacuagcagaauacagaaauuggucaaagccgcaauguaacauuacaggauuugcaccuuuuucuaaggacaauucgauucggcuuuccgcugguggggacaucugggugacaagagaaccuuaugugucaugcgauccugacaaguguuaucaauuugcccuugggcagggaacaacacuaaacaacgggcauucaaaugacacaguacaugauaggaccccuuaccggacccuauugaugaaugaauuggguguuccauuucauuugggaaccaggcaagugugcauagcaugguccagcucaaguugucacgauggaaaagcauggcugcauguuuguguaacuggggaugaugaaaaugcaacugcuagcuucauuuacaaugggaggcuuguagauaguauugguucaugguccaaaaaaauacucagaacccaggagucggaaugcguuuguaucaauggaacuuguacaguaguaaugacugaugggagcgcuucaggaaaagcugauacuaaaauacuauucauugaggaggggaaaaucguucauauuagcacauugucaggaagugcucagcaugucgaggagugcuccuguuauccucgauauccuggugucagaugugucugcagagacaacuggaaaggcuccaauaggcccaucguagauauaaauguaaaggaucauagcauuguuuccaguuaugugugcucaggacuuguuggagacacacccagaaaaaacgacagcuucagcaguagccauugccuagacccuaacaaugaggaagguggucauggagugaaaggcugggccuuugaugauggaaaugacguguggaugggaagaacgaucagcgagaaguuacgcucagguuaugaaaucuucaaagucaucgaaggcugguccaaaccuaacuccaaauuacagauaaauaggcaagucauaguugaaagagguaacagguccgguuauucugguauuuucuccguugaaggcaaaagcugcaucaaucggugcuuuuauguggaguugauaaggggaaggaaagaggaaacugaagucugguggaccucaaacaguauuguuguguuuuguggcaccucagguacauauggaacaggcucauggccugauggggcggauaucaaucucaugccuauauaa

SEQ ID NO: 46306 - RNA, 1410 nt, Artificial Sequence
  derived and/or modified CDS sequence (wt) from neuraminidase__InfluenzaA__AAY98080
augaauccaaaucaaaagauaauaacaauuggcucuguuucucucaccauugccacaauaugcuuccuuaugcaaauugccauccugguaacuacuguaacauugcauuucaagcaguaugaaugcaacucccccccaaacaaccaaguaaugcugugugaaccagcaauaauagaaagaaacauaacagagauaguguaucugaccaacaccaccauagagaaggaaauaugccccaaauuagcagaauacagaaauuggucaaagccgcaauguaacauuacaggauuugcaccuuuuuccaaggacaauucgauucggcuuuccgcugguggggacaucugggugacaagagaaccuuaugugucaugcgauccugacaaguguuaucaauuugcccuuggacagggaacaacacuaaacaacgggcauucaaaugacacaguacaugauaggaccccuuacaggacccuauugaugaaugaauuggguguuccauuucauuugggaaccaggcaagugugcauagcaugguccagcucaaguugucacgauggaaaagcauggcugcauguuuguguaacuggggaugaugaaaaugcaacugcuagcuucauuuacgaugggaggcuuguagauaguauugguucaugguccaaaaaaauacucagaacccaggagucggaaugcguuuguaucaauggaacuuguacaguaguaaugacugaugggagcgcuucaggaaaagcugauacuaaaauacuauucauugaggaggggaaaaucguuaauauuagcacauugucaggaagugcucagcaugucgaggagugcuccuguuauccucgauauccuggugucagaugugucugcagagacaacuggaaaggcuccaauaggcccaucguagauauaaauguaaaggauuauagcauuguuuccaguuaugugugcucaggacuuguuggagacacacccagaaaaaacgacagcuucagcaguagccauugccuagauccuaacaaugaggaagguggucauggagugaaaggcugggccuuugaugauggaaaugacguguggaugggaagaacgaucagcgagaaguuacgcucagguuaugaaaccuucaaagucaucgaaggcugguccaaaccuaacuccaaauuacagauaaauaggcaagucauaguugaaagagguaacagguccgguuauucugguauuuucuccguugaaggcaaaagcugcaucaaucggugcuuuuauguggaguugauaaggggaaggaaagaggaaacugaaguuugguggaccucaaacaguauuguuguguuuuguggcaccucagguacauauggaacaggcucauggccugauggggcggauaucaaucucaugccuauauaa

SEQ ID NO: 46307 - RNA, 1410 nt, Artificial Sequence
  derived and/or modified CDS sequence (wt) from neuraminidase__InfluenzaA__AAY98090
augaauccaaaucaaaagauaauaacgauuggcucuguuucucucacuauugccacaauaugcuuccuuaugcaaauugccauccuggugacuacuguaacauugcauuucaagcaauaugaaugcaacucucucccaaacaaccaaguaaugcugugugaaccaacaauaauagaaagaaacauaacagagauaguguaucugaccaacaccaccauagagaaggaaauaugccccaaacuagcagaauacagaaauuggucaaagccgcaauguaaaauuacaggauuugcaccuuuuucuaaggacaauucaauucggcuuuccgcugguggggacauuugggugacaagagaaccuuaugugucaugcgauccugacaaguguuaucaauuugcccuuggacagggaacaacacuaaacaacaggcauucaaaugacacaguacaugauaggaccccuuaucgaacccuauugaugaaugaguuggguguuccauuucauuugggaaccaagcaagugugcauagcaugguccagcucaaguugucacgauggaaaagcauggcugcauguuuguguaacugggcacgaugaaaaugcaacugcuagcuucauuuacgauggaaggcuuguagauaguauugguucaugguccaaaaaaauccucaggacccaggagucggaaugcguuuguaucaauggaacuuguacaguaguaaugacugaugggagugcuucaggaaaagcugauacuaaaauacuauucauugaggaggggaaaaucauucauauuagccaauugucaggaagugcucagcaugucgaggagugcucauguuauccucgauauccuggugucagaugugucugcagagacaacuggaaaggcuccaauaggcccauuguagauauaaauguaaaggauuauagcauuguuuccaguuaugugugcucaggacuuguuggagacacacccagaaaaaacgacagcuccagcaguagccauugccugaauccuaacaaugaggaagggggucauggagugaaaggcugggccuuugaugauggaaaugacguguggaugggaagaacgaucagcgagaaauuccgcucagguuaugaaaccuucaaagucauugaaggcugguccaaaccuaacucuaaauugcagauaaauaggcaagucauaguugacagagauaauagguccgguuauucugguauuuucucuguugaaggcaaaagcugcaucaaucggugcuuuuauguggaguugauaaggggaaggaaacaggaaacugaagucugguggaccucaaacaguauuguuguguuuuguggcaccucagguacauauggaacaggcucauggccugauggggcggacaucaaucuuaugccuauauaa

SEQ ID NO: 46308 - RNA, 1410 nt, Artificial Sequence; identical to SEQ ID NO: 46293
  derived and/or modified CDS sequence (wt) from neuraminidase__InfluenzaA__AAY98100

SEQ ID NO: 46309 - RNA, 1410 nt, Artificial Sequence; identical to SEQ ID NO: 46291
  derived and/or modified CDS sequence (wt) from neuraminidase__InfluenzaA__AAY98110

SEQ ID NO: 46310 - RNA, 1410 nt, Artificial Sequence; identical to SEQ ID NO: 46293
  derived and/or modified CDS sequence (wt) from neuraminidase__InfluenzaA__AAY98120

SEQ ID NO: 46311 - RNA, 1410 nt, Artificial Sequence; identical to SEQ ID NO: 46303
  derived and/or modified CDS sequence (wt) from neuraminidase__InfluenzaA__AAY98130

SEQ ID NO: 46312 - RNA, 1410 nt, Artificial Sequence; identical to SEQ ID NO: 46293
  derived and/or modified CDS sequence (wt) from neuraminidase__InfluenzaA__AAY98150

SEQ ID NO: 46313 - RNA, 1410 nt, Artificial Sequence
  derived and/or modified CDS sequence (wt) from neuraminidase__InfluenzaA__AAY98160
augaauccaaaucaaaagauaauaacgauuggcucuguuucucucacuauugccacaauaugcuuccuuaugcaaauugccauccugguaacuacuguaacauugcauuucaagcaauaugaaugcaacucucucccaaacaaccaaguaaugcugugugaaccaacaauacuagaaagaaacauaacagagauaguguaucugaccaacaccaccauagagaaggaaauaugccccaaacuagcagaauacagaaauuggucaaagccgcaauguaaaauuacaggauuugcaccuuuuucuaaggacaauucaauucggcuuuccgcugguggggacauuugggugacaagagaaccuuaugugucaugcgauccugacaaguguuaucaauuugcccuuggacagggaacaacacuaaacaacaggcauucaaaugacacaguacaugauaggaccccuuaucgaacccuauugaugaaugaguuggguguuccauuucauuugggaaccaagcaagugugcauagcaugguccagcucaaguugucacgauggaaaagcauggcugcauguuuguguaacugggcacgaugaaaaugcaacugcuagcuucauuuacggugggaggcuuguagauaguauugguucaugguccaaaaaaauccucaggacccaggagucggaaugcguuuguaucaauggaacuuguacaguaguaaugacugaugggagugcuucaggaagagcugauacuaaaauacuauucauugaggaggggaaaaucauucauauuagccaauugucaggaaaugcucagcaugucgaggagugcucauguuauccucgauauccuggugucagaugugucugcagagacaacuggaaaggcuccaauaggcccauuguagauauaaauguaaaggauuauagcauuguuuccaguuaugugugcucaggacuuguuggagacacacccagaaaaaacgacagcuccagcaguagcaauugccugaauccuaacaaugaggaagggggucauggaguaaaaggcugggcauuugaugauggaaaugacguguggaugggaagaacgaucagcgagaaauuccgcucagguuaugaaaccuucaaagucauugaaggcugguccaaaccuaacuccaaauugcagauaaauaggcaagucauaguugacagagauaauagguccgguuauucugguauuuucucuguugaaggcaaaagcugcaucaaucggugcuuuuauguggaguugauaaggggaaggaaacaggaaacugaagucugguggaccucaaacaguauuguuguguuuuguggcaccucagguacauauggaacaggcucauggccugauggggcggacaucaaucucaugccuauauaa

SEQ ID NO: 46314 - RNA, 1410 nt, Artificial Sequence; identical to SEQ ID NO: 46293
  derived and/or modified CDS sequence (wt) from neuraminidase__InfluenzaA__AAY98170

SEQ ID NO: 46315 - RNA, 1410 nt, Artificial Sequence; identical to SEQ ID NO: 46293
  derived and/or modified CDS sequence (wt) from neuraminidase__InfluenzaA__AAY98180

SEQ ID NO: 46316 - RNA, 1410 nt, Artificial Sequence; identical to SEQ ID NO: 46293
  derived and/or modified CDS sequence (wt) from neuraminidase__InfluenzaA__AAY98200

SEQ ID NO: 46317 - RNA, 1410 nt, Artificial Sequence; identical to SEQ ID NO: 46293
  derived and/or modified CDS sequence (wt) from neuraminidase__InfluenzaA__AAY98210

SEQ ID NO: 46318 - RNA, 1410 nt, Artificial Sequence; identical to SEQ ID NO: 46296
  derived and/or modified CDS sequence (wt) from neuraminidase__InfluenzaA__AAY98220

SEQ ID NO: 46319 - RNA, 1410 nt, Artificial Sequence; identical to SEQ ID NO: 46291
  derived and/or modified CDS sequence (wt) from neuraminidase__InfluenzaA__AAY98230

SEQ ID NO: 46320 - RNA, 1410 nt, Artificial Sequence
  derived and/or modified CDS sequence (wt) from neuraminidase__InfluenzaA__AAY98250
augaauccaaaucaaaagauaauaacgauuggcucuguuucucucacuauugccacaauaugcuuccuuaugcaaauugccauccugguaacuacuguaacauugcauuucaagcaauaugaaugcaacucucucccaaacaaccaaguaaugcugugugaaccaacaauacuagaaagaaacauaacagagauaguguaucugaccaacaccaccauagagaaggaaauaugccccaaacuagcagaauacagaaauuggucaaagccgcaauguaaaauuacaggauuugcaccuuuuucuaaggacaauucaauucggcuuuccgcugguggggacauuugggugacaagagaaccuuaugugucaugcgauccugacaaguguuaucaauuugcccuuggacagggaacaacacuaaacaacaggcauucaaaugacacaguacaugauaggaccccuuaucgaacccuauugaugaaugaguuggguguuccauuucauuugggaaccaagcaagugugcauagcaugguccagcucaaguugucacgauggaaaagcauggcugcauguuuguguaacugggcacgaugaaaaugcaacugcuagcuucauuuacggugggaggcuuguagauaguauugguucaugguccaaaaaaauccucaggacccaggagucggaaugcguuuguaucaauggaacuuguacaguaguaaugacugaugggagugcuucaggaagagcugauacuaaaauacuauucauugaggaggggaaaaucauucauauuagccaauugucaggaagugcucagcaugucgaggagugcucauguuauccucgauauccuggugucagaugugucugcagagacaacuggaaaggcuccaauaggcccauuguagauauaaauguaaaggauuauagcauuguuuccaguuaugugugcucaggacuuguuggagacacacccagaaaaaacgacagcuccagcaguagccauugccugaauccuaacaaugaggaagggggucauggaguaaaaggcugggcauuugaugauggaaaugacguguggaugggaagaacgaucagcgagaaauuccgcucagguuaugaaaccuucaaagucauugaaggcugguccaaaccuaacuccaaauugcagauaaauaggcaagucauaguugacagagauaauagguccgguuauucugguauuuucucuguugaagacaaaagcugcaucaaucggugcuuuuauguggaguugauaaggggaaggaaacaggaaacugaagucugguggaccucaaacaguauuguuguguuuuguggcaccucagguacauauggaacaggcucauggccugauggggcggacaucaaucucaugccuauauaa

SEQ ID NO: 46321 - RNA, 1410 nt, Artificial Sequence; identical to SEQ ID NO: 46293
  derived and/or modified CDS sequence (wt) from neuraminidase__InfluenzaA__AAY98322

SEQ ID NO: 46322 - RNA, 1410 nt, Artificial Sequence; identical to SEQ ID NO: 46296
  derived and/or modified CDS sequence (wt) from neuraminidase__InfluenzaA__AAY98332

SEQ ID NO: 46323 - RNA, 1410 nt, Artificial Sequence; identical to SEQ ID NO: 46303
  derived and/or modified CDS sequence (wt) from neuraminidase__InfluenzaA__AAY98342

SEQ ID NO: 46324 - RNA, 1410 nt, Artificial Sequence; identical to SEQ ID NO: 46293
  derived and/or modified CDS sequence (wt) from neuraminidase__InfluenzaA__AAY98359

SEQ ID NO: 46325 - RNA, 1410 nt, Artificial Sequence
  derived and/or modified CDS sequence (wt) from neuraminidase__InfluenzaA__AAY98369
augaauccaaaucaaaagauaauaacgauuggcucuguuucucucacuauugccacaauaugcuuccuuaugcaaauagccauccugguaacuacuguaacguugcauuucaagcaauaugaaugcaacucccccccaaacaaccaaguaaugcugugugaaccaacaauaauagaaagaaacauaacagagauaguguaucugaccaacaccaccauagagaaggaaauaugccccaaacuagcagaauacagaaauuggucaaagccgcaauguaaaauuacaggauuugcaccuuuuucuaaggauaauucaauucggcuuuccgcugguggggacauuugggugacaagagaaccuuaugugucaugcgauccugacaaguguuaucaauuugcccuuggacagggaacaacacuaaacaacaggcauucaaaugacacuguacaugauaggaccccuuaucgaacccuauugaugaaugaguuggguguuccauuucauuugggaaccaagcaaguguguauagcaugguccagcucaaguugucacgauggaaaagcauggcugcauguuuguguaacugggcaugaugaaaaugcaacugcuagcuucauuuacgaugggagacuuguagauaguauugguucaugguccaaaaaaauccucaggacccaggagucggaaugcguuuguaucaauggaacuuguacaguaguaaugacugaugggagugcuucaggaagagcugauacuaaaauacuauucauugaggaggggaaaaucguucacacuagcaaauugucaggaagugcucagcaugucgaggagugcuccuguuauccucgauacccuggugucagaugugucugcagagacaacuggaaaggcuccaauaggcccaucguagauauaaauguaaaggauuauagcauuguuuccaguuaugugugcucaggacuuguuggagacacacccagaaaaaacgacagcuccagcaguagccauugccuggauccuaacaaugaagaagggggucauggagugaaaggcugggccuuugaugauggaaaugacguguggaugggaagaacgaucagcgagaagucacgcucagguuaugaaaccuucaaggucauugaaggcugguccaaaccuaacuccaaauugcagauaaauaggcaagucauaguugaaagagguaauauguccgguuauucugguauuuucucuguugaaggcaaaagcugcaucaaucggugcuuuuauguggaguugauaaggggaaggaaacaggaaacugaagucugguggaccucaaacaguauuguuguguuuuguggcaccucagguacauauggaacaggcucauggccugauggggcggacaucaaucucaugccuauauaa

SEQ ID NO: 46326 - RNA, 1410 nt, Artificial Sequence
  derived and/or modified CDS sequence (wt) from neuraminidase__InfluenzaA__AAY98379
augaauccaaaucaaaagauaauaacgauuggcucugucucucucacuauugccacaauaugcuuccuuaugcaaauugccauccugguaacuacuguaacauugcauuucaagcaauaugaaugcaacucucucccaaacaaccaaguaaugcugugugaaccaacaauaauagaaagaaacauaacagagauaguguaucugaccaacaccaccauagagaaggaaauaugccccaaacuagcagaauacagaaauuggucaaagccgcaauguaaaauuacaggauuugcaccuuuuucuaaggacaauucaauucggcuuuccgcugguggggacauuugggugacaagagaaccuuaugugucaugcgauccugacaaguguuaucaauuugcccuuggacagggaacaacacuaaacaacaggcauucaaacgacacaguacaugauaggaccccuuaucgaacccuauugaugaaugaguuggguguuccauuucauuugggaaccaagcaagugugcauagcaugguccagcucaaguugucacgauggaaaagcauggcugcauguuuguguaacugggcacgaugaaaaugcaacugccagcuucauuuacggugggaggcuuguagauaguauugguucaugguccaaaaaaauccucaggacccaggagucggaaugcguuuguaucaauggaacuuguacaguaguaaugacugaugggagugcuucaggaagagcugauacuaaaauacuauucauugaggaggggaaaaucauucauauuagccaauugucaggaagugcucagcaugucgaggagugcucauguuauccucgguauccuggugucagaugugucugcagagacaacuggaaaggcuccaauaggcccauuguagauauaaauguaaaggauuauagcauuguuuccaguuaugugugcucaggacuuguuggagacacacccagaaaaaacgacagcuccagcaguagccauugccugaauccuaacaaugaggaagggggucauggaguaaaaggcugggccuuugaugauggaaaugacguguggaugggaagaacgaucagcgagaaauuccgcucagguuaugaaaccuucaaagucauugaaggcugguccaaaccuaacuccaaauugcagauaaauaggcaagucauaguugacagaaauaauagguccgguuauucugguauuuucucuguugaaggcaaaagcugcaucaaucggugcuuuuauguggaguugauaaggggaaggaaacaggaaacugaagucugguggaccucaaacaguauuguuguguuuuguggcaccucagguacauauggaacaggcucauggccugauggggcggacaucaaucucaugccuauauaa

SEQ ID NO: 46327 - RNA, 1410 nt, Artificial Sequence
  derived and/or modified CDS sequence (wt) from neuraminidase__InfluenzaA__AAY98389
augaauccaaaucaaaagauaauaacgauuggcucuguuucucucacuauugccacaauaugcuuccuuaugcaaauugccauccugguaacuacuguaacauugcauuucaagcaauaugaaugcaacucucucccaaacaaccaaguaaugcugugugaaccaacaauaauagaaagaaacauaacagagauaguguaucugaccaacaccaccauagagaaggaaauaugccccaaacuagcagaauacagaaauuggucaaagccgcaauguaaaauuacaggauuugcaccuuuuucuaaggacaauucaauucggcuuuccgcugguggggacauuugggugacaagagaaccuuaugugucaugcgauccugacaaguguuaucaauuugcccuuggacagggaacaacacuaaacaacaggcauucaaaugacacaguacaugauaggaccccuuaucgaacccuauugaugaaugaguuggguguuccauuucauuugggaaccaagcaagugugcauagcaugguccagcucaaguugucacgauggaaaagcauggcugcauguuuguguaacugggcacgaugaaaaugcaacugcuagcuucauuuacggugggaggcuuguagauagcauugguucaugguccaaaaaaauccucaggacccaggagucggaaugcguuuguaucaauggaacuuguacaguaguaaugacugaugggagugcuucaggaagagcugauacuaaaauacuauucauugaggaggggaaaaucauucauauuagccaauugucaggaagugcucagcaugucgaggagugcucauguuauccucgauauccuggugucagaugugucugcagagacaacuggaaaggcuccaauaggcccauuguagauauaaauguaaaggauuauagcauuguuuccaguuaugugugcucaggacuuguuggagacacacccagaaaaaacgacagcuccagcaguagccauugccugaauccuaacaaugaggaagggggucauggaguaaaaggcugggccuuugaugauggaaaugacguguggaugggaagaacgaucagcgagaaauuccgcucagguuaugaaaccuucaaagucauugaaggcugguccaaaccuaacuccaaauugcagauaaauaggcaagucauaguugacagagauaauagguccgguuauucugguauuuucucuguugaaggcaaaagcugcaucaaucggugcuuuuauguggaguugauaaggggaaggaaacaggaaacugaagucugguggaccucaaacaguauuguuguguuuuguggcaccucagguacauauggaacaggcucauggccugauggggcggacaucaaucucaugccuauauaa

SEQ ID NO: 46328 - RNA, 1410 nt, Artificial Sequence; identical to SEQ ID NO: 46293
  derived and/or modified CDS sequence (wt) from neuraminidase__InfluenzaA__AAY98399

SEQ ID NO: 46329 - RNA, 1410 nt, Artificial Sequence; identical to SEQ ID NO: 46293
  derived and/or modified CDS sequence (wt) from neuraminidase__InfluenzaA__AAY98409

SEQ ID NO: 46330 - RNA, 1410 nt, Artificial Sequence; identical to SEQ ID NO: 46293
  derived and/or modified CDS sequence (wt) from neuraminidase__InfluenzaA__AAY98773

SEQ ID NO: 46331 - RNA, 1410 nt, Artificial Sequence
  derived and/or modified CDS sequence (wt) from neuraminidase__InfluenzaA__AAZ32955
augaauccaaaucaaaagauaauaacgauuggcucuguuucucucaccauuuccacaauaugcuucuucaugcaaauugccauccugauaacuacuguaacauugcauuucaagcaauaugaauucaacucccccccaaacaaccaagugaugcugugugaaccaacaauaauagaaagaaacauaacagagauaguguaucugaccaacaccaccauagagaaggaaauaugccccaaacuagcagaauacagaaauuggucaaagccgcaauguaacauuacaggauuugcaccuuuuucuaaggacaauucgauucggcuuuccgccgguggggacaucugggugacaagagaaccuuaugugucaugcgauccugacaaguguuaucaauuugcccuuggacagggaacaacacuaaacaacgugcauucaaaugacauaguacaugaaaggaccccuuaucggacccuauugaugaaugaguuggguguuccauuucaucuggggaccaagcaagugugcauagcaugguccagcucaaguugucacgauggaaaagcauggcugcauguuuguguaacgggggaugaugaaaaugcaacugcuagcuucauuuacaaugggagacuuguagauaguauuguuucaugguccaaaaaaauccucaggacccaggagucagaaugcguuuguaucaauggaacuuguacaguaguaaugacugaugggagugcuucaggaaaagcugauacuaaaauacuauucauugaggaggggaaaaucguucauacuagcacauugucaggaagugcucagcaugucgaggagugcuccuguuauccucgauauccuggugucagaugugucugcagagacaauuggaaaggcuccaauaggcccaucguagauauaaacauaaaggauuauagcauuguuuccaguuaugugugcucaggacuuguuggagacacacccagaaaaaacgacagcuccagcaguagccauugcuuggauccaaacaaugaggaagguggucauggagugaaaggcugggccuuugaugauggaaaugacguguggaugggaagaacgaucagcgagaaguuacgcucaggauaugaaaccuucaaagucauugaaggcugguccaacccuaacuccaaauugcagauaaauaggcaagucauaguugacagagguaauagguccgguuauucugguauuuucucuguugaaggcaaaagcugcaucaaucggugcuuuuauguggaguugauaagaggaagaaaacaggaaacugaagucuuguggaccucaaacaguauuguuguguuuuguggcaccucagguacauauggaacaggcucauggccugauggggcggacaucaaucucaugccuauauaa

SEQ ID NO: 46332 - RNA, 1344 nt, Artificial Sequence
  derived and/or modified CDS sequence (wt) from neuraminidase__InfluenzaA__AAZ32957
augaauccaaaucaaaagauaauaacgauuggcucuguuucucucaccauuuccacaauaugcuucuucaugcaaauugccauccugauaacuacuguaacauuaauagaaagaaacauaacagagauaguguaucugaccaacaccaccauagagaaggaaauaugccccaaacuagcagaauacagaaauuggucaaagccgcaauguaacauuacaggauuugcaccuuuuucuaaggacaauucgauucggcuuuccgcugguggggacaucugggugacaagagaaccuuaugugucaugcgauccugacaaguguuaucaauuugcccuuggacagggaacaacacuaaacaacgugcauucaaaugacacaguacaugauaggaccccuuaucggacccuauugaugaaugaguuggguguuccauuucaucuggggaccaagcaagugugcauagcaugguccagcucaaguugucacgauggaaaagcauggcugcauguuuguguaacgggggaugaugaaaaugcaacugcuagcuucauuuacaaugggaggcuuguagauaguauuguuucaugguccaaaaaaauccucaggacccaggagucagaaugcguuuguaucaauggaacuuguacaguaguaaugacugaugggaaugcuucaggaaaagcugauacuaaaauacuauucauugaggaggggaaaaucguucauacuagcacauugucaggaagugcucagcaugucgaggagugcuccuguuauccucgauauccuggugucagaugugucugcagagacaacuggaaaggcuccaauaggcccaucguagauauaaacauaaaggauuauagcauuguuuccaguuaugugugcucaggacuuguuggagacacacccagaaaaaacgacagcuccagcaguagccauugcuuggauccuaacaaugaggaagguggucauggagugaaaggcugggccuuugaugauggaaaugacguguggaugggaagaacgaucagcgagaaguuacgcucaggauaugaaaccuucaaagucauugaaggcugguccaacccuaacuccaaauugcagauaaauaggcaagucauaguugacagagguaauagguccgguuauucugguauuuucucuguugaaggcaaaagcugcaucaaucggugcuuuuauguggaguugauaaggggaagaaaacaggaaacugaagucuuguggaccucaaacaguauuguuguguuuuguggcaccucagguacauauggaacaggcucauggccugauggggcggacaucaaucucaugccuauauaa

SEQ ID NO: 46333 - RNA, 1344 nt, Artificial Sequence; identical to SEQ ID NO: 46332
  derived and/or modified CDS sequence (wt) from neuraminidase__InfluenzaA__AAZ32958

SEQ ID NO: 46334 - RNA, 1344 nt, Artificial Sequence; identical to SEQ ID NO: 46332
  derived and/or modified CDS sequence (wt) from neuraminidase__InfluenzaA__AAZ32959

SEQ ID NO: 46335 - RNA, 1410 nt, Artificial Sequence; identical to SEQ ID NO: 46296
  derived and/or modified CDS sequence (wt) from neuraminidase__InfluenzaA__AAZ38465

SEQ ID NO: 46336 - RNA, 1410 nt, Artificial Sequence; identical to SEQ ID NO: 46301
  derived and/or modified CDS sequence (wt) from neuraminidase__InfluenzaA__AAZ38476

SEQ ID NO: 46337 - RNA, 1410 nt, Artificial Sequence
  derived and/or modified CDS sequence (wt) from neuraminidase__InfluenzaA__AAZ38487
augaauccaaaucaaaagauaauaacgauuggcucuguuucucucacuauugccacaauaugcuuccuuaugcaaauugccauccugguaacuacuguaacauugcauuucaagcaauaugaaugcaacucucucccaaacaaccaaguaaugcugugugaaccaacaauacuagaaagaaacauaacagagauaguguaucugaccaacaccaccauagagaaggaaauaugccccaaacuagcagaauacagaaauuggucaaagccgcaauguaaaauuacaggauuugcaccuuuuucuaaggacaauucaauucggcuuuccgcugguggggacauuugggugacaagagaaccuuaugugucaugcgauccugacaaguguuaucaauuugcccuuggacagggaacaacacuaaacaacaggcauucaaaugacacaguacaugauaggaccccuuaucgaacccuauugaugaaugaguuggguguuccauuucauuugggaaccaagcaagugugcauagcaugguccagcucaaguugucacgauggaaaagcauggcugcauguuuguguaacugggcacgaugaaaaugcaacugcuagcuucauuuacggugggaggcuuguagauaguauugguucaugguccaaaaaaauccucaggacccaggagucggaaugcguuuguaucaauggaacuuguacaguaguaaugacugaugggagugcuucaggaagagcugauaccaaaauacuauucauugaggaggggaaaaucauucauauuagccaauugucaggaagugcucagcaugucgaggagugcucauguuauccucgauauccuggugucagaugugucugcagagacaacuggaaaggcuccaauaggcccauuguagauauaaauguaaaggauuauagcauuguuuccaguuaugugugcucaggacuuguuggagacacacccagaaaaaacgacagcuccagcaguagcaauugccugaauccuaacaaugaggaagggggucauggaguaaaaggcugggcauuugaugauggaaaugacguguggaugggaagaacgaucagcgagaaauuccgcucagguuaugaaaccuucaaagucauugaaggcugguccaaaccuaacuccaaauugcagauaaauaggcaagucauaguugacagagauaauagguccgguuauucugguauuuucucuguugaaggcaaaagcugcaucaaucggugcuuuuauguggaguugauaaggggaaggaaacaggaaacugaagucugguggaccucaaacaguauuguuguguuuuguggcaccucagguacauauggaacaggcucauggccugauggggcggacaucaaucucaugccuauauaa

SEQ ID NO: 46338 - RNA, 1410 nt, Artificial Sequence
  derived and/or modified CDS sequence (wt) from neuraminidase__InfluenzaA__AAZ38509
augaauccaaaucaaaagauaauaacgauuggcucuguuucucucaccauuuccacaauaugcuucuucaugcaaauugccaucuugauaacuacuguaacauugcauuucaagcaauaugaauucaacucccccccaaacaaccaagugaugcugugugaaccaacaauaauagaaagaaacauaacagagauaguguaucugaccaacaccaccauagagaaggaaauaugccccaaacuagcagaauacagaaauuggucaaagccgcaaugugacauuacaggauuugcaccuuuuucuaaggacaauucgauuaggcuuuccgcugguggggacaucugggugacaagagaaccuuaugugucaugcgauccugacaaguguuaucaauuugcccuuggacagggaacaacacuaaacaacgugcauucaaaugacacaguacaugauaggaccccuuaucggacacuauugaugaaugaguuagguguuccauuucaucuggggaccaagcaagugugcauagcaugguccagcucaaguugccacgauggaaaagcauggcugcauguuuguguaacgggggaugauaaaaaugcaacugcuagcuucauuuacaaugggaggcuuguagauaguauuguuucaugguccaaagaaauccucagaacccaggagucagaaugcguuuguaucaauggaacuuguacaguaguaaugacugaugggagugcuucaggaaaagcugauacuaaaauacuauucauugaggaggggaaaaucguucauacuagcacauugucaggaagugcucagcaugucgaggaaugcuccugcuauccucgauauccuggugucagaugugucugcagagacaacuggaaaggcuccaauaggcccaucguagauauaaacauaaaggauuauagcauuguuuccaguuaugugugcucaggacuuguuggagacacacccagaaaaaacgacagcuccagcaguagccauugcuuggauccuaacaaugaagaagguggucauggagugaaaggcugggccuuugaugauggaaaugacguguggaugggaagaacgaucagcgagaaguuacgcucaggauaugaaaccuucaaagucauugaaggcugguccaacucuaauuccaaauugcagauaaauaggcaagucauaguugacagagguaauagguccgguuauucugguauuuucucuguugaaggcaaaagcugcaucaaucggugcuuuuauguggaguugauaaggggaagaaaagaggaaacugaagucuuguggaccucaaacaguauuguuguguuuuguggcaccucagguacauauggaacaggcucauggccugauggggcggacaucaaucucaugccuauauaa

SEQ ID NO: 46339 - RNA, 1410 nt, Artificial Sequence
  derived and/or modified CDS sequence (wt) from neuraminidase__InfluenzaA__AAZ38586
augaauccaaaucaaaagauaauaacgauuggcucuguuucucucaccauuuccacaauaugcuucuuuaugcaaauugccauuuugauaacuacuguaacauugcauuucaagcaauaugaauucaacucccccccaaacaaccaagugaugcugugugaaccaacaauaauagaaagaaacauaacagagauaguguaucugaccaacaccaccauagagaaggaaauaugccccaaacuagcagaauacagaaauuggucaaagccgcaaugugacauuacaggauuugcaccuuuuucuaaggacaauucgauuaggcuuuccgcugguggggacaucugggugacaagagaaccuuaugugucaugcgauccugacaaauguuaucaauuugcccuuggacagggaacaacacuaaacaacgugcauucaaaugacacaguacaugauaggaccccuuaucggacccuauugaugaaugaguuagguguuccauuucaucuggggacuaagcaagugugcauagcaugguccagcucaaguugucacgauggaaaagcauggcugcauguuuguguaacgggggaugauaaaaaugcaacugcuagcuucauuuacaaugggaggcuuguagauaguauuguuucaugguccaaagaaauccucagaacccaggagucagaaugcguuuguaucaauggaacuuguacaguaguaaugacugaugggagugcuucaggaaaagcugauacuaaaauacuauucauugaggaggggaaaaucguucauacuagcacauugucaggaagugcccagcaugucgaggagugcuccugcuauccucgauauccuggugucagaugugucugcagagacaacuggaaaggcuccaauaggcccaucguagauauaaacauaaaggauuauagcauuguuuccaguuaugugugcucaggacuuguuggagacacacccagaaaaaacgacagcuccagcaguagccauugcuuggauccuaacaaugaagaagguggucauggagugaaaggcugggccuuugaugauggaaaugacguguggaugggaagaacgaucagcgagaaguuacgcucaggauaugaaaccuucaaagucauugaaggcugguccaacccuaauuccaaauugcagauaaauaggcaagucauaguugacagagguaauagguccgguuauucugguauuuucucuguugaaggcaaaagcugcaucaaucggugcuuuuauguggaguugauaaggggaagaaaagaggaaacugaagucuuguggaccucaaacaguauuguuguguuuuguggcaccucagguacauauggaacaggcucauggccugauggggcggacaucaaucucaugccuauauaa

SEQ ID NO: 46340 - RNA, 1410 nt, Artificial Sequence
  derived and/or modified CDS sequence (wt) from neuraminidase__InfluenzaA__AAZ38597
augaauccaaaucaaaagauaauaacgauuggcucuguuucucucaccauuuccacaauaugcuucuucaugcaaauugccaucuugauaacuacuguaacauugcauuucaagcaauaugaauucaacucccccccaaacaaccaagugaugcugugugaaccaacaauaauagaaagaaacauaacagagauaguguaucugaccaacaccaccauagagaaggaaauaugccccaagcuagcagaauacagaaauuggucaaagccgcaaugugacauuacaggauuugcaccuuuuucuaaggacaauucgauuaggcuuuccgcugguggggacaucugggugacaagagaaccuuaugugucaugugauccugacaaguguuaucaauuugcccuuggacagggaacaacacuaaacaacgugcauucaaaugacacaguacaugauaggaccccuuaucgaacccuauugaugaaugaguuagguguuccauuucaucuggggaccaagcaagugugcauagcaugguccagcucaaguugucacgauggaaaagcauggcugcauguuuguguaacgggggaugauaaaaaugcaacugcuaguuucauuuacaaugggaggcuuguagauaguauuguuucaugguccaaagaaauccucaggacccaggagucagaaugcguuuguaucaauggaacuuguacaguaguaaugacugaugggagugcuucaggaaaagcugauacuaaaauacuauucauugaggaggggaaaaucguucauacuagcacauugucaggaagugcucaacaugucgaggagugcuccugcuauccucgauauccuggugucagaugugucugcagagacaacuggaaaggcuccaauaggcccauuguagauauaaacauaaaggauuauagcauuguuuccaguuaugugugcucaggacuuguuggagacacacccagaaaaaacgacagcuccagcaguagccauugcuuggauccuaacaaugaagaagguggucauggagugaagggcugggccuuugaugauggaaaugacguauggaugggaagaacgaucagcgagaaguuacgcucaggauaugaaaccuucaaagucauugaaggcugguccaacccuaauuccaaauugcagauaaauaggcaagucauaguugacagagguaauagguccgguuauucugguauuuucucuguugaaggcaaaagcugcaucaaucggugcuuuuauguggaguugauaaggggaagaaaagaggaaacugaagucuuguggaccucaaacaguauuguuguguuuuguggcaccucagguacauauggaacaggcucauggccugauggggcggacaucaaucucaugccuauauaa

SEQ ID NO: 46341 - RNA, 1410 nt, Artificial Sequence
  derived and/or modified CDS sequence (wt) from neuraminidase__InfluenzaA__AAZ38608
augaauccaaaucaaaagauaauaacgauuggcucuguuucucucaccauuuccacaauaugcuuuuucaugcaaauugccaucuugauaacuacuguaacauugcauuucaagcaauaugaauucaacucccccccaaacaaccaagugaugcugugugaaccaacaauaauagaaagaaacauaacagagauuguguaucugaccaacaccaccauagagaaggaaaugugccccaaacuagcagaauacagaaauuggucaaagccgcaaugugacauuacaggauuugcaccuuuuucuaaggacaauucgauuaggcuuuccgcugguggggacaucugggugacaagagaaccuuaugugucaugcgauccugacaaguguuaccaauuugcccuuggacagggaacaacacuaaacaacgugcauucaaaugacacaguacaugauaggaccccuuaucggacccuauugaugaaugaguuagguguuccauuucaucuggggaccaagcaagugugcauagcaugguccagcucaaguugucacgauggaaaagcauggcugcauguuuguguaacgggggaugauaaaaaugcaacugcuagcuucauuuacaaugggaggcuuguagauaguauuguuucaugguccaaaaaaauccucaggacccaggagucagaaugcguuuguaucaauggaacuuguacaguaguaaugacugaugggagugcuucaggaaaagcugauacuaaaauacuauucauugaggaggggaaaaucauucauacuagcacauugucaggaagugcucagcaugucgaggagugcuccugcuauccucgauauccuggugucagaugugucugcagagacaacuggaaaggcuccaauaggcccaucguagauauaaacauaaaggauuauagcauuguuuccaguuaugugugcucaggacuuguuggagacacacccagaaaaaacgacagcuccagcaguagccauugcuuggauccuaacaaugaagaagguggucauggagugaaaggcugggccuuugaugauggaaaugacguguggaugggaagaacgaucagcgagaaguuacgcucaggauaugaaaccuucaaagucauugaaggcugguccaaaccuaauuccaaauugcagauaaauaggcaagucauaguugacagagguaauagguccgguuauucugguauuuucucuguugaaggcaaaagcugcaucaaucggugcuuuuauguggaguugauaaggggaagaaaagaggaaacugaagucuuguggaccucaaacaguauuguuguguuuuguggcaccucagguacauauggaacaggcucauggccugauggggcggacaccaaucucaugccuauauaa

SEQ ID NO: 46342 - RNA, 1410 nt, Artificial Sequence
  derived and/or modified CDS sequence (wt) from neuraminidase__InfluenzaA__AAZ38619
augaauccaaaucaaaagauaauaacgauuggcucuguuucucucaccauuuccacaauaugcuucuucaugcaaauugccauccugauaaccacuguaacauugcauuucaagcaauaugaauucaacucccccccaaacaaccaagugaugcugugugaaccaacaauaauagaaagaaacauaacagagauaguguaucugaccaacaccaccauagagaaggaaaugugccccaaacuagcagaauacagaaauuggucaaagccgcaaugugacauuacaggauuugcaccuuuuucuaaggacaauucgauuaggcuuuccgcugguggggacaucugggugacaagagaaccuuaugugucaugcgacccugacaaguguuaccaauuugcccuuggacagggaacaacacuaaacaacgugcauucaaaugacacaguacaugauaggaccccuuaucggacccuauugaugaaugaauuagguguuccauuucaucuggggaccaagcaagugugcauagcaugguccagcucaaguugucacgauggaaaagcauggcugcauguuuguguaacgggggaugauaaaaaugcaacugcuagcuucauuuacaaugggaggcuuguagauaguauuguuucaugguccaaaaaaauccucaggacccaggagucagaaugcguuuguaucaauggaacuuguacaguaguaaugacugaugggagugcuucaggaaaagcugauacuaaaauacuauucauugaggaggggaaaaucauucauacuagcacauugucaggaagugcucagcaugucgaggagugcuccugcuauccucgauauccuggugucagaugugucugcagagacaacuggaaaggcuccaauaggcccaucguagauauaaacauaaaggauuauagcauuguuuccaguuaugugugcucagggcuuguuggagacacacccagaaaaaacgacagcuccagcaguagccauugcuuggauccuaacaaugaagaagguggucauggagugaaaggcugggccuuugaugauggaaaugacguguggaugggaagaacgaucagcgagaaguuacgcucaggauaugaaaccuucaaagucauugaaggcugguccaaaccuaauuccaaauugcagauaaauaggcaagucauaguugacagagguaauagguccgguuauucugguauuuucucuguugaaggcaaaagcugcaucaaucggugcuuuuauguggaguugauaaggggaagaaaagaggaaacugaagucuuguggaccucaaacaguauuguuguguuuuguggcaccucagguacauauggaacaggcucauggccugauggggcggacaucaaucucaugccuauauaa

SEQ ID NO: 46343 - RNA, 1410 nt, Artificial Sequence
  derived and/or modified CDS sequence (wt) from neuraminidase__InfluenzaA__AAZ38641
augaauccaaaucaaaagauaauaacgauuggcucuguuucucucaccauuuccacaauaugcuucuucaugcaaauugccaucuugauaacuacuguaacauugcauuucaagcaauaugaauucaacucccccccaaacaaccaagugaugcugugugaaccaacaauaauagaaagaaacauaacagagauaguguaucugaccaacaccaccauagagaaggaaauaugccccaaacuagcagaauacagaaauuggucaaagccgcaaugugacauuacaggauuugcaccuuuuucuaaggacaauucgauuaggcuuuccgcugguggggacaucugggugacaagagaaccuuaugugucaugcgauccugacaaguguuaucaauuugcccuuggacagggaacaacacuaaacaacgugcauucaaaugacacaguacaugauaggaccccuuaucggacccuauugaugaaugaguuagguguuccauuucaucuggggaccaagcaagugugcauagcaugguccagcucaaguugucacgauggaaaagcauggcugcauguuuguguaacgggggaugauaaaaaugcaacugcuagcuuuauuuacaaugggaggcuuguagauaguauuguuucaugguccaaagaaauccucaggacccaggagucagaaugcguuuguaucaauggaacuuguacaguaguaaugacugaugggagugcuucaggaaaagcugauacuaaaauacuauucauugaggaggggaaaaucguucauacuagcacauugucaggaagugcucagcaugucgaggagugcuccugcuauccucgauauccuggugucagaugugucugcagagacaacuggaaaggcuccaauaggcccaucguagauauaaacauaaaggauuauaguauuguuuccaguuaugugugcucaggacuuguuggagacacacccagaaaaaacgacagcuccagcaguagccauugcuuggauccuaacaaugaagaagguggucauggagugaaaggcugggccuuugaugauggaaaugacguguggaugggaagaacgaucagcgagaaguuacgcucaggauaugaaaccuucaaagucauugaaggcugguccaacccuaauuccaaauugcagauaaauaggcaagucauagucgacagagguaauagguccgguuauucugguauuuucucuguugaaggcaaaagcugcaucaaucggugcuuuuauguggaguugauaaggggaagaaaagaggaaacugaagucuuguggaccucaaacaguauuguuguguuuuguggcaccucagguacauauggaacaggcucauggccugauggggcggacaucaaucucaugccuauauaa

SEQ ID NO: 46344 - RNA, 1410 nt, Artificial Sequence
  derived and/or modified CDS sequence (wt) from neuraminidase__InfluenzaA__AAZ38653
augaauccaaaucaaaagauaauaacgauuggcucuguuucucucaccauuuccacaauaugcuucuucaugcaaauugccaucuugauaacuacuguaacauugcauuucaagcaauaugaauucaacucccccccaaacaaccaagugaugcugugugaaccaacaauaauagaaagaaacauaacagagauaguguaucugaccaacaccaccauagagaaggaaauaugccccaaacuagcagaauacagaaauuggucaaagccgcaaugugacauuacaggauuugcaccuuuuucuaaggacaauucgauuaggcuuuccgcugguggggacaucugggugacaagagaaccuuaugugucaugcgauccugacaaguguuaucaauuugcccuuggacagggaacaacacuaaacaacgugcauucaaaugacacaguacaugauaggaccccuuaucggacacuauugaugaaugaguuagguguuccauuucaucuggggaccaagcaagugugcauagcaugguccagcucaaguugucacgauggaaaagcauggcugcauguuuguguaacgggggaugauaaaaaugcaacugcuagcuucauuuacaaugggaggcuuguagauaguauuguuucaugguccaaagaaauccucagaacccaggagucagaaugcguuuguaucaauggaacuuguacaguaguaaugacugaugggagugcuucaggaaaagcugauacuaaaauacuauucauugaggaggggaaaaucguucauacuagcacauugucaggaagugcucagcaugucgaggagugcuccugcuauccucgauauccuggugucagaugugucugcagagacaacuggaaaggcuccaauaggcccaucguagauauaaacauaaaggauuauagcauuguuuccaguuaugugugcucaggacuuguuggagacacacccagaaaaaacgacagcuccagcaguagccauugcuuggauccuaacaaugaagaagguggucauggagugaaaggcugggccuuugaugauggaaaugacguguggaugggaagaacgaucagcgagaaguuacgcucaggauaugaaaccuucaaagucauugaaggcugguccaacccuaauuccaaauugcagauaaauaggcaagucauaguugacagagguaauagguccgguuauucugguauuuucucuguugaaggcaaaagcugcaucaaucggugcuuuuauguggaguugauaaggggaagaaaagaggaaacugaagucuuguggaccucaaacaguauuguuguguuuuguggcaccucagguacauauggaacaggcucauggccugauggggcggacaucaaucucaugccuauauaa

SEQ ID NO: 46345 - RNA, 1410 nt, Artificial Sequence
  derived and/or modified CDS sequence (wt) from neuraminidase__InfluenzaA__AAZ43386
augaauccaaaucaaaagauaauaacaauuggcucugucucucucaccauugcaacaauaugcuuccucaugcagauugccauccugguaacuacuguaacauugcauuucaagcaauaugagugcgacucccccgcgaacaaccaaguaaugccgugugaaccaauaauaauagaaaggaacauaacagagauaguguauuugacuaacaccaccauagagaaagagauaugccccaaauuaguggaauacaggaauuggucaaagccgcaauguaaaauuacaggauuugcaccuuuuucuaaggacaauucaauucggcuuucugcugguggggacauuugggugacgagagaaccuuaugugucaugcgauccuggcaaguguuaucaauuugcacucgggcaggggaccacacuagacaacaaacauucaaaugacacaauacaugauagaaccccucaucgaacccuauugaugaaugaguuggguguuccauuucauuugggaaccaggcaaguguguauagcaugguccagcucaaguugucacgauggaaaagcauggcugcauguuugugucacuggguaugauaaaaaugcaacugcuagcuucauuuacgaugggaggcuuguagacaguauugguucauggucucaaaauauccucaggacccaggagucggaaugcguuuguaucaaugggacuuguacaguaguaaugacugauggaagugcuucaggaagagcugauacuaaaauacuauucauugaagaggggaaaauuguucauauuagcccauugucaggaagugcucagcauguagaggaguguuccuguuauccucgauauccuggugucagauguaucugcagagacaacuggaaaggcucuaauaggcccgucguagauauaaaugugaaagauuauagcauugauuccaguuaugugugcucagggcuuguuggcgacacacccagaaacaacgacagaucuagcaauagcuauugccggaauccuaacaaugagaaagggaaucacggagugaaaggcugggccuuugacgauggaaaugacguguggaugggaagaacgaucagcgaggauucacgcucagguuaugaaaccuucaaagucauuggugguugguccacaccuaauuccaaauugcagauaaauaggcaagucauaguugacagcgauaauaggucagguuauucugguauuuucucuguugagggcaaaagcugcaucaauaggugcuuuuauguggaguugauaaggggaagggaacaggaaacuagaguaugguggaccucaaacaguauuguuguguuuuguggcacuucagguaccuaugggacaggcucauggccugauggggcggacaucaaucucaugccuauauaa

SEQ ID NO: 46346 - RNA, 1410 nt, Artificial Sequence
  derived and/or modified CDS sequence (wt) from neuraminidase__InfluenzaA__AAZ43397
augaauccaaaucaaaagauaauaacaauuggcucuguuucucucaccauugccacaauaugcuuccuuaugcaaauugccauccugguaacuacuguaacauugcauuucaagcagcaugaaugcaacucccccccaaacaaccaaguaaugcugugugaaccaacaauaauagaaagaaacauaacagagauaguguaucugaccaacaccaccauagagagggaaauaugccccaaacuagcagaauacagaaauuggucaaagccgcaauguaacauuacaggauuugcaccuuuuucuaaggacaauucgauucgacuuuccgcugguggugacaucugggugacaagagaaccuuaugugucaugcgauccugacaaguguuaucaauuugcccuugggcagggaacaacacuaaacaacgggcauucaaaugacacaguacaugauaggaccccuuaccggacccuauugaugaaugaauuggguguuccauuucauuugggaaccaggcaagugugcauagcaugguccagcucaaguugucacgauggaaaagcauggcugcauguuuguguaacuggggaugauaaaaaugcaacugcuagcuucauuuacaaugggaggcuuguagauaguauugguucaugguccaaaaaaauacucagaacccaggagucggaaugcguuuguaucaauggaacuuguacaguaguaaugacugaugggagcgcuucaggaaaagcugauacuaaaauacuauucauugaggaggggaaaaucguucauauuagcacauugucaggaagugcucagcaugucgaggaguguuccuguuauccucgauauccuggugucagaugugucugcagagacaacuggaaaggcuccaauaggcccauuguagauauaaauguaaaggauuauagcauuguuuccaguuaugugugcucaggacuuguuggagacacacccagaaaaaacgacagcuccagcaguagccauugccuagauccuaacaaugaggaagguggucauggagugaaaggcugggccuuugaugauggaaaugacguguggaugggaagaacgaucagcgagaaguuacgcucagguuaugaaaccuucaaagucaucgaaggcugguccaaaccuaacuccaaauuacagacaaauaggcaaguuauaguugaaagagguaacagguccgguuauucugguauuuucuccguugaaggcaaaagcugcaucaaucggugcuuuuauguggaguugauaaggggaaggaaagaggaaacugaagucugguggaccucaaacaguauuguuguguuuuguggcaccucagguacauauggaacaggcucauggccugauggggcggacaucaaucucaugccuauauaa

SEQ ID NO: 46347 - RNA, 1410 nt, Artificial Sequence
  derived and/or modified CDS sequence (wt) from neuraminidase__InfluenzaA__AAZ43408
augaauccaaaucaaaagauaauaacgauuggcucuguuucucucaccauugccacaauaugcuuccuuaugcaaauugccauccugguaacuacuguaacauugcauuucaagcaauaugaaugcaacucccccccaaacaaccaagugaugcugugugaaccaacaaugauagaaagaaacauaacagagauaguguaucugaccaacaccaccauagagaaggaaauaugccccaaacuagcagaauacagaaauuggucaaagccgcaauguaacauuacaggauuugcaccuuuuucuaaggacaauucgauucggcuuuccgcugguggggacaucugggugacaagagaaccuuaugugucaugcgauccugacaaguguuaucaauuugcccuuggacagggaacaacacuaaacaacgggcauucaaaugacacaguacaugauaggaccccuuaucgaacccuauugaugaaugaguuggguguuccauuucauuugggaaccaagcaagugugcauagcaugguccagcucaaguugucacgauggaaaagcauggcugcauguuuguguaacgggggaugaugaaaaugcaacugcuagcuucauuuacaaugggaggcuuguagauaguauugguucaugguccaaaaaaauccucaggacccaggagucggaaugcguuuguaucaauggaacuuguacaguaguaaugacugaugggagugcuucaggaaaagcugauacuaaaauacuauucauugaggaggggaaaaucguucauacuagcucauugucaggaagugcucagcaugucgaggagugcuccuguuauccucgauauccuggugucagaugugucugcagagacaacuggaaaggcuccaauaggcccaucguagauauaaauguaaaggauuauagcauuguuuccaguuaugugugcucaggacuuguuggagacacacccagaaaaaacgacagcuccagcaguagccauugcuuggauccuaacaaugaggaagguggucauggagugaaaggcugggccuuugaugauggaaaugacguguggaugggaagaacgaucagcgagaaguuacgcucaggauaugaaaccuucaaagucauugaaggcugguccaaaccuaacuccaaauugcagauaaauaggcaagucauaguugacagagguaauagguccgguuauucugguauuuucucuguugaaagcaaaagcugcaucaauaggugcuuuuauguggaguugauaaggggaaggaaacaggaaacugaagucuuguggaccucaaacaguauuguuguguuuuguggcaccucagguacauauggaacaggcucauggccugauggggcggacaucaaucucaugccuauauaa

SEQ ID NO: 46348 - RNA, 1410 nt, Artificial Sequence
  derived and/or modified CDS sequence (wt) from neuraminidase__InfluenzaA__AAZ74355
augaauccaaaucaaaagauaauaacaauuggcucuguuucucucaccauugccacaauaugcuuccuuaugcaaauugccauccugguaaccacuguaacauugcauuucaagcagcacgaaugcaacucccccccaaacaaccaagcaaugccgugugaaccagcaauaauagaaagaaacacaacagagacaguguaucugaccaacaccaccauagagaaggaaauaugccccaaauuagcagaauacagaaauuggucaaagccgcaauguaacauuacaggauuugcaccuuuuucuaaggacaauucgauucggcuuuccgcugguggggacaucugggugacaagagaaccuuaugugucaugcgauccugacaaguguuaucaauuugcccuuggacagggaacaacacuaaacaacgggcauucaaaugacacaguacaugauaggaccccuuaccggacccuauugaugaaugaauuggguguuccauuucauuugggaaccaggcaagugugcauagcaugguccagcucaaguugucacgauggaaaagcauggcugcauguuuguguaacuggggaugaugaaaaugcaacugcuagcuucauuuacaaugggaggcuuguagauaguauugguucaugguccaaaaaaauacucagaacccaggagucggaaugcguuuguaucaauggaacuuguacaguaguaaugacugaugggagcgcuucaggaaaagcugauacuaaaauacuauucauugaggaggggaaaaucguucauauuagcacauugucaggaagugcucagcaugucgaggagugcuccuguuauccucgauauccuggugucagaugugucugcagagacaacuggaaaggcuccaauaggcccaucguagauauaaauguaaaggauuauagcauuguuuccaguuaugugugcucaggacuuguuggagacacacccagaaaaaacgacagcuucagcaguagccauugccuagauccuaacaaugaggaagguggucauggagugaaaggcugggccuuugaugauggaaaugacguguggaugggaagaacgaucagcgagaaguuacgcucagguuaugaaaccuucaaagucaucgaaggcugguccaaaccuaacuccaaauuacagauaaauaggcaagucauaguugaaagagguaacagguccgguuauucugguauuuucuccguugaaggcaaaagcugcaucaaucggugcuuuuauguggaguugauaagaggaaggaaagaggaaacugaagucugguggaccucaaacaguauuguuguguuuuguggcaccucagguacauauggaacaggcucauggccugauggggcggauaucaaucucaugccuauauaa

SEQ ID NO: 46349 - RNA, 1410 nt, Artificial Sequence
  derived and/or modified CDS sequence (wt) from neuraminidase__InfluenzaA__AAZ74366
augaauccaaaucaaaagauaauaacgauuggcucuguuucucucacuauugccacaauaugcuuccuuaugcaaauugccauccugguaacuacuguaacauugcauuucaagcaauaugaaugcaacucucucccaaacaaccaaguaaugcugugugaaccaacaauaauagaaagaaacauaacagagauaguguaucugaccaacaccaccauagagaaggaaauaugccccaaacuagcagaauacagaaauuggucaaagccgcaauguaaaauuacaggauuugcaccuuuuucuaaggacaauucaauucggcuuuccgcugguggggacauuugggugacaagagaaccuuaugugucaugcgauccugacaaguguuaucaauuugcccuuggacagggaacaacacuaaacaacaggcauucaaaugacacaguacaugauaggaccccuuaucgaacccuauugaugaaugaguuggguguuccauuucauuugggaaccaagcaagugugcauagcaugguccagcucaaguugucacgauggaaaagcauggcugcauguuuguguaacugggcacgaugaaaaugcaacugcuagcuucauuuacgauggaaggcuuguagauaguauugguucaugguccaaaaaaauccucaggacccaggagucggaaugcguuuguaucaauggaacuuguacaguaguaaugacugaugggagugcuucaggaaaagcugauacuaaaauacuauucauugaggaggggaaaaucauucauauuagucaauugucaggaagugcucagcaugucgaggagugcucauguuauccucgauauccuggugucagaugugucugcagagacaacuggaaaggcuccaauaggcccauuguagauauaaauguaaaggauuauagcauuguuuccaguuaugugugcucaggacuuguuggagacacacccagaaaaaacgacagcuccagcaguagccauugccugaauccuaacaaugaggaagggggucauggagugaaaggcugggccuuugaugauggaaaugacguguggaugggaagaacgaucagcgagaaauuccgcucagguuaugaaaccuucaaagucauugaaggcugguccaaaccuaacucuaaauugcagauaaauaggcaagucauaguugacaaagauaauagguccgguuauucugguauuuucucuguugaaggcaaaagcugcaucaaucggugcuuuuauguggaguugauaaggggaaggaaacaggaaacugaagucugguggaccucaaacaguauuguuguguuuuguggcaccucagguacauauggaacaggcucauggccugauggggcggacaucaaucuuaugccuauauaa

SEQ ID NO: 46350 - RNA, 1410 nt, Artificial Sequence
  derived and/or modified CDS sequence (wt) from neuraminidase__InfluenzaA__AAZ74377
augaauccaaaucaaaaaauaauaacgauuggcucuguuucucucaccauugccacaauaugcuuccuuacgcaaauugccauccugguaacuacuguaacauugcauuucaagcaauaugaaugcaacucccccccaaacaaccaagugaugcugugugaaccaacaauaauagaaagaaacauaacagagauaguguaucugaccaacaccaccauagagaaggaaauaugccccaaacuagcagaauacagaaauuggucaaagccgcaaugcaacauuacuggauuugcaccuuuuucuaaggacaauucgauucggcuuuccgcugguggggacaucuggguuacaagagaaccuuaugugucaugcgauccugacaaguguuaucaauuugcccuuggacagggaacaacacuaaacaacgggcauucaaaugacacaguacaugauaggaccccuuauaggacccuauugaugaaugaguuggguguuccauuucauuugggaaccaagcaagugugcauagcaugguccagcucaaguugucacgauggaaaagcauggcugcauguuuguguaacgggggaugauaaaaaugcaacugcuagcuucauuuacaaugggaggcuuguagauaguauagguucaugguccaaaaaaauccucaggacccaggagucggaaugcguuuguaucaauggaacuuguacaguaguaaugacugaugggagugcuucaggaaaagcugauacuaaaauacuauucauugaggaggggaaaaucguucauacuagccuauugucagggagugcucagcaugucgaggagugcuccuguuauccucgauauccuggugucagaugugucugcagagacaacuggaaaggcuccaauaggcccaucguagauauaaauguaaaggauuauagcauuguuuccaguuaugugugcucaggacuuguuggagacacacccagaaaaaacgacagcuccagcaguagccauugcuuggauccuaacaaugaggaagguggucauggagugaaaggcugggccuuugaugauggaaaugacguguggaugggaagaacgaucagagagaaguuacgcucaggauaugaaaccuucaaagucauugaaggcugguccaaaccuaacuccaaacugcagauaaauaggcaagucauaguugacagagauaauagguccgguuauucugguauuuucucuguugaaggcaaaagcugcaucaaucggugcuuuuauguggaguugauaaggggaaggaaccaggaaacugaagucuuguggaccucaaacaguauuguuguguuuuguggcaccucagguacauauggaacaggcucauggccugauggggcggacaucaaucucaugccuauauaa

SEQ ID NO: 46351 - RNA, 1410 nt, Artificial Sequence
  derived and/or modified CDS sequence (wt) from neuraminidase__InfluenzaA__AAZ74400
augaauccaaaucaaaagauaauaacgauuggcucuguuucucucacuauugccacaauaugcuuccuuaugcaaauagccauccugguaacuacuguaacauugcauuucaagcaauaugaaugcaacucccccccaaacaaccaaguaaugcugugugaaccaacaauaauagaaagaaacauaacagagauaguguaucugaccaacaccaccauagagaaggaaauaugccccaaacuagcagaauacagaaauuggucaaagccgcaauguaaaauuacaggauuugcaccuuuuucuaaggauaauucaauucggcuuuccgcugguggggacauuugggugacaagagagccuuaugugucaugcgauccugacaaguguuaucaauuugcccuuggacagggaacaacacuaaacaacaggcauucaaaugacacaguacaugauaggaccccuuaucgaacccuauugaugaaugaguuggguguuccauuucauuugggaaccaagcaaguguguauagcaugguccagcucaaguugucacgauggaaaagcauggcugcauguuuguguaacugggcaugaugaaaaugcaacugcuagccucauuuacgaugggagacuuguagauaguauugguucaugguccaaaaaaauccucaggacccaggagucggaaugcguuuguaucaauggaacuuguacaguaguaaugacugaugggagugcuucaggaagagcugauacuaaaauacuauucauugaggaggggaaaaucguucauacuagcaaauugucaggaagugcucagcaugucgaggagugcuccuguuauccucgauauccuggugucagaugugucugcagagacaacuggaaaggcuccaauaggcccaucguagauauaaauguaaaggauuauagcauuguuuccaguuaugugugcucaggacuuguuggagacacacccagaaaaaacgacagcuccagcaguagccauugccuggauccuaacaaugaagaagggggucauggagugaaaggcugggccuuugaugauggaaaugacguguggaugggaagaacgaucagcgagaagucacgcucugguuaugaaaccuucaaggucauugaaggcugguccaaaccuaacuccaaauugcagauaaauaggcaagucauaguugaaagagguaauauguccgguuauucugguauuuucucuguugaaggcaaaagcugcaucaaucggugcuuuuauguggaguugauaaggggaaggaaacaggaaacugaagucugguggaccucaaacaguauuguuguguuuuguggcaccucagguacauauggaacaggcucauggccugauggggcggacaucaaucucaugccuauauaa

SEQ ID NO: 46352 - RNA, 1410 nt, Artificial Sequence
  derived and/or modified CDS sequence (wt) from neuraminidase__InfluenzaA__AAZ74411
augaauccaaaucaaaagauaauaacgauuggcucuguuucucucacuauugccacaauaugcuuccuuaugcaaauugccauccugguaacuacuguaacauugcauuucaagcaauaugaaugcaacucucucccaaacaaccaaguaaugcugugugaaccaacaauacuagaaagaaacauaacagagauaguguaucugaccaacaccaccauagagaaggaaauaugccccaaacuagcagaauacagaaauuggucaaagccgcaauguaaaauuacaggauuugcaccuuuuucuaaggacaauucaauucggcuuuccgcugguggggacauuugggugacaagagaaccuuaugugucaugugauccugacaaguguuaucaauuugcccuuggacagggaacaacacuaaacaacaggcauucaaaugacacaguacaugauaggaccccuuaucgaacccuauugaugaaugaguuggguguuccauuucauuugggaaccaagcaagugugcauagcaugguccagcucaaguugucacgauggaaaagcauggcugcauguuuguguaacugggcacgaugaaaaugcaacugcuagcuucauuuacggugggaggcuuguagauaguauugguucaugguccaaaaaaauccucaggacccaggagucggaaugcguuuguaucaauggaacuuguacaguaguaaugacugaugggagugcuucaggaagagcugauacuaaaauacuauucauugaggaggggaaaaucauucauauuagccaauugucaggaagugcucagcaugucgaggagugcucauguuauccucgauauccuggugucagaugugucugcagagacaacuggaaaggcuccaauaggcccauuguagauauaaauguaaaggauuauagcauuguuuccaguuaugugugcucaggacuuguuggagacacacccagaaaaaacgacagcuccagcaguagccauugccugaauccuaacaaugaggaagggggucauggaguaaaaggcugggcauuugaugauggaaaugacguguggaugggaagaacgaucagcgagaaauuccgcucagguuaugaaaccuucaaagucauugaaggcugguccaaaccuaacuccaaauugcagauaaauaggcaagucauaguugacagagauaauagguccgguuauucugguauuuucucuguugaaggcaaaagcugcaucaaucggugcuuuuauguggaguugauaaggggaaggaaacaggaaacugaagucugguggaccucaaacaguauuguuguguuuuguggcaccucagguacauauggaacaggcucauggccugauggagcggacaucaaucucaugccuauauaa

SEQ ID NO: 46353 - RNA, 1410 nt, Artificial Sequence
  derived and/or modified CDS sequence (wt) from neuraminidase__InfluenzaA__AAZ74422
augaauccaaaucaaaagauaauaacgauuggcucuguuucucucaccauuuccacaauaugcuucuucaugcaaauugccaucuugauaaccacuguaacauugcauuucaagcaauaugaauucaacucccccccaaacaaccaagugaugcugugugaaccaacaauaauagaaagaaacauaacagagauaguguaccugaccaacaccaccauagagaaggaaauaugccccaaaccagcagaauacagaaauuggucaaagccgcaaugugacauuacaggauuugcaccuuuuucuaaggacaauucgauuaggcuuuccgcugguggggacaucugggugacaagagaaccuuaugugucaugcgauccugacaaguguuaucaauuugcccuuggacagggaacaacacuaaacaacgugcauucaaaugacacaguacaugauaggaccccuuaucggacccuauugaugaaugaguuagguguuccauuucaucuggggaccaagcaagugugcauagcaugguccagcucaaguugucacgauggaaaagcauggcugcauguuuguguaacgggggaugauaaaaaugcaacugcuagcuucauuuacaaugggaggcuaguagauaguauuguuucaugguccaaagaaauccucaggacccaggagucagaaugcguuuguaucaauggaacuugugcaguaguaaugacugaugggagcgcuucaggaaaagcugauacuaaaauacuauucauugaggaggggaaaaucguucauacuagcaaauugucaggaagugcucagcaugucgaggagugcuccugcuauccucgauauccugguaucagaugugucugcagagacaacuggaaaggcuccaauaggcccaucguagauauaaacauaaaggauuauagcauuguuuccaguuaugugugcucaggacuuguuggagacacacccagaaaaaacgacagcuccagcaguagccauugcuuggauccuaacaaugaagaagguggucauggagugaaaggcugggccuuugaugauggaaaugacguguggaugggaagaacgaucagcgagaaguuacgcucaggauaugaaaccuucaaagucauugaaggcugguccaauccuaauuccaaauugcagauaaauaggcaagucauaguugauagagguaauagguccgguuauucugguauuuucucuguugaaggcaaaagcugcaucaaucggugcuuuuauguggaguugauaaggggaagaaaagaggaaacugaagucuuguggaccucaaacaguauuguuguguuuuguggcaccucagguacauauggaacaggcucauggccugauggggcggacaucaaucucaugccuauauaa

SEQ ID NO: 46354 - RNA, 1410 nt, Artificial Sequence
  derived and/or modified CDS sequence (wt) from neuraminidase__InfluenzaA__AAZ74444
augaauccaaaucaaaagauaauaacgauuggcucuguuucucucaccauuuccacaauaugcuucuucaugcaaauugccaucuugauaacuacuguaacauugcauuucaagcaauaugaauucaacucccccccaaacaaccaagugaugcugugugaaccaacaauaauagaaagaaacauaacagagauaguguaucugaccaacaccaccauagagaaggaaauaugccccaaacuagcagaauacagaaauuggucaaagccgcaaugugacauuacaggauuugcaccuuuuucuaaggacaauucgauuaggcuuuccgcugguggggacaucugggugacaagagaaccuuaugugucaugcgauccugacaaguguuaucaguuugcccuuggacagggaacaacacuaaacaacgugcauucaaaugacacaguacaugauaggaccccuuaucggacccuauugaugaaugaguuagguguuccauuucaucuggggaccaagcaagugugcauagcaugguccagcucaaguugucacgauggaaaagcauggcugcauguuuguguaacgggggaugauaaaaaugcaacugcuagcuucauuuacaaugggaggcuuguagauaguauuguuucaugguccaaagaaauccucaggacccaggagucagaaugcguuuguaucaauggaacuuguacaguaguaaugacugaugggagugcuucaggaaaagcugauacuaaaauacuauucauugaggaggggaaaaucguucauacuagcacauugucaggaagugcucagcaugucgaggagugcuccuguuauccucgauauccuggugucagaugugucugcagagacaacuggaaaggcuccaauaggcccaucguggauauaaacauaaaggauuauagcauuguuuccaguuaugugugcucaggacuuguuggagacacacccagaaaaaacgacagcuccagcaguagccauugcuuggauccuaacaaugaagaagguggucauggagugaaaggcugggccuuugaugauggaaaugacguguggaugggaagaacgaucagcgagaaguuacgcucaggauaugaaaccuucaaagucauugaaggcugguccaacccuaauuccaaauugcagauaaauaggcaagucauaguugacagagguaauaggucugguuauucugguauuuucucuguugaaggcaaaagcugcaucaaucggugcuuuuauguggaguugauaaggggaagaaaagaggaaacugaagucuuguggaccucaaacaguauuguuguguuuuguggcaccucagguacauauggaacaggcucauggccugauggggcggacaucaaucucaugccuauauaa

SEQ ID NO: 46355 - RNA, 1410 nt, Artificial Sequence
  derived and/or modified CDS sequence (wt) from neuraminidase__InfluenzaA__AAZ74455
augaauccaaaucaaaagauaauaacgauuggcucuguuucucucaccauuuccacaauaugcuucuucaugcaaauugccaucuugauaacuacuguaacauugcauuucaagcaauaugaauucaacucccccccaaacaaccaagugaugcugugugaaccaacaauaauagaaagaaacauaacagagauaguguaucugaccaacaccaccauagagaaggaaauaugccccaaacuagcagaauacagaaauuggucaaagccgcaaugugacauuacaggauuugcaccuuuuucuaaggacaauucgauuaggcuuuccgcugguggggacaucugggugacaagagaaccuuaugugucaugcgauccugacaaguguuaucaauuugcccuuggacagggaacaacacuaaacaacgugcauucaaaugacacaguacaugauaggaccccuuaucggacccuauugaugaaugaguuagguguuccauuccaucuggggaccaagcaagugugcauagcaugguccagcucaaguugucacgauggaaaagcauggcugcauguuuguguaacgggggaugauaaaaaugcaacugcuagcuucauuuacaaugggaggcuuguagauaguauuguuucaugguccaaagauauccucaggacccaggagucagaaugcguuuguaucaauggaacuuguacaguaguaaugacugaugggagugcuucaggaaaagcugauacuaaaauacuauucauugaggaggggaaaaucguucauacuagcacauugucaggaagugcucagcaugucgaggagugcuccugcuauccucgauauccuggugucagaugugucugcagagacaacuggaaaggcuccaauaggcccauuguagauauaaacauaaaggauuauagcauuguuuccaguuaugugugcucaggacuuguuggagacacacccagaaaaaacgacagcuccagcaguagccauugcuuggauccuaacaaugaagaagguggucauggagugaaaggcugggccuuugaugauggaaaugacguguggaugggaagaacgaucagcgagaaguugcgcuuaggauaugaaaccuucaaagucauugaaggcugguccaacccuaauuccaaauugcagauaaauaggcaagucauaguugaaagagguaauagguccgguuauucuggcauuuucucuguugaaggcaaaagcugcaucaaucggugcuuuuauguggaguugauaaggggaagaaaagaggaaacugaagucuuguggaccucaaacaguauuguuguguuuuguggcaccucagguacauauggaacaggcucauggccugauggggcggacaucaaucucaugccuauauaa

SEQ ID NO: 46356 - RNA, 1410 nt, Artificial Sequence
  derived and/or modified CDS sequence (wt) from neuraminidase__InfluenzaA__AAZ74477
augaauccaaaucaaaagauaauaacgauuggcucuguuucucucaccauuuccacaauaugcuucuucaugcaaauugccaucuugauaacuacuguaacauugcauuucaagcaauaugaauucaacucccccccaaacaaccaagugaugcugugugaaccaacaauaauagaaagaaacauaacagagauaguguaucugaccaacaccaccauagagaaggaaauaugccccaaacuagcagaauacagaaauuggucaaagccgcaaugugacauuacaggauuugcaccuuuuucuaaggacaauucaauuaggcuuuccgcugguggggacaucugggugacaagagaaccuuaugugucaugcgauccugacaaguguuaucaauuugcccuuggacagggaacaacacuaaacaacgugcauucaaaugacacaguacaugauaggaccccuuaucggacccuauugaugaaugaguuagguguuccauuucaucuggggaccaagcaagugugcauagcaugguccagcucaaguugucacgauggaaaagcauggcugcauguuuguguaacgggggaugauaaaaaugcaacugcuagcuucauuuacaaugggaggcuuguagauaguauuguuucaugguccaaagaaauccucaggacccaggagucagaaugcguuuguaucaauggaacuuguacaguaguaaugacugaugggagugcuucaggaaaagcugauacuaaaauacuauucauugaggaggggaaaaucguucauacuagcacauugucaggaagugcucagcaugucgaggagugcuccugcuauccucgauauccuggugucagaugugucugcagagacaacuggaaaggcuccaauaggcccauuguagauauaaacauaaaggauuauagcauuguuuccaguuaugugugcucaggacuuguuggagacacacccagaaaaaacgacagcuccagcaguagccauugcuuggauccuaacaaugaagaagguggucauggagugaaaggcugggccuuugaugauggaaaugacguguggaugggaagaacaaucagcgagaaguuacgcucaggauaugaaaccuucaaagucauugaaggcugguccaacccuaauuccaaauugcagauaaauaggcaagucauaguugacagagguaauagguccgguuauucugguauuuucucuguugaaggcaaaagcugcaucaaucggugcuuuuauguggaguugauaaggggaagaaaagaggaaacugaagucuuguggaccucaaacaguauuguuguguuuuguggcaccucagguacauauggaacaggcucauggccugauggggcggacaucaaucucaugccuauauaa

SEQ ID NO: 46357 - RNA, 1410 nt, Artificial Sequence
  derived and/or modified CDS sequence (wt) from neuraminidase__InfluenzaA__AAZ74488
augaauccaaaucaaaagauaauaacgauuggcucuguuucucucaccauuuccacaauaugcuucuucaugcaaauugccaucuugauaacuacuguaacauugcauuucaagcaauaugaauucaacucccccccaaacaaccaagugaugcugugugaaccaacaauaauagaaagaaacauaacagagauaguguaucugaccaacaccaccauagagaaggaaauaugccccaaacuagcagaauacagaaauuggucaaagccgcaaugugacauuacaggauuugcaccuuuuucuaaggacaauucgauuaggcuuuccgcugguggggacaucugggugacaagagaaccuuaugugucaugcgauccugacaaguguuaucaauuugcccuuggacagggaacaacacuaaacaacgugcauucaaaugacacaguacaugauaggaccccuuaucggacccuauugaugaaugaguuagguguuccauuccaucuggggaccaagcaagugugcauagcaugguccagcucaaguugucacgauggaaaagcauggcugcauguuuguguaacgggggaugauaaaaaugcaacugcuagcuucauuuacaaugggaggcuuguagauaguauuguuucaugguccaaagauauccucaggacccaggagucagaaugcguuuguaucaauggaacuuguacaguaguaaugacugaugggagugcuucaggaaaagcugauacuaaaauacuauucauugaggaggggaaaaucguucauacuagcacauugucaggaagugcucagcaugucgaggagugcuccugcuauccucgauauccuggugucagaugugucugcagagacaacuggaaaggcuccaauaggcccauuguagauauaaacauaaaggauuauagcauuguuuccaguuaugugugcucaggacuuguuggagacacacccagaaaaaacgacagcuccagcaguagccauugcuuggauccuaacaaugaagaagguggucauggagugaaaggcugggccuuugaugauggaaaugacguguggauggggagaacgaucagcgagaaguugcgcuuaggauaugaaaccuucaaagucauugaaggcugguccaacccuaauuccaaauugcagauaaauaggcaagucauaguugaaagagguaauagguccgguuauucuggcauuuucucuguugaaggcaaaagcugcaucaaucggugcuuuuauguggaguugauaaggggaagaaaagaggaaacugaagucuuguggaccucaaacaguauuguuguguuuuguggcaccucagguacauauggaacaggcucauggccugauggggcggacaucaaucucaugccuauauaa

SEQ ID NO: 46358 - RNA, 1410 nt, Artificial Sequence
  derived and/or modified CDS sequence (wt) from neuraminidase__InfluenzaA__AAZ74499
augaauccaaaucaaaagauaauaacgauuggcucuguuucucucaccauuuccacaauaugcuucuucaugcaaauugccaucuugauaaccacuguaacauugcauuucaagcaauaugaauucaacucccccccaaacaaccaagugaugcugugugaaccaacaauaauagaaagaaacauaacagagauaguguaccugaccaacaccaccauagagaaggaaauaugccccaaacuagcagaauacagaaauuggucaaagccgcaaugugacauuacaggauuugcaccuuuuucuaaggacaauucgauuaggcuuuccgcugguggggacaucugggugacaagagaaccuuaugugucaugcgauccugacaaguguuaucaauuugcccuuggacagggaacaacacuaaacaacgugcauucaaaugacacaguacaugauaggaccccuuaucggacccuauugaugaaugaguuagguguuccauuucaucuggggaccaagcaagugugcauagcaugguccagcucaaguugucacgauggaaaagcauggcugcauguuuguguaacgggggaugauaaaaaugcaacugcuagcuucauuuacaaugggaggcuuguagauaguauuguuucaugguccaaagaaauccucaggacccaggagucagaaugcguuuguaucaauggaacuugugcaguaguaaugacugaugggagcgcuucaggaaaagcugauacuaaaauacuauucauugaggaggggaaaaucguucauacuagcaaauugucaggaagugcucagcaugucgaggagugcuccugcuauccucgauauccugguaucagaugugucugcagagacaacuggaaaggcuccaauaggcccaucguagauauaaacauaaaggauuauagcauuguuuccaguuaugugugcucaggacuuguuggagacacacccagaaaaaacgacagcuccagcaguagccauugcuuggauccuaacaaugaagaagguggucauggagugaaaggcugggccuuugaugauggaaaugacguguggaugggaagaacgaucagcgagaaguuacgcucaggauaugaaaccuucaaagucauugaaggcugguccaacccuaauuccaaauugcagauaaauaggcaagucauaguugauagagguaauagguccgguuauucugguauuuucucuguugaaggcaaaagcugcaucaaucggugcuuuuauguggaguugauaaggggaagaaaagaggaaacugaagucuuguggaccucaaacaguauuguuguguuuuguggcaccucagguacauauggaacaggcucauggccugauggggcggacaucaaucucaugccuauauaa

SEQ ID NO: 46359 - RNA, 1410 nt, Artificial Sequence
  derived and/or modified CDS sequence (wt) from neuraminidase__InfluenzaA__AAZ74510
augaauccaaaucaaaagauaauaacgauuggcucuguuucucucaccauuuccacaauaugcuucuucaugcaaauugccaucuugauaacuacuguaacauugcauuucaagcaauaugaauucaacucccccccaaacaaccaagugaugcugugugaaccaacaauaauagaaagaaacauaacagagauaguguaucuaaccaacaccaccauagagaaggaaauaugccccaaacuagcagaauacagaaauuggucaaagccgcaaugugacauuacaggauuugcaccuuuuucuaaggacaauucgauuaggcuuuccgcugguggggacaucugggugacaagagaaccuuaugugucaugcgauccugacaaguguuaucaauuugcccuuggacagggaacaacacuaaacaacgugcauucaaaugacacaguacaugauaggaccccuuaucggacccuauugaugaaugaguuagguguuccauuccaucuggggaccaagcaagugugcauagcaugguccagcucaaguugucacgauggaaaagcauggcugcauguuuguguaacgggggaugauaaaaaugcaacugcuagcuucauuuacaaugggaggcuuguagauaguauuguuucaugguccaaagauauccucaggacccaggagucagaaugcguuuguaucaauggaacuuguacaguaguaaugacugaugggagugcuucaggaaaagcugauacuaaaauacuauucauugaggaggggaaaaucguucauacuagcacauugucaggaagugcucagcaugucgaggagugcuccugcuauccucgauauccuggugucagaugugucugcagagacaacuggaaaggcuccaauaggcccauuguagauauaaacauaaaggauuauagcauuguuuccaguuaugugugcucaggacuuguuggagacacacccagaaaaaacgacagcuccagcaguagccauugcuuggauccuaacaaugaagaagguggucauggagugaaaggcugggccuuugaugauggaaaugacguguggaugggaagaacgaucagcgagaaguugcgcuuaggauaugaaaccuucaaagucauugaaggcugguccaacccuaauuccaaauugcagauaaauaggcaagucauaguugaaagagguaauagguccgguuauucuggcauuuucucuguugaaggcaaaagcugcaucaaucggugcuuuuauguggaguugauaaggggaagaaaagaggaaacugaagucuuguggaccucaaacaguauuguuguguuuuguggcaccucagguacauauggaacaggcucauggccugauggggcggacaucaaucucaugccuauauaa

SEQ ID NO: 46360 - RNA, 1410 nt, Artificial Sequence; identical to SEQ ID NO: 46358
  derived and/or modified CDS sequence (wt) from neuraminidase__InfluenzaA__AAZ74521

SEQ ID NO: 46361 - RNA, 1410 nt, Artificial Sequence
  derived and/or modified CDS sequence (wt) from neuraminidase__InfluenzaA__AAZ74532
augaauccaaaucaaaagauaauaacaauuggcucuguuucucucaccauuuccacaauaugcuucuucaugcaaauugccaucuugauaacuacuguaacauugcauuucaagcaauaugaauucaacucccccccaaacaaccaagugaugcugugugaaccaacaauaauagaaagaaacauaacagagauaguguaucuaaccaacaccaccauagagaaggaaauaugccccaaacuagcagaauacagaaauuggucaaagccgcaaugugacauuacaggauuugcaccuuuuucuaaggacaauucgauuaggcuuuccgcugguggggacaucugggugacaagagaaccuuaugugucaugcgauccugacaaguguuaucaauuugcccuuggacagggaacaacacuaaacaacgugcauucaaaugacacaguacaugauaggaccccuuaucggacccuauugaugaaugaguuagguguuccauuccaucuggggaccaagcaagugugcauagcaugguccagcucaaguugucacgauggaaaagcauggcugcauguuuguguaacgggggaugauaaaaaugcaacugcuagcuucauuuacaaugggaggcuuguagauaguauuguuucaugguccaaagauauccucaggacccaggagucagaaugcguuuguaucaauggaacuuguacaguaguaaugacugaugggagugcuucaggaaaagcugauacuaaaauacuauucauugaggaggggaaaaucguucauacuagcacauugucaggaaaugcucagcaugucgaggagugcuccugcuauccucgauauccuggugucagaugugucugcagagacaacuggaaaggcuccaauaggcccauuguagauauaaacauaaaggauuauagcauuguuuccaguuaugugugcucaggacuuguuggagacacacccagaaaaaacgacagcuccagcaguagccauugcuuggauccuaacaaugaagaagguggucauggagugaaaggcugggccuuugaugauggaaaugacguguggaugggaagaacgaucagcgagaaguugcgcuuaggauaugaaaccuucaaagucauugaaggcugguccaacccuaauuccaaauugcagauaaauaggcaagucauaguugaaagagguaauagguccgguuauucuggcauuuucucuguugaaggcaaaagcugcaucaaucggugcuuuuauguggaguugauaaggggaagaaaagaggaaacugaagucuuguggaccucaaacaguauuguuguguuuuguggcaccucagguacauauggaacaggcucauggccugauggggcgaacaucaaucucaugccuauauaa

SEQ ID NO: 46362 - RNA, 1410 nt, Artificial Sequence; identical to SEQ ID NO: 46339
  derived and/or modified CDS sequence (wt) from neuraminidase__InfluenzaA__AAZ74543

SEQ ID NO: 46363 - RNA, 1410 nt, Artificial Sequence
  derived and/or modified CDS sequence (wt) from neuraminidase__InfluenzaA__AAZ74565
augaauccaaaucaaaagauaauaacgauuggcucuguuucucucacuauugccacaauaugcuuccuuaugcaaauugccauccugguaacuacuguaacauugcauuucaagcaauaugaaugcaacucucucccaaacaaccaaguaaugcugugugaaccaacaauacuagaaagaaacauaacagagauaguguaucugaccaacaccaccauagagaaggaaauaugccccaaacuagcagaauacagaaauuggucaaagccgcaauguaaaauuacaggauuugcaccuuuuucuaaggacaauucaauucggcuuuccgcugguggggacauuugggugacaagagaaccuuaugugucaugcgauccugacaaguguuaucaauuugcccuuggacagggaacaacacuaaacaacaggcauucaaaugacacaguacaugauaggaccccuuaucgaacccuauugaugaaugaguuggguguuccauuucauuugggaaccaagcaagugugcauagcaugguccagcucaaguugucacgaugggaaagcauggcugcauguuuguguaacugggcacgaugaaaaugcaacugcuagcuucauuuacggugggaggcuuguagauaguauugguucaugguccaaaaaaauccucaggacccaggagucggaaugcguuuguaucaauggaacuuguacaguaguaaugacugaugggagugcuucaggaagagcugauacuaaaauacuauucauugaggaggggaaaaucauucauauuagccaauugucaggaagugcucagcaugucgaggagugcucauguuauccucgauauccuggugucagaugugucugcagagacaacuggaaaggcuccaauaggcccauuguagauauaaauguaaaggauuauagcauuguuuccaguuaugugugcucaggacuuguuggagacacacccagaaaaaacgacagcuccagcaguagccauugccugaauccuaacaaugaggaagggggucauggaguaaaaggcugggcauuugaugauggaaaugacguguggaugggaagaacgaucagcgagaaauuccgcucagguuaugaaaccuucaaagucauugaaggcugguccaaaccuaacuccaaauugcagauaaauaggcaagucauaguugacagagauaauagguccgguuauucugguauuuucucuguugaaggcaaaagcugcaucaaucggugcuuuuauguggaguugauaaggggaaggaaacaggaaacugaagucugguggaccucaaacaguauuguuguguuuuguggcaccucagguacauauggaacaggcucauggccugauggggcggacaucaaucucaugccuauauaa

SEQ ID NO: 46364 - RNA, 1410 nt, Artificial Sequence; identical to SEQ ID NO: 46344
  derived and/or modified CDS sequence (wt) from neuraminidase__InfluenzaA__AAZ74598

SEQ ID NO: 46365 - RNA, 1410 nt, Artificial Sequence
  derived and/or modified CDS sequence (wt) from neuraminidase__InfluenzaA__AAZ74609
augaauccaaaucaaaagauaauaacaauuggcucuguuucucucacuauugccacaauaugcuuccuuaugcaaauugccauccugguaacuacuguaacauugcauuucaagcaauaugaaugcaacucccccccaaacaaccaaguaaugcugugugaaccaauaauaauagaaagaaacauaacagagauaguguaucugaccaacaccaccauagagaaagaaauaugccccaaacuagcagaauacagaaauuggucaaagccgcaauguaaaauuacaggauuugcaccuuuuucuaaggacaauucaauucggcuuuccgcugguggagacauuugggugacaagagaaccuuaugugucaugcgauccugacaaguguuaucaauuugcccuuggacagggaacaacacuaaacaacaggcauucaaaugacacaguacaugauaggaccccuuaucgaacccuauugaugaaugaguuggguguuccauuucauuugggaaccaagcaagugugcauagcaugguccagcucaaguugucacgauggaaaagcauggcugcauguuuguguaacugggcaugaugaaaaugcaacugcuagcuucauuuacgaugggaggcuuguagauaguauuaguucaugguccaaaaauauccucaggacccaggagucggaaugcguuuguaucaauggaacuuguacaguaguaaugacugauggaagugcuucagaaagagcugauacuaaaauacuauucauugaagaggggaaaaucguucauauuagcccauugucaggaagugcucagcaugucgaggaaugcuccuguuauccucgauauccuggugucagaugugucugcagagacaacuggaaaggcuccaauaggcccaucguagauauaaaugugaaagauuauagcauuguuuccaguuaugugugcucaggacuuguuggagacacacccagaaaaaacgacagcuccagcaguagcuauugccugaauccuaacaaugaggaagggggucauggagugaaaggcugggccuuugaugauggaaaugacguguggaugggaagaacgaucagcgaaaaguuacgcucagguuaugaaaccuucaaggucauuggaggcugguccaaaccuaacuccaaauugcagauaaauaggcaagucauaguugacagagguaauagguccgguuauucugguauuuucucuguugaaggcaaaagcugcgucaaucggugcuuuuauguggaguugauaaggggaaggaaacaggaaacugaagucugguggaccucaaacaguauuguuguguuuuguggcaccucagguacauauggaacaggcucauggccugauggggcggacaucaaucucaugccuauauaa

SEQ ID NO: 46366 - RNA, 1410 nt, Artificial Sequence
  derived and/or modified CDS sequence (wt) from neuraminidase__InfluenzaA__AAZ74620
augaauccaaaucaaaagauaauaacgauuggcucuguuucucucaccauugccacaauaugcuuccuuaugcaaauugccauccugguaacuacuguaacauugcauuucaagcaauaugaaugcaacucccccccaaacaaccaagugaugcugugugaaccaacaauaauagaaagaaacauaacagagauaguguaucugaccaacaccaccauagagaaggaaauaugccccaaacuagcagaauacagaaauuggucaaagccgcaauguaacauuacaggauuugcaccuuuuucuaaggacaauucgauucggcuuuccgcugguggggacaucugggugacaagagaaccuuaugugucaugcgauccugacaaguguuaucaauuugcccuuggacagggaacaacacuaaacaacggacauucaaaugacacaguacaugauaggaccccuuaucggacccuauugaugaaugaguuggguguuccauuucauuugggaaccaagcaagugugcauagcaugguccagcucaaguugucacgauggaaaagcauggcugcauguuuguguaacgggggaugaugaaaaugcaacugcuagcuucauuuacaaugggaggcuuguagauaguauugguucaugguccaaaaaaauccucaggacccaggagucggaaugcguuuguaucaauggaacuuguacaguaguaaugacugaugggagugcuucaggaaaagcugauacuaaaauacuauucauugaggaggggaaaaucguucauacuagccuauugucaggaagugcucagcaugucgaggagugcuccuguuauccucgauacccuggugucagaugugucugcagagacaacuggaaaggcuccaauaggcccaucguagauauaaauguaaaggauuauagcauuguuuccaguuaugugugcucaggacuuguuggagacacacccagaaaaaacgacagcuccagcaguagccauugcuuggauccuaacaaugaggaagguggucauggagugaaaggcugggccuuugaugauggaaaugacguguggaugggaagaacgaucagugagaaguuacgcucaggauaugaaaccuucaaagucauugaaggcugguccaaaccuaacuccaaauugcagauaaauaggcaagucauaguugacagagguaauagguccgguuauucugguauuuucucuguugaaggcaaaagcugcaucaaucggugcuuuuauguggaguugauaaggggaaggaaacaggaaacugaagucuuguggaccucaaacaguauuguuguguuuuguggcaccucagguacauauggaacaggcucauggccugauggggcggacaucaaucucaugccuauauaa

SEQ ID NO: 46367 - RNA, 1410 nt, Artificial Sequence; identical to SEQ ID NO: 46185
  derived and/or modified CDS sequence (wt) from neuraminidase__InfluenzaA__AAZ79508

SEQ ID NO: 46368 - RNA, 1410 nt, Artificial Sequence
  derived and/or modified CDS sequence (wt) from neuraminidase__InfluenzaA__AAZ79519
augaauccaaaucaaaagauaauaacgauuggcucuguuucucucacuauugccacaauaugcuuccuuaugcaaauugccauccugguaacuacuguaacauugcauuucaagcaauaugaaugcaacucucccccaaacaaccaaguaaugcugugugaaccaacaauacuagaaagaaacauaacagagauaguguaucugaccaacaccaccauagagaaggaaauaugccccaaacuagcagaauacagaaauuggucaaagccgcaauguaaaauuacaggauuugcaccuuuuucuaaggacaauucaauucggcuuuccgcugguggggacauuugggugacaagagaaccuuaugugucaugcgauccugacaaguguuaucaauuugcccuuggacagggaacaacacuaaacaacaggcauucaaaugacacaguacaugauaggaccccuuaucgaacccuauugaugaaugaguuggguguuccauuucauuugggaaccaagcaagugugcauagcaugguccagcucaaguugucacgauggaaaagcauggcugcauguuuguguaacugggcacgauaaaaaugcaacagcuagcuucauuuacggugggaggcuuguagauaguauugguucaugguccaaaaaaauccucaggacccaggagucggaaugcguuuguaucaauggaacuuguacaguaguaaugacugaugggagugcuucaggaagagcugauacuaaaauacuauucauugaggaggggaaaaucauucauauuagccaauugucaggaagugcucagcaugucgaggagugcucauguuauccucgauauccuggugucagaugugucugcagagacaacuggaaaggcuccaauaggcccauuguagauauaaauguaaaggauuauagcauuguuuccaguuaugugugcucaggacuuguuggagacacacccagaaaaaacgacagcuccagcaguagccauugccugaauccuaacaaugaggaagggggucauggaguaaaaggcugggcauuugaugauggaaaugacguguggaugggaagaacgaucagcgagaaauuccgcucagguuaugaaaccuucaaagucauugaaggcugguccagaccuaacuccaaauugcagauaaauaggcaagucauaguugacagagauaauagguccgguuauucugguauuuucucuguugaaggcaaaagcugcaucaaucggugcuuuuauguggaguugauaaggggaaggaaacaggaaacugaagucugguggaccucaaacaguauuguuguguuuuguggcaccucagguacauauggaacaggcucauggccugauggggcggacaucaaucucaugccuauauaa

SEQ ID NO: 46369 - RNA, 1410 nt, Artificial Sequence; identical to SEQ ID NO: 46149
  derived and/or modified CDS sequence (wt) from neuraminidase__InfluenzaA__AAZ79530

SEQ ID NO: 46370 - RNA, 1410 nt, Artificial Sequence
  derived and/or modified CDS sequence (wt) from neuraminidase__InfluenzaA__AAZ79552
augaauccaaaucaaaaaauaauaacgauuggcucuguuucucucaccauugccacaauaugcuuccuuaugcaaauugccauccugguaacuacuguaacauugcauuucaagcaauaugaaugcaacucccccccaaacaaccaagugaugcugugugaaccaacaauaauagaaagaaacauaacagagauaguguaucugaccaacaccaccauagagaaggaaauaugccccaaacuagcagaauacagaaauuggucaaagccgcaaugcaacauuacuggauuugcaccuuuuucuaaggacaauucgauucggcuuuccgcugguggggacaucuggguuacaagagaaccuuaugugucaugcgauccugacaaguguuaucaauuugcccuuggacagggaacaacacuaaacaacgggcauucaaaugacacaguacaugauaggaccccucauaggacccuauugaugaaugaguuggguguuccauuucauuugggaaccaagcaagugugcauagcaugguccagcucaaguugucacgauggaaaagcauggcugcauguuuguguaacgggggaugauaaaaaugcaacugcuagcuucauuuacaaugggaggcuuguagauaguauagguucaugguccaaaaaaauccucaggacccaggagucggaaugcguuuguaucaauggaacuuguacaguaguaaugacugaugggagugcuucaggaaaagcugauacuaaaauacuauucauugaggaggggaaaaucguucauacuagccuauugucagggagugcucagcaugucgaggagugcuccuguuauccucgauauccuggugucagaugugucugcagagacaacuggaaaggcuccaauaggcccaucguagauauaaauguaaaggauuauagcauuguuuccaguuaugugugcucaggacuuguuggagacacacccagaaaaaacgacagcuccagcaguagccauugcuuggauccuaacaaugaggaagguggucauggagugaaaggcugggccuuugaugauggaaaugacguguggaugggaagaacgaucagcgagaaguuacgcucaggauaugaaaccuucaaagucauugaaggcugguccaaaccuaacuccaaacugcagauaaauaggcaagucauaguugacagagauaauagguccgguuauucugguauuuucucuguugaaggcaaaagcugcaucaaucggugcuuuuauguggaguugauaaggggaaggaaccaggaaacugaagucuuguggaccucaaacaguauuguuguguuuuguggcaccucagguacauauggaacaggcucauggccugauggggcggacaucaaucucaugccuauauaa

SEQ ID NO: 46371 - RNA, 1410 nt, Artificial Sequence; identical to SEQ ID NO: 46303
  derived and/or modified CDS sequence (wt) from neuraminidase__InfluenzaA__AAZ79563

SEQ ID NO: 46372 - RNA, 1410 nt, Artificial Sequence; identical to SEQ ID NO: 46293
  derived and/or modified CDS sequence (wt) from neuraminidase__InfluenzaA__AAZ79574

SEQ ID NO: 46373 - RNA, 1410 nt, Artificial Sequence
  derived and/or modified CDS sequence (wt) from neuraminidase__InfluenzaA__AAZ79585
augaauccaaaucaaaagauaauaacgauuggcucuguuucucucacuauugccacaauaugcuuccuuaugcaaauugccauccugguaacuacuguaacauugcauuucaagcaauaugaaugcaacucucucccaaacaaccaaguaaugcugugugaaccaacaauacuagaaagaaacauaacagagauaguguaucugaccaacaccaccauagagaaggaaauaugccccaaacuagcagaauacagaaauuggucaaagccgcaauguaaaauuacaggauuugcaccuuuuucuaaggacaauucaauucggcuuuccgcugguggggacauuugggugacaagagaaccuuaugugucaugcgauccugacaaguguuaucaauuugcccuuggacagggaacaacacuaaacaacaggcauucaaaugacacaguacaugauaggaccccuuaucgaacccuauugaugaaugaguuggguguuccauuucauuugggaaccaagcaagugugcauagcaugguccagcucaaguugucacgauggaaaagcauggcugcauguuuguguaacugggcacgaugaaaaugcaacugcuagcuucauuuacggugggaggcuuguagauaguauugguucaugguccaaaaaaauccucaggacccaggagucggaaugcguuuguaucaauggaacuuguacaguaguaaugacugaugggagugcuucaggaagagcugauacuaaaauacuauucauugaggaggggaaaaucauucauauuagccaauugucaggaagugcucagcaugucgaggagugcucauguuauccucgauauccuggugucagaugugucugcagagacaacuggaaaggcuccaauaggcccauuguagauauaaauguaaaggauuauagcauuguuuccaguuaugugugcucaggacuuguuggagacacacccagaaaaaacgacagcuccagcaguagccauugccugaauccuaacaaugaggaagggggucauggaguaaaaggcugggcauuugaugauggaaaugacguguggaugggaagaacgaucagcgagaaauuccgcucagguuaugaaaccuucaaagucauugaaggcugguccaaaccuaacuccaaauugcagauaaauaggcaagucauaguugacagagauaauagguccgguuauucugguauuuucucuguugaaggcaaaagcugcaucaaucggugcuuuuauguagaguugauaaggggaaggaaacaggaaacugaagucugguggaccucaaacaguauuguuguguuuuguggcaccucagguacauauggaacaggcucauggccugauggggcggacaucaaucucaugccuauauaa

SEQ ID NO: 46374 - RNA, 1410 nt, Artificial Sequence; identical to SEQ ID NO: 46358
  derived and/or modified CDS sequence (wt) from neuraminidase__InfluenzaA__AAZ79618

SEQ ID NO: 46375 - RNA, 1410 nt, Artificial Sequence
  derived and/or modified CDS sequence (wt) from neuraminidase__InfluenzaA__AAZ79633
augaauccaaaucaaaagauaauaacgauuggcucuguuucucucaccauuuccacaauaugcuucuucaugcaaauugccaucuugauaacuacuguaacauugcauuucaagcaauaugaauucaacucccccccaaacaaccaagugaugcugugugaaccaacaauaauagaaagaaacauaacagagauaguguaucugaccaacaccaccauagagaaggaaauaugccccaagcuagcagaauacagaaauuggucaaagccgcaaugugacauuacaggauuugcaccuuuuucuaaggacaauucgauuaggcuuuccgcugguggggacaucugggugacaagagaaccuuaugugucaugugauccugacaaguguuaucaauuugcccuuggacagggaacaacacuaaacaacgugcauucaaaugacacaguacaugauaggaccccuuaucgaacccuauugaugaaugaguuagguguuccauuucaucuggggaccaagcaagugugcauagcaugguccagcucaaguugucacgauggaaaagcauggcugcauguuuguguaacgggggaugauaaaaaugcaacugcuaguuucauuuacaaugggaggcuuguagauaguauuguuucaugguccaaagaaauccucaggacccaggagucagaaugcguuuguaucaauggaacuuguacaguaguaaugacugaugggagugcuucaggaaaagcugauacuaaaauacuauucauugaggaggggaaaaucguucauacuagcacauugucaggaagugcucaacaugucgaggagugcuccugcuauccucgauauccuggugucagaugugucugcagagacaacuggaaaggcuccaauaggcccauuguagauauaaacauaaaggauuauagcauuguuuccaguuaugugugcucaggacuuguuggagacacacccagaaaaaacgacagcuccagcaguagccauugcuuagauccuaacaaugaagaagguggucauggagugaagggcugggccuuugaugauggaaaugacguguggaugggaagaacgaucagcgagaaguuacgcucaggauaugaaaccuucaaagucauugaaggcugguccaacccuaauuccaaauugcagauaaauaggcaagucauaguugacagagguaauagguccgguuauucugguauuuucucuguugaaggcaaaagcugcaucaaucggugcuuuuauguggaguugauaaggggaagaaaagaggaaacugaagucuuguggaccucaaacaguauuguuguguuuuguggcaccucagguacauauggaacaggcucauggccugauggggcggacaucaaucucaugccuauauaa

SEQ ID NO: 46376 - RNA, 1410 nt, Artificial Sequence; identical to SEQ ID NO: 46358
  derived and/or modified CDS sequence (wt) from neuraminidase__InfluenzaA__AAZ79945

SEQ ID NO: 46377 - RNA, 1410 nt, Artificial Sequence; identical to SEQ ID NO: 46355
  derived and/or modified CDS sequence (wt) from neuraminidase__InfluenzaA__AAZ79966

SEQ ID NO: 46378 - RNA, 1410 nt, Artificial Sequence
  derived and/or modified CDS sequence (wt) from neuraminidase__InfluenzaA__AAZ79977
augaauccaaaucaaaagauaauaacgauuggcucuguuucucucaccauuuccacaauaugcuucuuuaugcaaauugccaucuugauaacuacuguaacauugcauuucaagcaauaugaauucaacucccccccaaacaaccaagugaugcugugugaaccaacaauaauagaaagaaacauaacagagauaguguaucugaccaacaccaccauagagaaggaaauaugccccaaacuagcagaauacagaaauuggucaaagccgcaaugugacauuacaggauuugcaccuuuuucuaaggacaauucgauuaggcuuuccgcugguggggacaucugggugacaagagaaccuuaugugucaugcgauccugacaaauguuaucaauuugcccuuggacagggaacaacacuaaacaacgugcauucaaaugacacaguacaugauaggaccccuuaucggacccuauugaugaaugaguuagguguuccauuucaucuggggacuaagcaagugugcauagcaugguccagcucaaguugucacgauggaaaagcauggcugcauguuuguguaacgggggaugauaaaaaugcaacugcuagcuucauuuacaaugggaggcuuguagauaguauuguuucaugguccaaagaaauccucagaacccaggagucagaaugcguuuguaucaauggaacuuguacaguaguaaugacugaugggagugcuucaggaaaagcugauacuaaaauacuauucauugaggaggggaaaaucguucauacuagcacauugucaggaagugcccagcaugucgaggagugcuccugcuauccucgauauccuggugucagaugugucugcagagacaacuggaaaggcuccaauaggcccaucguagauauaaacauaaaggauuauagcauuguuuccaguuaugugugcucaggacuuguuggagacacacccagaaaaaacgacagcuccagcaguagccauugcuuggauccuaacaaugaagaagguggucauggagugaaaggcugggccuuugaugauggaaaugacguguggaugggaagaacgaucagcgagaaguuacgcucaggauaugaaaccuucaaagucauugaaggcugguccaacccuaauuccaaauugcagauaaauaggcaagucauaguugacagagguaauagguccgguuauucugguauuuucucuguugaaggcaaaagcugcaucaaucggugcuuuuauguggaguugauaaggggaagaaaagaggaaacugaagucuuguggaccucaaacaguauuguuguguuuuguggcaccucagguacauauggaacaggcucauggccugauggggcggacaucaaucucaugccuauauaa

SEQ ID NO: 46379 - RNA, 1410 nt, Artificial Sequence
  derived and/or modified CDS sequence (wt) from neuraminidase__InfluenzaA__AAZ79988
augaauccaaaucaaaagauaauaacgauuggcucuguuucucucaccauuuccacaauaugcuucuucaugcaaauugccaucuugauaacuacuguaacauugcauuucaagcaauaugaauucaacucccccccaaacaaccaagugaugcugugugaaccaacaauaauagaaagaaacauaacagagauaguguaucugaccaacaccaccauagagaaggaaauaugccccaaacuagcagaauacagaaauuggucaaagccgcaaugugacauuacaggauuugcaccuuuuucuaaggacaauucgauuaggcuuuccgcugguggggacaucugggugacaagagaaccuuaugugucaugcgauccugacaaguguuaucaauuugcccuuggacagggaacaacacuaaacaacgugcauucaaaugacacaguacaugauaggaccccuuaucggacccuauugaugaaugaguuagguguuccauuucaucuggggaccaagcaagugugcauagcaugguccagcucaaguugucacgauggaaaagcauggcugcauguuuguguaacgggggaugauaaaaaugcaacugcuagcuucauuuacaaugggaggcuuguagauaguauuguuucaugguccaaagaaauccucaggacccaggagucagaaugcguuuguaucaauggaacuuguacaguaguaaugacugaugggagugcuucaggaaaagcugauacuaaaauacuauucauugaggaggggaaaaucguucauacuagcacauugucaggaagugcucagcaugucgaggagugcuccugcuauccucgauauccuggugucagaugugucugcagagacaacuggaaaggcuccaauaggcccauuguagauauaaacauaaaggauuauagcauuguuuccaguuaugugugcucaggacuuguuggagacacacccagaaaaaacgacagcuccagcaguagccauugcuuggauccuaacaaugaagaagguggucauggagugaaaggcugggccuuugaugauggaaaugacguguggaugggaagaacgaucagcgagaaguuacgcucaggauaugaaaccuucaaagucauugaaggcugguccaacccuaauuccaaauugcagauaaauaggcaagucauaguugacagagguaauagguccgguuauucugguauuuucucuguugaaggcaaaagcugcaucaaucggugcuuuuauguggaguugauaaggggaagaaaagaggaaacugaagucuuguggaccucaaacaguauuguuguguuuuguggcaccucagguacauauggaacaggcucauggccugauggggcggacaucaaucucaugccuauauaa

SEQ ID NO: 46380 - RNA, 1410 nt, Artificial Sequence
  derived and/or modified CDS sequence (wt) from neuraminidase__InfluenzaA__AAZ79999
augaauccaaaucaaaagauaauaacgauuggcucuguuucucucaccauuuccacaauaugcuucuucaugcaaauugccaucuugauaacuacuguaacauugcauuucaagcaauaugaauucaacucccccccaaacaaccaaaugaugcugugugaaccaacaauaauagaaagaaacauaacagagauaguguaucugaccaacaccaccauagagaaggaaauaugccccaaacuagcagaauacagaaauuggucaaagccgcaaugugacauuacaggauuugcaccuuuuucuaaggacaauucgauuaggcuuuccgcugguggggacaucugggugacaagagaaccuuaugugucaugcgauccugacaaguguuaucaauuugcccuuggacagggaacaacacuaaacaacgugcauucaaaugacacaguacaugauaggaccccuuaucggacccuauugaugaaugaguuagguguuccauuccaucuggggaccaagcaagugugcauagcaugguccagcucaaguugucacgauggaaaagcauggcugcauguuuguguaacgggggaugauaaaaaugcaacugcuagcuucauuuacaaugggaggcuuguagauaguauuguuucaugguccaaagauauccucaggacccaggagucagaaugcguuuguaucaauggaacuuguacaguaguaaugacugaugggagugcuucaggaaaagcugauacuaaaauacuauucauugaggaggggaaaaucguucauacuagcacauugucaggaagugcucagcaugucgaggagugcuccugcuauccucgauauccuggugucagaugugucugcagagacaacuggaaaggcuccaauaggcccauuguagauauaaacauaaaggauuauagcauuguuuccaguuaugugugcucaggacuuguuggagacacacccagaaaaaacgacagcuccagcaguagccauugcuuggauccuaacaaugaagaagguggucauggagugaaaggcugggccuuugaugauggaaaugacguguggaugggaagaacgaucagcgagaaguugcgcuuaggauaugaaaccuucaaagucauugaaggcugguccaacccuaauuccaaauugcagauaaauaggcaagucauaguugaaagagguaauagguccgguuauucuggcauuuucucuguugaaggcaaaagcugcaucaaucggugcuuuuauguggaguugauaaggggaagaaaagaggaaacugaagucuuguggaccucaaacaguauuguuguguuuuguggcaccucagguacauauggaacaggcucauggccugauggggcggacaucaaucucaugccuauauaa

SEQ ID NO: 46381 - RNA, 1410 nt, Artificial Sequence
  derived and/or modified CDS sequence (wt) from neuraminidase__InfluenzaA__AAZ80010
augaauccaaaucaaaagauaauaacaauuggcucugucucucucaccauugcaacaguaugcuuccucaugcagauugccauccugguaacuacuguaacauugcauuucaagcaauaugagugcgacucccccgcgaacaaccaaguaaugccgugugaaccaauaauaauagaaaggaacauaacagagauaguguauuugacuaacaccaccauagagaaagagauaugccccaaauuaguggaauacagaaauuggucaaagccgcaauguaaaauuacaggauuugcaccuuuuucuaaggacaauucaauucggcuuucugcugguggggacauuugggugacgagagaaccuuaugugucaugcgauccuggcaaguguuaucaauuugcacucgggcaggggaccacacuagacaacaaacauucaaaugacacaauacaugauagaaucccucaucgaacccuauugaugaaugaguuggguguuccauuucauuuaggaaccaggcaaguguguauagcaugguccagcucaaguugucacgauggaaaagcauggcugcauguuugugucacuggggaugauaaaaaugcaacugcuagcuucauuuacgaugggaggcuuguggacaguauugguucauggucucaaaauauccucaggacccaggagucggaaugcguuuguaucaaugggacuuguacaguaguaaugacugauggaagugcuucaggaagagcugauacuagaauacuauucauugaagaggggaaaauuguccauauuagcccauugucaggaagugcucagcauguagaggaguguuccuguuauccucgauauccuggcgucagauguaucugcagagacaacuggaaaggcucuaauaggcccgucguagauauaaaugugaaagauuauagcauugauucccguuaugugugcucagggcuuguuggcgacacacccagaaacaacgacagaucuagcaauagcaauugcaggaauccuaacaaugauaaagggaaucauggagugaaaggcugggccuuugacgauggaaaugacguguggaugggaagaacgaucagcaaggauucacgcucagguuaugaaaccuucaaagucauuggugguugguccacaccuaauuccaaaucacagauaaauaggcaagucauaguugacagcgauaauaggucagguuauucugguauuuucucuguugagggcaaaagcugcaucaauaggugcuuuuacguggaguugauaaggggaagggaacaggagacuagaguaugguggaccucaaacaguauuguuguguuuuguggcacuucugguaccuaugggacaggcucauggccugauggggcggacaucaaucucaugccuauauaa

SEQ ID NO: 46382 - RNA, 1410 nt, Artificial Sequence
  derived and/or modified CDS sequence (wt) from neuraminidase__InfluenzaA__AAZ80021
augaauccaaaucaaaagauaauaacgauuggcucuguuucucucaccauuuccacaauaugcuucuucaugcaaauugccaucuugauaaccacuguaacauugcauuucaagcaauaugaauucaacucccccccaaacaaccaagugaugcugugugaaccaacaauaauagaaagaaacauaacagagauaguguaccugaccaacaccaccauagagaaggaaauaugccccaaacuagcagaauacagaaauuggucaaagccgcaaugugacauuacaggauuugcaccuuuuucuaaggacaauucgauuaggcuuuccgcugguggggacaucugggugacaagagaaccuuaugugucaugcgauccugacaaguguuaucaauuugcccuuggacagggaacaacacuaaacaacgugcauucaaaugacacaguacgugauaggaccccuuaucggacccuauugaugaaugaguuagguguuccauuucaucuggggaccaagcaagugugcauagcaugguccagcucaaguugucacgauggaaaagcauggcugcauguuuguguaacgggggaugauaaaaaugcaacugcuagcuucauuuacaaugggaggcuuguagauaguauuguuucaugguccaaagaaauccucaggacccaggagucagaaugcguuuguaucaauggaacuugugcaguaguaaugacugaugggagcgcuucaggaaaagcugauacuaaaauacuauucauugaggaggggaaaaucguucauacuagcaaauugucaggaagugcucagcaugucgaggagugcuccugcuauccucgauauccugguaucagaugugucugcagagacaacuggaaaggcuccaauaggcccaucguagauauaaacauaaaggauuauagcauuguuuccaguuaugugugcucaggacuuguuggagacacacccagaaaaaacgacagcuccagcaguagccauugcuuggauccuaacaaugaagaagguggucauggagugaaaggcugggccuuugaugauggaaaugacguguggaugggaagaacgaucagcgagaaguuacgcucaggauaugaaaccuucaaagucauugaaggcugguccaacccuaauuccaaauugcagauaaauaggcaagucauaguugauagagguaauagguccgguuauucugguauuuucucuguugaaggcaaaagcugcaucaaucggugcuuuuauguggaguugauaaggggaagaaaagaggaaaccgaagucuuguggaccucaaacaguauuguuguguuuuguggcaccucagguacauauggaacaggcucauggccugauggggcggacaucaaucucaugccuauauaa

SEQ ID NO: 46383 - RNA, 1410 nt, Artificial Sequence
  derived and/or modified CDS sequence (wt) from neuraminidase__InfluenzaA__AAZ83245
augaauccaaaucagaagauaauaacgauuggcucuguuucucucaccauuuccacaauaugcuucuucaugcaaauugccauccugauaacuacuguaacauugcauuucaagcaauaugaauucaacccccccccaaacaaccaagugaugcugugugaaccaacaauaauagaaagaaacauaacagagauaguguaucugaccaacaccaccauagagaaggaaauaugccccaaacuagcagaauacagaaauuggucaaagccgcaauguaacauuacaggauuugcaccuuuuucuaaggacaauucgauucggcuuuccgcugguggggacaucugggugacaagagaaccuuaugugucaugcgauccugacaaguguuaucaauuugcccuuggacagggaacaacacuaaacaacgugcauucaaaugacacaguacaugauaggaccccuuaucggacccuauugaugaaugaguuggguguuccauuucaucuggggaccaagcaagugugcauagcaugguccagcucaaguugucacgauggaaaagcauggcugcauguuuguguaacgggggaugaugaaaaugcaacugcuagcuucauuuacaaugggaggcuuguagauaguauuguuucaugguccaaaaaaauccucaggacccaggagucagaaugcguuuguaucaauggaacuuguacaguaguaaugacugaugggagugcuucaggaaaagcugauacuaaaauacuauucauugaggaggggaaaaucguucauacuagcacauugucaggaagugcucagcaugucgaggaguguuccuguuauccucgauauccuggugucagaugugucugcagagacaacuggaaaggcuccaauaggcccaucguagauauaaacauaaaggauuauagcauuguuuccaguuaugugugcucaggacuuguuggagacacacccagaaaaaacgacagcuccagcaguagccauugcuuggauccaaacaaugaggaagguggucauggagugaaaggcugggccuuugaugauggaaaugacguguggaugggaagaacgaucagcgagaaauuacgcucaggauaugaaaccuucaaagucauugaaggcugguccaacccuaacuccaaauugcagauaaauaggcaagucauaguugacagagauaauagguccgguuauucugguauuuucucuguugaaggcaaaagcugcaucaaucggugcuuuuauguggaguugauaaggggaagaaaccaggaaacugaagucuuguggaccucaaacaguauuguuguguuuuguggcaccucagguacauauggaacaggcucauggccugauggggcggacaucaaucucaugccuauauaa

SEQ ID NO: 46384 - RNA, 1413 nt, Artificial Sequence
  derived and/or modified CDS sequence (wt) from neuraminidase__InfluenzaA__AAZ83256
augaauccaaaucaaaaaauaauaaccauuggaucaaucaguauagcaaucggaauaauuagucuaauguugcaaauaggaaauauuauuucaauaugggcuagucacucaauccaaacuggaagucaaaaccacacuggaauaugcaaccaaagaaucaucacauaugaaaacagcaccugggugaaucacacauauguuaauauuaacaacacuaauguuguugcuggaaaggacaaaacuucagugacauuggccggcaauucaucucuuuguucuaucaguggaugggcuauauacacaaaagacaacagcauaagaauuggcuccaaaggagauguuuuugucauaagagaaccuuucauaucauguucucacuuggaaugcagaaccuuuuuucugacccaaggugcucuauuaaaugacaaacauucaaauggaaccguuaaggacagaaguccuuauagggccuuaaugagcuguccucuaggugaagcuccguccccauacaauucaaaguuugaaucaguugcauggucagcaagcgcaugccaugauggcaugggcugguuaacaaucggaauuucugguccagacaauggagcuguggcuguacuaaaauacaacggaauaauaacugaaaccauaaaaaguuggaaaaagcgaauauugagaacacaagagucugaaugugucugugugaacgggucauguuucaccauaaugaccgauggcccgaguaauggggccgccucguacaaaaucuucaagaucgaaaaggggaagguuacuaaaucaauagaguugaaugcacccaauuuccauuaugaggaauguuccuguuacccagacacuggcacagugauguguguaugcagggacaacuggcaugguucaaaucgaccuugggugucuuuuaaucaaaacuuggauuaucaaauaggauacaucugcaguggaguguucggugacaauccgcgucccaaagauggaaagggcagcuguaauccagugacuguugauggagcagacggaguuaagggguuuucauacaaauaugguaaugguguuuggauaggaaggacuaaaaguaacagacuuagaaagggguuugagaugauuugggauccuaauggauggacagauaccgacagugauuucucagugaaacaggauguuguggcaauaacugauuggucaggguacagcggaaguuucguucaacauccugaguuaacaggauuggacuguauaagaccuugcuucuggguugaguuagucagaggacugccuagagaaaauacaacaaucuggacuagugggagcagcauuucuuuuuguggcauugauagugauacugcaaacuggucuuggccagacggugcugaguugccguucaccauugacaaguag

SEQ ID NO: 46385 - RNA, 1410 nt, Artificial Sequence; identical to SEQ ID NO: 46293
  derived and/or modified CDS sequence (wt) from neuraminidase__InfluenzaA__AAZ83269

SEQ ID NO: 46386 - RNA, 1410 nt, Artificial Sequence; identical to SEQ ID NO: 46293
  derived and/or modified CDS sequence (wt) from neuraminidase__InfluenzaA__AAZ83280

SEQ ID NO: 46387 - RNA, 1410 nt, Artificial Sequence
  derived and/or modified CDS sequence (wt) from neuraminidase__InfluenzaA__AAZ83291
augaauccaaaucaaaagauaauaacgauuggcucuguuucucucaccauugcuacaauaugcuuccuuaugcaaauugccauccugguaacuacuguaacauugcauuucaagcaauaugaaugcaacucccccccaaacaaccaagugaugcugugugaaccaacaauaauagaaagaaacauaacagagauaguauaucugaccaacaccaccauagagaaggaaauaugccccaaacuagcagaauacagaaauuggucaaagccgcaauguaacauuacaggauuugcaccuuuuucuaaggacaauucgauucggcuuuccgcugguggggacaucugggugacaagagaaccuuaugugucaugcgauccugacaaguguuaucaauuugcccuuggacaaggaacaacacuaaacaacgggcauucaaaugacacaguacaugauaggaccccuuaucgaacccuauugaugaaugaguuggguguuccauuucauuugggaaccaaacaagugugcauagcaugguccagcucaaguugucacgauggaaaagcauggcugcauguuuguguaacgggggaugaugaaaaugcaacugcuagcuucauuuacaaugggaggcuuguagauaguauugguucaugguccaaaaaaauccucaggacccaggagucggaaugcguuuguaucaauggaacuuguacaguaguaaugacugaugggagugcuucaggaaaagcugauacuaaaauacuauucauugaggaggggaaaaucguucauacuagcucauugucaggaagugcucagcauguugaggagugcuccuguuauccucgauauccuggugucagaugugucugcagagacaacuggaaaggcuccaauaggcccaucguagauauaaauguaaaggauuauagcauuguuuccaguuaugugugcucaggacuuguuggagacacacccagaaaaaacgacagcuccagcaguagccauugcuuggauccuaacaaugaggaagguggucauggagugaaaggcugggccuuugaugauggaaaugacguguggaugggaagaacgaucagcgagaaguuacgcucaggauaugaaaccuucaaagucauugaaggcugguccaaaccuaacuccaaauugcagauaaauaggcaagucauaguugacagagguaauagguccgguuauucugguauuuucucuguugaaggcaaaagcugcaucaaucggugcuuuuauguggaguugauaaggggaaggaaacaggaaacugaagucuuguggaccucaaacaguauuguuguguuuuguggcaccucagguacauauggaacaggcucauggccugauggggcggacaucaaucucaugccuauauaa

SEQ ID NO: 46388 - RNA, 1413 nt, Artificial Sequence
  derived and/or modified CDS sequence (wt) from neuraminidase__InfluenzaA__AAZ83302
augaauccaaaucaaaaaauaauaaccauuggaucaaucaguauagcaaucggaauaauuagccuaauguugcaaauaggaaacauuauuucaauaugggcuagucacucaauccaaacuggaagucaaaaccacacuggaguaugcaaccaaagaaucaucacauaugaaaacagcaccugggugaaucacacauauguuaauauuaacaacaccaauguuauugcuggaaaggacaaagcuucagugacauuggccggcaauucaucucuuuguucuaucaguggaugggcuauauacacaaaagacaacagcauaagaauugguuccaaaggagauguuuuugucauaagagagccuuucauaucauguucucacucggaaugcagaaccuuuuuucugacccaaggugcucuauuaaaugacaaacauucaaaugggaccguuaaggacagaagucccuauagggcuuuaaugagcuguccucuaggugaagcuccguccccauacaauucaaaguuugaaucaguugcuuggucagcaagcgcaugccaugauggcaugggcugguuaacaaucggaauuucugguccagacaauggagcaguggcuguacuaaaauacaacggcauaauaacugaaaccauaaaaaguuggaaaaagcaaauauuaagaacacaagagucugaaugugucugugugaacgggucauguuucaccauaaugaccgauggcccgaguaauggggccgccucguacaaaaucuucaagaucgaaaagggaaagguuacuaaaucaauagaguugaaugcacccaauuuucauuaugaggaauguuccuguuacccagacacuggcacagugauguguguaugcagggacaacuggcaugguucaaaucgacccugggugucuuuuaaucaaaaccuggauuaucaaauaggauacaucugcagugggguguucggugacaauccgcgucccaaagauggagagggcagcugcaauccagugacuguugauggagcaaacggaguaaagggguuuucauacaaauaugguaaugguguuuggauaggaaggacuaaaaguaacagacuuagaaagggguuugagaugauuugggauccuaauggauggacagauaccgacagugauuucucagugaaacaggauguuguggcaauaacugauuggucaggguacagcggaaguuucguucaacauccugaguuaacaggauuggacuguauaagaccuugcuucuggguugaguuagucagaggacugccaaaagaaaauacaacaaucuggacuagugggagcagcauuucuuuuuguggcguaaauagugauacugcaaacuggucuuggccagacggugcugaguugccguuuaccauugacaaguag

SEQ ID NO: 46389 - RNA, 1410 nt, Artificial Sequence
  derived and/or modified CDS sequence (wt) from neuraminidase__InfluenzaA__AAZ83315
augaauccaaaucaaaagauaauaacgauuggcucuguuucucucacuauugccacaauaugcuuccuuaugcaaauugccauccugguaacuacuguaacacugcauuucaagcaauaugaaugcaacucucucccaaacaaccaaguaaugcugugugaaccaacaauaauagaaagaaacauaacagagauaguguaucugaccaacaccaccauagagaaggaaauaugccccaaacuagcagaauacagaaauuggucaaagccgcaauguaaaauuacaggauuugcaccuuuuucuaaggacaauucaauucggcuuuccgcugguggggacauuugggugacaagagaaccuuaugugucaugcgauccugacaaguguuaucaauuugcccuuggacagggaacaacacuaaacaacaggcauucaaaugacacaguacaugauaggaccccuuaucgaacccuauugaugaaugaguuggguguuccauuucauuugggaaccaagcaagugugcauagcaugguccagcucaaguugucacgauggaaaagcauggcugcauguuuguguaacugggcacgaugaaaaugcaacugcuagcuucauuuacgaugggaggcuuguagauaguauugguucaugguccaaaaaaauccucaggacccaggagucggaaugcguuuguaucaauggaacuuguacaguaguaaugacugaugggagugcuucaggaagagcuaauacuaaaauacuauucauugaggaggggaaaaucauucauauuagccaauugucaggaagugcucagcaugucgaggagugcucaugcuauccucgauauccuggugucagaugugucugcagagacaacuggaaaggcuccaauaggcccauuguagauauaaauguaaaggauuauagcauagcuuccaguuaugugugcucaggacuuguuggagacacacccagaaaaaacgacagcuccagcaguagccauugccugaauccuaacaaugaggaagggggucauggagugaaaggcugggccuuugaugauggaaaugacguguggaugggaagaacgaucagcgagaaauuccgcucagguuaugaaaccuucaaagucauugaaggcugguccaaaccuaacuccaaauugcagauaaauaggcaagucauaguugacagagauaauagguccgguuauucugguauuuucucuguugaaggcaaaagcugcaucaaucggugcuuuuauguggaguugauaaggggaaggaaacaggaaacugaagucugguggaccucaaacaguauuguuguguuuuguggcaccucagguacauauggaacaggcucauggccugauggggcggacaucaaucucaugccuauauaa

SEQ ID NO: 46390 - RNA, 1410 nt, Artificial Sequence
  derived and/or modified CDS sequence (wt) from neuraminidase__InfluenzaA__AAZ83326
augaauccaaaucaaaagauaauaacgauuggcucuguuucucucacuauugccacaauaugcuuccuuaugcaaauugccauccugguaacuacuguaacauugcauuucaagcaauaugaaugcgacucucucccaaacaaccaaguaaugcugugugaaccaacaauaauagaaagaaacauaacagagauaguguaucugaccaacaccaccauagagaaggaaauaugccccaaacuagcagaauacagaaauuggucaaagccgcaauguaaaauuacaggauuugcaccuuuuucuaaggacaauucaauucggcucuccgcugguggggacauuugggugacaagagaaccuuaugugucaugcgauccugacaaguguuaucaauuugcccuuggacagggaacaacacuaaacaacagacauucaaaugacacaguacaugauaggaccccuuaucgaacccuauugaugaaugaguuggguguuccauuucauuugggaaccaagcaagugugcauagcaugguccagcucaaguugucacgauggaaaagcauggcugcauguuuguguaacugggcacgaugaaaaugcaacugcuagcuucauuuacgaugggaggcuuguagauaguauugguucaugguccaaaaaaauccucaggacccaggagucugaaugcguuuguaucaauggaacuuguacaguaguaaugacugaugggagugcuucaggaagagcugauacuaaaauacuauucauugaggaggggaaaaucauucauauuagccaauugucaggaagugcucagcaugucgaggagugcucauguuauccucgauauccuggugucagaugugucugcagagacaacuggaaaggcuccaauaggcccauuguagauauaaauguaaaggauuauagcauuguuuccaguuaugugugcucaggacuuguuggagacacacccagaaaaaacgacagcuccagcaguagccauugccugaauccuaacaaugaggaagggggucauggagugaaaggcugggccuuugaugauggaaaugacguguggaugggaagaacgaucagcgagaaauuccgcucagguuaugaaacuuucaaagucauugaaggcugguccaaaccuaacuccaaauugcagauaaauaggcaagucauaguugacagagauaauagguccgguuauucugguauuuucucuguugaaggcaaaagcugcaucaaucggugcuuuuauguggaguugauaaggggaaggaaacaggaaacugaagucugguggaccucaaacaguauuguuguguuuuguggcaccucagguacauauggaacaggcucauggccugauggggcggacaucaaucucaugccuauauaa

SEQ ID NO: 46391 - RNA, 1410 nt, Artificial Sequence
  derived and/or modified CDS sequence (wt) from neuraminidase__InfluenzaA__AAZ83374
augaauccaaaucaaaagauaauaacgauuggcucuguuucucucaccauuuccacaauaugcuucuuuaugcaaauugccaucuugauaacuacuguaacauugcauuucaagcaauaugaauucaacucccccccaaacaaccaagugaugcugugugaaccaacaauaauagaaagaaacauaacagagauaguguaucugaccaacaccaccauagagaaggaaauaugccccaaacuagcagaauacagaaauuggucaaagccgcaaugugacauuacaggauuugcaccuuuuucuaaggacaauucgauuaggcuuuccgcugguggggacaucugggugacaagagaaccuuaugugucaugcgauccugacaaauguuaucaauuugcccuuggacagggaacaacacuaaacaacgugcauucaaaugacacaguacaugauaggaccccuuaucggacccuauugaugaaugaguuagguguuccauuucaucuggggacuaagcaagugugcauagcaugguccagcucaaguugucacgauggaaaagcauggcugcauguuuguguaacgggggaugauaaaaaugcaacugcuagcuucauuuacaaugggaggcuuguagauaguauuguuucaugguccaaagaaauccucagaacccaggagucagaaugcguuuguaucaauggaacuuguacaguaguaaugacugaugggagugcuucaggaaaagcugauacuaaaauacuauucauugaggaggggaaaaucguucauacuagcacauugucaggaagugcccagcaugucgaggagugcuccugcuauccucgauauccuggugucagaugugucugcagagacaacuggaaaggcuccaauaggcccaucguagauauaaacauaaaggauuauagcauuguuuccaguuaugugugcucaggacuuguuggagacacacccagaaaaaacgacagcuccagcaguagccauugcuuggauccuaacaaugaagaagguggucauggagugaaaggcugggccuuugaugauggaaaugacguguggaugggaagaacgaucagcgagaaguuacgcacaggauaugaaaccuucaaagucauugaaggcugguccaacccuaauuccaaauugcagauaaauaggcaagucauaguugacagagguaauagguccgguuauucugguauuuucucuguugaaggcaaaagcugcaucaaucggugcuuuuauguggaauugauaaggggaagaaaagaggaaacugaagucuuguggaccucaaacaguauuguuguguuuuguggcaccucagguacauauggaacaggcucauggccugauggggcggacaucaaucucaugccuauauaa

SEQ ID NO: 46392 - RNA, 1410 nt, Artificial Sequence; identical to SEQ ID NO: 46358
  derived and/or modified CDS sequence (wt) from neuraminidase__InfluenzaA__AAZ83385

SEQ ID NO: 46393 - RNA, 1413 nt, Artificial Sequence
  derived and/or modified CDS sequence (wt) from neuraminidase__InfluenzaA__AAZ85129
augaauacaaaucaaaaaauaauaaccauuggaucaaucaguauagcaaucggaauaauuagccuaauguugcaaauaggaaacauuauuucaauaugggcuagucacucaauccaaacuggaagucaaaaccacacuggaguaugcaaccaaagaaucaucacauaugaaaacagcaccugggugaaucacacauauguuaauauuaacaacaccaauguuauugcuggaaaggacaaaacuucagugacauuggccggcaauucaucucuuuguucuaucaguggaugggcuauauacacaaaagacaacagcauaagaauugguuccaaaggagauguuuuugucauaagagagccuuucauaucauguucucacuuggaaugcagaaccuuuuuucugacccaaggugcucuauuaaaugacaaacauucaaaugggaccguuaaggacagaagucccuauagggcuuuaaugagcuguccucuaggugaagcuccguccccauacaauucaaaguuugaaucaguugcuuggucagcaagcgcaugccaugauggcaugggcugguuaacaaucggaauuucugguccagacaauggagcaguggcuguacuaaaauacaacggcauaauaacugaaaccauaaaaaguuggaaaaagcaaauauuaagaacacaagagucugaaugugucugugugaacgggucauguuucaccauaaugaccgauggcccgaguaauggggccgccucguacaaaaucuucaagaucgaaaagggaaagguuacuaaaucaauagaguugaaugcacccaauuuucauuaugaggaauguuccuguuacccagacacuggcacagugauguguguaugcagggacaacuggcaugguucaaaucgacccugggugucuuuuaaucaaaaccuggauuaucaaauaggauacaucugcagugggguguucggugacaauccgcgucccaaagauggagagggcagcuguaauccagugacuguugauggagcaaacggaguaaagggguuuucauacaaauaugguaaugguguuuggauaggaaggacuaaaaguaacagacuuagaaagggguuugagaugauuugggauccuaauggauggacagauaccgacagugauuucucagugaaacaggauguuguggcaauaacugauuggucaggguacagcggaaguuucguucaacauccugaguuaacaggauuggacuguauaagaccuugcuucuggguugaguuagucagaggacuaccaaaagaaaauacaacaaucuggacuagugggagcagcauuucuuuuuguggcguaaauagugauacugcaaacuggucuuggccagacggugcugaguugccguuuacuauugacaaguag

SEQ ID NO: 46394 - RNA, 1410 nt, Artificial Sequence
  derived and/or modified CDS sequence (wt) from neuraminidase__InfluenzaA__ABA06513
augaauccaaaucaaaaaauaauaacgauuggcucuguuucucucaccauugccacaauaugcuuccuuacgcaaauugccauccugguaacuacuguaacauugcauuucaagcaauaugaaugcaacucccccccaaacaaccaagugaugcugugugaaccaacaauaauagaaagaaacauaacagagauaguguaucugaccaacaccaccauagagaaggaaauaugccccaaacuagcagaauacagaaauuggucaaagccgcaaugcaacauuacuggauuugcaccuuuuucuaaggacaauucgauucggcuuuccgcugguggggacaucuggguuacaagagaaccuuaugugucaugcgauccugacaaguguuaucaauuugcccuuggacagggaacaacacuaaacaacgggcauucaaaugacacaguacaugauaggaccccuuauaggacccuauugaugaaugaguuggguguuccauuucauuugggaaccaagcaagugugcauagcaugguccagcucaaguugucacgauggaaaagcauggcugcauguuuguguaacgggggaugauaaaaaugcaacugcuagcuucauuuacaaugggaggcuuguagauaguauagguucaugguccaaaaaaauccucaggacccaggagucggaaugcguuuguaucaauggaacuuguacaguaguaaugacugaugggagugcuucaggaaaagcugauacuaaaauacuauucauugaggaggggaaaaucguucauacuagccuauugucagggagugcucagcaugucgaggagugcuccuguuauccucgauauccuggugucagaugugucugcagagacaacuggaaaggcuccaauaggcccaucguagauauaaauguaaaggauuauagcauuguuuccaguuaugugugcucaggacuuguuggagacacacccagaaaaaacgacagcuccagcaguagccauugcuuggauccuaacaaugaggaagguggucauggagugaaaggcugggccuuugaugauggaaaugacguguggaugggaagaacgaucagcgagaaguuacgcucaggauaugaaaccuucaaagucauugaaggcugguccaaaccuaacuccaaacugcagauaaauaggcaagucauaguugacagagauaauagguccgguuauucugguauuuucucuguugaaggcaaaagcugcaucaaucggugcuuuuauguggaguugauaaggggaaggaaccaggaaacugaagucuuguggaccucaaacaguauuguuguguuuuguggcaccucagguacauauggaacaggcucauggccugauggggcggacaucaaucucaugccuauauaa

SEQ ID NO: 46395 - RNA, 1410 nt, Artificial Sequence
  derived and/or modified CDS sequence (wt) from neuraminidase__InfluenzaA__ABA06545
augaauccaaaucaaaaaauaauaacgauuggcucuguuucucucaccauugccacaauaugcuuccuuacgcaaauugccauccugguaacuacuguaacauugcauuucaagcaauaugaaugcaacucccccccaaacaaccaagugaugcugugugaaccaacaauaauagaaagaaacauaacagagauaguguaucugaccaacaccaccauagagaaggaaauaugccccaaacuagcagaauacagaaauuggucaaagccgcaaugcaacauuacuggauuugcaccuuuuucuaaggacaauucgauucggcuuuccgcugguggggacaucuggguuacaagagaaccuuaugugucaugcgauccugacaaguguuaucaauuugcccuuggacagggaacaacacuaaacaacgggcauucaaaugacacaguacaugauaggaccccuuauaggacccuauugaugaaugaguuggguguuccauuucauuugggaaccaagcaagugugcauagcaugguccagcucaaguugucacgauggaaaagcauggcuacauguuuguguaacgggggaugauaaaaaugcaacugcuagcuucauuuacaaugggaggcuuguagauaguauagguucaugguccaaaaaaauccucaggacccaggagucggaaugcguuuguaucaauggaacuuguacaguaguaaugacugaugggagugcuucaggaaaagcugauacuaaaauacuauucauugaggaggggaaaaucguucauacuagccuauugucagggagugcucagcaugucgaggagugcuccuguuauccucgauauccuggugucagaugugucugcagagacaacuggaaaggcuccaauaggcccaucguagauauaaauguaaaggauuauagcauuguuuccaguuaugugugcucaggacuuguuggagacacacccagaaaaaacgacagcuccagcaguagccauugcuuggauccuaacaaugaggaagguggucauggagugaaaggcugggccuuugaugauggaaaugacguguggaugggaagaacgaucagcgagaaguuacgcucaggauaugaaaccuucaaagucauugaaggcugguccaaaccuaacuccaaacugcagauaaauaggcaagucauaguugacagagauaauagguccgguuauucugguauuuucucuguugaaggcaaaagcugcaucaaucggugcuuuuauguggaguugauaaggggaaggaaccaggaaacugaagucuuguggaccucaaacaguauuguuguguuuuguggcaccucagguacauauggaacaggcucauggccugauggggcggacaucaaucucaugccuauauaa

SEQ ID NO: 46396 - RNA, 1413 nt, Artificial Sequence
  derived and/or modified CDS sequence (wt) from neuraminidase__InfluenzaA__ABA08478
augaauacaaaucaaaaaauaauaaccauuggaucaaucaguauagcaaucggaauaauuagucuaauguugcaaauaggaaauauuauuucaauaugggcuagucacucaauccaaacuggaagucaaaaccacacuggaauaugcaaccaaagaaucaucacauaugaaaacagcaccugggugaaucacacauauguuaauauuaacaacacuaauguuguugcuggaaaggacaaaacuucagugacauuggccggcaauucaucucuuuguucuaucaguggaugggcuauauacacaaaagacaacagcauaagaauuggcuccaaaggagauguuuuugucauaagagaaccuuucauaucauguucucacuuggaaugcagaaccuuuuuucugacccaaggugcucuauuaaaugacaaacauucaaauggaaccguuaaggacagaaguccuuauagggccuuaaugagcuguccucuaggugaagcuccguccccauacaauucaaaguuugaaucaguugcauggucagcaagcgcaugccaugauggcaugggcugguuaacaaucggaauuucugguccagacaauggagcuguggcuguacuaaaauacaacggaauaauaacugaaaccauaaaaaguuggaaaaagcgaauauugagaacacaagagucugaauguguuugugugaacgggucauguuucaccauaaugaccgauggcccgaguaauggggccgccucguacaaaaucuucaagaucgaaaaggggaagguuacuaaaucaauagaguugaaugcacccaauuuucauuaugaggaauguuccuguuacccagacacuggcacagugauguguguaugcagggacaacuggcaugguucaaaucgaccuugggugucuuuuaaucaaaacuuggauuaucaaauaggauacaucugcaguggaguguucggugacaauccgcgucccaaagauggaaagggcagcuguaauccagugacuguugauggagcagacggaguuaagggguuuucauacaaauaugguaaugguguuuggauaggaaggacuaaaaguaacagacuuagaaagggguuugagaugauuugggauccuaauggauggacagauaccgacagugauuucucagugaaacaggauguuguggcaauaacugauuggucaggguacagcggaaguuucguucaacauccugaguuaacaggauuggacuguauaagaccuugcuucuggguugaguuagucagaggacugccuagagaaaauacaacaaucuggacuagugggagcagcauuucuuuuuguggcguugauagugauacugcaaacuggucuuggccagacggugcugaguugccguucaccauugacaaguag

SEQ ID NO: 46397 - RNA, 1410 nt, Artificial Sequence
  derived and/or modified CDS sequence (wt) from neuraminidase__InfluenzaA__ABA08511
augaauccaaaucaaaaaauaauaacgauuggcucuguuucucucaccauugccacaauaugcuuccuuacgcaaauugccauccugguaacuacuguaacauugcauuucaagcaauaugaaugcaacucccccccaaacaaccaagugaugcugugugaaccaacaauaauagaaagaaacauaacagagauaguguaucugaccaacaccaccauagagaaggaaauaugccccaaacuggcagaauacagaaauuggucaaagccgcaaugcaacauuacuggauuugcaccuuuuucuaaggacaauucgauucggcuuuccgcugguggggacaucuggguuacaagagaaccuuaugugucaugcgauccugacaaguguuaucaauuugcccuuggacagggaacaacacuaaacaacgggcauucaaaugacacaguacaugauaggaccccuuauaggacccuauugaugaaugaguuggguguuccauuucauuugggaaccaagcaagugugcauagcaugguccagcucaaguugucacgauggaaaagcauggcugcauguuuguguaacgggggaugauaaaaaugcaacugcuagcuucauuuacaaugggaggcuuguagauaguauagguucaugguccaaaaaaauccucaggacccaggagucggaaugcguuuguaucaauggaacuuguacaguaguaaugacugaugggagugcuucaggaaaagcugauacuaaaauacuauucauugaggaggggaaaaucguucauacuagccuauugucagggagugcucagcaugucgaggagugcuccuguuauccucgauauccuggugucagaugugucugcagagacaacuggaaaggcuccaauaggcccaucguagauauaaauguaaaggauuauagcauuguuuccaguuaugugugcucaggacuuguuggagacacacccagaaaaaacgacagcuccagcaguagccauugcuuggauccuaacaaugaggaagguggucauggagugaaaggcugggccuuugaugauggaaaugacguguggaugggaagaacgaucagcgagaaguuacgcucaggauaugaaaccuucaaagucauugaaggcugguccaaaccuaacuccaaacugcagauaaauaggcaagucauaguugacagagauaauagguccgguuauucugguauuuucucuguugaaggcaaaagcugcaucaaucggugcuuuuauguggaguugauaaggggaaggaaccaggaaacugaagucuuguggaccucaaacaguauuguuguguuuuguggcaccucagguacauauggaacaggcucauggccugauggggcggacaucaaucucaugccuauauaa

SEQ ID NO: 46398 - RNA, 1413 nt, Artificial Sequence
  derived and/or modified CDS sequence (wt) from neuraminidase__InfluenzaA__ABA12699
augaauccaaaucaaaaaauaauaaccauuggaucaaucaguauagcaaucggaauaauuagucuaauguugcaaauaggaaauauuauuucaauaugggcuagucacucaauccaaacuggaagucaaaaccacacuggaauaugcaaccaaagaaucaucacauaugaaaacagcaccugggugaaucacacauauguuaauauuaacaacacuaauguuguugcuggaaaggacaaaacuucagugacauuggccggcaauucaucucuuuguucuaucaguggaugggcuauauacacaaaagacaacagcauaagaauuggcuccaaaggagauguuuuugucauaagagaaccuuucauaucauguucucacuuggaaugcagaaccuuuuuucugacccaaggugcucuauuaaaugacaaacauucaaauggaaccguuaaggacagaaguccuuauagggccuuaaugagcuguccucuaggugaagcuccguccccauacaauucaaaguuugaaucaguugcauggucagcaagcgcaugccaugauggcaugggcugguuaacaaucggaauuucugguccagacaauggagcuguggcuguacuaaaauacaacggaauaauaacugaaaccauaaaaaguuggaaaaagcgaauauugagaacacaagagucugaaugugucugugugaacgggucauguuucaccauaaugaccgauggcccgaguaauggggccgccucguacaaaaucuucaagaucgaaaaggggaagguuacuaaaucaauagaguugaaugcacccaauuuucauuaugaggaauguuccuguuacccagacacuggcacagugauguguguaugcagggacaacuggcaugguucaaaucgaccuugggugucuuuuaaucaaaacuuggauuaucaaauaggauacaucugcaguggaguguucggugacaauccgcgucccaaagauggaaagggcagcuguaauccagugacuguugauggagcagacggaguuaagggguuuucauacaaauaugguaaugguguuuggauaggaaggacuaaaaguaacagacuuagaaagggguuugagaugauuugggauccuaauggauggacagauaccgacagugauuucucagugaaacaggauguuguggcaauaacugauuggucaggguacagcggaaguuucguucaacauccugaguuaacaggauuggacuguauaagaccuugcuucuggguugaguuagucagaggacugccuagagaaaauacaacaaucuggacuagugggagcagcauuucuuuuuguggcguugauagugauacugcaaacuggucuuggccagacggugcugaguugccguucaccauugacaaguag

SEQ ID NO: 46399 - RNA, 1413 nt, Artificial Sequence; identical to SEQ ID NO: 46398
  derived and/or modified CDS sequence (wt) from neuraminidase__InfluenzaA__ABA12710

SEQ ID NO: 46400 - RNA, 1413 nt, Artificial Sequence
  derived and/or modified CDS sequence (wt) from neuraminidase__InfluenzaA__ABA12721
augaauccaaaucaaaaaauaauaaccauuggaucaaucaguauagcaaucggaauaauuagucuaauguugcaaauaggaaauauuauuucaauaugggcuagucacucaauccaaacuggaagucaaaaccacacuggaguaugcaaccaaagaaucaucacauaugaaaacagcaccugggugaaucacacauauguuaauauuaacaacacuaauguuauugcuggaaaggacaaaacuucagugacauuggccggcaauucaucucuuuguucaaucaguggaugggcuauauacacaaaagacaacagcauaagaauugguuccaaaggagauguuuuugucauaagagagccuuucauaucauguucucacuuggaaugcagaaccuuuuuucugacccaaggugcucuauuaaaugacaaacauucaaaugggaccguuaaggacagaagucccuauagggcuuuaaugagcuguccucuaggugaagcuccguccccauacaauucaaaguuugaaucaguugcuuggucagcaagcgcaugccaugauggcaugggcuggcuaacaaucggaauuucugguccagacaauggagcuguggcuguacuaaaauacaacggcauaauaacugaaaccauaaaaaguuggaaaaagcaaauauuaagaacacaagagucugaaugugucugugugaacgggucauguuucaccauaaugaccgauggcccgaguaauggggccgccucguacaaaaucuucaagaucggaaagggaaagguuacuaaaucaauagaguugaaugcacccaauuuucauuaugaggaauguuccuguuacccagacacuggcacagugauguguguaugcagggacaacuggcaugguucaaaucgaccuugggugucuuuuaaucaaaaccuggauuaucaaauaggauacaucugcagugggguguucggugacaauccgcgucccagagauggagagggcagcuguaauccagugacuguugauggagcaaacggaguaaagggguuuucauacaaauaugguaaugguguuuggauaggaaggacuaaaaguaacagacuuagaaagggguuugagaugauuugggauccuaauggauggacagauaccgacagugauuucucagugaaacaggaugucguggcaauaacugauuggucaggguacagcggaaguuucguucaacauccugaguuaacaggauuggacuguauaagaccuugcuucuggguugaguuagucagaggacugccuagagaaaauacaacaaucuggacuagugggagcagcauuucuuucuguggcguaaauagugauacugcaaacuggucuuggccagacggugcugaguugccguucaccauugacaaguag

SEQ ID NO: 46401 - RNA, 1413 nt, Artificial Sequence
  derived and/or modified CDS sequence (wt) from neuraminidase__InfluenzaA__ABA12732
augaauccaaaucaaaaaauaauaaccauuggaucaaucaguauagcaaucggaauaauuagucuaauguugcaaauaggaaauauuauuucaauaugggcuagucacucaauccaaacuggaagucaaaaccacacuggaauaugcaaccaaagaaucaucacauaugaaaacagcaccugggugaaucacacauauguuaauauuaacaacacuaauguuguugcuggaaaggacaaaacuucagugacauuggccggcaauucaucucuuuguucuaucaguggaugggcuauauacacaaaagacaacagcauaagaauuggcuccaaaggagauguuuuugucauaagagaaccuuucauaucauguucucacuuggaaugcagaaccuuuuuucugacccaaggugcucuauuaaaugacaaacauucaaauggaaccguuaaggacagaagucccuauagggccuuaaugagcuguccucuaggugaagcuccguccccauacaauucaaaguuugaaucaguugcauggucagcaagcgcaugccaugauggcaugggcugguuaacaaucggaauuucugguccagacaauggagcuguggcuguacuaaaauacaacggaauaauaacugaaaccauaaaaaguuggaaaaagcgaauauugagaacacaagagucugaaugugucugugugaacgggucauguuucaccauaaugaccgauggcccgaguaauggggccgccucguacaaaaucuucaagaucgaaaaggggaagguuacuaaaucaauagaguugaaugcacccaauuuccauuaugaggaauguuccuguuacccagacacuggcacagugaugugugugugcagggacaacuggcaugguucaaaucgaccuugggugucuuuuaaucaaaacuuggauuaucaaauaggauacaucugcaguggaguguucggugacaauccgcgucccaaagauggaaagggcagcuguaauccagugacuguugauggagcagacggaguuaagggguuuucauacaaauaugguaaugguguuuggauaggaaggacuaaaaguaacagacuuagaaagggguuugagaugauuugggauccuaauggauggacagauaccgacagugauuucucagugaaacaggauguuguggcaauaacugauuggucaggguacagcggaaguuucguucaacauccugaguuaacaggauuggacuguauaagaccuugcuucuggguugaguuagucagaggacugccuagagaaaauacaacaaucuggacuagugggagcagcauuucuuuuuguggcguugauagugauacugcaaacuggucuuggccagacggugcugaguugccguucaccauugacaaguag

SEQ ID NO: 46402 - RNA, 1410 nt, Artificial Sequence
  derived and/or modified CDS sequence (wt) from neuraminidase__InfluenzaA__ABA12743
augaauccaaaucaaaagauaauaacgauuggcucuguuucucucaccauuuccacaauaugcuucuucaugcaaauugccaucuugauaacuacuguaacauugcauuucaagcaauaugaauucaacucccccccaaacaaccaagugaugcugugugaaccaacaauaauagaaagaaacauaacagagauaguguaucugaccaacaccaccauagagaaggaaauaugccccaaacuagcagaauacagaaauuggucaaagccgcaaugugacauuacaggauuugcaccuuuuucuaaggacaauucgauuaggcuuuccgcugguggggacaucugggugacaagagaaccuuaugugucaugcgauccugacaaguguuaucaauuugcccuuggacagggaacaacacuaaacaacgugcauucaaaugacacaguacaugauaggaccccuuaucggacccuauugaugaaugaguuagguguuccauuucaucuggggaccaagcaagugugcauagcaugguccagcucaaguugucaugauggaaaagcauggcugcauguuuguguaacgggggaugauaaaaaugcaacugcuagcuucauuuacaaugggaggcuuguagauaguauuguuucaugguccaaagaaauccucaggacccaggagucagaaugcguuuguaucaauggaacuuguacaguaguaaugacugaugggagugcuucaggaaaagcugauacuaaaauacuauucauugaggaggggaaaaucguucauacuagcacauugucaggaagugcucagcaugucgaggagugcuccugcuauccucgauauccuggugucagaugugucugcagagacaacuggaaaggcuccaauaggcccauuguagauauaaacauaaaggauuauagcauuguuuccaguuaugugugcucaggacuuguuggagacacacccagaaaaaacgacagcuccagcaguagccauugcuuggauccuaacaaugaagaagguggucauggagugaaaggcugggccuuugaugauggaaaugacguguggaugggaagaacgaucagcgagaaguuacgcucaggauaugaaaccuucaaagucauugaaggcugguccaacccuaauuccaaauugcagauaaauaggcaagucauaguugacagagguaauagguccgguuauucugguauuuucucuguugaaggcaaaagcugcaucaaucggugcuuuuauguggaguugauaaggggaagaaaagaggaaacugaagucuuguggaccucaaacaguauuguuguguuuuguggcaccucagguacauauggaacaggcucauggccugauggggcggacaucaaucucaugccuauuuaa

SEQ ID NO: 46403 - RNA, 1410 nt, Artificial Sequence
  derived and/or modified CDS sequence (wt) from neuraminidase__InfluenzaA__ABA12754
augaauccaaaucaaaagauaauaacgauuggcucuguuucucucaccauuuccacaauauguuucuucaugcaaauugccaucuugauaacuacuguaacauugcauuucaagcaauaugaauucaacucccccccaaacaaccaagugaugcugugugaaccaacaauaauagaaagaaacauaacagagauaguguaucugaccaacaccaccauagagaaggaaauaugccccaaacuagcagaauacagaaauuggucaaagccgcaaugugacauuacaggauuugcaccuuuuucuaaggacaauucgauuaggcuuuccgcugguggggacaucugggugacaagagaaccuuaugugucaugcgauccugacaaguguuaucaauuugcccuuggacagggaacaacacuaaacaacgugcauucaaaugacacaguacaugauaggaccccuuaucggacccuauugaugaaugaauuagguguuccauuccaucuggggaccaagcaagugugcauagcaugguccagcucaaguugucacgauggaaaagcauggcugcauguuuguguaacgggggaugauaaaaaugcaacugcuagcuucauuuacaaugggaggcuuguagauaguauuguuucaugguccaaagauauccucaggacccaggagucagaaugcguuuguaucaauggaacuuguacaguaguaaugacugaugggagugcuucaggaaaagcugauacuaaaauacuauucauugaggaggggaaaaucguucauacuagcacauugucaggaagugcucagcaugucgaggagugcuccugcuauccucgauauccuggugucagaugugucugcagagacaacuggaaaggcuccaauaggcccauuguagauauaaacauaaaggauuauagcauuguuuccaguuaugugugcucaggacuuguuggagacacacccagaaaaaacgacagcuccagcaguagccauugcuuggauccuaacaaugaagaagguggucauggagugaaaggcugggccuuugaugauggaaaugacguguggaugggaagaacgaucagcgagaaguugcgcuuaggauaugaaaccuucaaagucauugaaggcugguccaacccuaauuccaaauugcagauaaauaggcaagucauaguugaaagagguaauagguccgguuauucuggcauuuucucuguugaaggcaaaagcugcaucaaucggugcuuuuauguggaguugauaaggggaagaaaagaggaaacugaagucuuguggaccucaaacaguauuguuguguuuuguggcaccucagguacauauggaacaggcucauggccugauggggcggacaucaaucucaugccuauauaa

SEQ ID NO: 46404 - RNA, 1410 nt, Artificial Sequence
  derived and/or modified CDS sequence (wt) from neuraminidase__InfluenzaA__ABA12765
augaauccaaaucaaaagauaauaacgauuggcucuguuucucucaccauuuccacaauaugcuucuucaugcaaauugccaucuugauaaccacuguaacauugcauuucaagcaauaugaauucaacucccccccaaacaaccaagugaugcugugugaaccaacaauaauagaaagaaauauaacagagauaguguaccugaccaacaccaccauagagaaggaaauaugccccaaacuagcagaauacagaaauuggucaaagccgcaaugugacauuacaggauuugcaccuuuuucuaaggacaauucgauuaggcuuuccgcugguggggacaucugggugacaagagaaccuuaugugucaugcgauccugacaaguguuaucaauuugcccuuggacagggaacaacacuaaacaacgugcauucaaaugacacaguacaugauaggaccccuuaucggacccuauugaugaaugaguuagguguuccauuucaucuggggaccaagcaagugugcauagcaugguccagcucaaguugucacgauggaaaagcauggcugcauguuuguguaacgggggaugauaaaaaugcaacugcuagcuucauuuacaaugggaggcuuguagauaguauuguuucaugguccaaagaaauccucaggacccaggagucagaaugcguuuguaucaauggaacuugugcaguaguaaugacugaugggagcgcuucaggaaaagcugauacuaaaauacuauucauugaggaggggaaaaucguucauacuagcaaauugucaggaagugcucagcaugucgaggagugcuccugcuauccucgauauccugguaucagaugugucugcagagacaacuggaaaggcuccaauaggcccaucguagauauaaacauaaaggauuauagcauuguuuccaguuaugugugcucaggacuuguuggagacacacccagaaaaaacgacagcuccagcaguagccauugcuuggauccuaacaaugaagaagguggucauggagugaaaggcugggccuuugaugauggaaaugacguguggaugggaagaacgaucagcgagaaguuacgcucaggauaugaaaccuucaaagucauugaaggcugguccaacccuaauuccaaauugcagauaaauaggcaagucauaguugauagagguaauagguccgguuauucugguauuuucucuguugaaggcaaaagcugcaucaaucggugcuuuuauguggaguugauaaggggaagaaaagaggaaaccgaagucuuguggaccucaaacaguauuguuguguuuuguggcaccucagguacauauggaacaggcucauggccugauggggcggacaucaaucucaugccuauauaa

SEQ ID NO: 46405 - RNA, 1410 nt, Artificial Sequence; identical to SEQ ID NO: 46345
  derived and/or modified CDS sequence (wt) from neuraminidase__InfluenzaA__ABA12776

SEQ ID NO: 46406 - RNA, 1410 nt, Artificial Sequence; identical to SEQ ID NO: 46378
  derived and/or modified CDS sequence (wt) from neuraminidase__InfluenzaA__ABA12786

SEQ ID NO: 46407 - RNA, 1410 nt, Artificial Sequence
  derived and/or modified CDS sequence (wt) from neuraminidase__InfluenzaA__ABA18029
augaauccaaaucaaaagauaauaacgauuggcucuguuucucucaccauuuccacaauaugcuucuucaugcaaauugccaucuugauaaccacuguaacauugcauuucaagcaauaugaauucaacucccccccaaacaaccaagugaugcugugugaaccaacaauaauagaaagaaacauaacagagauaguguaccugaccaacaccaccauagagaaggaaauaugccccaaacuagcagaauacagaaauuggucaaagccgcaaugugacauuacaggauuugcaccuuuuucuaaggacaauucgauuaggcuuuccgcugguggggacaucugggugacaagagaaccuuaugugucaugcgauccugacaaguguuaucaauuugcccuuggacagggaacaacacuaaacaacgugcauucaaaugacacaguacaugauaggaccccuuaucggacccuauugaugaaugaguuagguguuccauuucaucuggggaccaagcaagugugcauagcaugguccagcucaaguugucacgauggaaaagcauggcugcauguuuguguaacgggggaugauaaaaaugcaacugcuagcuucauuuacaaugggaggcuuguagauaguauuguuucaugguccaaagaaauccucaggacccaggagucagaaugcguuuguaucaauggaacuugugcaguaguaaugacugaugggagcgcuucaggaaaagcugauacuaaaauacuauucauugaggaggggaaaaucguucauacuagcaaauugucaggaagugcucagcaugucgaggagugcuccugcuauccucgauauccugguaucagaugugucugcagagacaacuggaaaggcuccaauaggcccaucguagauauaaacauaaaggauuauagcauuguuuccaguuaugugugcucaggacuuguuggagacacacccagaaaaaacgacagcuccagcaguagccauugcuuggauccuaacaaugaagaagguggucauggagugaaaggcugggccuuugaugauggaaaugacguguggaugggaagaacgaucagcgagaaguuacgcucaggauaugaaaccuucaaagucauugaaggcugguccaacccuaauuccaaauugcagauaaauaggcaagucauaguugauagagguaauagguccgguuauucugguauuuucucuguugaaggcaaaagcugcaucaaucggugcuuuuauguggaguugauaaggggaagaaaagaggaaaccgaagucuuguggaccucaaacaguauuguuguguuuuguggcaccucagguacauauggaacaggcucauggccugauggggcggacaucaaucucaugccuauauaa

SEQ ID NO: 46408 - RNA, 1413 nt, Artificial Sequence
  derived and/or modified CDS sequence (wt) from neuraminidase__InfluenzaA__ABA18040
augaauccaaaucaaaaaauaauaaccauuggaucaaucaguauagcaaucggaauaauuagccuaauguugcaaauaggaaacauuauuucaauaugggcuagucacucaauccaaacuggaagucaaaaccacacuggaguaugcaaccaaagaaucaucacauaugaaaacagcaccugggugaaucacacauauguuaauauuaacaacaccaauguuauugcuggaaaggacaaaacuucagugacauuggccggcaauucaucucuuuguucuaucaguggaugggcuauauacacaaaagacaacagcauaagaauugguuccaaaggagauguuuuugucauaagagagccuuucauaucauguucucacuuggaaugcagaaccuuuuuucugacccaaggugcucuauuaaaugacaaacauucaaaugggaccguuaaggacagaagucccuauagggcuuuaaugagcuguccucuaggugaagcuccguccccauacaauucaaaguuugaaucaguugcuuggucagcaagcgcaugccaugauggcaugggcugguuaacaaucggaauuucugguccagacaauggagcaguggcuguacuaaaauacaacggcauaauaacugaaaccauaaaaaguuggaaaaagcaaauauuaagaacacaagagucugaaugugucugugugaacgggucauguuucaccauaaugaccgauggcccgaguaauggggccgccucguacaaaaucuucaagaucgaaaagggaaagguuacuaaaucaauagaguugaaugcacccaauuuucauuaugaggaauguuccuguuacccagacacuggcacagugauguguguaugcagggacaacuggcaugguucaaaucgacccugggugucuuuuaaucaaaaccuggauuaucaaauaggauacaucugcagugggguguucggugacaauccgcgucccaaagauggagagggcagcuguaauccagugacuguugauggagcaaacggaguaaagggguuuucauacaaauaugguaaugguguuuggauaggaaggacuaaaaguaacagacuuagaaagggguuugagaugauuugggauccuaauggauggacagauaccgacagugauuucucagugaaacaggauguuguggcaauaacugauuggucaggguacagcggaaguuucguucaacauccugaguuaacaggauuggacuguauaagaccuugcuucuggguugaguuagucagaggacugccaaaagaaaauacaacaaucuggacuagugggagcagcauuucuuuuuguggcguaaauagugauacugcaaacuggucuuggccagacggugcugaguugccguuuaccauugacaaguag

SEQ ID NO: 46409 - RNA, 1410 nt, Artificial Sequence
  derived and/or modified CDS sequence (wt) from neuraminidase__InfluenzaA__ABA18126
augaauccaaaucaaaagauaauaacaauuggcucuguuucucucaccauugccacaauaugcuuccuuaugcaaauugccauccugguaacuacuguaacauugcauuucaagcaguaugaaugcaacucccccccaaacaaccaaguaaugcugugugaaccaacaauaauagaaagaaacauaacagagauaguguaucugaccaacaccaccauagagaaggaaauaugccccaaacuagcagaauacagaaauuggucaaagccgcaauguaacauuacaggauuugcaccuuuuucuaaggacaauucgauucggcuuuccgcugguggggacaucugggugacaagagaaccuuaugugucaugcgauccugacaaguguuaucaauuugcccuugggcagggaacaacacuaaacaacgggcauucaaaugacacaguacaugauaggaccccuuaccggacccuauugaugaaugaguuggguguuccauuucauuugggaaccaagcaagugugcauagcaugguccagcucaaguugucacgauggaaaagcauggcugcauguuuguguaacuggggaugaugaaaaugcaacugcuagcuucauuuacaaugggaggcuuguagauaguauugguucaugguccaaaaaaauacucaggacccaggagucggaaugcguuuguaucaauggaacuuguacaguaguaaugacugaugggagcgcuucaggaaaagcugauacuaaaauacuauucauugaggaggggaaaaucguucauauuagcacauugucaggaagugcucagcaugucgaggagugcuccuguuauccucgauauccuggugucagaugugucugcagagacaacuggaaaggcuccaauaggcccaucguagauauaaauguaaaggauuauagcauuguuuccaguuaugugugcucaggacuuguuggagacacacccagaaaaaacgacagcuucagcaguagccauugccuagauccuaacaaugaggaagguggucauggagugaaaggcugggccuuugaugauggaaaugacauguggaugggaagaacgaucagcgagaaguuacgcucagguuaugaaaccuucaaagucaucgaaggcugguccaaaccuaacuccaaauuacagauaaauaggcaagucauaguugaaagagguaacagguccgguuauucugguauuuucuccguugaaggcaaaagcugcaucaaucggugcuuuuauguggaguugauaaggggaaggaaagaggaaacugaagucugguggaccucaaacaguauuguuguguuuuguggcaccucagguacauauggaacaggcucauggccugauggggcggauaucaaucucaugccuauauaa

SEQ ID NO: 46410 - RNA, 1413 nt, Artificial Sequence
  derived and/or modified CDS sequence (wt) from neuraminidase__InfluenzaA__ABA18148
augaauccaaaucaaaaaauaauaaccauuggaucaaucaguauagcaaucggaauaauuagucuaauguugcaaauaggaaauauuauuucaauaugggcuagucacucaauccaaacuggaagucaaaaccacacuggaauaugcaaccaaagaaucaucacauaugaaaacagcaccugggugaaucacacauauguuaauauuaacaacacuaauguuguugcuggaaaggacaaaacuucagugacauuggccggcaauucaucucuuuguucuaucaguggaugggcuauauacacaaaagacaacagcauaagaauuggcuccaaaggagauguuuuugucauaagagaaccuuucauaucauguucucacuuggaaugcagaaccuuuuuucugacccaaggugcucuauuaaaugacaaacauucaaauggaaccguuaaggacagaaguccuuauagggccuuaaugagcuguccucuaggugaagcuccguccccauacaauucaaaguuugaaucaguugcauggucagcaagcgcaugccaugauggcaugggcugguuaacaaucggaauuucugguccagacaauggagcuguggcuguacuaaaauacaacggaauaauaacugaaaccauaaaaaguuggaaaaagcgaauauugagaacacaagagucugaaugugucugugugaacgggucauguuucaccauaaugaccgauggcccgaguaauggggccgccucguacaaaaucuuuaagaucgaaaaggggaagguuacuaaaucaauagaguugaaugcacccaauuuucauuaugaggaauguuccuguuacccagacacuggcacagugauguguguaugcagggacaacuggcaugguucaaaucgaccuugggugucuuuuaaucaaaacuuggauuaucaaauaggauacaucugcaguggaguguucggugacaauccgcgucccaaagauggaaagggcagcuguaauccagugacuguugauggagcagacggaguuaagggguuuucauacaaauaugguaaugguguuuggauaggaaggacuaaaaguaacagacuuagaaagggguuugagaugauuugggauccuaauggauggacagauaccgacagugauuucucagugaaacaggacguuguggcaauaacugauuggucaggguacagcggaaguuucguucaacauccugaguuaacaggauuggacuguauaagaccuugcuucuggguugaguuagucagaggacugccuagagaaaauacaacaaucuggacuagugggagcagcauuucuuuuuguggcguugauagugauacugcaaacuggucuuggccagacggugcugaguugccguucaccauugacaaguag

SEQ ID NO: 46411 - RNA, 1410 nt, Artificial Sequence
  derived and/or modified CDS sequence (wt) from neuraminidase__InfluenzaA__ABA18159
augaauccaaaucaaaagauaauaacgauuggcucuguuucucucaccauuuccacaauaugcuucuucaugcaaauugccaucuugauaaccacuguaacauugcauuucaagcaauaugaauucaacucccccccaaacaaccaagugaugcugugugaaccaacaauaauagaaagaaacauaacagagauaguguaccugaccaacaccaccauagagaaggaaauaugccccaaacuagcagaauacagaaauuggucaaagccgcaaugugacauuacaggauuugcaccuuuuucuaaggacaauucgauuaggcuuuccgcugguggggacaucugggugacaagagaaccuuaugugucaugcgauccugacaaguguuaucaauuugcccuuggacagggaacaacacuaaacaacgugcauucaaaugacacaguacaugauaggaccccuuaucggacccuauugaugaaugaguuagguguuccauuucaucuggggaccaagcaagugugcauagcaugguccagcucaaguugucacgauggaaaagcauggcugcauguuuguguaacgggggaugauaaaaaugcaacugcuagcuucauuuacaaugggaggcuuguagauaguauuguuucaugguccaaagaaauccucaggacccaggagucagaaugcguuuguaucaauggaacuugugcaguaguaaugacugaugggagcgcuucaggaaaagcugauacuaaaauacuauucauugaggaggggaaaaucguucauacuagcaaauugucaggaagugcucagcaugucgaggagugcuccugcuauccucgauauccugguaucagaugugucugcagagacaacuggaaaggcuccaauaggcccaucguagauguaaacauaaaggauuauagcauuguuuccaguuaugugugcucaggacuuguuggagacacacccagaaaaaacgacagcuccagcaguagccauugcuuggauccuaacaaugaagaagguggucauggagugaaaggcugggccuuugaugauggaaaugacguguggaugggaagaacgaucagcgagaaguuacgcucaggauaugaaaccuucaaagucauugaaggcugguccaacccuaauuccaaauugcagauaaauaggcaagucauaguugauagagguaauagguccgguuauucugguauuuucucuguugaaggcaaaagcugcaucaaucggugcuuuuauguggaguugauaaggggaagaaaagaggaaacugaagucuuguggaccucaaacaguauuguuguguuuuguggcaccucagguacauauggaacaggcucauggccugauggggcggacaucaaucucaugccaauauaa

SEQ ID NO: 46412 - RNA, 1410 nt, Artificial Sequence
  derived and/or modified CDS sequence (wt) from neuraminidase__InfluenzaA__ABA26703
augaauccaaaucaaaagauaauaacgauuggcucuguuucucucaccauuuccacaauaugcuucuucaugcaaauugccaucuugauaacuacuguaacauugcauuucaagcaauaugaauucaacucccccccaaacaaccaagugaugcugugugaaccaacaauaauagaaagaaacauaacagagauaguguaucugaccaacaccaccauagagaaggaaauaugccccaaacuagcagaauacagaaauuggucaaagccgcaaugugacauuacaggauuugcaccuuuuucuaaggacaauucgauuagacuuuccgcugguggggacaucugggugacaagagaaccuuaugugucaugcgauccugacaaguguuaucaauuugcccuuggacagggaacaacacuaaacaacgugcauucaaaugacacaguacaugauaggaccccuuaucggacccuauugaugaaugaguuagguguuccauuucaucuggggaccaagcaagugugcauagcaugguccagcucaaguugucacgauggaaaagcauggcugcauguuuguguaacgggggaugauaaaaaugcaacugcuagcuucauuuacaaugggaggcuuguagauaguauuguuucaugguccaaagaaauccucaggacccaggagucagaaugcguuuguaucaauggaacuuguacaguaguaaugacugaugggagugcuucaggaaaagcugauacuaaaauacuauucauugaggaggggaaaaucguucauacuagcacauugucaggaagugcucagcaugucgaggagugcuccugcuauccucgauauccuggugucagaugugucugcagagacaacuggaaaggcuccaauaggcccaucguagauauaaacauaaaggauuauagcauuguuuccaguuaugugugcucaggacuuguuggagacacacccagaaaaaacgacagcuccagcaguagccauugcuuggauccuaacaaugaagaagguggucauggagugaaaggcugggccuuugaugauggaaaugacguguggaugggaagaacgaucagcgagaaguuacgcucaggauaugaaaccuucaaagucauugaaggcugguccaacccuaauuccaaauugcagauaaauaggcaagucauaguugacagagguaauagguccgguuauucugguauuuucucuguugaaggcaaaagcugcaucaaucggugcuuuuauguggaguugauaaggggaagaaaagaggaaacugaagucuuguggaccucaaacaguauuguuguguuuuguggcaccucagguacauauggaacaggcucauggccugauggggcggacaucaaucucaugccuauauaa

SEQ ID NO: 46413 - RNA, 1410 nt, Artificial Sequence
  derived and/or modified CDS sequence (wt) from neuraminidase__InfluenzaA__ABA26714
augaauccaaaucaaaagauaauaacgauuggcucuguuucucucaccauuuccacaauaugcuucuucaugcaaauugccaucuugauaacuacuguaacauugcauuucaagcaauaugaauucaacucccccccaaacaaccaagugaugcugugugaaccaacaauaauagaaagaaacauaacagagauaguguaucugaccaacaccaccauagagaaggaaauaugccccaaacuagcagaauacagaaauuggucaaagccgcaaugugacauuacaggauuugcaccuuuuucuaaggacaauucgauuaggcuuuccgcugguggggacaucugggugacaagagaaccuuaugugucaugcgauccugacaaguguuaucaauuugcccuuggacagggaacaacacuaaacaacgugcauucaaaugacacaguacaugauaggaccccuuaucggacccuauugaugaaugaguuagguguuccauuucaucuggggaccaagcaagugugcauagcaugguccagcucaaguugucacgauggaaaagcauggcugcauguuuguguaacgggggaugauaaaaaugcaacugcuagcuucauuuacaaugggaggcuuguagauaguauuguuucaugguccaaagaaauccucaggacccaggagucagaaugcguuuguaucaauggaacuuguacaguaguaaugacugaugggagugcuucaggaaaagcugauacuaaaauacuauucauugaggaggggaaaaucguucauacuagcacauugucaggaagugcucagcaugucgaggaaugcuccugcuauccucgauauccuggugucagaugugucugcagagacaacuggaaaggcuccaauaggcccaucguagauauaaacauaaaggauuauagcauuguuuccaguuaugugugcucaggacuuguuggagacacacccagaaaaaacgacagcuccagcaguagccauugcuuggauccuaacaaugaagaagguggucauggagugaaagguugggccuuugaugauggaaaugacguguggaugggaagaacgaucagcgagaaguuacgcucaggauaugaaaccuucaaagucauugaaggcugguccaacccuaauuccaaauugcagauaaauaggcaagucauaguugacagagguaauagguccgguuauucugguauuuucucuguugaaggcaaaagcugcaucaaucggugcuuuuauguggaguugauaaggggaagaaaagaggaaacugaaguuuuguggaccucaaacaguauuguuguguuuuguggcaccucagguacauauggaacaggcucauggccugauggagcggacaucaaucucaugccuauauaa

SEQ ID NO: 46414 - RNA, 1410 nt, Artificial Sequence; identical to SEQ ID NO: 46378
  derived and/or modified CDS sequence (wt) from neuraminidase__InfluenzaA__ABA26736

SEQ ID NO: 46415 - RNA, 1410 nt, Artificial Sequence; identical to SEQ ID NO: 46378
  derived and/or modified CDS sequence (wt) from neuraminidase__InfluenzaA__ABA26747

SEQ ID NO: 46416 - RNA, 1410 nt, Artificial Sequence
  derived and/or modified CDS sequence (wt) from neuraminidase__InfluenzaA__ABA26758
augaauccaaaucaaaagauaauaacgauuggcucuguuucucucaccauuuccacaauaugcuucuuuaugcaaauugccaucuugauaacuacuguaacauugcauuucaagcaauaugaauucaacucccccccaaacaaccaagugaugcugugugaaccaacaauaauagaaagaaacauaacagagauaguguaucugaccaacaccaccauagagaaggaaauaugccccaaacuagcagaauacagaaauuggucaaagccgcaaugugacauuacaggauuugcaccuuuuucuaaggacaauucgauuaggcuuuccgcugguggggacaucugggugacaagagaaccuuaugugucaugcgauccugacaaauguuaucaauuugcccuuggacagggaacaacacuaaacaacgugcauucaaaugacacaguacaugauaggaccccuuaucggacccuauugaugaaugaguuagguguuccauuucaucuggggacuaagcaagugugcauagcaugguccagcucaaguugucacgauggaaaagcauggcugcauguuuguguaacgggggaugauaaaaaugcaacugcuagcuucauuuacaaugggaggcuuguagauaguauuguuucaugguccaaagaaauccucagaacccaggagucagaaugcguuuguaucaauggaacuuguacaguaguaaugacugaugggagugcuucaggaaaagcugauacuaaaauacuauucauugaggaggggaaaaucguucauacuagcacauugucaggaagugcccagcaugucgaggagugcuccugcuauccucgauauccuggugucagaugugucugcagagacaacuggaaaggcuccaauaggcccaucguagauauaaacauaaaggauuauagcauuguuuccaguuaugugugcucaggacuuguuggagacacacccagaaaaaacgacagcuccagcaguagccauugcuuggauccuaacaaugaagaagguggucauggagugaaaggcugggccuuugaugauggaaaugacguguggaugggaagaacgaucagcgagaaguuacgcucaggauaugaaaccuucaaagucauugaaggcugguccaacccuaauuccaaauugcagauaaauaggcaagucauaguugacagagguaauagguccgguuauucugguauuuucucuguugaaggcaaaaguugcaucaaucggugcuuuuauguggaguugauaaggggaagaaaagaggaaacugaagucuuguggaccucaaacaguauuguuguguuuuguggcaccucagguacauauggaacaggcucauggccugauggggcggacaucaaucucaugccuauauaa

SEQ ID NO: 46417 - RNA, 1410 nt, Artificial Sequence; identical to SEQ ID NO: 46378
  derived and/or modified CDS sequence (wt) from neuraminidase__InfluenzaA__ABA26769

SEQ ID NO: 46418 - RNA, 1410 nt, Artificial Sequence
  derived and/or modified CDS sequence (wt) from neuraminidase__InfluenzaA__ABA26780
augaauccaaaucaaaagauaauaacgauuggcucuguuucucucaccauuuccacaauaugcuucuucaugcaaauugccaucuugauaacuacuguaacauugcauuucaagcaauaugaauucaacucccccccaaacaaccaagugaugcugugugaaccaacaauaauagaaagaaacauaacagagauaguguaucugaccaacaccaccauagagaaggaaauaugccccaaacuagcagaauacagaaauuggucaaagccgcaaugugacauuacaggauuugcaccuuuuucuaaggacaauucgauuagacuuuccgcugguggggacaucugggugacaagagaaccuuaugugucaugcgacccugacaaguguuaucaauuugcccuuggacagggaacaacacuaaacaacgugcauucaaaugacacaguacaugauaggaccccuuaucggacccuauugaugaaugaguuagguguuccauuucaucuggggaccaagcaagugugcauagcaugguccagcucaaguugucacgauggaaaagcauggcugcauguuuguguaacgggggaugauaaaaaugcaacugcuagcuucauuuacaaugggaggcuuguagauaguauuguuucaugguccaaagaaauccucagaacccaggagucagaaugcguuuguaucaauggaacuuguacaguaguaaugacugaugggagugcuucaggaaaagcugauacuaaaauacuauucauugaggaagggaaaaucguucauacuagcacauugucaggaagugcucagcaugucgaggagugcuccugcuauccucgauauccuggugucagaugugucugcagagacaacuggaaaggcuccaauaggcccaucguagauauaaacauaaaggauuauagcauuguuuccaguuaugugugcucaggacuuguuggagacacacccagaaaaaacgacagcuccagcaguagccauugcuuggauccuaacaaugaagaagguggucauggagugaaaggcugggccuuugaugauggaaaugacguguggaugggaagaacgaucagcgagaaguuacgcucaggauaugaaaccuucaaagucauugaaggcugguccaacccuaauuccaaauugcagauaaauaggcaagucauaguugacagagguaauagguccgguuauucugguauuuucucuguugaaggcaaaagcugcaucaaucggugcuuuuauguggaguugauaaggggaagaaaagaggaaacugaagucuuguggaccucaaacaguauuguuguguuuuguggcaccucagguacauauggaacaggcucauggccugauggggcggacaucaaucucaugccuauauaa

SEQ ID NO: 46419 - RNA, 1410 nt, Artificial Sequence; identical to SEQ ID NO: 46378
  derived and/or modified CDS sequence (wt) from neuraminidase__InfluenzaA__ABA26791

SEQ ID NO: 46420 - RNA, 1410 nt, Artificial Sequence; identical to SEQ ID NO: 46378
  derived and/or modified CDS sequence (wt) from neuraminidase__InfluenzaA__ABA26802

SEQ ID NO: 46421 - RNA, 1413 nt, Artificial Sequence
  derived and/or modified CDS sequence (wt) from neuraminidase__InfluenzaA__ABA42250
augaauccaaaucaaaaaauaauaaccauuggaucaaucaguauagcaaucggaauaauuagucuaauguugcaaauaggaaauauuauuucaauaugggcuagucacucaauccaaacuggaagucaaaaccacacuggaauaugcaaccaaagaaucaucacauaugaaaacagcaccugggugaaucacacauauguuaauauuaacaacacuaauguuguugcuggaaaggacaaaacuucagugacauuggccggcaauucaucucuuuguucuaucaguggaugggcuauauacacaaaagacaacagcauaagaauuggcuccaaaggagauguuuuugucauaagagaaccuuucauaucauguucucacuuggaaugcagaaccuuuuuucugacccaaggugcucuauuaaaugacaaacauucaaauggaaccguuaaggacagaaguccuuauagggccuuaaugagcuguccucuaggugaagcuccguccccauacaauucaaaguuugaaucaguugcauggucagcaagcgcaugccaugauggcaugggcugguuaacaaucggaauuucugguccagacaauggagcuguggcuguacuaaaauacaacggaauaauaacugaaaccauaaaaaguuggaaaaagcgaauauugagaacacaagagucugaauguguuugugugaacgggucauguuucaccauaaugaccgauggcccgaguaauggggccgccucguacaaaaucuucaagaucgaaaaggggaagguuacuaaaucaauagaguugaaugcacccaauuuucauuaugaggaauguuccuguuacccagacacuggcacagugauguguguaugcagggacaacuggcaugguucaaaucgaccuugggugucuuuuaaucaaaacuuggauuaucaaauaggauacaucugcaguggaguguucggugacaauccgcgucccaaagauggaaagggcagcuguaauccagugacuguugauggagcagacggaguuaagggguuuucauacaaauauggugaugguguuuggauaggaaggacuaaaaguaacagacuuagaaagggguuugagaugauuugggauccuaauggauggacagauaccgacagugauuucucagugaaacaggauguuguggcaauaacugauuggucaggguacagcggaaguuucguucaacauccugaguuaacaggauuggacuguauaagaccuugcuucuggguugaguuagucagaggacugccuagagaaaauacaacaaucuggacuagugggagcagcauuucuuuuuguggcguugauagugauacugcaaacuggucuuggccagacggugcugaguugccguucaccauugacaaguag

SEQ ID NO: 46422 - RNA, 1413 nt, Artificial Sequence; identical to SEQ ID NO: 46408
  derived and/or modified CDS sequence (wt) from neuraminidase__InfluenzaA__ABA42261

SEQ ID NO: 46423 - RNA, 1410 nt, Artificial Sequence
  derived and/or modified CDS sequence (wt) from neuraminidase__InfluenzaA__ABA42272
augaauccaaaucaaaagauaauaacgauuggcucuguuucucucaccauuuccacaauaugcuucuucaugcaaauugccaucuugauaacuacuguaacauugcauuucaagcaauaugaauucaacucccccccaaacaaccaagugaugcugugugaaccaacaauaauagaaagaaacauaacagagauaguguaucugaccaacaccaccauagagaaggaaauaugccccaaacuagcagaauacagaaauuggucaaagccgcaaugugacauuacaggauuugcaccuuuuucuaaggacaauucgauuaggcuuuccgcugguggggacaucugggugacaagagaaccuuaugugucaugcgauccugacaaguguuaucaauuugcccuuggacagggaacaacacuaaacaacgugcauucaaaugacacaguacaugauaggaccccuuaucggacccuauugaugaaugaguuagguguuccauuccaucuggggaccaagcaagugugcauagcaugguccagcucaaguugucacgauggaaaagcauggcugcauguuuguguaacgggggaugauaaaaaugcaacugcuagcuucauuuacaaugggaggcuuguagauaguauuguuucaugguccaaagauauccucaggacccaggagucagaaugcguuuguaucaauggaacuuguacaguaguaaugacugaugggagugcuucaggaaaagcugauacuaaaauacuauucauugaggaggggaaaaucguucauacuagcacauugucaggaagugcucagcaugucgaggagugcuccugcuauccucgauauccuggugucagaugugucugcagagacaacuggaaaggcuccaauaggcccauuguagauauaaacauaaaggauuauagcauuguuuccaguuaugugugcucaggacuuguuggagacacacccagaaaaaacgacagcuccagcaguagccauugcuuggauccuaacaaugaagaagguggucauggagugaaaggcugggccuuugaugauggaaaugacguguggaugggaagaacgaucaacgagaaguugcgcuuaggauaugaaaccuucaaagucauugaaggcugguccaacccuaauuccaaauugcagauaaauaggcaagucauaguugaaagagguaauagguccgguuauucuggcauuuucucuguugaaggcaaaagcugcaucaaucggugcuuuuauguggaguugauaaggggaagaaaagaggaaacugaagucuuguggaccucaaacaguauuguuguguuuuguggcaccucagguacauauggaacaggcucauggccugauggggcggacaucaaucucaugccuauauaa

SEQ ID NO: 46424 - RNA, 1410 nt, Artificial Sequence
  derived and/or modified CDS sequence (wt) from neuraminidase__InfluenzaA__ABA42294
augaauccaaaucaaaagauaauaacgauuggcucuguuucucucaccauuuccacaauaugcuucuucaugcaaauugccaucuugauaacuacuguaacauugcauuucaagcaauaugaauucaacucccccccaaacaaccaagugaugcugugugaaccaacaauaauagaaagaaacauaacagagauaguguaucugaccaacaccaccauagagaaggaaauaugccccaaacuagcagaauacagaaauuggucaaagccgcaaugugacauuacaggauuugcaccuuuuucuaaggacaauucgauuaggcuuuccgcugguggggacaucugggugacaagagaaccuuaugugucaugcgauccugacaaguguuaucaauuugcccuuggacagggaacaacacuaaacaacgugcauucaaaugacacaguacaugauaggaccccuuaucggacccuauugaugaaugaguuagguguuccauuucaucuggggaccaagcaagugugcauagcaugguccagcucaaguugucacgauggaaaagcauggcugcauguuuguguaacgggggaugauaaaaaugcaacugcuagcuucauuuacaaugggaggcuuguagauaguauuguuucaugguccaaagaaauccucaggacccaggagucagaaugcguuuguaucaauggaacuuguacaguaguaaugacugaugggagugcuucaggaaaagcugauacuaaaauacuguucauugaggaggggaaaaucguucauacuagcacauugucaggaagugcucagcaugucgaggaaugcuccugcuauccucgauauccuggugucagaugugucugcagagacaacuggaaaggcuccaauaggcccaucguagauauaaacauaaaggauuauagcauuguuuccaguuaugugugcucaggacuuguuggagacacacccagaaaaaacgacagcuccagcaguagccauugcuuggauccuaacaaugaagaagguggucauggagugaaagguugggccuuugaugauggaaaugacguguggaugggaagaacgaucagcgagaaguuacgcucaggauaugaaaccuucaaagucauugaaggcugguccaacccuaauuccaaauugcagauaaauaggcaagucauaguugacagagguaauagguccgguuauucugguauuuucucuguugaaggcaaaagcugcaucaaucggugcuuuuauguggaguugauaaggggaagaaaagaggaaacugaagucuuguggaccucaaacaguauuguuguguuuuguggcaccucagguacauauggaacaggcucauggccugauggggcggacaucaaucucaugccuauauaa

SEQ ID NO: 46425 - RNA, 1410 nt, Artificial Sequence
  derived and/or modified CDS sequence (wt) from neuraminidase__InfluenzaA__ABA42305
augaauccaaaucaaaagauaauaacaauuggcucuguuucucucaccauugccacaauaugcuuccuuaugcaaauugccauccugguaacuacuguaacauugcauuucaagcaguaugaaugcaacucccccccaaacaaccaaguaaugcugugugaaccaacaauaauagaaagaaacauaacagagauaguguaucugaccaacaccaccauagagaaggaaauaugccccaaacuagcagaauacagaaauuggucaaagccgcaauguaacauuacaggauuugcaccuuuuucuaaggacaauucgauucggcuuuccgcugguggggacaucugggugacaagagaaccuuaugugucaugcgauccugacaaguguuaucaauuugcccuuggacagggaacaacacuaaacaacgggcauucaaaugacacaguacaugauaggaccccuuaccggacccuauugaugaaugaauuggguguuccauuucauuugggaaccaggcaagugugcauagcaugguccagcucaaguugucacgauggaaaagcauggcugcauguuuguguaacuggggaugaugaaaaugcaacugcuagcuucauuuacaaugggaggcuuguagauaguauugguucaugguccaaaaaaauacucagaacccaggagucggaaugcguuuguaucaauggaacuuguacaguaguaaugacugaugggagcgcuucaggaaaagcugauacuaaaauacuauucauugaggaggggaaaaucguucauauuagcacauugucaggaagugcucagcaugucgaggagugcuccuguuauccucgauauccuggugucagaugugucugcagagacaacuggaaaggcuccaauaggcccaucguagauauaaauguaaaggauuauagcauuguuuccaguuaugugugcucaggacuuguuggagacacacccagaaaaaacgacagcuucagcaguagccauugccuagauccuaacaaugaggaagguggucauggagugaaaggcugggccuuugaugauggaaaugacguguggaugggaagaacgaucagcgagaaguuacgcucagguuaugaaaccuucaaagucaucgaaggcugguccaaaccuaacuccaaauuacagauaaauaggcaagucauaguugaaagagguaacagguccgguuauucugguauuuucuccguugaaggcaaaagcugcaucaaucggugcuuuuauguggaguugauaaggggaaggaaagaggaaacugaagucugguggaccucaaacaguauuguuguguuuuguggcaccucagguacauauggaacaggcucauggccugauggggcggauaucaaucucaugccuauauaa

SEQ ID NO: 46426 - RNA, 1410 nt, Artificial Sequence; identical to SEQ ID NO: 46270
  derived and/or modified CDS sequence (wt) from neuraminidase__InfluenzaA__ABA42316

SEQ ID NO: 46427 - RNA, 1413 nt, Artificial Sequence
  derived and/or modified CDS sequence (wt) from neuraminidase__InfluenzaA__ABA42327
augaauccaaaucaaaaaauaauaaccauuggaucaaucaguauagcaaucggaauaauuagucuaauguugcaaauaggaaauauuauuucaauaugggcuagucacucaauccaaacuggaagucaaaaccacacuggaauaugcaaccaaagaaucaucacauaugaaaacagcaccugggugaaucacacauauguuaauauuaacaacacuaauguuguugcuggaaaggacaaaacuucagugacauuggccggcaauucaucucuuuguucuaucaguggaugggcuauauacacaaaagacaacagcauaagaauuggcuccaaaggagauguuuuugucauaagagaaccuuucauaucauguucucacuuggaaugcagaaccuuuuuucugacccaaggugcucuauuaaaugacaaacauucaaaugggaccguuaaggacagaaguccuuauagggccuuaaugagcuguccucuaggugaagcuccguccccauacaauucaaaguuugaaucaguugcauggucagcaagcgcaugccaugauggcaugggcugguuaacaaucggaauuucugguccagacaauggagcuguggcuguacuaaaauacaacggcauaauaacugaaaccauaaaaaguuggaaaaagcgaauauuaagaacacaagagucugaaugugucugugugaacgggucauguuucaccauaaugaccgauggcccgaguaauggggcugccucguauaaaaucuucaagauugaaaaagggaaaguuacuaaaucaauagaguugaaugcacccaauuuucauuaugaggaauguuccuguuacccagacacuggcacagugauguguguaugcagggacaacuggcaugguucaaaucgaccuugggugucuuuuaaucaaaaccuggauuaucaaauaggauacaucugcagugggguguucggugacaauccgcgucccaaagauggagagggcagcuguaauccagugacuguugauggggcagacggaguaaagggguuuucauacaaauaugguaaugguguuuggauaggaaggacuaaaaguaacagacuuagaaagggguuugagaugauuugggauccuaauggauggacagauaccgacagugauuucucagugaaacaggauguuguggcaauaacugauuggucaggguacagcggaaguuucguucaacauccugaguuaacaggauuggacuguauaagaccuugcuucuggguugaguuagucagaggacugccuagagaaaauacaacaaucuggacuagugggagcagcauuucuuuuuguggcguaaauagugauacugcaaacuggucuuggccagacggugcugaguugccguucaccauugacaaguag

SEQ ID NO: 46428 - RNA, 1410 nt, Artificial Sequence
  derived and/or modified CDS sequence (wt) from neuraminidase__InfluenzaA__ABA42338
augaauccaaaucaaaagauaauaacaauuggcucuguuucucucaccauugccacaauaugcuuccuuaugcaaauugccauccugguaacuacuguaacauugcauuucaagcaguaugaaugcaacucccccccaaacaaccaaguaaugcugugugaaccagcaauaauagaaagaaacauaacagaaauaguguaucugaccaacaccaccauagagaaggaaauaugccccaaauuagcagaguacagaaauuggucaaagccgcaauguaacauuacaggauuugcaccuuuuuccaaggacaauucgauucggcuuuccgcugguggggacaucugggugacaagagaaccuuaugugucaugcgauccugacaaguguuaucaauuugcccuuggacagggaacaacacuaaacaacgggcauucaaaugacacaguacaugauaggaccccuuaccggacccuauugaugaaugaauuggguguuccauuucauuugggaaccaggcaagugugcauagcaugguccagcucaaguugucacgauggaaaagcauggcugcauguuuguguaacuggggaugaugaaaaugcaacugcuagcuucauuuacaaugggaggcuuguagauaguauugguucaugguccaaaaaaauacucagaacccaggaaucggaaugcguuuguaucaauggaacuuguacaguaguaaugacugaugggagcgcuucaggaaaagcugauacuaaaauacuauucauugaggaggggaaaaucguuaauauuagcacauugucaggaagugcucagcaugucgaggagugcuccuguuauccucgauauccuggugucagaugugucugcagagacaacuggaaaggcuccaauaggcccaucguagauauaaauguaaaggauuauagcauuguuuccaguuaugugugcucaggacuuguuggagacacacccagaaaaaacgacagcuucagcaguagccauugccuagauccuaacaaugaggaagguggucauggagugaaaggcugggccuuugaugauggaaaugacguguggaugggaagaacgaucagcgagaaguuacgcucagguuaugaaaccuucaaagucaucgaaggcugguccaaaccuaacuccaaauuacagauaaauagacaagucauaguugaaagagguaacagguccgguuauucugguauuuucuccguugaaggcaaaagcugcaucaaucggugcuuuuauguggaguugauaaggggaaggaaagaggaaacugaaguuugguggaccucaaacaguauuguuguguuuuguggcaccucagguacauauggaacaggcucauggccugauggggcggauaucaaucucaugccuauauaa

SEQ ID NO: 46429 - RNA, 1410 nt, Artificial Sequence
  derived and/or modified CDS sequence (wt) from neuraminidase__InfluenzaA__ABA42349
augaauccaaaucaaaagauaauaacaauuggcucuguuucucucaccauugccacaauaugcuuccuuaugcaaauugccauccugguaacuacuguaacauugcauuucaagcaguaugaaugugacucccccccaaacaaccaaguaaugcugugugaaccaacaauaauagaaagaaacauaacagagauaguguaucugaccaacaccaccauagagaaggaaauaugccccaaacuagcagaauacagaaauuggucaaagccgcaauguaacauuacaggauuugcaccuuuuucuaaggacaauucgauucggcuuuccgcugguggggacaucugggugacaagagaaccuuaugugucaugcgauccugacaaguguuaucaauuugcccuugggcagggaacaacacuaaacaacgggcauucaaaugacacaguacaugauaggaccccuuaccggacccuauugaugaaugaauuggguguuccauuucauuugggaaccaggcaagugugcauagcaugguccagcucaaguugucacgauggaaaagcauggcugcauguuuguguaacuggggaugaugaaaaugcaacugcuagcuucauuuacaaugggaagcuuguagauaguauugguucaugguccaaaaaaauacucagaacccaggagucggaaugcguuuguaucaauggaacuuguacaguaguaaugacugaugggagcgcuucaggaaaagcugauacuaaaauacuauucauugaggaggggaaaaucguucauauuagcacauugucaggaagugcucagcaugucgaggagugcuccuguuauccucgauauccuggugucagaugugucugcagagacaacuggaaaggcuccaauaggcccaucguagauauaaauguaaaggauuauagcauuguuuccaguuaugugugcucaggacuuguuggagacacacccagaaaaaacgacagcuucagcaguagccauugccuagauccuaacaaugaggaagguggucauggagugaaaggcugggccuuugaugauggaaaugacguguggaugggaagaacgaucagcgagaaguuacgcucagguuaugaaaccuucaaagucaucgaaggcugguccaaaccuaacuccaaauuacagauaaauaggcaagucauaguugaaagagguaacagguccgguuauucugguauuuucuccguugaaggcaaaagcugcaucaaucggugcuuuuauguggaguugauaaggggaaggaaagaggaaacugaagucugguggaccucaaacaguauuguuguguuuuguggcaccucagguacauauggaacaggcucauggccugauggggcggauaucaaucucaugccuauauaa

SEQ ID NO: 46430 - RNA, 1410 nt, Artificial Sequence; identical to SEQ ID NO: 46194
  derived and/or modified CDS sequence (wt) from neuraminidase__InfluenzaA__ABA42360

SEQ ID NO: 46431 - RNA, 1410 nt, Artificial Sequence
  derived and/or modified CDS sequence (wt) from neuraminidase__InfluenzaA__ABA42371
augaauccaaaucaaaagauaauaacaauuggcucuguuucucucaccauugccacaauaugcuuccuuaugcaaauugccauccugguaacuacuguaacauugcauuucaagcaguaugaaugcaacucccccccaaacaaccaaguaaugcugugugaaccagcaauaauagaaagaaacauaacagagauaguguaucugaccaacaccaccauagagaaggaaauaugccccaaauuagcagaauacagaaauuggucaaagccgcaauguaacauuacaggauuugcaccuuuuuccaaggacaauucgauucggcuuuccgcugguggggacaucugggugacaagagaaccuuaugugucaugcgauccugacaaguguuaucaauuugcccuuggacagggaacaacacuaaacaacgggcauucaaaugacacaguacaugauaggaccccuuaccggacccuauugaugaaugaauuggguguuccauuucauuugggaaccaggcaagugugcauagcaugguccagcucaaguugucacgauggaaaagcauggcugcauguuuguguaacuggggaugaugaaaaugcaacugcuagcuucauuuacaaugggaggcuuguagauaguauugguucaugguccaaaaaaauacucagaacccaggagucggaaugcguuuguaucaauggaacuuguacaguaguaaugacugaugggagcgcuucaggaaaagcugauacuaaaauacuauucauugaggaggggaaaaucguuaauauuagcacauugucaggaagugcucagcaugucgaggagugcuccuguuauccucgauauccuggugucagaugugucugcagagacaacuggaaaggcuccaauaggcccaucguagauauaaauguaaaggauuauagcauuguuuccaguuaugugugcucaggacuuguuggagacacacccagaaaaaacgacagcuucagcaguagccauugccuagauccuaacaaugaggaagguggucauggagugaaaggcugggccuuugaugauggaaaugacguguggaugggaagaacgaucagcgagaaguuacgcucagguuaugaaaccuucaaagucaucgaaggcugguccaaaccuaacuccaaauuacagauaaauaggcaagucauaguugaaagagguaacagguccgguuauucugguauuuucuccguugaaggcaaaagcugcauaaaucggugcuuuuauguggaguugauaaggggaaggaaagaggaaacugaaguuugguggaccucaaacaguauuguuguguuuuguggcaccucagguacauauggaacaggcucauggccugauggggcggauaucaaucucaugccuauauaa

SEQ ID NO: 46432 - RNA, 1410 nt, Artificial Sequence; identical to SEQ ID NO: 46177
  derived and/or modified CDS sequence (wt) from neuraminidase__InfluenzaA__ABA42382

SEQ ID NO: 46433 - RNA, 1410 nt, Artificial Sequence
  derived and/or modified CDS sequence (wt) from neuraminidase__InfluenzaA__ABA42393
augaauccaaaucaaaagauaauaacaauuggcucuguuucucucaccauugccacaauaugcuuccuuaugcaaauugccauccugguaacuacuguaacauugcauuucaagcaguaugaaugcaacucccccccaaacaaccaaguaaugcugugugaaccagcaauaauagaaagaaacauaacagagauaguguaucugaccaacaccaccauagagaaggaaauaugccccaaauuagcagaauacagaaauuggucaaagccgcaauguaacauuacaggauuugcaccuuuuuccaaggacaauucgauucggcuuuccgcugguggggacaucugggugacaagagaaccuuaugugucaugcgauccugacaaguguuaucaauuugcccuuggacagggaacaacacuaaacaacgggcauucaaaugacacaguacaugauaggaccccuuaccggacccuauugaugaaugaauuggguguuccauuucauuugggaaccaggcaagugugcauagcaugguccagcucaaguugucacgauggaaaagcauggcugcauguuuguguaacuggggaugaugaaaaugcaacugcuagcuucauuuacaaugggaggcuuguagauaguauugguucaugguccaaaaaaauacucagaacccaggaaucggaaugcguuuguaucaauggaacuuguacaguaguaaugacugaugggagcgcuucaggaaaagcugauacuaaaauacuauucauugaggaggggaaaaucguuaauauuagcacauugucaggaagugcucagcaugucgaggagugcuccuguuauccucgauauccuggugucagaugugucugcagagacaacuggaaaggcuccaauaggcccaucguagauauaaauguaaaggauuauagcauuguuuccaguuaugugugcucaggacuuguuggagacacacccagaaaaaacgacagcuucagcaguagccauugccuagauccuaacaaugaggaagguggucauggagugaaaggcugggccuuugaugauggaaaugacguguggaugggaagaacgaucagcgagaaguuacgcucagguuaugaaaccuucaaagucaucgaaggcugguccaaaccuaacuccaaauuacagauaaauaggcaagucauaguugaaagagguaacagguccgguuauucugguauuuucuccguugaaggcaaaagcugcaucaaucggugcuuuuauguggaguugauaaggggaaggaaagaggaaacugaaguuugguggaccucaaacaguauuguuguguuuuguggcaccucagguacauauggaacaggcucauggccugauggggcggauaucaaucucaugccuauauaa

SEQ ID NO: 46434 - RNA, 1410 nt, Artificial Sequence
  derived and/or modified CDS sequence (wt) from neuraminidase__InfluenzaA__ABA42404
augaauccaaaucaaaagauaauaacaauuggcucuguuucucucaccauugccacaauaugcuuccuuaugcaaauugccauccugguaacuacuguaacauugcauuucaagcaguaugaaugcaacucccccccaaacaaccaaguaaugcugugugaaccagcaauaauagaaagaaacauaacagagauaguguaucugaccaacaccaccauagagaaggaaauaugccccaaauuagcagaauacagaaauuggucaaagccgcaauguaacauuacaggauuugcaccuuuuuccaaggacaauucgauucggcuuuccgcugguggggacaucugggugacaagagaaccuuaugugucaugcgauccugacaaguguuaucaauuugcccuuggacagggaacaacacuaaacaacgggcauucaaaugacacaguacaugauaggaccccuuaccggacccuauugaugaaugaauuggguguuccauuucauuugggaaccaggcaagugugcauagcaugguccagcucaaguugucacgauggaaaagcauggcugcauguuuguguaacuggggaugaugaaaaugcaacugcuagcuucauuuacaaugggaggcuuguagauaguauugguucaugguccaaaaaaauacucagaacccaggaaucggaaugcguuuguaucaauggaacuuguacaguaguaaugacugaugggagcgcuucaggaaaagcugauacuaaaauacuauucauugaggaggggaaaaucguuaauauuagcacauugccaggaagugcucagcaugucgaggagugcuccuguuauccucgauauccuggugucagaugugucugcagagacaacuggaaaggcuccaauaggcccaucguagauauaaauguaaaggauuauagcauuguuuccaguuaugugugcucaggacuuguuggagacacacccagaaaaaacgacagcuucagcaguagccauugccuagauccuaacaaugaggaagguggucauggagugaaaggcugggccuuugaugauggaaaugacguguggaugggaagaacgaucagcgagaaguuacgcucagguuaugaaaccuucaaagucaucgaaggcugguccaaaccuaacuccaaauuacagauaaauaggcaagucauaguugaaagagguaacagguccgguuauucugguauuuucuccguugaaggcaaaagcugcaucaaucggugcuuuuauguggaguugauaaggggaaggaaagaggaaacugaaguuugguggaccucaaacaguauuguuguguuuuguggcaccucagguacauauggaacaggcucauggccugauggggcggauaucaaucucaugccuauauaa

SEQ ID NO: 46435 - RNA, 1410 nt, Artificial Sequence; identical to SEQ ID NO: 46270
  derived and/or modified CDS sequence (wt) from neuraminidase__InfluenzaA__ABA42415

SEQ ID NO: 46436 - RNA, 1410 nt, Artificial Sequence
  derived and/or modified CDS sequence (wt) from neuraminidase__InfluenzaA__ABA42446
augaauccaaaucaaaagauaauaacaauuggcucuguuucucucaccauugccacaauaugcuuccuuaugcaaauugccauccugguaacuacuguaacauugcauuucaagcaguaugaaugcaacucccccccaaacaaccaaguaaugcugugugaaccagcaauaauagaaagaaacauaacagagauaguguaucugaccaacaccaccauagagaaggaaauaugccccaaauuagcagaauacagaaauuggucaaagccgcaauguaacauuacaggauuugcaccuuuuucuaaggacaauucgauucggcuuuccgcugguggggacaucugggugacaagagaaccuuaugugucaugcgauccugacaaguguuaucaauuugcccuuggacagggaacaacacuaaacaacgggcauucaaaugacacaguacaugauaggacuccuuaccggacccuauugaugaaugaauuggguguuccauuucauuugggaaccaggcaagugugcauagcaugguccagcucaaguugucacgauggaaaagcauggcugcauguuuguguaacuggggaugaugaaaaugcaacugcuagcuucauuuacaaugggaggcuuguagauaguauugguucaugguccaaaaaaauacucagaacccaggagucggaaugcguuuguaucaauggaacuuguacaguaguaaugacugaugggagcgcuucaggaaaagcugauacuaaaauacuauucauugaggaggggaaaaucguucauauuagcacauugucaggaagugcucagcaugucgaggagugcuccuguuauccucgauauccuggugucagaugugucugcagagacaacuggaaaggcuccaauaggcccaucguagauauaaauguaaaggauuauagcauuguuuccaguuaugugugcucaggacuuguuggagacacacccagaaaaaacgacagcuucagcaguagccauugccuagauccuaacaaugaggaagguggucauggagugaaaggcugggccuuugaugauggaaaugacguguggaugggaagaacgaucagcgagaaguuacgcucagguuaugaaaccuucaaagucaucgaaggcugguccaaaccuaacuccaaauuacagauaaauaggcaagucauaguugaaagagguaacagguccgguuauucugguauuuucuccguugaaggcaaaagcugcaucaaucggugcuuuuauguggaguugauaaggggaaggaaagaggaaacugaagucugguggaccucaaacaguauuguuguguuuuguggcaccucagguacauauggaacaggcucauggccugauggggcggauaucaaucucaugccuauauaa

SEQ ID NO: 46437 - RNA, 1410 nt, Artificial Sequence
  derived and/or modified CDS sequence (wt) from neuraminidase__InfluenzaA__ABA42457
augaauccaaaucaaaagauaauaacaauuggcucuguuucucucaccauugccacaauaugcuuccuuaugcaaauugccauccugguaacuacuguaacauugcauuucaagcaguaugaaugcaacucccccccaaacaaccaaguaaugcugugugaaccaacaauaauagaaagaaacauaacagagauaguguaucugaccaacaccaccauagagaaggaaauaugccccaaacuagcagaauacagaaauuggucaaagccgcaauguaacauuacaggauuugcaccuuuuucuaaggacaauucgauucggcuuuccgcugguggggacaucugggugacaagagaaccuuaugugucaugcgauccugacaaguguuaucaauuugcccuugggcagggaacaacacuaaacaacgggcauucaaaugacacaguacaugauaggaccccuuaccggacccuauugaugaaugaauuggguguuccauuucauuugggaaccaggcaagugugcauagcaugguccagcucaaguugucacgauggaaaagcauggcugcauguuuguguaacuggggaugaugaaaaugcaacugcuagcuucauuuacaaugggaggcuuguagauaguauugguucaugguccaaaaaaauacucagaacccaggagucggaaugcguuuguaucaauggaacuuguacaguaguaaugacugaugggagcgcuucaggaaaagcugauacuaaaauacuauucauugaggaggggaaaaucguucauauuagcacauuaucaggaagugcucagcaugucgaggagugcuccuguuauccucgauauccuggugucagaugugucugcagagacaacuggaaaggcuccaauaggcccaucguagauauaaauguaaaggauuauagcauuguuuccaguuaugugugcucaggacuuguuggagacacacccagaaaaaacgacagcuucagcaguagccauugccuagauccuaacaaugaggaagguggucauggagugaaaggcugggccuuugaugauggaaaugacguguggaugggaagaacgaucagcgagaaguuacgcucagguuaugaaaccuucaaagucaucgaaggcugguccaaaccuaacuccaaauuacagauaaauaggcaagucauaguugaaagagguaacagguccgguuauucugguauuuucuccguugaaagcaaaagcugcaucaaucggugcuuuuauguggaguugauaaggggaaggaaagaggaaacugaagucugguggaccucaaacaguauuguuguguuuuguggcaccucagguacauauggaacaggcucauggccugauggggcggauaucaaucucaugccuauauaa

SEQ ID NO: 46438 - RNA, 1410 nt, Artificial Sequence; identical to SEQ ID NO: 46269
  derived and/or modified CDS sequence (wt) from neuraminidase__InfluenzaA__ABA42468

SEQ ID NO: 46439 - RNA, 1410 nt, Artificial Sequence
  derived and/or modified CDS sequence (wt) from neuraminidase__InfluenzaA__ABA42479
augaauccaaaucaaaagauaauaacaauuggcucuguuucucucaccauugccacaauaugcuuccuuaugcaaauugccauccugguaacuacuguaacauugcauuucaagcaguaugaaugugacucccccccaaacaaccaaguaaugcugugugaaccaacaauaauagaaagaaacauaacagagauaguguaucugaccaacaccaccauagagaaggaaauaugccccaaacuagcagaauacagaaauuggucaaagccgcaauguaacauuacaggauuugcaccuuuuucuaaggacaauucgauucggcuuuccgcugguggggacaucugggugacaagagaaccuuaugugucaugcgauccugacaaguguuaucaauuugcccuugggcagggaacaacacuaaacaacgggcauucaaaugacacaguacaugauaggaccccuuaccggacccuauugaugaaugaauuggguguuccauuucauuugggaaccaggcaagugugcauagcaugguccagcucaaguugucacgauggaaaagcauggcugcauguuuguguaacuggggaugaugaaaaugcaacugcuagcuucauuuacaaugggaggcuuguagauaguauugguucaugguccaaaaaaauacucagaacccaggagucggaaugcguuuguaucaauggaacuuguacaguaguaaugacugaugggagcgcuucaggaaaagcugauacuaaaauacuauucauugaggaggggaaaaucguucauauuagcacauugucaggaagugcucagcaugucgaggagugcuccuguuauccucgauauccuggugucagaugugucugcagagacaacuggaaaggcuccaauaggcccaucguagauauaaauguaaaggauuauagcauuguuuccaguuaugugugcucaggacuuguuggagacacacccagaaaaaacgacagcuucagcaguagccauugccuagauccuaacaaugaggacgguggucauggagugaaaggcugggccuuugaugauggaaaugacguguggaugggaagaacgaucagcgagaaguuacgcucagguuaugaaaccuucaaagucaucgaaggcugguccaaaccuaacuccaaauuacagauaaauaggcaagucauaguugaaagagguaacagguccgguuauucugguauuuucuccguugaaggcaaaagcugcaucaaucggugcuuuuauguggaguugauaaggggaaggaaagaggaaacugaagucugguggaccucaaacaguauuguuguguuuuguggcaccucagguacauauggaacaggcucauggccugauggggcggauaucaaucucaugccuauauaa

SEQ ID NO: 46440 - RNA, 1410 nt, Artificial Sequence
  derived and/or modified CDS sequence (wt) from neuraminidase__InfluenzaA__ABA42490
augaauccaaaucaaaagauaauaacaauuggcucuguuucucucaccauugccacaauaugcuuccuuaugcaaauugccauccugguaacuacuguaacauugcauuucaagcaguaugaaugcaacucccccccaaacaaccaaguaaugcugugugaaccaacaauaauagaaagaaacauaacagagauaguguaucugaccaauaccaccauagagaaggaaauaugccccaaauuagcagaauacagaaauuggucaaagccgcaauguaacauuacaggauuugcaccuuuuucuaaggacaauucgauucggcuuuccgcugguggggacaucugggugacaagagaaccuuaugugucaugcgauccugacaaguguuaucaauuugcccuugggcagggaacaacacuaaacaacgggcauucaaaugacacaguacaugauaggaccccuuaccggacccuauugaugaaugaauuggguguuccauuucauuugggaaccaggcaagugugcauagcaugguccagcucaaguugucacgauggaaaagcauggcugcauguuuguguaacuggggaugaugaaaaugcaacugcuagcuucauuuacaaugggaggcuuguagauaguauugguucaugguccaaaaaaauacucagaacccaggagucggaaugcguuuguaucaauggaacuuguacaguaguaaugacugaugggagcgcuucaggaaaagcugauacuaaaauacuauucauugaggaggggaaaaucguucauauuagcaaauugucaggaagugcucagcaugucgaggagugcuccuguuauccucgauauccuggugucagaugugucugcagagacaacuggaaaggcuccaauaggcccaucguagauauaaauguaaaggauuauagcauuguuuccaguuaugugugcucaggacuuguuggagacacacccagaaaaaacgacagcuucagcaguagccauugccuagauccuaacaaugaggaagguggucauggagugaaaggcugggccuuugaugauggaaaugacguguggaugggaagaacgaucagcgagaaguuacgcucagguuaugaaaccuucaaagucaucaaaggcugguccaaaccuaacuccaaauuacagauaaauaggcaagucauaguugaaagagguaacagguccgguuauucugguauuuucuccguugaaggcaaaagcugcaucaaucggugcuuuuauguggaguugauaaggggaaggaaagaggaaacugaagucugguggaccucaaacaguauuguuguguuuuguggcaccucagguacauauggaacaggcucauggccugauggggcggauaucaaucucaugccuauauaa

SEQ ID NO: 46441 - RNA, 1410 nt, Artificial Sequence; identical to SEQ ID NO: 46269
  derived and/or modified CDS sequence (wt) from neuraminidase__InfluenzaA__ABA42501

SEQ ID NO: 46442 - RNA, 1410 nt, Artificial Sequence
  derived and/or modified CDS sequence (wt) from neuraminidase__InfluenzaA__ABA42512
augaauccaaaucaaaagauaauaacgauuggcucuguuucucucaccauugccacaauaugcuuccuuaugcaaauugccauccugguaacuacuguaacauugcauuucaagcaauaugaaugcaacucccccccaaacaaccaagugaugcugugugaaccaacaauaauagaaagaaacauaacagagauaguauauccgaccaacaccaccauagagaaagaaauaugccccaaacuagcagaauacagaaauuggucaaagccgcaauguaacauuacaggauuugcaccuuuuucuaaggacaauucgauucggcuuuccgcugguggggacaucugggugacaagagaaccuuaugugucaugcgauccugacaaguguuaucaauuugcccuuggacagggaacaacacuaaacaacgggcauucaaaugacacaguacaugauaggaccccuuaucgaacccuauugaugaaugaguuggguguuccauuucauuugggaaccaagcaagugugcauagcaugguccagcucaaguugucacgauggaaaagcauggcugcauguuuguguaacgggggaugaugaaaaugcaacugcuagcuucauuuacaaugggaggcuuguagauaguauugguucaugguccaaaaaaauccucaggacccaggagucggaaugcguuuguaucaauggaacuuguacaguaguaaugacugaugggagugcuucaggaaaagcugauacuaaaauacuauucauugaggaggggaaaaucguucauacuagcucauugucaggaagugcucagcaugucgaggagugcuccuguuauccucgauauccuggugucagaugugucugcagagacaacuggaaaggcuccaauaggcccaucguagauauaaauguaaaggauuauagcauuguuuccaguuaugugugcucaggacuuguuggagacacacccagaaaaaacgacagcuccagcaguagccauugcuuggauccuaacaaugaggaagguggucauggagugaaaggcugggccuuugaugauggaaaugacguguggaugggaagaacgaucagcgagaaguuacgcucaggauaugaaaccuucaaagucauugaaggcugguccaaaccuaacuccaaauugcagauaaauaggcaagucauaguugacagagguaauagguccgguuauucugguauuuucucuguugaaggcaaaagcugcaucaaucggugcuuuuauguggaguugauaaggggaaggaaacaggaaacugaagucuuguggaccucaaacaguauuguuguguuuuguggcaccucagguacauauggaacaggcucauggccugauggggcggacaucaaucucaugccuauauaa

SEQ ID NO: 46443 - RNA, 1410 nt, Artificial Sequence
  derived and/or modified CDS sequence (wt) from neuraminidase__InfluenzaA__ABA42523
augaauccaaaucaaaagauaauaacgauuggcucuguuucucucaccauugccacaauaugcuuccuuaugcaaauugccauccugguaacuacuguaacauugcauuucaagcaauaugaaugcaacucccccccaaacaaccaagugaugcugugugaaccaacaauaauagaaagaaacauaacagagauaguguaucugaccaacaccaccauagagaaggaaauaugccccaaacuagcagaauacagaaauuggucaaagccgcaauguaacauuacaggauuugcaccuuuuucuaaggacaauucgauucggcuuuccgcugguggggacaucugggugacaagagaaccuuaugugucaugcgauccugacaaguguuaucaauuugcccuuggacagggaacaacacuaaacaacggacauucaaaugacacaguacaugauaggaccccuuaucggacccuauugaugaaugaguuggguguuccauuucauuugggaaccaagcaagugugcauagcaugguccagcucaaguugucacgauggaaaagcauggcugcauguuuguguaacgggggaugaugaaaaugcaacugcuagcuucauuuacaaugggaggcuuguagauaguauugguucaugguccaaaaaaauccucaggacccaggagucggaaugcguuuguaucaauggaacuuguacaguaguaaugacugaugggagugcuucaggaaaagcugauacuaaaauacuauucauugaggaggggaaaaucguucauacuagccuauugucaggaagugcucagcaugucgaggagugcuccuguuauccucgauacccuggugucagaugugucugcagagacaacuggaaaggcuccaauaggcccaucguagauauaaauguaaaggauuauagcauuguuuccaguuaugugugcucaggacuuguuggagacacacccagaaaaaacgacagcuccagcaguagccauugcuuggauccuaacaaugaggaagguggucauggagugaaaggcugggccuuugaugauggaaaugacguguggaugggaagaacgaucagcgagaaguuacgcucaggauaugaaaccuucaaagucauugaaggcugguccaaaccuaacuccaaauugcagauaaauaggcaagucauaguugacagagguaauagguccgguuauucugguauuuucucuguugaaggcaaaagcugcaucaaucggugcuuuuauguggaauugauaaggggaaggaaacaggaaacugaagucuuguggaccucaaacaguauuguuguguuuuguggcaccucagguacauauggaacaggcucauggccugauggggcggacaucaaucucaugccuauauaa

SEQ ID NO: 46444 - RNA, 1410 nt, Artificial Sequence; identical to SEQ ID NO: 46181
  derived and/or modified CDS sequence (wt) from neuraminidase__InfluenzaA__ABA42534

SEQ ID NO: 46445 - RNA, 1410 nt, Artificial Sequence
  derived and/or modified CDS sequence (wt) from neuraminidase__InfluenzaA__ABA42545
augaauccaaaucaaaagauaauaacgauuggcucuguuucucucaccauugccacaauaugcuuccuuaugcaaauugccauccugguaacuacuguaacauugcauuucaagcaauaugaaugcaacucccccccaaacaaccaagugaugcugugugaaccaacaauaauagaaagaaacauaacagagauaguauaucugaccaacaccaccauagagaaggaaauaugccccaaacuagcagaauacagaaauuggucaaagccgcaauguaacauuacaggauuugcaccuuuuucuaaggacaauucgauucggcuuuccgcugguggggacaucugggugacaagagaaccuuaugugucaugcgauccugacaaguguuaucaauuugcccuuggacagggaacaacacuaaacaacgggcauucaaaugacacaguacaugauaggaccccuuaucgaacccuauugaugaaugaguuggguguuccauuucauuugggaaccaagcaagugugcauagcaugguccagcucaaguugucacgauggaaaagcauggcugcauguuuguguaacgggggaugaugaaaaugcaacugcuagcuucauuuacaaugggaggcuuguagauaguauugguucaugguccaaaaaaauccucaggacccaggagucggaaugcguuuguaucaauggaacuuguacaguaguaaugacugaugggagugcuucaggaaaagcugauacuaaaauacuauucauugaggaggggaaaaucguucauacuagcucauugucaggaagugcucagcaugucgaggagugcuccuguuauccucgauauccuggugucagaugugucugcagagacaacuggaaaggcuccaauaggcccaucguagauauaaauguaaaggauuauagcauuguuuccaguuaugugugcucaggacuuguuggagacacacccagaaaaaacgacagcuccagcaguagccauugcuuggauccuaacaaugaggaagguggucauggagugaaaggcugggccuuugaugauggaaaugacguauggaugggaagaacgaucagcgagaaguuacgcucaggauaugaaaccuucaaagucauugaaggcugguccaaaccuaacuccaaauugcagauaaauaggcaagucauaguugacagagguaauagguccgguuauucugguauuuucucuguugaaggcaaaagcugcaucaaucggugcuuuuauguggaguugauaaggggaaggaaacaggaaacugaagucuuguggaccucaaacaguauuguuguguuuuguggcaccucagguacauauggaacaggcucauggccugauggggcggacaucaaucucaugccuauauaa

SEQ ID NO: 46446 - RNA, 1410 nt, Artificial Sequence
  derived and/or modified CDS sequence (wt) from neuraminidase__InfluenzaA__ABA42556
augaauccaaaucaaaagauaauaacgauuggcucuguuucucucaccauugccacaauaugcuuccuuaugcaaauugccauccugguaacuacuguaacauugcauuucaagcaauaugaaugcaacucccccccaaacaaccaagugaugcugugugaaccaacaauaauagaaagaaacauaacagagauaguguaucugaccaacaccaccauagagaaggaaauaugccccaaacuagcagaauacagaaauuggucaaagccgcaauguaacauuacaggauuugcaccuuuuucuaaggacaauucgauucggcuuuccgcugguggggacaucugggugacaagagaaccuuaugugucaugcgauccugacaaguguuaucaauuugcccuuggacagggaacaacacuaaacaacggacauucaaaugacacaguacaugauaggaccccuuaucggacccuauugaugaaugaguuggguguuccauuucauuugggaaccaagcaagugugcauagcaugguccagcucaaguugucacgauggaaaagcauggcugcauguuuguguaacgggggaugaugaaaaugcaacugcuagcuucauuuacaaugggaggcuuguagauaguauugguucaugguccaaaaaaauccucaggacccaggagucggaaugcguuuguaucaauggaacuuguacaguaguaaugacugaugggagugcuucaggaaaagcugauacuaaaauacuauucauugaggaggggaaaaucguucauacuagccuauugucaggaagugcucagcaugucgaggagugcuccuguuauccucgauacccuggugucagaugugucugcagagacaacuggaaaggcuccaauaggcccaucguagauauaaauguaaaggauuauagcauuguuuccaguuaugugugcucaggacuuguuggagacacacccagaaaaaacgacagcuccagcaguagccauugcuuggauccuaacaaugaggaagguggucauggagugaaaggcugggccuuugaugauggaaaugacguguggaugggaagaacgaucagcgagaaguuacgcucaggauaugaaaccuucaaagucauugaaggcugguccaaaccuaacuccaaauugcagauaaauaggcaagucauaguugacagagguaauagguccgguuauucugguauuuucucuguugaaggcaaaagcugcaucaaucggugcuuuuauguggaguugauaaggggaaggaaacaggaagcugaagucuuguggaccucaaacaguauuguuguguuuuguggcaccucagguacauauggaacaggcucauggccugauggggcggacaucaaucucaugccuauauaa

SEQ ID NO: 46447 - RNA, 1410 nt, Artificial Sequence; identical to SEQ ID NO: 46181
  derived and/or modified CDS sequence (wt) from neuraminidase__InfluenzaA__ABA42567

SEQ ID NO: 46448 - RNA, 1410 nt, Artificial Sequence
  derived and/or modified CDS sequence (wt) from neuraminidase__InfluenzaA__ABA42931
augaauccaaaucaaaagauaauaacgauuggcucuguuucucucaccauugccacaauaugcucccuuaugcaaauugccauccugguaacuacuguaacauugcauuucaagcaauaugaaugcaacucccccccaaacaaccaagugaugcugugugaaccaacaauaauagaaagaaacauaacagagauaguguaucugaccaacaccaccauagagaaggaaauaugccccaaacuagcagaauacagaaauuggucaaagccgcaauguaacauuacaggauuugcaccuuuuucuaaggacaauucgauucggcuuuccgcugguggggacaucugggugacaagagaaccuuaugugucaugcgauccugacaaguguuaucaauuugcccuuggacagggaacaacacuaaacaacggacauucaaaugacacaguacaugauaggaccccuuaucggacccuauugaugaaugaguuggguguuccauuucauuugggaaccaagcaagugugcauagcaugguccagcucaaguugucacgauggaaaagcauggcugcauguuuguguaacgggggaugaugaaaaugcaacugcuagcuucauuuacaaugggaggcuuguagauaguauugguucgugguccaaaaaaauccucaggacccaggagucggaaugcguuuguaucaauggaacuuguacaguaguaaugacugaugggagugcuucaggaaaagcugauacuaaaauacuauucauugaggaggggaaaaucguucauacuagccuauugucaggaagugcucagcaugucgaggagugcuccuguuauccucgauacccuggugucagaugugucugcagagacaacuggaaaggcuccaauaggcccaucguagauauaaauguaaaggauuauagcauuguuuccaguuaugugugcucaggacuuguuggagacacacccagaaaaaacgacagcuccagcaguagccauugcuuggauccuaacaaugaggaagguggucauggagugaaaggcugggccuuugaugauggaaaugacguguggaugggaagaacgaucagcgagaaauuacgcucaggauaugaaaccuucaaagucauugaaggcugguccaaaccuaacuccaaauugcagauaaauaggcaagucauaguugacagagguaauagguccgguuauucugguauuuucucuguugaaggcaaaagcugcaucaaucggugcuuuuauguggaguugauaaggggaaggaaacaggaaacugaagucuuguggaccucaaacaguauuguuguguuuuguggcaccucagguacauauggaacaggcucauggccugauggggcggacaucaaucucaugccuauauaa

SEQ ID NO: 46449 - RNA, 1410 nt, Artificial Sequence; identical to SEQ ID NO: 46181
  derived and/or modified CDS sequence (wt) from neuraminidase__InfluenzaA__ABA42942

SEQ ID NO: 46450 - RNA, 1410 nt, Artificial Sequence; identical to SEQ ID NO: 46181
  derived and/or modified CDS sequence (wt) from neuraminidase__InfluenzaA__ABA42981

SEQ ID NO: 46451 - RNA, 1410 nt, Artificial Sequence
  derived and/or modified CDS sequence (wt) from neuraminidase__InfluenzaA__ABA42992
augaauccaaaucaaaagauaauaacaauuggcucuguuucucucaccauugccacaauaugcuuccuuaugcaaauugccauccugguaacuacuguaacauugcauuucaagcaguaugaaugcaacucccccccaaacaaccaaguaaugcugugugaaccagcaauaauagaaagaaacauaacagagauaguguaucugaccaacaccaccauagagaaggaaauaugccccaaauuagcagaauacagaaauuggucaaagccgcaauguaacauuacaggauuugcaccuuuuuccaaggacaauucgauucggcuuuccgcugguggggacaucugggugacaagagaaccuuaugugucaugcgauccugacaaguguuaucaauuugcccuugggcagggaacaacacuaaacaacgggcauucaaaugacacaguacaugauaggaccccuuaccggacccuauugaugaaugaauuggguguuccauuucauuugggaaccaggcaagugugcauagcaugguccagcucaaguugucacgauggaaaagcauggcugcauguuuguguaacuggggaugaugaaaaugcaacugcuagcuucauuuacaaugggaggcuuguagauaguauugguucaugguccaaaaaaauacucagaacccaggagucggaaugcguuuguaucaauggaacuuguacaguaguaaugacugaugggagcgcuucaggaaaagcugauacuaaaauacuauucauugaggaggggaaaaucguuaauauuagcacauugucaggaagugcucagcaugucgaggagugcuccuguuauccucgauauccuggugucagaugugucugcagagacaacuggaaaggcuccaauaggcccaucguagauauaaauguaaaggauuauagcauuguuuccaguuaugugugcucaggacuuguuggagacacacccagaaaaaacgacagcuucagcaguagccauugccuagauccuaacaaugaggaagguggucauggagugaaaggcugggccuuugaugauggaaaugacguguggaugggaagaacgaucagcgagaaguuacgcucagguuaugaaaccuucaaagucaucgaaggcugguccaaaccuaacuccaaauuacagauaaauaggcaagucauaguugaaagagguaacagguccgguuauucugguauuuucuccguugaaggcaaaagcugcaucaaucggugcuuuuauguggaguugauaaggggaaggaaagaggaaacugaaguuugguggaccucaaacaguauuguuguguuuuguggcaccucagguacauauggaacaggcucauggccugauggggcggauaucaaucucaugccuauauaa

SEQ ID NO: 46452 - RNA, 1413 nt, Artificial Sequence
  derived and/or modified CDS sequence (wt) from neuraminidase__InfluenzaA__ABA43192
augaauccaaaucaaaaaauaauaaccauuggaucaaucaguauagcaaucggaauaauuagccuaauguugcaaauaggaaacauuauuucaauaugggcuagucacucaauccaaacuggaagucaaaaccacacuggaguaugcaaccaaagaaucaucacauaugaaaacagcaccugggugaaucacacauauguuaauauuaacaacaccaauguuauugcugggaaggacaaaacuucagugauauuggccggcaauucaucucuuuguucuaucaguggaugggcuauauacacaaaagacaacagcauaagaauugguuccaaaggagauguuuuugucauaagggagccuuucauaucauguucucacuuggaaugcagaaccuuuuuucugacccaaggugcucuauuaaaugacaaacauucaaaugggaccguuaaggacagaagucccuauagggcuuuaaugagcuguccucuaggugaagcuccguccccauacaauucaaaguuugaaucaguugcuuggucagcaagcgcaugccaugauggcaugggcugguuaacaaucggaauuucugguccagacaauggagcaguggcuguacuaaaauacaacggcauaauaacugaaaccauaaaaaguuggaaaaagcaaauauuaagaacacaagagucugaaugugucugugugaacgggucauguuucaccauaaugaccgauggcccgaguaauggggccgccucguacaaaaucuucaagaucgaaaagggaaagguuacuaaaucaauagaguugaaugcacccaauuuucauuaugaggaauguuccuguuacccagacacuggcacagugauguguguaugcagggacaacuggcaugguucaaaucgacccugggugucuuuuaaucaaaaccuggauuaucaaauaggauacaucugcagugggguguucggugacaauccgcgucccaaagauggagagggcagcuguaauccagugacuguugauggagcaaacggaguaaagggguuuucauacaaauaugguaaugguguuuggauaggaaggacuaaaaguaacagacuuagaaagggguuugagaugauuugggauccuaauggauggacagauaccgacagugauuucucagugaaacaggauguugugucaauaacugauuggucaggguacagcggaaguuucguucaacauccugaguuaacaggauuggacuguauaagaccuugcuucuggguugaguuagucagaggacugccaaaagaaaauacaacaaucuggacuagugggagcagcauuucuuuuuguggcguaaauagugauacugcaaacuggucuuggccagacggugcugaguugccguuuaccauugacaaguag

SEQ ID NO: 46453 - RNA, 1410 nt, Artificial Sequence
  derived and/or modified CDS sequence (wt) from neuraminidase__InfluenzaA__ABA43203
augaauccaaaucaaaagauaauaacgauuggcucuguuucucucaccauuuccacaauaugcuucuucaugcaaauugccaucuugauaaccacuguaacauugcauuucaagcaauaugaauucaacucccccccaaacaaccaagugaugcugugugaaccaacaauaauagaaagaaacauaacagagauaguguaccugaccaacaccaccauagagaaggaaauaugccccaaacuagcagaauacagaaauuggucaaagccgcaaugugacauuacaggauuugcaccuuuuucuaaggacaauucgauuaggcuuuccgcugguggggacaucugggugacaagagaaccuuaugugucaugcgauccugacaaguguuaucaauuugcccuuggacagggaacaacacuaaacaacgugcauucaaaugacacaguacaugauaggaccccuuaucggacccuauugaugaaugaguuagguguuccauuucaucuggggaccaagcaagugugcauagcaugguccagcucaaguugucacgauggaaaagcauggcugcauguuuguguaacgggggaugauaaaaaugcaacugcuagcuucauuuacaaugggaggcuuguagauaguauuguuucaugguccaaagaaauccucaggacccaggagucagaauguguuuguaucaauggaacuugugcaguaguaaugacugaugggagcgcuucaggaaaagcugauacuaaaauacuauucauugaggaggggaaaaucguucauacuagcaaauugucaggaagugcucagcaugucgaggagugcuccugcuauccucgauauccugguaucagaugugucugcagagacaacuggaaaggcuccaauaggcccaucguagauauaaacauaaaggauuauagcauuguuuccaguuaugugugcucaggacuuguuggagacacacccagaaaaaacgacagcuccagcaguagccauugcuuggauccuaacaaugaagaagguggucauggagugaaaggcugggccuuugaugauggaaaugacguguggaugggaagaacgaucagcgagaaguuacgcucaggauaugaaaccuucaaagucauugaaggcugguccaacccuaauuccaaauugcagauaaauaggcaagucauaguugauagagguaauagguccgguuauucugguauuuucucuguugaaggcaaaagcugcaucaaucggugcuuuuauguggaguugauaaggggaagaaaagaggaaacugaagucuuguggaccucaaacaguauuguuguguuuuguggcaccucagguacauauggaacaggcucauggccugauggggcggacaucaaucucaugccuauauaa

SEQ ID NO: 46454 - RNA, 1410 nt, Artificial Sequence
  derived and/or modified CDS sequence (wt) from neuraminidase__InfluenzaA__ABA43339
augaauccaaaucaaaagauaauaacaauuggcucuguuucucucuccauugccacaauaugcuuccuuaugcaaauugccauccugguaacuacuguaacacugcauuucaagcaauaugagugcagcucccccccaaacaaccaaguaaugccgugcgaaccaacaauaauagaaagaaacauaacagagauaguguauuugacuaacaccaccauagagaaagagauaugccccaaacuaguagaauacagaaauuggucaaagccgcaauguaaaauuacgggauuugcaccuuuuucuaaggacaauucaauucggcuuuccgcugguggagacauuugggugacaagagaaccuuaugugucaugcgauccuggcaaguguuaucaauuugcacuuggacagggaaccacacuaaacaacaggcauucaaaugacacaguacaugauaggaccccuuaucgaacccucuugaugaaugaguuggguguuccauuucauuugggaaccaagcaagugugcauggcaugguccagcucaagcugucacgauggaaaagcauggcugcauguuugugucacugggcaugaugaaaaugcaacugcuagcuucauuuacgaugggaggcuuguagacaguauugguucaugguccaaaaauauccucaggacccaggagucggaaugcguuuguaucaaugggacuugcacaguaguaaugacugauggaagugcuucagaaagagcugauacuaaaauacuauucauugaagaggggaaaaucguucauauuagcccauugucaggaagugcucagcauguagaggagugcuccuguuauccccgauauccuggugucagaugugucugcagagacaacuggaaaggcuccaauaggcccaucguagauauaaaugugaaagauuauagcauuguuuccaguuaugugugcucagggcuuguuggagacacacccagaaaaaacgacagauccagcaguagcuauugccggaauccuaacaaugagaaagggagucauggagugaaaggcugggccuuugacgauggaaaugacguguggaugggaagaacgaucggcgaggaguuacgcucagguuaugaaaccuucaaagucauuggagguugguccacaccuaacuccaaauugcagauaaauaggcaagucauaguugacagcgguaauagguccgguuauucugguauuuucucuguugagggcaaaagcugcaucaaucggugcuuuuauguggaguugauaaggggaaggaagcaggaaacuagagucugguggaccucaaacaguauuguuguguuuuguggcaccucagguacauauggaacaggcucauggccugauggggcggacaucaaucucaugccuauauaa

SEQ ID NO: 46455 - RNA, 1410 nt, Artificial Sequence
  derived and/or modified CDS sequence (wt) from neuraminidase__InfluenzaA__ABA54916
augaauccaaaucaaaagauaauaaccaccggaucaaucuguaugguaauuggaaugguuagcuugauguugcaaauugggaacauaaucucaauauggguuagucauucaauucagacagggacucaacaccgagcugaaccaugcaaucgaagcauuauuaauuaugaaaacaacaccuggguaaaucagacauaugucaaaaucagcaacaccaauuuucuuacugagaaagcuguggcuucaguaagauuagugggcaauucaucucuuugccccauuaguggaugggcuguauacaguaaggacaacaguauaagaaucgguuccaagggggauguguuuguuauaagagagccguucaucucaugcucccacuuggaaugccgaaccuucuuuuugacucagggagccuugcugaaugauaagcacuccaaugggaccgucaaagacagaagcccuuacagaacauugaugagcuguccugugggugaggcccccuccccauauaacucgagguuugagucuguugcuuggucggcaagugcuugucaugauggcacuaguugguugacaauuggaauuucuggcccagacaauggggcuguggcuguauugaaauacaauggcauaauaacagacacuaucaagaguuggaggaacaacauacugagagcucaagagucugaaugugcauguguaaauggcucuugcuuuacuguaaugacugacggaccaaguaaugggcaggcuucauauaagaucuucaaaauagaaaaagggaaaguaguuaaaucagucgaauugaaugccccuaauuaucacuaugaggagugcuccuguuauccugaugcuggcgaaaucacaugugugugcagggauaauuggcauggcucaaaucggccauggguaucuuucaaucaaaauuuggaguaccaaauaggauauauaugcaguggaguuuucggagacaauccacgccccaaugauggaacaggcaguugugguccgguguccccuaacggggcauauggaguaaaaggguuuucauuuaaauacggcaaugguguuuggaucgggagaaccaaaagcacuaauuccaggagcggcuuugaaaugauuugggauccaaauggguggacuggaacggacaguaauuuuucggugaagcaagauaucguagcuauaacugauuggucaggauauagcgggaguuuuguccagcauccagaacugacaggauuagauugcauaagaccuuguuucuggguugagcuaaucagagggcggcccaaagagagcacaauuuggacuagugggagcagcauaucuuuuugugguguaaauagugacacuguggguuggucuuggccagacggugcugaguugccauucaccauugacaaguag

SEQ ID NO: 46456 - RNA, 1413 nt, Artificial Sequence
  derived and/or modified CDS sequence (wt) from neuraminidase__InfluenzaA__ABA87048
augaauccaaaucaaaaaauaauaaccauuggaucaaucaguauagcaaucggaauaauuagccuaauguugcaaauaggaaacauuauuucaauaugggcuagucacucaauccaaacuggaagucaaaaccacacuggaguaugcaaccaaagaaucaucacauaugaaaacagcaccugggugaaucacacauauguuaauauuaacaacaccaauguuauugcuggaaaggacaaaacuucagugacauuggccggcaauucaucucuuuguucuaucaguggaugggcuauauacacaaaagacaacagcauaagaauugguuccaaaggagauguuuuugucauaagagagccuuucauaucauguucucacuuggaaugcagaaccuuuuuucugacccaaggugcucuauuaaaugacaaacauucaaaugggaccguuaaggacagaagucccuauagggcuuuaaugagcuguccucuaggugaagcuccguccccauacaauucaaaguuugaaucaguugcuuggucagcaagcgcaugccaugauggcaugggcugguuaacaaucggaauuucugguccagacaauggagcaguggcuguacuaaaauacaacggcauaauaacugaaaccauaaaaaguuggaaaaagcaaauauuaagaacacaagagucugaaugugucugugugaacgggucauguuucaccauaaugaccgauggcccgaguaauagggccgccucguacaaaaucuucaagaucgaaaagggaaagguuacuaaaucaguagaguugaaugcacccaauuuucauuaugaggaauguuccuguuacccagacacuggcacagugauguguguaugcagggacaacuggcaugguucaaaucgaccuugggugucuuuuaaucaaaaccuggauuaucaaauaggauacaucugcagugggguguucggugacaauccgcgucccaaagauggagagggcagcuguaauccagugacuguugauggagcaaauggaguaaagggguuuucauacaaauaugguaaugguguuuggauaggaaggacuaaaaguaacagacuuagaaagggguuugagaugauuugggauccuaauggauggacagauaccgacagugauuucucagugaaacaggauguuguggcaauaacugauuggucaggguacagcggaaguuucguucaacauccugaguuaacaggauuggacuguauaagaccuugcuucuggguugaguuagucagaggacugccuaaagaaaauacaacaaucuggacuagugggagcagcauuucuuuuuguggcguaaauagugauacugcaaacuggucuuggccagacggugcugaguugccguucaccauugacaaguag

SEQ ID NO: 46457 - RNA, 1413 nt, Artificial Sequence
  derived and/or modified CDS sequence (wt) from neuraminidase__InfluenzaA__ABA87060
augaauccaaaucaaaaaauaauaaccauuggaucaaucaguauagcaaucggaauaauuagucuaauguugcaaauaggaaauauuauuucaauaugggcuagucacucaauccaaacuggaagucaaaaccacacuggaauaugcaaccaaagaaucaucacauaugaaaacagcaccugggugaaucacacauauguuaauauuaacaacacuaauguuguugcuggaaaggacaaaacuucagugacauuggccggcaauucaucucuuuguucuaucaguggaugggcuauauacacaaaagacaacagcauaagaauuggcuccaaaggagauguuuuugucauaagagaaccuuucauaucauguucucacuuggaaugcagaaccuuuuuucugacccaaggugcucuauuaaaugacaaacauucaaauggaaccguuaaggacagaaguccuuauagggccuuaaugagcuguccucuaggugaagcuccguccccauacaauucaaaguuugaaucaguugcauggucagcaagcgcaugccaugauggcaugggcugguuaacaaucggaauuucugguccagacaauggagcuguggcuguacuaaaauacaacggaauaauaacugaaaccauaaaaaguuggaaaaagcgaauauugagaacacaagagucugaaugugucugugugaacgggucauguuucaccauaaugaccgauggcccgaguaaugggaccgccucguacaaaaucuucaagaucgaaaaggggaagguuacuaaaucaauagaguugaaugcacccaauuuucauuaugaggaauguuccuguuacccagacacuggcacagugauguguguaugcagggacaacuggcaugguucaaaucgaccuugggugucuuuuaaucaaaacuuggauuaucaaauaggauacaucugcaguggaguguucggugacaauccgcgucccaaagauggaaagggcagcuguaguccagugacuguugauggagcugacggaguuaagggguuuucauacaaauaugguaaugguguuuggauaggaaggacuaaaaguaacagacuuagaaagggguuugagaugauuugggauccuaauggauggacagauaccgacagugauuucucagugaaacaggauguuguggcaauaacugauuggucaggguacagcggaaguuucguucaacauccugaguuaacaggauuggacuguauaagaccuugcuucuggguugaguuagucagaggacugccuagagaaaauacaacaaucuggacuagugggagcagcauuucuuuuuguggcguugauagugauacugcaaacuggucuuggccagacggugcugaguugccguucaccauugacaaguag

SEQ ID NO: 46458 - RNA, 1413 nt, Artificial Sequence
  derived and/or modified CDS sequence (wt) from neuraminidase__InfluenzaA__ABA87083
augaauccaaaucaaaaaauaauaaccauuggaucaaucaguauagcaaucggaauaauuagucuaauguugcaaauaggaaauauuauuucaauaugggcuagucacucaauccaaacuggaagucaaaaccacacuggaauaugcaaccaaaaaaucaucacauauaaaaacagcaccugggugaaucacacauauguuaauauuaacaacacuaauguuguugcuggaaaggacaaaacuucagugacauuggccggcaauucaucucuuuguucuaucaguggaugggcuauauacacaaaagauaacagcauaagaauuggcuccaaaggagauguuuuugucauaagagaaccuuucauaucauguucucacuuggaaugcagaaccuuuuuucugacccaaggugcucuauuaaaugacaaacauucaaaugggaccguuaaggacagaaguccuuauagggccuuaaugagcuguccucuaggugaagcuccgucuccauacaauucaaaguuugaaucaguugcauggucagcaagcgcaugccaugauggcaugggcugguuaacaaucggaauuucugguccagacaauggagcuguggcuguacuaaaauacaacggaauaauaacugaaaccauaaaaaguuggaaaaagcgaauauuaagaacacaagagucugaaugugucugugugaacgggucauguuucaccauaaugaccgauggcccgaguaauggggccgccucguacaaaaucuucaagaucgaaaaggggaagguuacuaaaucaauagaguugaaugcacccaauuuucauuaugaggaauguuccuguuacccagacacuggcacagugauguguguaugcagggacaacuggcaugguucaaaucgaccuugggugucuuuuaaucaaaacuuggauuaucaaauaggauacaucugcaguggaguguucggugacaauccgcgucccaaagauggagagggcagcuguaauccagugacuguugauggagcagacggaguaaagggguuuucauacaaauaugguaaugguguuuggauaggaaggacuaaaaguaacagacuuagaaagggguuugagaugauuugggauccuaauggauggacagauaccgacaguguuuucucagugaaacaggauguuguggcaauaacugauuggucaggguacagcggaaguuucguucaacauccugaguuaacaggauuggacuguauaagaccuuguuucuggguugaguuagucagaggacugccuagagaaaauacaacaaucuggacuagugggagcagcauuucuuuuuguggcguuaauagugauacugcaaacuggucuuggccagacggugcugaguugccguucaccauugacaaguag

SEQ ID NO: 46459 - RNA, 1413 nt, Artificial Sequence
  derived and/or modified CDS sequence (wt) from neuraminidase__InfluenzaA__ABA87234
augaauucaaaucaaaaaauaauaaccauuggaucaaucaguauagcaaucggaauaauuagccuaauguugcaaauaggaaacauuauuucaauaugggcuagucacucaauccaaacuggaagucaaaaccacacuggaguaugcaaccaaagaaucaucacauaugaaaacaguaccugggugaaucacacauauguuaauauuaacaacaccaauguuauugcuggaaaggacaaaacuucagugacauuggccggcaauucaucucuuuguucuaucaguggaugggcuauauacacaaaagacaacagcauaagaauugguuccaaaggagauguuuuugucauaagagagccuuucauaucauguucucacuuggaaugcagaaccuuuuuucugacccaaggugcucuauuaaaugacaaacauucaaaugggaccguuaaggacagaagucccuauagggcuuuaaugagcuguccucuaggugaagcuccguccccauacaauucaaaguuugaaucaguugcuuggucagcaagcgcaugccaugauggcaugggcugguuaacaaucggaauuucugguccagacaauggagcaguggcuguacuaaaauacaacggcauaauaacugaaaccauaaaaaguuggaaaaagcaaauauuaagaacacaagagucugaaugugucugugugaacgggucauguuucaccauaaugaccgauggcccgaguaauggggccgccucguacaaaaucuucaagaucgaaaagggaaagguuauuaaaucaauagaguugaaugcacccaauuuucauuaugaggaauguuccuguuacccagacacuggcacagugauguguguaugcagggacaacuggcaugguucaaaucgacccugggugucuuuuaaucaaaaccuggauuaucaaauaggauacaucugcagugggguguucggugacaauccgcgucccaaagauggagagggcagcuguaauccagugacuguugauggagcaaacggaguaaagggguuuucauacaaauaugguaaugguguuuggauaggaaggacuaaaaguaacagacuuagaaagggguuugagaugauuugggauccuaauggauggacagauaccgacagugauuucucagugaaacaggauguuguggcaauaacugauuggucaggguacagcggaaguuucguucaacauccugaguuaacaggauuggacuguauaagaccuugcuucuggguugaguuagucagaggacugccaaaagaaaauacaacaaucuggacuagugggagcagcauuucuuuuuguggcguaaauagugauacugcaaacuggucuuggccagacggugcugaguugccguuuaccauugacaaguag

SEQ ID NO: 46460 - RNA, 1410 nt, Artificial Sequence
  derived and/or modified CDS sequence (wt) from neuraminidase__InfluenzaA__ABB02784
augaauccaaaucaaaaaauaauaacgauuggcucuguuucucucaccauugccacaauaugcuuccuuacgcaaauugccauccugguaacuacuguaacauugcauuucaagcaauaugaaugcaacucccccccaaacaaccaaguaaugcugugugaaccaacaauaauagaaagaaacauaacagagauaguguaucugaccaacaccaccauagagaaggaaauaugccccaaacuagcagaauacagaaauuggucaaagccgcaaugcaacauuacuggauuugcaccuuuuucuaaggacaauucgauucggcuuuccgcugguggggacaucuggguuacaagagaaccuuaugugucaugcgauccugacaaguguuaucaauuugcccuuggacagggaacaacacuaaacaacgggcauucaaaugacacaguacaugauaggaccccuuauaggacccuauugaugaaugaguuggguguuccauuucauuugggaaccaagcaagugugcauagcaugguccagcucaaguugucacgauggaaaagcauggcugcauguuuguguaacgggggaugauaaaaaugcaacugcuagcuucauuuacaaugggaggcuuguagauaguauagguucaugguccaaaaaaauccucaggacccaggagucggaaugcguuuguaucaauggaacuuguacaguaguaaugacugaugggagugcuucaggaaaagcugauacuaaaauacuauucauugaggaggggaaaaucguucauacuagccuauugucagggagugcucagcaugucgaggagugcuccuguuauccucgauauccuggugucagaugugucugcagagacaacuggaaaggcuccaauaggcccaucguagauauaaauguaaaggauuauagcauuguuuccaguuaugugugcucaggacuuguuggagacacacccagaaaaaacgacagcuccagcaguagccauugcuuggauccuaacaaugaggaagguggucauggagugaaaggcugggccuuugaugauggaaaugacguguggaugggaagaacgaucagcgagaaguuacgcucaggauaugaaaccuucaaagucauugaaggcugguccaaaccuaacuccaaacugcagauaaauaggcaagucauaguugacagagauaauagguccgguuauucugguauuuucucuguugaaggcaaaagcugcaucaaucggugcuuuuauguggaguugauaaggggaaggaaccaggaaacugaagucuuguggaccucaaacaguauuguuguguuuuguggcaccucagguacauauggaacaggcucauggccugauggggcggacaucaaucucaugccuauauaa

SEQ ID NO: 46461 - RNA, 1413 nt, Artificial Sequence; identical to SEQ ID NO: 46401
  derived and/or modified CDS sequence (wt) from neuraminidase__InfluenzaA__ABB02795

SEQ ID NO: 46462 - RNA, 1413 nt, Artificial Sequence
  derived and/or modified CDS sequence (wt) from neuraminidase__InfluenzaA__ABB02806
augaauccaaaucaaaaaauaauaaccauuggaucaaucaguauagcaaucggaauaauuagucuaauguugcaaauaggaaauauuauuucaauaugggcuagucacucaauccaaacuggaagucaaaaccacacuggaauaugcaaccaaagaaucaucacauaugaaaacagcaccugggugaaucacacauauguuaauauuaacaacacuaauguuguugcuggaaaggacaaaacuucagugacauuggccggcaauucaucucuuuguucuaucaguggaugggcuauauacacaaaagacaacagcauaagaauuggcuccaaaggagauguuuuugucauaagagaaccuuucauaucauguucucacuuggaaugcagaaccuuuuuucugacccaaggugcucuauuaaaugacaaacauucaaauggaaccguuaaggacagaaguccuuauagggccuuaaugagcuguccucuaggugaagcuccguccccauacaauucaaaguuugaaucaguugcauggucagcaagcgcaugccaugauggcaugggcugguuaacaaucggaauuucugguccagacaauggagcuguggcuguacuaaaauacaacggaauaauaacugaaaccauaaaaaguuggaaaaagcgaauauugagaacacaagagucugaaugugucugugugaacgggucauguuucaccauaaugaccgauggcccgaguaauggggccgccucguacaaaaucuucaagaucgaaaaggggaagguuacuaaaucaauagaguugaaugcacccaauuuucauuaugaggaauguuccuguuacccagacacuggcacagugauguguguaugcagggacaacuggcaugguucaaaucgaccuugggugucuuuuaaucaaaacuuggauuaucaaauaggauacaucugcaguggaguguucggugacaauccgcgucccaaagauggaaagggcagcuguaauccagugacuguugauggagcagacggaguuaagggguuuucauacaaauaugguaaugguguuuggauaggaaggacuaaaaguaacagacuuagaaagggguuugagaugauuugggauccuaauggauggacagauaccgacagugauuucucagugaaacaggacguuguggcaauaacugauuggucaggguacagcggaaguuucguucaacauccugaguuaacaggauuggacuguauaagaccuugcuucuggguugaguuagucagaggacugccuagagaaaauacaacaaucuggacuagugggagcagcauuucuuuuuguggcguugauagugauacugcaaacuggucuuggccagacggugcugaguugccguucaccauugacaaguag

SEQ ID NO: 46463 - RNA, 1413 nt, Artificial Sequence
  derived and/or modified CDS sequence (wt) from neuraminidase__InfluenzaA__ABB02817
augaauccaaaucaaaaaauaauaaccauuggaucaaucaguauagcaaucggaauaauuagccuaauguugcaaauaggaaacauuauuucaauaugggcuagucacucaauccaaacuggaagucaaaaccacacuggaguaugcaaccaaagaaucaucacauaugaaaacagcaccugggugaaucacacauauguuaauauuaacaacaccaauguuauugcuggaaaggacaaaacuucagugacauuggccggcaauucaucucuuuguucuaucaguggaugggcuauauacacaaaagacaacagcauaagaauugguuccaaaggagauguuuuugucauaagagagccuuucauaucauguucucacuuggaaugcagaaccuuuuuucugacccaaggugcucuauuaaaugacaaacauucaaaugggaccguuaaggacagaagucccuauagggcuuuaaugagcuguccucuaggugaagcuccguccccauacaauucaaaguuugaaucaguugcuuggucagcaagcgcaugccaugauggcaugggcugguuaacaaucggaauuucugguccagacaauggagcaguggcuguacuaaaauacaacggcauaauaacugaaaccauaaaaaguuggaaaaagcaaauauuaagaacacaagagucugaaugugucugugugaacgggucauguuucaccauaaugaccgauggcccgaguaauggggccgccucguacaaaaucuucaagaucgaaaagggaaagguuacuaaaucaguagaguugaaugcacccaauuuucauuaugaggaauguuccuguuacccagacacuggcacagugauguguguaugcagggacaacuggcaugguucaaaucgaccuugggugucuuuuaaucaaaaccuggauuaucaaauaggauacaucugcagugggguguucggugacaauccgcgucccaaagauggagaaggcagcuguaauccagugacuguugauggagcaaauggaguaaagggguuuucauacaaauaugguaaugguguuuggauaggaaggacuaaaaguaacagacuuagaaagggguuugagaugauuugggauccuaauggauggacagauaccgacagugauuucucagugaaacaggauguuguggcaauaacugauuggucaggguacagcggaaguuucguucaacauccugaguuaacaggauuggacuguauaagaccuugcuucuggguugaguuagucagaggacugccuaaagaaaauacaacaaucuggacuagugggagcagcauuucuuuuuguggcguaaauagugauacugcaaacuggucuuggccagacggugcugaguugccguucaccauugacaaguag

SEQ ID NO: 46464 - RNA, 1413 nt, Artificial Sequence
  derived and/or modified CDS sequence (wt) from neuraminidase__InfluenzaA__ABB02828
augaauccaaaucaaaaaauaauaaccauuggaucaaucaguauagcaaucggaauaauuagccuaauguugcaaauaggaaacauuauuucaauaugggcuagucacucaauccaaacuggaagucaaaaccacacuggaguaugcaaccaaagaaucaucacauaugaaaacagcaccugggugaaucacacauauguuaauauuaacaacaccaauguuauugcuggaaaggacaaaacuucagugacauuggccggcaauucaucucuuuguucuaucaguggaugggcuauauacacaaaagacaacagcauaagaauugguuccaaaggagauguuuuugucauaagagagccuuucauaucauguucucacuuggaaugcagaaccuuuuuucugacccaaggugcucuauuaaaugacaaacauucaaaugggaccguuaaggacagaagucccuauagggcuuuaaugagcuguccucuaggugaagcuccguccccauacaauucaaaguuugaaucaguugcuuggucagcaagcgcaugccaugauggcaugggcugguuaacaaucggaauuucugguccagacaauggagcaguggcuguacuaaaauacaacggcauaauaacugaaaccauaaaaaguuggaaaaagcaaauauuaagaacacaagagucugaaugugucugugugaacgggucauguuucaccauaaugaccgauggcccgaguaauggggccgccucguacaaaaucuucaagaucgaaaagggaaagguuacuaaaucaguagaguugaaugcacccaauuuucauuaugaggaauguuccuguuacccagacacuggcacagugauguguguaugcagggacaacuggcaugguucaaaucgaccuugggugucuuuuaaucaaaaccuggauuaucaaauaggauacaucugcagugggguguucggugacaauccgcgucccaaagauggagagggcagcuguaauccagugacuguugauggagcaaauggaguaaagggguuuucauacaaauaugguaaugguguuuggauaggaaggacuaaaaguaacagacuuagaaaaggguuugagaugauuugggauccuaauggauggacagauaccgacagugauuucucagugaaacaggauguuguggcaauaacugauuggucaggguacagcggaaguuucguucaacauccugaguuaacaggauuggacuguauaagaccuugcuucuggguugaguuagucagaggacugccuaaagaaaauacaacaaucuggacuagugggagcagcauuucuuuuuguggcguaaauagugauacugcaaacuggucuuggccagacggugcugaguugcccuucaccauugacaaguag

SEQ ID NO: 46465 - RNA, 1410 nt, Artificial Sequence
  derived and/or modified CDS sequence (wt) from neuraminidase__InfluenzaA__ABB02839
augaauccaaaucaaaagauaauaacgauuggcucuguuucucucaccauuuccacaauaugcuucuucaugcaaauugccaucuugauaacuacuguaacauugcauuucaagcaauaugaauucaacucccccccaaacaaccaaguggugcugugugaaccaacaauaauagaaagaaacauaacagagauaguguaucugaccaacaccaccauagagaaggaaauaugccccaaacuagcagaauacagaaauuggucaaagccgcaaugugacauuacaggauuugcaccuuuuucuaaggacaauucgauuaggcuuuccgcugguggggacaucugggugacaagagaaccuuaugugucaugcgauccugacaaguguuaucaauuugcccuuggacagggaacaacacuaaacaacgugcauucaaaugacacaguacaugauaggaccccuuaucggacccuauugaugaaugaguuagguguuccauuucaucuggggaccaagcaagugugcauagcaugguccagcucaaguugucacgauggaaaagcauggcugcauguuuguguaacgggggaugauaaaaaugcaacugcuagcuucauuuacaaugggaggcuuguagauaguauuguuucaugguccaaagaaauccucaggacccaggagucagaaugcguuuguaucaauggaacuuguacaguaguaaugacugaugggagugcuucaggaaaagcugauacuaaaauacuauucauugaggaggggaaaaucguucauacuagcacauugucaggaagugcucagcaugucgaggaaugcuccugcuauccucgauauccuggugucagaugugucugcagagacaacuggaaaggcuccaauaggcccaucguagauauaaacauaaaggauuauagcauuguuuccaguuaugugugcucaggacuuguuggagacacacccagaaaaaacgacagcuccagcaguagccauugcuuggauccuaacaaugaagaagguggucauggagugaaagguugggccuuugaugauggaaaugacguguggaugggaagaacgaucagcgagaaguuacgcucaggauaugaaaccuucaaagucauugaaggcugguccaacccuaauuccaaauugcagauaaauaggcaagucauaguugacagagguaauagguccgguuauucugguauuuucucuguugaaggcaaaagcugcaucaaucggugcuuuuauguggaguugauaaggggaagaaaagaggaaacugaagucuuguggaccucaaacaguauuguuguguuuuguggcaccucagguacauauggaacaggcucauggccugauggggcggacaucaaucucaugccuauauaa

SEQ ID NO: 46466 - RNA, 1410 nt, Artificial Sequence
  derived and/or modified CDS sequence (wt) from neuraminidase__InfluenzaA__ABB02850
augaauccaaaucaaaagauaauaacgauuggcucuguuucucucaccauuuccacaauaugcuucuucaugcaaauugccaucuugauaaccacuguaacauugcauuucaagcaauaugaauucaacucccccccaaacaaccaagugaugcugugugaaccaacaauaauagaaagaaacauaacagagauaguguaccugaccaacaccaccauagagaaggaaauaugccccaaaccagcagaauacagaaauuggucaaagccgcaaugugacauuacaggauuugcaccuuuuucuaaggacaauucgauuaggcuuuccgcugguggggacaucugggugacaagagaaccuuaugugucaugcgauccugacaaguguuaucaauuugcccuuggacagggaacaacacuaaacaacgugcauucaaaugacacaguacaugauaggaccccuuaucggacccuauugaugaaugaguuagguguuccauuucaucuggggaccaagcaagugugcauagcaugguccagcucaaguugucacgauggaaaagcauggcugcauguuuguguaacgggggaugauaaaaaugcaacugcuagcuucauuuacaaugggaggcuuguagauaguauuguuucaugguccaaagaaauccucaggacccaggagucagaaugcguuuguaucaauggaacuugugcaguaguaauuacugaugggagcgcuucaggaaaagcugauacuaaaauacuauucauugaggaggggaaaaucguucauacuagcaaauugucaggaagugcucagcaugucgaggagugcuccugcuauccucgauauccugguaucagaugugucugcagagacaacuggaaaggauccaauaggcccaucguagauauaaacauaaaggauuauagcauuguuuccaguuaugugugcucaggacuuguuggagacacacccagaaaaaacgacagcuccagcaguagccuuugcuuggauccuaacaaugaagaagguggucauggagugaaaggcugggccuuugaugauggaaaugacguguggaugggaagaacgaucagcgagaaguuacgcucaggauaugaaaccuucaaagucauugaaggcugguccaacccuaauuccaaauugcagauaaauaggcaagucauaguugauagagguaauagguccgguuauucugguauuuucucuguugaaggcaaaagcugcaucaaucggugcuuuuauguggaguugauaaggggaagaaaagaggaaacugaagucuuguggaccucaaacaguauuguuguguuuuguggcaccucagguacauauggaacaggcucauggccugauggggcggacaucaaucucaugccuauauaa

SEQ ID NO: 46467 - RNA, 1410 nt, Artificial Sequence
  derived and/or modified CDS sequence (wt) from neuraminidase__InfluenzaA__ABB02861
augaauccaaaucaaaagauaauaacaauuggcucuguuucucucaccauugccacaauaugcuuccuuaugcaaauugccauccugguaacuacuguaacauugcauuucaagcaguaugaaugcaacucccccccaaacaaccaaguaaugcugugugaaccagcaauaauagaaagaaacauaacagagauaguguaucugaccaacaccaccauagagaaggaaauaugccccaaauuagcagaauacagaaauuggucaaagccgcaauguaacauuacaggauuugcaccuuuuuccaaggacaauucgauucggcuuuccgcugguggggacaucugggugacaagagaaccuuaugugucaugcgauccugacaaguguuaucaauuugcccuuggacagggaacaacacuaaacaacgggcauucaaaugacacaguacaugauaggaccccuuaccggacccuauugaugaaugaauuggguguuccauuucauuugggaaccaggcaagugugcauagcaugguccagcucaaguugucacgauggaaaagcauggcugcauguuuguguaacuggggaugaugaaaaugcaacugcuagcuucauuuacgaugggaggcuuguagauaguauugguucaugguccaaaaaaauacucagaacccaggagucggaaugcguuuguaucaauggaacuuguacaguaguaaugacugaugggagcgcuucaggaaaagcugauacuaaaauacuauucauugaggaggggaaaaucguuaauauuagcacauugucaggaagugcucagcaugucgaggagugcuccuguuauccucgauauccuggugucagaugugucugcagagacaacuggaaaggcuccaauaggcccaucguagauauaaauguaaaggauuauagcauuguuuccaguuaugugugcucaggacuuguuggagacacacccagaaaaaacgacagcuucagcaguagccauugccuagauccuaacaaugaggaagguggucauggagugaaaggcugggccuuugaugauggaaaugacguguggaugggaagaacgaucagcgagaaguuacgcucagguuaugaaaccuucaaagucaucgaaggcugguccaaaccuaacuccaaauuacagauaaauaggcaagucauaguugaaagagguaacagguccgguuauucugguauuuucuccguugaaggcaaaagcugcaucaaucggugcuuuuauguggaguugauaaggggaaggaaagaggaaacugaaguuugguggaccucaaacaguauuguuguguuuuguggcaccucagguacauauggaacaggcucauggccugauggggcggauaucgaucucaugccuauauaa

SEQ ID NO: 46468 - RNA, 1410 nt, Artificial Sequence; identical to SEQ ID NO: 46265
  derived and/or modified CDS sequence (wt) from neuraminidase__InfluenzaA__ABB02872

SEQ ID NO: 46469 - RNA, 1410 nt, Artificial Sequence; identical to SEQ ID NO: 46265
  derived and/or modified CDS sequence (wt) from neuraminidase__InfluenzaA__ABB02883

SEQ ID NO: 46470 - RNA, 1410 nt, Artificial Sequence
  derived and/or modified CDS sequence (wt) from neuraminidase__InfluenzaA__ABB02894
augaauccaaaucaaaagauaauaacgauuggcucuguuucucucaccauugccacaauaugcuuccuuaugcaaauugccauccugguaacuacuguaacauugcauuucaagcaauaugaaugcaacucccccccaaacaaccaagugaugcugugugaaccaacaauaauagaaagaaacauaacagagaugguguaucugaccaacaccaccauagagaaggaaauaugccccaaacuagcagaauacagaaauuggucaaagccgcaauguaacauuacaggauuugcaccuuuuucuaaggacaauucgauucggcuuuccgcugguggggacaucugggugacaagagaaccuuaugugucaugcgauccugacaaguguuaucaauuugcccuuggacagggaacaacacuaaacaacggacauucaaaugacacaguacaugauaggaccccuuaucggacccuauugaugaaugaguuggguguuccauuucauuugggaaccaagcaagugugcauagcaugguccagcucaaguugucacgauggaaaagcauggcugcauguuuguguaacgggggaugaugaaaaugcaacugcuagcuucauuuacaaugggaggcuuguagauaguauugguucaugguccaaaaaaauccucaggacccaggagucggaaugcguuuguaucaauggaacuuguacaguaguaaugacugaugggagugcuucaggaaaagcugauacuaaaauacuauucauugaggaggggaaaaucguucauacuagccuauugucaggaagugcucagcaugucgaggagugcuccuguuauccucgauacccuggugucagaugugucugcagagacaacuggaaaggcuccaauaggcccaucguagauauaaauguaaaggauuauagcauuguuuccaguuaugugugcucaggacuuguuggagacacacccagaaaaaacgacagcuccagcaguagccauugcuuggauccuaacaaugaggaagguggucauggagugaaaggcugggccuuugaugauggaaaugacguguggaugggaagaacgaucagcgagaaguuacgcucaggauaugaaaccuucaaagucauugaaggcugguccaaaccuaacuccaaauugcagauaaauaggcaagucauaguugacagagguaauagguccgguuauucugguauuuucucuguugaaggcaaaagcugcaucaaucggugcuuuuauguggaguugauaaggggaaggaaacaggaaacugaagucuuguggaccucaaacaguauuguuguguuuuguggcacuucagguacauauggaacaggcucauggccugauggggcggacaucaaucucaugccuauauaa

SEQ ID NO: 46471 - RNA, 1410 nt, Artificial Sequence; identical to SEQ ID NO: 46181
  derived and/or modified CDS sequence (wt) from neuraminidase__InfluenzaA__ABB02905

SEQ ID NO: 46472 - RNA, 1413 nt, Artificial Sequence
  derived and/or modified CDS sequence (wt) from neuraminidase__InfluenzaA__ABB02916
augaauccaaaucaaaaaauaauaaccauuggaucaaucaguauagcaaucggaauaauuagucuaauguugcaaauaggaaauauuauuucaauaugggcuagucacucaauccaaacuggaagucaaaaccacacuggaguaugcaaccaaagaaucaucacauaugaaaacagcaccugggugaaucacacauauguuaauauuaacaacacuaauguuauugcugaaaaggacaaaacuucagugacauuggccggcaauucaucucuuuguucaaucaguggaugggcuauauacacaaaagacaacagcauaagaauugguuccaaaggagauguuuuugucauaagagagccuuucauaucauguucucacuuggaaugcagaaccuuuuuucugacccaaggugcucuauuaaaugacaaacauucaaaugggaccguuaaggacagaagucccuauagggcuuuaaugagcuguccucuaggugaagcuccguccccauacaauucaaaguuugaaucaguugcuuggucagcaagcgcaugccaugauggcaugggcugguuaacaaucggaauuucugguccagacaauggagcaguggcuguacuaaaauacaacggcauaauaacugaaaccauaaaaaguuggaaaaagcaaauauuaagaacacaagagucugaaugugucugugugaacgggucauguuucaccauaaugaccgauggcccgaguaauggggccgccucguacaaaaucuucaagaucgaaaagggaaagguuacuaaaucaauagaguugaaugcacccaauuuucauuaugaggaauguuccuguuacccagacacuggcacagugauguguguaugcagggacaacuggcaugguucaaaucgaccuugggugucuuuuaaucaaaaccuggauuaucaaauaggauacaucugcagugggguguucggugacaauccgcgucccagagauggagagggcagcuguaauccagugacuguugauggagcaaacggaguaaagggguuuucauacaaauaugguaaugguguuuggauaggaaggacuaaaaguaacagacuuagaaagggguuugagaugauuugggauccuaauggauggacagauaccgacagugauuucucagugaaacaggaugucguggcaauaacugauuggucaggguacagcggaaguuucguucaacauccugaguuaacaggauuggacuguauaagaccuugcuucuggguugaguuagucagaggacugccuagagaaaauacaacaaucuggacuagugggagcagcauuucuuucuguggcguaaauagugauacugcaaacuggucuuggccagacggugcugaguugccguucaccauugacaaguag

SEQ ID NO: 46473 - RNA, 1413 nt, Artificial Sequence
  derived and/or modified CDS sequence (wt) from neuraminidase__InfluenzaA__ABB02927
augaauccaaaucaaaaaauaauaaccauuggaucaaucaguauagcaaucggaauaaucagucuaauguugcaaauaggaaauauuauuucaauaugggcuagucacucaauccaaacuggaagucaaaaccacacuggaauaugcaaccaaagaaucaucacauaugaaaacagcaccugggugaaucacacauauguuaauauuaacaacacuaauguuguugcuggaaaggacaaaacuucagugacauuggccggcaauucaucucuuuguucuaucaguggaugggcuauauacacaaaagacaacagcauaagaauuggcuccaaaggagauguuuuugucauaagagaaccuuucauaucauguucucacuuggaaugcagaaccuuuuuucugacccaaggugcucuauuaaaugacaaacauucaaaugggaccguuaaggacagaaguccuuauagggccuuaaugagcuguccucuaggugaagcuccguccccauacaauucaaaguuugaaucaguugcauggucagcaagcgcaugccaugauggcaugggcugguuaacaaucggaauuucugguccagacaauggagcuguggcuguacuaaaauacaacggaauaauaacugaaaccauaaaaaguuggaaaaagcgaauauuaagaacacaagagucugaaugugucugugugaacgggucauguuucaccauaaugaccgauggcccgaguaauggggccgccucguacaaaaucuucaagaucgaaaaggggaagguuacuaaaucaauagaguugaaugcacccaauuuucauuaugaggaauguuccuguuacccagacacuggcacagugauguguguaugcagggacaacuggcaugguucaaaucgaccuugggugucuuuuaaucaaaacuuggauuaucaaauaggauacaucugcaguggaguguucggugacaauccgcgucccaaagauggagagggcagcuguaauccagugacuguugauggagcagacggaguaaagggguuuucauacaaauaugguaaugguguuuggauaggaaggacuaaaaguaacaaacuuagaaagggguuugagaugauuugggauccuaauggauggacagauaccgacagugauuucucagugaaacaggauguuguggcaauaacugauuggucaggguacagcggaaguuucguucaacauccugaguuaacaggauuggacuguauaagaccuugcuucuggguugaguuagucagaggacugccuagagaaaauacaacaaucuggacuagugggagcagcauuucuuuuuguggcguuaauagugauacugcaaacuggucuuggccagacggugcugaguugccguucaccauugacaaguag

SEQ ID NO: 46474 - RNA, 1413 nt, Artificial Sequence
  derived and/or modified CDS sequence (wt) from neuraminidase__InfluenzaA__ABB02939
augaauccaaaucaaaaaauaauaaccauuggaucaaucaguauagcaaucggaauaauuagccuaauguugcaaauaggaaacauuauuucaauaugggcuagucacucaauccaaacuggaagucaaaaccacacuggaguaugcaaccaaagaaucaucacauaugaaaacagcaccuggaugaaucacacauauguuaauauuaacaacaccaauguuauugcuggaaaggacaaaacuucagugacauuggccggcaauucaucucuuuguucuaucaguggaugggcuauauacacaaaagacaacagcauaagaauugguuccaaaggagauguuuuugucauaagagagccuuucauaucauguucucacuuggaaugcagaaccuuuuuucugacccaaggugcucuauuaaaugacaaacauucaaaugggaccguuaaggacagaagucccuauagggcuuuaaugagcuguccucuaggugaagcuccguccccauacaauucaaaguuugaaucaguugcuuggucagcaagcgcaugccaugauggcaugggcugguuaacaaucggaauuucugguccagacaauggagcaguggcuguacuaaaauacaacggcauaauaacugaaaccauaaaaaguuggaaaaagcaaauauuaagaacacaagagucugaaugugucugugugaacgggucauguuucaccauaaugaccgauggcccgaguaauggggccgccucguacaaaaucuucaagaucgaaaagggaaagguuacuaaaucaauggaguugaaugcacccaauuuucauuaugaggaauguuccuguuacccagacacuggcacagugauguguguaugcagggacaacuggcaugguucaaaucgacccugggugucuuuuaaucaaaaccuggauuaucaaauaggauacaucugcagugggguguucggugacaauccgcgucccaaagauggagagggcagcuguaauccagugacuguugauggagcaaacggaguaaagggguuuucauacaaauaugguaaugguguuuggauaggaaggacuaaaaguaacagacuuagaaagggguuugagaugauuugggauccuaauggauggacagauaccgacagugauuucucagugaaacaggauguuguggcaauaacugauuggucaggguacagcggaaguuucguucaacauccugaguuaacaggauuggacuguauaagaccuugcuucuggguugaguuagucagaggacugccaaaagaaaauacaacaaucuggacuagugggagcagcauuucuuuuuguggcguaaauagugauacugcaaacuggucuuggccagacggugcugaguugccguuuaccauugacaaguag

SEQ ID NO: 46475 - RNA, 1410 nt, Artificial Sequence
  derived and/or modified CDS sequence (wt) from neuraminidase__InfluenzaA__ABB02950
augaauccaaaucaaaagauaauaacgauuggcucuguuucucucacuauugccacaauaugcuuccuuaugcaaauugccauccugguaacuacuguaacauugcauuucaagcaauaugaaugcgacucucucccaaacaaccaaguaaugcuaugugaaccaacaauaauagaaagaaacauaacagagauaguguaucugaccaacaccaccauagagaaggaaauaugccccaaacuagcagaauacagaaauuggucaaagccgcaauguaaaauuacaggauuugcaccuuuuucuaaggacaauucaauucggcuuuccgcugguggggacauuugggugacaagagaaccuuaugugucaugcgauccugacaaguguuaucaauuugcccuuggacagggaacaacacuaaacaacagacauucaaaugacacaguacaugauaggaccccuuaucgaacccuauugaugaaugaguuggguguuccauuucauuugggaaccaagcaagugugcauagcaugguccagcucaaguugucacgauggaaaagcauggcugcauguuuguguaacugggcacgaugaaaaugcaacugcuagcuucauuuacgaugggaggcuuguagauaguauugguucaugguccaaaaaaauccucaggacccaggagucugaaugcguuuguaucaauggaacuuguacaguaguaaugacugaugggagugcuucaggaagagcugauacuaaaauacuauucauugaggaggggaaaaucauucauauuagccaauugucaggaagugcucagcaugucgaggagugcucauguuauccucgauauccuggugucagaugugucugcagagacaacuggaaaggcuccaauaggcccauuguagauauaaauguaaaggauuauagcauuguuuccaguuaugugugcucaggacuuguuggagacacacccagaaaaaacgacagcuccagcaguagccauugccugaauccuaacaaugaggaagggggucauggagugaaaggcugggccuuugaugauggaaaugacguguggaugggaagaacgaucagcgagaaauuccgcucagguuaugaaacuuucaaagucauugaaggcugguccaaaccuaacuccaaauugcagauaaauaggcaagucauaguugacagagauaauagguccgguuauucugguauuuucucuguugaaggcaaaagcugcaucaaucggugcuuuuauguggaguugauaaggggaaggaaacaggaaacugaagucugguggaccucaaacaguauuguuguguuuuguggcaccucagguacauauggaacaggcucauggccugauggggcggacaucaaucucaugccuauauaa

SEQ ID NO: 46476 - RNA, 1410 nt, Artificial Sequence; identical to SEQ ID NO: 46293
  derived and/or modified CDS sequence (wt) from neuraminidase__InfluenzaA__ABB02961

SEQ ID NO: 46477 - RNA, 1410 nt, Artificial Sequence; identical to SEQ ID NO: 46293
  derived and/or modified CDS sequence (wt) from neuraminidase__InfluenzaA__ABB02972

SEQ ID NO: 46478 - RNA, 1410 nt, Artificial Sequence; identical to SEQ ID NO: 46293
  derived and/or modified CDS sequence (wt) from neuraminidase__InfluenzaA__ABB02983

SEQ ID NO: 46479 - RNA, 1410 nt, Artificial Sequence
  derived and/or modified CDS sequence (wt) from neuraminidase__InfluenzaA__ABB02994
augaauccaaaucaaaagauaauaacgauuggcucuguuucucucacuauugccacaauaugcuuccuuaugcaaauugccauccugguaacuacuguaacauugcauuucaagcaauaugaaugcaacucucucccaaacaaccaaguaaugcugugugaaccaacaauacuagaaagaaacauaacagagauaguguaucugaccaacaccaccauagagaaggaaauaugccccaaacuagcagaauacagaaauuggucaaagccgcaauguaaaauuacaggauuugcaccuuuuucuaaggacaauucaauucggcuuuccgcugguggggacauuugggugacaagagaaccuuaugugucaugcgauccugacaaguguuaucaauuugcccuuggacagggaacaacacuaaacaacaggcauucaaaugacacagugcaugauaggaccccuuaucgaacccuauugaugaaugaguuggguguuccauuucauuugggaaccaagcaagugugcauagcaugguccagcucaaguugucacgauggaaaagcauggcugcauguuuguguaacugggcacgaugaaaaugcaacugcuagcuucauuuacggugggaggcuuguagauaguauugguucaugguccaaaaaaauccucaggacccaggagucggaaugcguuuguaucaauggaacuuguacaguaguaaugacugaugggagugcuucaggaagagcugauacuaaaauacuauucauugaggaggggaaaaucauucauauuagccaauugucaggaagugcucagcaugucgaggagugcucauguuauccucgauauccuggugucagaugugucugcagagacaacuggaaaggcuccaauaggcccauuguagauauaaauguaaaggauuauagcauuguuuccaguuaugugugcucaggacuuguuggagacacacccagaaaaaacgacagcuccagcaguagccauugccugaauccuaacaaugaggaagggggucauggaguaaaaggcugggcauuugaugauggaaaugacguguggaugggaagaacgaucagcgagaaauuccgcucagguuaugaaaccuucaaagucauugaaggcugguccaaaccuaacuccaaauugcagauaaauaggcaagucauaguugacagagauaauagguccgguuauucugguauuuucucuguugaaggcaaaagcugcaucaaucggugcuuuuauguggaguugauaaggggaaggaaacaggaaacugaagucugguggaccucaaacaguauuguuguguuuuguggcaccucagguacauauggaacaggcucauggccugauggggcggacaucaaucucaugccuauauaa

SEQ ID NO: 46480 - RNA, 1410 nt, Artificial Sequence; identical to SEQ ID NO: 46293
  derived and/or modified CDS sequence (wt) from neuraminidase__InfluenzaA__ABB03005

SEQ ID NO: 46481 - RNA, 1410 nt, Artificial Sequence; identical to SEQ ID NO: 46325
  derived and/or modified CDS sequence (wt) from neuraminidase__InfluenzaA__ABB03016

SEQ ID NO: 46482 - RNA, 1410 nt, Artificial Sequence; identical to SEQ ID NO: 46293
  derived and/or modified CDS sequence (wt) from neuraminidase__InfluenzaA__ABB03027

SEQ ID NO: 46483 - RNA, 1410 nt, Artificial Sequence; identical to SEQ ID NO: 46325
  derived and/or modified CDS sequence (wt) from neuraminidase__InfluenzaA__ABB03038

SEQ ID NO: 46484 - RNA, 1410 nt, Artificial Sequence
  derived and/or modified CDS sequence (wt) from neuraminidase__InfluenzaA__ABB03049
augaauccaaaucaaaagauaauaacgauuggcucuguuucucucacuauugccacaauaugcuuccuuaugcaaauugccauccugguaacuacuguaacauugcauuucaagcaauaugaaugcaacucucucccaaacaaccaaguaaugcugugugaaccaacaauacuagaaagaaacauaacagagauaguguaucugaccaacaccaccauagagaaggaaauaugccccaaacuagcagaauacagaaauuggucaaagccgcaauguaaaauuacaggauuugcaccuuuuucuaaggacaauucaauucggcuuuccgcugguggggacauuugggugacaagagaaccuuaugugucaugcgauccugacaaguguuaucaauuugcccuuggacagggaacaacacuaaacaacaggcauucaaaugacacaguacaugauaggaccccuuaucgaacccuauugaugaaugaguuggguguuccauuucauuugggaaccaagcaagugugcauagcaugguccagcucaaguugucacgauggaaaagcauggcugcauguuuguguaacugggcacgaugaaaaugcaacugcuagcuucauuuacggugggaggcuuguagauaguauugguucaugguccaaaaaaauccucaggacccaggagucggaaugcguuugcaucaauggaacuuguacaguaguaaugacugaugggagugcuucaggaagagcugauacuaaaauacuauucauugaggaggggaaaaucauucauauuagccaauugucaggaagugcucagcaugucgaggagugcucauguuauccucgauauccuggugucagaugugucugcagagacaacuggaaaggcuccaauaggcccauuguagauauaaauguaaaggauuauagcauuguuuccaguuaugugugcucaggacuuguuggagacacacccagaaaaaacgacagcuccagcaguagccauugccugaauccuaacaaugaggaagggggucauggaguaaaaggcugggcauuugaugauggaaaugacguguggaugggaagaacgaucagcgagaaauuccgcucagguuaugaaaccuucaaagucauugaaggcugguccaaaccuaacuccaaauugcagauaaauaggcaagucauaguugacagagauaauagguccgguuauucugguauuuucucuguugaaggcaaaagcugcaucaaucggugcuuuuauguggaguugauaaggggaaggaaacaggaaacugaagucugguggaccucaaacaguauuguuguguuuuguggcaccucagguacauauggaacaggcucauggccugauggggcggacaucaaucucaugccuauauaa

SEQ ID NO: 46485 - RNA, 1410 nt, Artificial Sequence
  derived and/or modified CDS sequence (wt) from neuraminidase__InfluenzaA__ABB03060
augaauccaaaucaaaagauaauaacgauuggcucuguuucucucaccauuuccacaauaugcuucuucaugcaaauugccaucuugauaacuacuguaacauugcauuucaagcaauaugaauucaacucccccccaaacaaccaagugaugcugugugaaccaacaauaauagaaagaaacauaacagagauaguguaucugaccaacaccaccauagagaaggaaauaugccccaaacuagcagaauacagaaauuggucaaagccgcaaugugacauuacaggauuugcaccuuuuucuaaggacaauucgauuaggcuuuccgcugguggggacaucugggugacaagagaaccuuaugugucaugcgauccugacaaguguuaucaauuugcccuuggacagggaacaacacuaaacaacgugcauucaaaugacacaguacaugauaggaccccuuaucggacccuauugaugaaugaguuagguguuccauuucaucuggggaccaagcaagugugcauagcaugguccagcucaaguugucaugauggaaaagcauggcugcauguuuguguaacgggggaugauaaaaaugcaacugcuagcuucauuuacaaugggaggcuuguagauaguauuguuucaugguccaaagaaauccucaggacccaggagucagaaugcguuuguaucaauggaacuuguacaguaguaaugacugaugggagugcuucaggaaaagcugauacuaaaauacuauucauugaggaggggaaaaucguucauacuagcacauugucaggaagugcucagcaugucgaggagugcuccugcuauccucgauauccugguaucagaugugucugcagagacaacuggaaaggcuccaauaggcccauuguagauauaaacauaaaggauuauagcauuguuuccaguuaugugugcucaggacuuguuggagacacacccagaaaaaacgacagcuccagcaguagccauugcuuggauccuaacaaugaagaagguggucauggagugaaaggcugggccuuugaugauggaaaugacguguggaugggaagaacgaucagcgagaaguuacgcucaggauaugaaaccuucaaagucauugaaggcugguccaacccuaauuccaaauugcagauaaauaggcaagucauaguugacagagguaauagguccgguuauucugguauuuucucuguugaaggcaaaagcugcaucaaucggugcuuuuauguggaguugauaaggggaagaaaagaggaaacugaagucuuguggaccucaaacaguauuguuguguuuuguggcaccucagguacauauggaacaggcucauggccugauggggcggacaucaaucucaugccuauauaa

SEQ ID NO: 46486 - RNA, 1410 nt, Artificial Sequence
  derived and/or modified CDS sequence (wt) from neuraminidase__InfluenzaA__ABB03071
augaauccaaaucaaaagauaauaacgauuggcucuguuucucucaccauuuccacaauaugcuucuucaugcaaauugccaucuugauaacuacuguaacauugcauuucaagcaauaugaauucaacucccccccaaacaaccaagugaugcugugugaaccaacaauaauagaaagaaacauaacagagauaguguaucugaccaacaccaccauagagaaggaaauaugccccaaacuagcagaauacagaaauuggucaaagccgcaauguggcauuacaggauuugcaccuuuuucuaaggacaauucgauuaggcuuuccgcugguggggacaucugggugacaagagaaccuuaugugucaugcgauccugacaaguguuaucaauuugcccuuggacagggaacaacacuaaacaacgugcauucaaaugacacaguacaugauaggaccccuuaucggacccuauugaugaaugaguuagguguuccauuucaucuggggaccaagcaagugugcauagcaugguccagcucaaguugucaugauggaaaagcauggcugcauguuuguguaacgggggaugauaaaaaugcaacugcuagcuucauuuacaaugggaggcuuguagauaguauuguuucaugguccaaagaaauccucaggacccaggagucagaaugcguuuguaucaauggaacuuguacaguaguaaugacugaugggagugcuucaggaaaagcugauacuaaaauacuauucauugaggaggggaaaaucguucauacuagcacauugucaggaagugcucagcaugucgaggagugcuccugcuauccucgauauccuggugucagaugugucugcagagacaacuggaaaggcuccaauaggcccauuguagauauaaacauaaaggauuauagcauuguuuccaguuaugugugcucaggacuuguuggagacacacccagaaaaaacgacagcuccagcaguagccauugcuuggauccuaacaaugaagaagguggucauggagugaaaggcugggccuuugaugauggaaaugacguguggaugggaagaacgaucagcgagaaguuacgcucaggauaugaaaccuucaaagucauugaaggcugguccaacccuaauuccaaauugcagauaaauaggcaagucauaguugacaaagguaauagguccgguuauucugguauuuucucuguugaaggcaaaagcugcaucaaucggugcuuuuauguggaguugauaaggggaagaaaagaggaaacugaagucuuguggaccucaaacaguauuguuguguuuuguggcaccucagguacauauggaacaggcucauggccugauggggcggacaucaaucucaugccuauauaa

SEQ ID NO: 46487 - RNA, 1410 nt, Artificial Sequence
  derived and/or modified CDS sequence (wt) from neuraminidase__InfluenzaA__ABB03093
augaauccaaaucaaaagauaauaacgauuggcucuguuucucucaccauuuccacaauaugcuucuucaugcaaauugccaucuugauaacuacuguaacauugcauuucaagcaauaugaauucaacucccccccaaacaaccaagugaugcugugugaaccaacaauaauagaaagaaacauaacagagauaguguaucugaccaacaccaccauagagaaggaaauaugccccaaacuagcagaauacagaaauuggucaaagccgcaaugugacauuacaggauuugcaccuuuuucuaaggacaauucgauuaggcuuuccgcugguggggacaucugggugacaagagaaccuuaugugucaugcgauccugacaaguguuaucaauuugcccuuggacagggaacaacacuaaacaacgugcauucaaaugacacaguacaugauaggaccccuuaucggacccuauugaugaaugaguuagguguuccauuucaucuggggaccaagcaagugugcauagcaugguccagcucaaguugucacgauggaaaagcauggcugcauguuuguguaacgggggaugauaaaaaugcaacugcuagcuucauuuacaaugggaggcuuguagauagcauuguuucaugguccaaagaaauccucaggacccaggagucagaaugcguuuguaucaauggaacuuguacaguaguaaugacugaugggagugcuucaggaaaagcugauacuaaaauacuauucauugaggaggggaaaaucguucauacuagcacauugucaggaagugcucagcauaucgaggagugcuccugcuauccucgauauccuggugucagaugugucugcagagacaacuggaaaggcuccaauaggcccauuguagauauaaacauaaaggauuauagcauuguuuccaguuaugugugcucaggacuuguaggagacacacccagaaaaaacgacagcuccagcaguagccauugcuuggauccuaacaaugaagaagguggucauggagugaaaggcugggccuuugaugauggaaaugacguguggaugggaagaacgaucagcgagaaguuacgcucaggauaugaaaccuucaaagucauugaaggcugguccaacccuaauuccaaauugcagauaaauaggcaagucauaguugacagagguaauagguccgguuauucugguauuuucucuguugaaggcaaaagcugcaucaaucggugcuuuuauguggaguugauaaggggaagaaaagaggaaacugaagucuuguggaccucaaacaguauuguuguguuuuguggcaccucagguacauauggaacaggcucauggccugauggggcggacaucaaucucaugccuauauaa

SEQ ID NO: 46488 - RNA, 1410 nt, Artificial Sequence; identical to SEQ ID NO: 46394
  derived and/or modified CDS sequence (wt) from neuraminidase__InfluenzaA__ABB03104

SEQ ID NO: 46489 - RNA, 1410 nt, Artificial Sequence
  derived and/or modified CDS sequence (wt) from neuraminidase__InfluenzaA__ABB03115
augaauccaaaucaaaagauaauaacgauuggcucuguuucccucaccauuuccacaauaugcuucuucaugcaaauugccauccugauaacuacuguaacauugcauuucaagcaauaugaauucaacucccccccaaacaaccaagugaugcugugugaaccaacaauaauagaaagaaacauaacagagauaguguaucugaccaacaccaccauagagaaggaaauaugccccaaacuagcagaauacagaaauuggucaaagccgcaauguaacauuacaggauuugcaccuuuuucuaaggacaauucgauucggcuuuccgcugguggggacaucugggugacaagagaaccuuaugugucaugcgauccugacaaguguuaucaauuugcccuuggacagggaacaacacuaaacaacgugcauucaaaugacacaguacaugauaggaccccuuaucggacccuauugaugaaugaguuggguguuccauuucaucuggggaccaagcaagugugcauagcaugguccagcucaaguugucacgauggaaaagcauggcugcauguuuguguaacgggggaugaugaaaaugcaacugcuagcuucauuuacaaugggaggcuuguagauaguauuguuucaugguccaaaaaaauccucaggacccaggagucagaaugcguuuguaucaauggaacuuguacaguaguaaugacugaugggagugcuucaggaaaagcugauacuaaaauacuauucauugaggaggggaaaauuguucauacuagcacauuaucaggaagugcucagcaugucgaggagugcuccuguuauccucgauauccuggugucagaugugucugcagagacaacuggaaaggcuccaauaggcccaucguagauauaaacauaaaggauuauagcauuguuuccaguuaugugugcucaggacuuguuggagacacacccagaaaaaacgacagcuccagcaguagccauugcuuggauccaaacaaugaggaagguggucauggagugaaaggcugggccuuugaugauggaaaugacguguggaugggaagaacgaucagcgagaaguuacgcucaggauaugaaaccuucaaagucauugaaggcugguccaacccuaacuccaaauugcagauaaauaggcaagucauaguugacagagguaacagguccgguuauucugguauuuucucuguugaaggcaaaagcugcaucaaucggugcuuuuauguggaguugauaaggggaagaaaacaggaaaaugaagucuuguggaccucaaacaguauuguuguguuuuguggcaccucagguacauauggaacaggcucauggccugauggggcggacaucaaucucaugccuauauaa

SEQ ID NO: 46490 - RNA, 1413 nt, Artificial Sequence
  derived and/or modified CDS sequence (wt) from neuraminidase__InfluenzaA__ABB03126
augaauccaaaucaaaaaauaauaaccauuggaucaaucaguauagcaaucggaauaauuagucuaauguugcaaauaggaaauauuauuucaauaugggcuagucacucaauccaaacuggaagucaaaaccacacuggaauaugcaaccaaagaaucaucacauaugaaaacagcaccugggugaaucacacauauguuaauauuaacaacacuaauguuguugcuggaaaggacaaaacuucagugacauuggccggcaauucaucucuuuguucuaucaguggaugggcuauauacacaaaagacaacagcauaagaauuggcuccaaaggagauguuuuugucauaagagaaccuuucauaucauguucucacuuggaaugcagaaccuuuuuucugacccaaggugcucuauuaaaugacaaacauucaaauggaaccguuaaggacagaaguccuuauagggccuuaaugagcuguccucuaggugaagcuccguccccauacaauucaaaguuugaaucaguugcauggucagcaagcgcaugccaugauggcaugggcugguuaacaaucggaauuucugguccagacaauggagcuguggcuguacuaaaauacaacggaauaauaacugaaaccauaaaaaguuggaaaaagcgaauauugagaacacaagagucugaaugugucugugugaacgggucauguuucaccauaaugaccgauggcccgaguaauggggccgccucguacaaaaucuuuaagaucgaaaaggggaagguuacuaaaucaauagaguugaaugcacccaauuuucauuaugaggaauguuccuguuacccagacacuggcacagugauguguguaugcagggacaacuggcaugguucaaaucgaccuugggugucuuuuaaucaaaacuuggauuaucaaauaggauacaucugcaguggaguguucggugacaauccgcgucccaaagauggaaagggcagcuguaauccagugacuguugauggagcagacggaguuaagggguuuucauacaaauaugguaaugguguuuggauaggaaggacuaaaaguaacagacuuagaaagggguuugagaugauuugggauccuaauggauggacagauaccgacagugauuucucagugaaacaggauguuguggcaauaacugauuggucaggguacagcggaaguuucguucaacauccugaguuaacaggauuggacuguauaagaccuugcuucuggguugaguuagucagaggacugccuagagaaaauacaacaaucuggacuagugggagcagcauuucuuuuuguggcguugauagugauacugcaaacuggucuuggccagacggugcugaguugccguucaccauugacaaguag

SEQ ID NO: 46491 - RNA, 1413 nt, Artificial Sequence
  derived and/or modified CDS sequence (wt) from neuraminidase__InfluenzaA__ABB03148
augaauccaaaucaaaaaauaauaaccauuggaucaaucaguauagcaaucggaacaauuagucuaauguugcaaauaggaaauauuauuucaauaugggcuagucacucaauccaaacuggaagucaaaaccacacuggaauaugcaaccaaagaaucaucacauaugaaaacagcaccugggugaaucacacauauguuaauauuaacaacacuaauguuguugcuggaaaggacaaaacuucagugacauuggccggcaauucaucucuuuguucuaucaguggaugggcuauauacacaaaagacaacagcauaagaauuggcuccaaaggagauguuuuugucauaagagaaccuuucauaucauguucucacuuggaaugcagaaccuuuuuucugacccaaggugcucuauuaaaugacaaacauucaaauggaaccguuaaggacagaaguccuuauagggccuuaaugagcuguccucuaggggaagcuccguccccauacaauucaaaguuugaaucaguugcauggucagcaagcgcaugccaugauggcaugggcugguuaacaaucggaauuucugguccagacaauggagcuguggcuguacuaaaauacaacggaauaauaacugaaaccauaaaaaguuggaaaaagcgaauauugagaacacaagagucugaaugugucugugugaacgggucauguuucaccauaaugaccgauggcccgaguaauggggccgccucguacaaaaucuucaagaucgaaaaggggaagguuacuaaaucaauagaguugaaugcacccaauuuucauuaugaggaauguuccugcuacccagacacuggcacagugauguguguaugcagggacaauuggcauggcucaaaucgaccuugggugucuuuuaaucaaaacuuggauuaucaaauaggauacaucugcaguggaguguucggugacaauccgcgucccaaagauggaaagggcagcuguaauccagugacuguugauggagcagacggaguuaagggguuuucauacaaauaugguaaugguguuuggauaggaaggacuaaaaguaacagacuuagaaagggguuugagaugauuugggauccuaauggauggacagauaccgacagugauuucucagugaaacaggauguuguggcaauaacugauuggucaggguacagcggaaguuucguucaacauccugaguuaacaggauuggacuguauaagaccuugcuucuggguugaguuagucagaggacugccuagagaaaauacaacaaucuggacuagugggagcagcauuucuuuuuguggcguugauagugauacugcaaacuggucuuggccagacggugcugaguugccguucaccauugacaaguag

SEQ ID NO: 46492 - RNA, 1410 nt, Artificial Sequence
  derived and/or modified CDS sequence (wt) from neuraminidase__InfluenzaA__ABB04286
augaauccaaaucaaaagauaauaacaauuggcucugucucucucaccauugcaacaauaugcuuccuuaugcaaauugccauccugguaacuacuguaacauugcauuucaagcaauaugagugcagcucccccccaaacaaccaaguaaugccgugugaaccaauaauaauagaaaggaacauaacagagauaguguauuugacuaacaccaccauagagaaagagauaugccccaaauuaguggaauacagaaauuggucaaagccgcaauguaaaauuacaggauuugcaccuuuuucuaaggacaauucaauucggcuuucugcugguggggacauuugggugacgagagaaccuuaugugucaugugauccuggcaaguguuaucaauuugcacucgggcaggggaccacacuagacaacaagcauucaaaugacacaauacaugauaggaccccucaucgaacccuauugaugaaugaguuggguguuccauuucauuugggaaccaggcaaguguguauagcaugguccagcucaaguugucacgauggaaaagcauggcugcauguuugugucacuggguaugauaaaaaugcaacugcuagcuucauuuacgaugggaggcuuguagacaguauugguucaugguccaaaaauauccucaggacccaggagucggaaugcguuuguaucaaugggacuuguacaguaguaaugacugauggaagugcuucagaaagagcugauacuaaaauacuguucauugaagaggggaaaaucguucauauuagcccauugucaggaagugcucagcauguagaggaguguuccuguuauccucgauauccuggugucagaugugucugcagagacaacuggaaaggcuccaauaggcccgucguagauauaaaugugaaagauuauagcauuguuuccaguuaugugugcucagggcuuguuggcgacacacccagaaaaaacgacagaucuagcaguagcuauugccggaauccuaacaaugagaaagggaaucauggagugaaaggcugggccuuugacgauggaaaugacguguggaugggaagaacgaucagcgaggagucacgcucagguuaugaaaccuucaaagucauuggugguugguccacaccuaauuccaaaucgcagauaaauaggcaagucauaguugacagcgguaauagguccgguuauucugguauuuucucuguugagggcaaaagcugcaucaauaggugcuuuuauguggaguugauaaggggaagggaacaggaaacuagagucugguggaccucaaacaguauuguuguguuuuguggcacuucagguaccuauggaacaggcucauggccugauggagcggacaucaaucucaugccuauauaa

SEQ ID NO: 46493 - RNA, 1410 nt, Artificial Sequence
  derived and/or modified CDS sequence (wt) from neuraminidase__InfluenzaA__ABB04297
augaauccaaaucaaaagauaauaacaauuggcucugucucucucaccauugcaacaauaugcuuccucaugcagauugccauccugguaacuaccguaacauugcauuucaagcaauaugagugcgacucccccgcgaacaaccaaguaauuccgugugaaccaauaacaauagaaaggaacauaacagagauaguguacuugacuaacaccaccauagagaaagagauaugccccaaauuaguggaauacaggaauuggucaaagccgcaauguaaaauuacaggauuugcaccuuuuuccaaggacaauucaauucggcuuucugcugguggggacauuugggugacgagagaaccuuaugugucaugcgauccuggcaaguguuaucaauuugcacucggucaggggaccacacuagacaacaaacauucaaaugacacaauacaugauagaaccccucaucgaacccuauugaugaaugaguuggguguuccauuucauuugggaaccaggcaaguguguauagcaugguccagcucaaguugucacgauggaaaagcauggcugcauguuugugucacuggguaugauaaaaaugcaacugcuagcuucauuuacgaugggaggcuuguagacaguauugguucauggucucaaaauauccucaggacccaggagucggaaugcguuuguaucaaugggacuuguacaguaguaaugacugauggaagugcaucaggaagagcugauacuaaaauacuauucauugaagaggggaaaauuguucauauuagcccauugucaggaagugcucagcauguagaggaguguuccuguuauccucgauauccuggugucagauguaucugcagagacaacuggaaaggcucuaauaggcccgucguagauauaaaugugaaagauuauagcauugauuccaguuaugugugcucagggcuuguuggcgacacacccagaaacaacgacagaucuagcaauagcuauugccggaauccuaacaaugagaaagggaaucacggagugaaaggcugggccuuugacgauggaaaugauguguggaugggaagaacgaucagcgaggauucacgcucagguuaugaaaccuucaaagucauuggugguugguccacaccuaauuccaaauugcagauaaauaggcaagucauaguugacagcgauaauagaucagguuauucugguauuuucucuguugagggcaaaagcugcaucaauaggugcuuuuauguggaguugauaaggggaagggagcaggaaacuagaguaugguggaccucaaacaguauuguuguguuuuguggcacuucagguaccuaugggacaggcucauggccugauggggcggacaucaaucucaugccuauauaa

SEQ ID NO: 46494 - RNA, 1410 nt, Artificial Sequence
  derived and/or modified CDS sequence (wt) from neuraminidase__InfluenzaA__ABB04319
augaauccaaaucaaaagauaauaacaauuggcucuguuucucucaccauugccacaauaugcuuucuuaugcaaauugccauccugguaacuacuguaacauugcauuucaagcaauaugagugcagcucccccccgaacaaccaaguaaugccgugugaaccaacaauaauagaaagaaacauaacagagauaguguauuugacuaacaccaccauagagaaagagauaugccccaaacuaguagaauacagaaauuggucaaagccgcaauguaaaauuacaggauuugcaccuuuuucuaaggacaauucaauucggcuuuccgcugguggagacauuugggugacaagagaaccuuaugugucaugcgauccuggcaaguguuaccaauuugcacuugggcagggaaccacacuaaacaacaggcauucaaaugacacaguacaugauaggaccccuuaucgaacccucuuaaugaaugaguuggguguuccauuucauuuggggaccaagcaagugugcauagcaugguccagcucaaguugucacgauggaaaagcauggcugcauguuugugucacugggcaugauaaaaaugcaacugcuagcuucauuuacaaugggaggcuuguagacaguauugguucaugguccaaaaauauccucaggacccaggagucggaaugcguuuguaucaaugggacuuguacaguaguaaugacugauggaagugcuucagaaagagcugauacuaaaauacuauucauugaagaggggaaaaucguucauauuagcccauugucagggagugcucagcauguagaggagugcuccuguuauccucgauauccuggugucagaugugucugcagagacaacuggaaaggcuccaauaggcccaucguagauauaaaugugaaagauuauagcauuguuuccaguuaugugugcucagggcuuguuggagacacacccagaaaaaacgacagauccagcaguagcuauugccagaauccuaacaaugagaaagggagucauggagugaaaggcugggccuuugacgauggaaaugacguguggaugggaagaacgaucggcgaggaguuacgcucagguuaugaaaccuucaaagucauuggagguugguccacaccuaacuccaaauugcagauaaauaggcaagucauaguugacagcgguaauagguccgguuauucugguauuuucucuguugagggcaaaagcugcaucaaucggugcuuuuauguggaguugauaaggggaaggaaacaggaaacuagagucugguggaccucaaacaguauuguuguguuuuguggcaccucagguacauauggaacaggcucauggccugauggggcggacaucaaucucaugccuauauaa

SEQ ID NO: 46495 - RNA, 1410 nt, Artificial Sequence
  derived and/or modified CDS sequence (wt) from neuraminidase__InfluenzaA__ABB04341
augaauccaaaucaaaagauaauaacaauuggcucugucucucucaccauugcaacaauaugcuuccucaugcagauugccauccugguaacuacuguaacauugcauuucaagcaauaugagugcgacucccccgcgaacaaccaaguaaugccgugugaaccaauaauaauagaaaggaacauaacagagauaguguauuugacuaacaccaccauagagaaagagauaugccccaaauuaguggaauacaggaauuggucaaagccgcaauguaaaauuacaggauuugcaccuuuuucuaaggacaauucaguucggcuuucugcugguggggacauuugggugacgagagaaccuuaugugucaugcgauccuggcaaguguuaucaauuugcacucgggcaggggaccacacuagacaacaaacauucaaaugacacaauacaugauagaaccccucaucgaacccuauugaugaaugaguugggugucccauuucauuugggaaccaggcaaguguguauagcaugguccagcucaaguugucacgauggaaaagcauggcugcauguuugugucacuggguaugauaaaaaugcaacugcuagcuucauuuacgaugggaggcuuguagacaguauugguucauggucucaaaauauccucaggacccaggagucggaaugcguuuguaucaaugggacuuguacaguaguaaugacugauggaagugcuucaggaagagcugauacuaaaauacuauucauugaagaggggaaaauuguucauauuagcccauugucaggaagugcucagcauguagaggaguguuccuguuauccucgauauccuggugucagauguaucugcagagacaacuggaaaggcucuaauaggcccgucguagauauaaaugugaaagauuauagcauugauuccaguuaugugugcucagggcuuguuggcgacacacccagaaaaaacgacagaucuagcaauagcuauugccggaauccuaacaaugagaaagggaaucacggagugaaaggcugggccuuugacgauggaaaugacguguggaugggaagaacgaucagcgaggauucacgcucagguuaugaaaccuucaaagucauuggugguugguccacaccuaauuccaaauugcagauaaauaggcaagucauaguugacagcgauaauaggucagguuauucugguauuuucucuguugagggcaaaagcugcaucaauaggugcuuuuauguggaguugauaaggggaagggaacaggaaacuagaguaugguggaccucaaacaguauuguuguguuuuguggcacuucagguaccuaugggacaggcucauggccugauggggcggacaucaaucucaugccuauauaa

SEQ ID NO: 46496 - RNA, 1410 nt, Artificial Sequence
  derived and/or modified CDS sequence (wt) from neuraminidase__InfluenzaA__ABB04352
augaauccaaaucaaaagauaauaacaauuggcucuguuucucucaccauugcaacaauaugcuuccuuaugcaaauugccauccugguaacuacuguaacauugcauuucaagcaauaugagugcagcucccccccaaacaaccaaguaaugccgugugaaccaauaauaauagaaagaaacauaacagagauaguguauuugacuaacaccaccauagagaaagagauaugccccaaacuaguagaauacagaaauuggucaaagccgcaauguaaaauuacaggauuugcaccuuuuucuaaggacaauucaauucggcuuuccgcugguggagacauuugggugacgagagaaccuuaugugucaugcgauccuggcaaguguuaucaauuugcacuugggcagggaaccacacuaaacaacaagcauucaaaugacacaguacaugauaggaccccuuaucgaacccucuugaugaaugaguuggguguuccauuucauuugggaaccaaacaagugugcauagcaugguccagcucaaguugucacgauggaaaagcauggcugcauguuugugucacugggcaugauaaaaaugcaacugcuagcuucauuuacgaugggaggcuuguagacaguauugguucaugguccaaaaauauccucaggacccaggagucggaaugcguuuguaucaaugggacuuguacaguaguaaugacugauggaagugcuucagaaagagcugauacuaaaauacuauucauugaagaggggaaaaucguucauauuagcccauugucaggaagugcucagcauguagaggaguguuccuguuauccucgauauccuggugucagaugugucugcagagacaacuggaaaggcuccaauaggcccaucguagauauaaaugugaaagauuauagcauuguuuccaguuaugugugcucagggcuuguuggcgacacacccagaaaaaacgacagauccagcaguagcuauugccggaauccuaacaaugagaaagggagucauggagugaaaggcugggccuuugacgauggaaaugacguguggaugggaagaacgaucggcgaggaguuacgcucagguuaugaaaccuucaaagucauuggugguugguccacaccuaacuccaaauugcagauaaauaggcaagucauaguugacagcgguaauagguccgguuauucugguauuuucucuguugagggcaaaagcugcaucaauaggugcuuuuauguggaguugauaaggggaagggaacaggaaacuagagucugguggaccucaaacaguauuguuguguuuuguggcaccucagguacauauggaacaggcucauggccugauggagcggacaucaaucucaugccuauauaa

SEQ ID NO: 46497 - RNA, 1410 nt, Artificial Sequence
  derived and/or modified CDS sequence (wt) from neuraminidase__InfluenzaA__ABB04374
augaauccaaaucaaaagauaauaacaauuggcucugucucucucaccauugcaacaguaugcuuccucaugcagauugccauccugguaacuacuguaacauugcauuucaagcaauaugagugcgacucccccgcgaauaaccaaguaaugccgugugaaccaauaauaauagaaaggaacauaacagagauaguguauuugacuaacaccaccauagagaaagagauaugccccaaauuaguggaauacagaaauuggucaaagccgcaauguaaaauuacaggauuugcaccuuuuucuaaggacaauucaauucggcuuucugcugguggggacauuugggugacgagagaaccuuaugugucaugcgauccuggcaaguguuaucaauuugcacucgggcaggggaccacacuagacaacaaacauucaaaugacacaauacaugauagaaucccucaucgaacccuauugaugaaugaguuggguguuccauuucauuuaggaaccaggcaaguguguauagcaugguccagcucaaguugucacgauggaaaagcauggcugcauguuugugucacuggggaugaugaaaaugcaacugcuagcuucauuuacgaugggaggcuuguggacaguauugguucauggucucaaaauauccucaggacccaggagucggaaugcguuuguaucaaugggacuuguacaguaguaaugacugauggaagugcuucaggaagagcugauacuagaauacuauucauugaagaggggaaaauuguccauauuagcccauugucaggaagugcucagcauguagaggaguguuccuguuacccucgauauccuggcgucagauguaucugcagagacaacuggaaaggcucuaauaggcccgucguagauauaaaugugaaagauuauagcauugauucccguuaugugugcucagggcuuguuggcgacacacccaggaacaaugacaaaucuagcaauagcaauugcaggaauccuaacaaugauaaagggaaucauggagugaaaggcugggccuuugacgauggaaaugacguguggaugggaagaacgaucagcaaggauucacgcucagguuaugaaaccuucaaagucauuggugguugguccacaccuaauuccaaaucgcagauaaauaggcaggucauaguugacagcgauaauaggucagguuauucugguauuuucucuguugagggcaaaagcugcaucaauagaugcuuuuacguggaguugauaaggggaagggaacaggagacuaaaguaugguggaccucaaacaguauuguuguguuuuguggcacuucagguaccuaugggacaggcucauggccugauggggcggauaucaaucucaugccuauauaa

SEQ ID NO: 46498 - RNA, 1410 nt, Artificial Sequence
  derived and/or modified CDS sequence (wt) from neuraminidase__InfluenzaA__ABB04931
augaauccaaaucaaaagauaauaacaauuggcucugucucucucaccauugcaacaauaugcuuccucaugcagauugccauccugguaacuacuguaacauugcauuucaagcaauaugagugcgacucccccgcgaacaaccaaguaaugccgugugaaccaauaauaauagaaaggaacauaacagagauaguguauuugacuaacaccaccauagaaaaagagauaugccccaaauuaguggaauacaggaauuggucaaagccacaauguaaaauuacaggauuugcaccuuucucuaaggacaauucaauucggcuuucugcugguggggacauuugggugacgagagaaccuuaugugucaugcgauccuggcaaauguuaucaauuugcacucgggcaggggaccacacuagacaacaaacauucaaaugacacaauacaugauagaaccccucaucgaacccuauugaugaaugaguuggguguuccauuucacuugggaaccaggcaaguguguauagcaugguccagcucaaguugucacgauggaaaagcauggcugcauguuugugucacuggguaugauaaaaaugcaacugcuagcuucauuuacgaugggaggcuuguagacagcauugguucauggucucaaaauauccucaggacccaggagucggaauguguuuguaucaaugggacuuguacaguaguaaugacugauggaagugcuucaggaagagcugauacuaaaauacuauucauugaagaggggaaaauuguucauauuagcccauugucaggaagugcucagcauguagaggaguguuccuguuauccucgauauccuggugucagauguaucugcagagacaacuggaaaggcucuaauaggccagucguagauauaaaugugaaagauuauagcauugauuccaguuaugugugcucagggcuuguuggcgacacacccagaaacaacgacagaucuagcaguagcuauugccggaauccuaacaaugaaaaagggaaacacggagugaaaggaugggccuuugacgauggaaaugacguguggaugggaagaacgaucagcgaggauucacgcucagguuaugaaaccuucaaagucauuggugguugguccacaccuaauuccaaauugcagauaaauaggcaagucauaguugacagcgauaauaggucagguuauucugguauuuucucuguugagggcaaaagcugcaucaauaggugcuuuuauguggaguugauaaggggaagggaacaggaaacuagaguaugguggaccucaaacaguauuguuguguuuuguggcacuucagguaccuaugggacaggcucauggccugauggggcggacaucaaucucaugccuauauaa

SEQ ID NO: 46499 - RNA, 1410 nt, Artificial Sequence
  derived and/or modified CDS sequence (wt) from neuraminidase__InfluenzaA__ABB04942
augaauccaaaucaaaagauaauaacaauuggcucuguuucucucaccauugcaacaauaugcuuccuuaugcaaauugccauccugguaacuacuguaacauugcauuucaagcaauaugagugcagcucccccccaaacaaccaaguaaugccgugugaaccaauaauaauagaaagaaacauaacagagauaguguauuugacuaacaccaccauagagaaagagauaugccccaaacuaguggaauacagaaauuggucaaagccgcaauguaaaauuacaggauuugcaccuuuuucuaaggacaauucaauucggcuuuccgcugguggggacauuugggugacgagagaaccuuaugugucaugcgauccuggcaaguguuaucaauuugcacucgggcagggaaccacacuaaacaacaagcauucaaaugacacaauacaugauaggaccccuuaucgaacccuauugaugaaugaguuggguguuccauuucauuugggaaccaagcaagugugcauagcaugguccagcucaaguugucacgauggaaaagcauggcugcauguuugugucacugggcaugauaaaaaugcaacugcuagcuucauuuacgaugggaggcuuguagacaguauugguucaugguccaaaaauauccucaggacccaggagucggaaugcguuuguaucaaugggacuuguacaguaguaaugacugauggaagugcuucagaaagagcugauacuaaaauacuauucauugaagaggggaaaaucguucauauuagcccauugucaggaagugcucagcauguagaggaguguuccuguuauccucgauauccuggugucagaugugucugcagagacaacuggaaaggcuccaauaggcccaucguagauauaaaugugaaagauuauagcauuguuuccaguuaugugugcucagggcuuguuggcgacacacccagaaaaaacgacagauccagcaguagcuauugccggaauccuaacaaugagaaagggaaucauggagugaaaggcugggccuuugacgauggaaaugacguguggaugggaagaacgauuggcgaggaguuacgcucagguuaugaaaccuucaaagucauuggugguugguccacaccuaacuccaaauugcagauaaauaggcaagucauaguugacagcgauaauagguccgguuauucugguauuuucucuguugagggcaaaagcugcaucaauaggugcuuuuauguggaguugauaaggggaagggaacaggaaacuagagucugguggaccucaaacaguauuguuguguuuuguggcaccucagguacauauggaacaggcucauggccugauggagcggacaucaaucucaugccuauauaa

SEQ ID NO: 46500 - RNA, 1410 nt, Artificial Sequence
  derived and/or modified CDS sequence (wt) from neuraminidase__InfluenzaA__ABB04953
augaauccaaaucaaaagauaauaacaauuggcucuguuucucucaccauugcaacaauaugcuuccuuaugcaaauugccauccugguaacuacuguaacauugcauuucaagcaauaugagugcagcucccccccaaacaaccaaguaaugccgugugaaccaauaauaaucgaaagaaacauaacagagauaguguauuugacuaacaccaccauagagaaagagauaugccccaaacuaguagaauacagaaauuggucaaagccgcaauguaaaauuacaggauuugcaccuuuuucuaaggacaauucaauucggcuuuccgcugguggagacauuugggugacgagagaaccuuaugugucaugcgauccuggcaaguguuaucaauuugcacuugggcagggaaccacacuaaacaacaagcauucaaaugacacaguacaugauaggaccccuuaucgaacccucuugaugaaugaguuggguguuccauuucauuugggaaccaagcaagugugcauagcaugguccagcucaaguugucacgauggaaaagcauggcugcauguuugugucacugggcaugauaaaaaugcaacugcuagcuucauuuacgaugggaggcuuguagacaguauugguucaugguccaaaaauauccucaggacccaggagucggaaugcguuuguaucaaugggacuuguacaguaguaaugacugauggaagugcuucagaaagagcugauacuaaaauacuauucauugaagaggggaaaaucguucauauuagcccauugucaggaagugcucagcauguagaggaguguuccuguuauccucgauauccuggugucagaugugucugcagagacaacuggaaaggcuccaauaggcccaucguagauauaaaugugaaagauuauagcauuguuuccaguuaugugugcucagggcuuguuggcgacacacccagaaaaaacgacagauccagcaguagcuauugccggaauccuaacaaugagaaagggagucauggagugaaaggcugggccuuugacgauggaaaugacguguggaugggaagaacgaucggcgaggaguuacgcucagguuaugaaaccuucaaagucauuggugguugguccacaccuaacuccaaauugcagauaaauaggcaagucauaguugacagcgguaauagguccgguuauucugguauuuucucuguugagggcaaaagcugcaucaauaggugcuuuuauguggaguugauaaggggaagggaacaggaaacuagagucugguggaccucaaacaguauuguuguguuuuguggcaccucagguacauauggaacaggcucauggccugauggagcggacaucaaucucaugccuauauaa

SEQ ID NO: 46501 - RNA, 1410 nt, Artificial Sequence; identical to SEQ ID NO: 46397
  derived and/or modified CDS sequence (wt) from neuraminidase__InfluenzaA__ABB04975

SEQ ID NO: 46502 - RNA, 1410 nt, Artificial Sequence
  derived and/or modified CDS sequence (wt) from neuraminidase__InfluenzaA__ABB04986
augaauccaaaucaaaagauaauaacaauuggcucuguuucucucaccauugccacaauaugcuuccuuaugcaaauugccauccugguaacuacuguaacauugcauuucaagcaguaugaaugcaacucccccccaaacaaccaaguaaugcugugugaaccaacaauaauagaaagaaacauaacagagauaguguaucugaccaacaccaccauagagaaggaaauaugccccaaacuagcagaauacagaaauuggucaaagccgcaauguaacauuacaggauuugcaccuuuuucuaaggacaauucgauccggcuuuccgcugguggggacaucugggugacaagagaaccuuaugugucaugcgauccugacaaguguuaucaauuugcccuugggcagggaacaacacuaaacaacgggcauucaaaugacacaguacaugauaggaccccuuaccggacccuauugaugaaugaauuggguguuccauuucauuugggaaccaggcaagugugcauagcaugguccagcucaaguugucacgauggaaaagcauggcugcauguuuguguaacuggggaugaugaaaaugcaacugcuagcuucauuuacaaugggaggcuuguagauaguauugguucaugguccaaaaaaauacucagaacccaggagucggaaugcguuuguaucaauggaacuuguacaguaguaaugacugaugggagcgcuucaggaaaagcugauacuaaaauacuauucauugaggaggggaaaaucguucauauuagcacauugucaggaagugcucagcaugucgaggagugcuccuguuauccucgauauccuggugucagaugugucugcagagacaacuggaaaggcuccaauaggcccaucguagauauaaauguaaaggaucauagcauuguuuccaguuaugugugcucaggacuuguuggagacacacccagaaaaaacgacagcuucagcaguagccauugccuagacccuaacaaugaggaagguggucauggagugaaaggcugggccuuugaugauggaaaugacguguggaugggaagaacgaucagcgagaaguuacgcucagguuaugaaaccuucaaagucaucgaaggcugguccaaaccuaacuccaaauuacagauaaauaggcaagucauaguugaaagagguaacagguccgguuauucugguauuuucuccguugaaggcaaaagcugcaucaaucggugcuuuuauguggaguugauaaggggaaggaaagaggaaacugaagucugguggaccucaaacaguauuguuguguuuuguggcaccucagguacauauggaacaggcucauggccugauggggcggauaucaaucucaugccuauauaa

SEQ ID NO: 46503 - RNA, 1410 nt, Artificial Sequence
  derived and/or modified CDS sequence (wt) from neuraminidase__InfluenzaA__ABB04997
augaauccaaaucaaaagauaauaacgauuggcucuguuucucucaccauugccacaauaugcuuccuuaugcaaauugccauccugguaacuacuguaacauugcauuucaagcaauaugaaugcaacucccccccaaacaaccaagugaugcugugugaaccaacaauaauagaaagaaacauaacagagauagugcaucugaccaacaccaccauagagaaggaaauaugccccaaacuagcagaauacagaaauuggucaaagccgcaauguaacauuacaggauuugcaccuuuuucuaaggacaauucgauucggcuuuccgcugguggggacaucugggugacaagagaaccuuaugugucaugcgauccugacaaguguuaucaauuugcccuuggacagggaacaacacuaaacaacggacauucaaaugacacaguacaugauaggaccccuuaucggacccuauugaugaaugaguuggguguuccauuucauuugggaaccaagcaagugugcauagcaugguccagcucaaguugucacgauggaaaagcauggcugcauguuuguguaacgggggaugaugaaaaugcaacugcuagcuucauuuacaaugggaggcuuguagauaguauugguucaugguccaaaaaaauccucaggacccaggagucggaaugcguuuguaucaauggaacuuguacaguaguaaugacugaugggagugcuucaggaaaagcugauacuaaaauacuauucauugaggaggggaaaaucguucauacuagccuauugucaggaagugcucagcaugucgaggagugcuccuguuauccucgauacccuggugucagaugugucugcagagacaacuggaaaggcuccaauaggcccaucguagauauaaauguaaaggauuauagcauuguuuccaguuaugugugcucaggacuuguuggagacacacccagaaaaaacgacagcuccagcaguagccauugcuuggauccuaacaaugaggaagguggucauggagugaaaggcugggccuuugaugauggaaaugacguguggaugggaagaacgaucagcgagaaguuacgcucaggauaugaaaccuucaaagucauugaaggcugguccaaaccuaacuccaaauugcagauaaauaggcaagucauaguugacagagguaauagguccgguuauucugguauuuucucuguugaaggcaaaagcugcaucaaucggugcuuuuauguggaguugauaaggggaaggaaacaggaaacugaagucuuguggaccucaaacaguauuguuguguuuuguggcaccucagguacauauggaacaggcucauggccugauggggcggacaucaaucucaagccuauauaa

SEQ ID NO: 46504 - RNA, 1410 nt, Artificial Sequence
  derived and/or modified CDS sequence (wt) from neuraminidase__InfluenzaA__ABB05008
augaauccaaaucaaaagauaauaacgauuggcucuguuucucucaccauugcuacaauaugcuuccuuaugcaaauugccauccugguaacuacuguaacauugcauuucaagcaauaugaaugcaacucccccccaaacaaccaagugaugcugugugaaccaacaauaauagaaagaaacauaacagagauaguauaucugaccaacaccaccauagagaaggaaauaugccccaaacuagcagaauacagaaauuggucaaagccgcaauguaacauuacaggauuugcaccuuuuucuaaggacaauucgauucggcuuuccgcugguggggacaucugggugacaagagaaccuuaugugucaugcgacccugacaaguguuaucaauuugcccuuggacaaggaacaacacuaaacaacgggcauucaaaugacacaguacaugauaggaccccuuaucgaacccuauugaugaaugaguuggguguuccauuucauuugggaaccaaacaagugugcauagcaugguccagcucaaguugucacgauggaaaagcauggcugcauguuuguguaacgggggaugaugaaaaugcaacagcuagcuucauuuacaaugggaggcuuguagauaguauugguucaugguccaaaaaaauccucaggacccaggagucggaaugcguuuguaucaauggaacuuguacaguaguaaugacugaugggagugcuucaggaaaagcugauacuaaaauacuauucauugaggaggggaaaaucguucauacuagcucauugucaggaagugcucagcaugucgaggagugcuccuguuauccucgauauccuggugucagaugugucugcagagacaacuggaaaggcuccaauaggcccaucguagauauaaauguaaaggauuauagcauuguuuccaguuaugugugcucaggacuuguuggagacacacccagaaaaaacgacagcuccagcaguagccauugcuuggauccuaacaaugaggaagguggucauggagugaaaggcugggccuuugaugauggaaaugacguguggaugggaagaacgaucagcgagaaguuacgcucaggauaugaaaccuucaaagucauugaaggcugguccaaaccuaacuccaaauugcagauaaauaggcaagucauaguugacagagguaauagguccgguuauucugguauuuucucuguugaaggcaaaagcugcaucaaucggugcuuuuauguggaguugauaaggggaaggaaacaggaaacugaagucuuguggaccucaaacaguauuguuguguuuuguggcaccucagguacauauggaacaggcucauggccugauggggcggacaucaaucucaugccuauauaa

SEQ ID NO: 46505 - RNA, 1410 nt, Artificial Sequence; identical to SEQ ID NO: 46233
  derived and/or modified CDS sequence (wt) from neuraminidase__InfluenzaA__ABB05186

SEQ ID NO: 46506 - RNA, 1410 nt, Artificial Sequence
  derived and/or modified CDS sequence (wt) from neuraminidase__InfluenzaA__ABB05219
augaauccaaaucaaaagauaauaacgauuggcucuguuucucucaccauugccacaauaugcuuccuuaugcaaauugccauccugguaacuacuguaacauugcauuucaagcaauaugaaugcaacucccccccaaacaaccaagugaugcugugugaaccaacaauaauagaaagaaacauaacagagauaguauaucugaccaacaccaccauagagaaggaaauaugccccaaacuagcagaauacagaaauuggucaaagccgcaauguaacauuacaggauuugcaccuuuuucuaaggacaauucaauucggcuuuccgcugguggggacaucugggugacaagagaaccuuaugugucaugcgauccugacaaguguuaucaauuugcccuuggacagggaacaacacuaaacaacgggcauucaaaugacacaguacaugauaggaccccuuaucgaacccuauugaugaaugaguuggguguuccauuucauuugggaaccaagcaagugugcauagcaugguccagcucaaguugucacgauggaaaagcauggcugcauguuuguguaacgggggaugaugaaaaugcaacugcuagcuucauuuacaaugggaggcuuguagauaguauugguucaugguccaaaaaaauccucaggacccaggagucggaaugcguuuguaucaauggaacuuguacaguaguaaugacugauggaagugcuucaggaaaagcugauacuaaaauacuauucauugaggaggggaaaaucguucauacuagcucauugucaggaagugcucagcaugucgaggagugcuccuguuauccucgauauccuggugucagaugugucugcagagacaacuggaaaggcuccaauaggcccaucguagauauaaauguaaaggauuauagcauuguuuccaguuaugugugcucaggacuuguuggagacacacccagaaaaaacgacagcuccagcaguagccauugcuuggauccuaacaaugaggaagguggucauggagugaaaggcugggccuuugaugauggaaaugacguguggaugggaagaacgaucagcgagaaguuacgcucaggauaugaaaccuucaaagucauugaaggcugguccaaaccuaacuccaaauugcagauaaauaggcaagucauaguugacagagguaauagguccgguuauucugguauuuucucuguugaaggcaaaagcugcaucaaucggugcuuuuauguggaguugauaaggggaaggaaacaggaaacugaagucuuguggaccucaaacaguauuguuguguuuuguggcaccucagguacauauggaacaggcucauggccugauggggcggacaucaaucucaugccuauauaa

SEQ ID NO: 46507 - RNA, 1410 nt, Artificial Sequence
  derived and/or modified CDS sequence (wt) from neuraminidase__InfluenzaA__ABB46395
augaauccaaaucaaaagauaauaacaauuggcucugucucucucaccauugcaacaauaugcuuccucaugcagauugccauccugguaacuacuguaacauugcauuucaagcaauaugagugcgacuccccagcgaacaaacaaguaaugccgugugaaccaauaauaauagaaaggaacauaacagagauaguguauuugacuaacaccaccauagaaaaagagauaugccccaaauuaguggaauacaggaauuggucaaagccacaauguaaaauuacaggauuugcaccuuucucuaaggacaauucaauucggcuuucugcugguggggacauuugggugacgagagaaccuuaugugucaugcgauccuggcaaguguuaucaauuugcacucgggcaggggaccacacuagacaacaaacauucaaaugacacaauacaugauagaaccccucaucgaacccuauugaugaaugaguuggguguuccauuucacuugggaaccaggcaaguguguauagcaugguccagcucaaguugucacgauggaaaagcauggcugcauguuugugucacuggguaugauaaaaaugcaacugcuagcuucauuuacgaugggaggcuuguagacagcauugguucauggucucaaaauauccucaggacccaggagucggaauguguuuguaucaaugggacuuguacaguaguaaugacugauggaagugcuucaggaagagcugauacuaaaauacuauucauugaagaggggaaaauuguucauauuagcccauugucaggaagugcucagcauguagaggaguguuccuguuauccucgauauccuggugucagauguaucugcagagacaacuggaaaggcucuaauaggccagucguagauauaaaugugaaagauuauagcauugauuccaguuaugugugcucagggcuugugggcgacacacccagaaacaacgacagaucuagcaguagcuauugccggaauccuaacaaugaaaaagggacucacggagugaaaggcugggccuuugacgauggaaaugacguguggaugggaagaacgaucagcgaggauucacgcucagguuaugaaaccuucaaagucauuggugguugguccacaccuaauuccaaauugcagauaaauaggcaagucauaguugacagcgauaauaggucagguuauucugguauuuuuucuguugagggcaaaagcugcaucaauaggugcuuuuauguggagcugauaaggggaagggaacaggaaacuagaguaugguggaccucaaacaguauuguuguguuuuguggcacuucagguaccuaugggacaggcucauggccugauggggcggacaucaaucucaugccuauauaa

SEQ ID NO: 46508 - RNA, 1410 nt, Artificial Sequence
  derived and/or modified CDS sequence (wt) from neuraminidase__InfluenzaA__ABB46417
augaauccaaaucaaaagauaauaacgauuggcucuguuucucucacuauugccacaauaugcuuccuuaugcaaauugccauccugguaacuacuguaacauugcauuucaagcaauaugaaugcaacucucucccaaacaaccaaguaaugcugugugaaccaacaauaauagaaagaaacauuacagagauaguguaccugaccaacaccaccauagagaaggaaauaugccccaaacuagcagaauacagaaauuggucaaagccgcaauguaaaauuacaggauuugcaccuuuuucuaaggacaauucaauucggcuuuccgcugguggggacauuugggugacaagagaaccuuaugugucaugcgauccugacaaguguuaucaauuugcccuuggacagggaacaacacuaaacaacaggcauucaaaugacacaguacaugauaggaccccuuaucgaacccuauugaugaaugaguuggguguuccauuucauuugggaaccaagcaagugugcauagcaugguccagcucaaguugucacgauggaaaagcauggcugcauguuuguguaacugggcacgaugaaaaugcaacugcuagcuucauuuacgaugggaggcuuguagauaguauugguucaugguccaaaaaaauccucaggacccaggagucggaaugcguuuguaucaauggaacuuguacaguaguaaugacugaugggagugcuucaggaagagcugauacuaaaauacuauucauugaggaggggaaaaucauucauauuagccaauugucaggaagugcucagcaugucgaggagugcucauguuauccucgauauccuggugucagaugugucugcagagacaacuggaaaggcuccaauaggcccauuguagauauaaauguaaaggauuauagcauuguuuccaguuaugugugcucaggacuuguuggagacacacccagaaaaaacgacagcuccagcaguagccauugccugaauccuaacaaugaggaagggggucauggagugaaaggcugggccuuugaugauggaaaugacguguggaugggaagaacgaucagcgagaaauuccgcucagguuaugaaaccuucaaagucauugaaggcugguccaaaccuaacucuaaauugcagauaaauaggcaagucauaguugacagagauaauagguccgguuauucugguauuuucucuguugaaggcaaaagcugcaucaaucggugcuuuuauguggaguugauaaggggaaggaaacaggaaacugaaguaugguggaccucaaacaguauuguuguguuuuguggcaccucagguacauauggaacaggcucauggccugauggggcggacaucaaucucaugccuauauaa

SEQ ID NO: 46509 - RNA, 1410 nt, Artificial Sequence
  derived and/or modified CDS sequence (wt) from neuraminidase__InfluenzaA__ABB46428
augaauccaaaucaaaagauaauaacaauuggcucuguuucucucacuauugccacaauaugcuuccuuaugcaaauugccauccugguaacuacuguaacauugcauuucaagcaauaugaaugcaacucccccccaaacaaccaaguaaugcugugugaaccaacaauaauagaaagaaacauaacagagauaguguaucugaccaacaccaccauagagaaggaaauaugccccaaacuagcagaauacagaaauuggucaaagccgcaauguaacauuacaggauuugcaccuuuuucuaaggacaauucgauucggcuuuccgcugguggggacaucugggugacaagagaaccuuaugugucaugcgauccugacaaguguuaucaauuugcccuuggacagggaacaacacuaaacaacgggcauucaaaugacacaguacaugauaggaccccuuaucggacccuauugaugaaugaguuggguguuccauuucauuugggaaccaagcaagugugcauagcaugguccagcucaaguugucacgauggaaaagcauggcugcauguuuguguaacuggggaugaugaaaaugcaacugcuagcuucauuuacaaugggaggcuuguagauaguauugguucaugguccaaaaaaauccucaggacccaggagucggaaugcguuuguaucaauggaacuuguacaguaguaaugacugaugggagcgcuucaggaaaagcugauacuaaaauacuauucauugaggaggggaaaaucguucauauuagcccauugucaggaagugcucagcaugucgaggagugcuccuguuauccucgauauccuggugucagaugugucugcagagacaacuggaaaggcuccaauaggcccaucguagauauaaauguaaaggauuauagcauuguuuccaguuaugugugcucaggacuuguuggagacacacccagaaaaaacgacagcuucagcaguagccauugccuagauccuaacaaugaggaagguggucauggagugaaaggcugggccuuugaugauggaaaugacguguggaugggaagaacgaucagcgagaaguuacgcucagguuaugaaaccuucaaagucauugaaggcugguccaaaccuaacuccaaauugcagauaaauaggcaagucauaguugacagagguaacagguccgguuauucugguauuuucuccguugaaggcaaaagcugcaucaaucggugcuuuuauguggaguugauaaggggaaggaaagaggaaacugaagucugguggaccucaaacaguauuguuguguuuuguggcaccucagguacauauggaacaggcucauggccugauggggcggacaucaaucucaugccuauauaa

SEQ ID NO: 46510 - RNA, 1410 nt, Artificial Sequence
  derived and/or modified CDS sequence (wt) from neuraminidase__InfluenzaA__ABB46439
augaauccaaaucaaaagauaauaacgauuggcucuguuucucucaccauuuccacaauaugcuucuucaugcaaauugccaucuugauaacuacuguaacauugcauuucaagcaauaugaauucaacucccccccaaacaaccaagugaugcugugugaaccaacaauaauagaaagaaacauaacagagauaguguaucugaccaacaccaccauagagaaggaaauaugccccaaacuagcagaauacagaaauuggucaaagccgcaaugugacauuacaggauuugcaccuuuuucuaaggacaauucgauuaggcuuucugcugguggggacaucugggugacaagagaaccuuaugugucaugcgauccugacaaguguuaucaauuugcccuuggacagggaacaacacuaaacaacgugcauucaaaugacacaguacaugauaggaccccuuaucggacccuauugaugaaugaguuagguguuccauuucaucuggggaccaagcaagugugcauagcaugguccagcucaaguugucacgauggaaaagcauggcugcauguuuguguaacgggggaugauaaaaaugcaacugcuagcuucauuuacaaugggaggcuuguagauaguauuguuucaugguccaaagaaauccucagaacccaggagucagaaugcguuuguaucaauggagcuuguacaguaguaaugacugaugggagugcuucaggaaaagcugauacuaaaauacuauucauugaggagaggaggaucguucauacuagcacauugucaggaagugcucagcaugucgaggagugcuccugcuauccucgauauccuggugucagaugugucugcagagacaacuggaaaggguccaauaggcccaucguagauauaaacauaaaggauuauagcauuguuuccaguuaugugugcucaggacuuguuggagacacacccagaaaaaacgacagcuccagcaguagcaauugcuuggauccuaacaaugaagaagguggucauggagugaaaggcugggccuuugaugauggaaaugacguguggaugggaagaacgaucagcgagaaguuacgcucaggauaugaaaccuucaaagucauugaaggcugguccaacccuaauuccaaauugcagauaaauaggcaagucauaguugacagagguaauagguccgguuauucugguauuuucucuguugaaggcaaaagcugcaucaaucggugcuuuuauguggaguugauaaggggaagaaaagaggaaacugaagucuuguggaccucaaacaguauuguuguguuuuguggcaccucgggugcauauggaacaggcucauggccugauggggcggacaucaaucucaugccuauauaa

SEQ ID NO: 46511 - RNA, 1410 nt, Artificial Sequence; identical to SEQ ID NO: 46358
  derived and/or modified CDS sequence (wt) from neuraminidase__InfluenzaA__ABB46450

SEQ ID NO: 46512 - RNA, 1410 nt, Artificial Sequence
  derived and/or modified CDS sequence (wt) from neuraminidase__InfluenzaA__ABB46461
augaauccaaaucaaaagauaauaacgauuggcucuguuucucucaccauuuccacaauaugcuucuucaugcaaauugccaucuugauaacuacuguaacauugcauuucaagcaauaugaauucaacucccccccaaacaaccaagugaugcugugugaaccaacaauaauagaaagaaacauaacagagauaguguaucugaccaacaccaccauagagaaggaaauaugccccaaacuagcagaauacagaaauuggucaaagccgcaaugugacauuacaggauuugcaccuuuuucuaaggacaauucgauuaggcuuuccgcugguggggacaucugggugacaagagaaccuuaugugucaugcgauccugacaaguguuaucaauuugcccuuggacagggaacaacacuaaacaacgugcauucaaaugacacaguacaugauaggaccccuuaucggacccuauugaugaaugaguuagguguuccauuucaucuggggaccaagcaagugugcauagcaugguccagcucaaguugucacgauggaaaagcauggcugcauguuuguguaacgggggaugauaaaaaugcaacugcuagcuucauuuacaaugggaggcuuguagauaguauuguuucaugguccaaagaaauccucaggacccaggagucagaaugcguuuguaucaauggaacuuguacaguaguaaugacugaugggagugcuucaggaaaagcugauacuaaaauacuauucauugaggaggggaaaaucguucauacuagcacauugucaggaagugcucagcaugucgaggaaugcuccugcuauccucgauauccuggugucagaugugucugcagagacaacuggaaaggcuccaauaggcccaucguagauauaaacauaaaggauuauagcauuguuuccaguuaugugugcucaggacuuguuggagacacacccagaaaaaacgacagcuccagcaguagccauugcuuggauccuaacaaugaagaagguggucauggagugaaagguugggccuuugaugauggaaaugacguguggaugggaagaacgaucagcgagaaguuacgcucaggauaugaaaccuucaaagucauugaaggcugguccaacccuaauuccaaauugcagauaaauaggcaagucauaguugacagagguaauagguccgguuauucugguauuuucucuguugaaggcaaaagcugcaucaaucggugcuuuuauguggaguugauaaggggaagaaaagaggaaacugaagucuuguggaccucaaacaguauuguuguguuuuguggcaccucagguacauauggaacaggcucauggccugauggggcggacaucaaucucaugccuauauaa

SEQ ID NO: 46513 - RNA, 1410 nt, Artificial Sequence
  derived and/or modified CDS sequence (wt) from neuraminidase__InfluenzaA__ABB46550
augaauccaaaucaaaagauaauaacaauuggcucugucucucucaccauugcaacaauaugcuuccuuaugcaaauugccauccugguaacuacuguaacauugcauuucaagcaauaugagugcagcucccccccaaacaaccaaguaaugccgugugaaccaauaauaauagaaaggaacauaacagagauaguguauuugacuaacaccaccauagagaaagagauaugccccaaauuaguggaauacagaaauuggucaaagccgcaauguaaaauuacaggauuugcaccuuuuucuaaggacaauucaauucggcuuucugcugguggggacauuugggugacgagagaaccuuaugugucaugugauccuggcaaguguuaucaauuugcacucgggcaggggaccacacuagacaacaagcauucaaaugacacaauacaugauaggaccccucaucgaacccuauugaugaaugaguuggguguuccauuucauuugggaaccaggcaaguguguauagcaugguccagcucaaguugucacgauggaaaagcauggcugcauguuugugucacuggguaugauaaaaaugcaacugcuagcuucauuuacgaugggaggcuuguagacaguauugguucaugguccaaaaauauccucaggacccaggagucggaaugcguuugugucaaugggacuuguacaguaguaaugacugauggaagugcuucagaaagagcugauacuaaaauacuguucauugaagaggggaaaaucguucauauuagcccauugucaggaagugcucagcauguagaggaguguuccuguuauccucgauauccuggugucagaugugucugcagagacaacuggaaaggcuccaauaggcccgucguagauauaaaugugaaagauuauagcauuguuuccaguuaugugugcucagggcuuguuggcgacacacccagaaaaaacgacagaucuagcaguagcuauugccggaauccuaacaaugagaaagggaaucauggagugaaaggcugggccuuugacgauggaaaugacguguggaugggaagaacgaucagcgaggagucacgcuccgguuaugaaaccuucaaagucauuggugguugguccacaccuaauuccaaaucgcagauaaauaggcaagucauaguugacagcgguaauagguccgguuauucugguauuuucucuguugagggcaaaagcugcaucaauaggugcuuuuauguggaguugauaaggggaagggaacaggaaacuagagucugguggaccucaaacaguauuguuguguuuuguggcacuucagguaccuauggaacaggcucauggccugauggagcggacaucaaucucaugccuauauaa

SEQ ID NO: 46514 - RNA, 1410 nt, Artificial Sequence
  derived and/or modified CDS sequence (wt) from neuraminidase__InfluenzaA__ABB51955
augaauccaaaucaaaagauaauaacgauuggcucuguuucucucaccauuuccacaauaugcuucuuuaugcaaauugccauccugguaacuacuguaacauugcauuucaagcaauaugaaugcaacucccccccaaacaaccaagugaugcugugugaaccaacaauaauagaaagaaacauaacagagauaguguaucugaccaacaccaccauagagaaggaaauaugccccaaacuagcagaauacagaaauuggucaaagccgcaauguaacauuacaggauuugcaccuuuuucuaaggacaauucgauucggcuuuccgcugguggggacaucugggugacaagagaaccuuaugugucaugcgauccugacaaauguuaucaauuugcccuuggacagggaacaacacuaaacaacgggcauucaaaugacauaguacaugauaggaccccuuaucggacccuauugaugaaugaguuggguguuccauuucaucuggggaccaagcaagugugcauagcaugguccagcucaaguugucaugauggaaaagcauggcugcauguuuguguaacgggggaugaugaaaaugcaacugcuagcuucauuuacaaugggaggcuuguagauaguauugguucaugguccaaaaaauucuucaggacucaggagucagaaugcguuuguauccauggaacuuguacaguaguaaugacugaugggagugcuucaagaaaagccgauacuaaaauacuauucaucgaggaggggaaaaucguucauaccagcacauugucaggaagugcucagcaugucgaggagugcuccuguuauccucgauauccuggugucagaugugucugcagagacaacuggaaaggcuccaauaggcccaucguagauauaaauauaaaggauuauagcauuguuuccaguuaugugugcucaggacuuguuggagacacacccagaaaaaacgacagcuccagcaguagccauugcuuggauccuaacaaugaggaagguggucauggagugaaaggcugggccuuugaugauggaaaugacguguggaugggaagaacgaucagcgagaaguuacgcucaggauaugaaaccuucaaagucauugaaggcugguccaaaccuaacuccaaauugcagauaaauaggcaagucauaguugacagagguaauagguccgguuauucugguauuuucucuguugaaggcaaaagcugcaucaaucggugcuuuuauguggaguugauaaggggaaggaaacaggaaacugaagucuuguggaccucaaacaguauuguuguguuuuguggcacuucagguacauauggaacaggcucauggccugauggggcggacaucaaucucaugccuauauaa

SEQ ID NO: 46515 - RNA, 1413 nt, Artificial Sequence
  derived and/or modified CDS sequence (wt) from neuraminidase__InfluenzaA__ABB51956
augaauccaaaucaaaaaauaauaaccauuggaucaaucaguauagcaaucggaauaauuagccuaauguugcaaauaggaaacauuauuucaauaugggcuagucacucaauccaaacuggaagucaaaaucacacuggaguaugcaaccaaagaaucaucacauaugaaaacagcaccugggugaaucacacauauguuaauauuaacaacaccaauguuauugcuggaaaggacaaaacuucagugacaguggccggcaauucaucucuuuguucuaucaguggaugggcuauauacacaaaagacaacagcauaagaauugguuccaaaggagauguuuuugucauaagagagccuuucauaucauguucucacuuggaaugcagaaccuuuuuucugacccaaggugcucuauuaaaugacaaacauucaaaugggaccguuaaggacagaagccccuauagggcuuuaaugagcuguccucugggugaagcuccguccccauacaauucaaaguuugaaucaguugcuuggucagcaagcgcaugccaugauggcaugggcugguuaacaaucggaauuucugguccagacaauggagcaguggcuguacuaaaauacaacggcauaauaacugaaaccauaaaaaguuggaaaaagccaauauuaggaacccaagagucugaaugggucugugugaacgggucauguuucaccauaaugaccgaugacccgaguuaugaggccgccucguacaaaaucuucaagaucgaaagggaaaggguuacuaaaucaauagaguugaaugcacccaauuuucauuaugaggaauguuccuguuacccagacacuggcacagugauguguguaugcagggacaacuggcaugguucaaaucgacccuggguguccuuuaaucaaaaccuggauuaucaaauaggauacaucugcagugggguguucggugacaauccgcgucccaaagauggagagggcagcuguaauccagugacuguugauggagcaaacggaguaaagggguuuucauacaaauaugguaaugguguuuggauaggaaggacuaaaaguaacagacuuagaaagggguuugagaugauuugggauccuaauggauggacagauaccgacagugauuucucagugaaacaggauguuguggcaauaacugauuggucuggguacagcggaaguuucguucaacauccugaguuaacaggauuggacuguauaagaccuugcuucuggguugaguuagucagaggacugccaaaagaaaauacaacaaucuggacuagugggagcagcauuucuuuuuguggcguaaauagugauacugcaaacuggucuuggccagacggugcugaguugccguuuaccauugacaaguaa

SEQ ID NO: 46516 - RNA, 1410 nt, Artificial Sequence
  derived and/or modified CDS sequence (wt) from neuraminidase__InfluenzaA__ABB51957
augaauccaaaucaaaagauaauaacaauuggcucuguuucucucaccauugccacaauaugcuuccuuaugcaaauugccauccugguaacuacuguaacauugcauuucaagcagcaugaaugcaacucccccccaaacaaccaaguaaugcugugugaaccaacaauaauagaaagaaacauaacagagauaguguaucugaccaacaccaccauagagaaggaaauaugccccaaacuagcagaauacagaaauuggucaaagccgcaauguaacauuacaggauuugcaccuuuuucuaaggacaauucgauucggcuuuccgcugguggggacaucugggugacaagagaaccuuaugugucaugcgauccugacaaguguuaucaauuugcccuugggcagggaacaacacuaaacaacgggcauucaaaugacacaguacgugauaggaccccuuaccggacccuauugaugaaugaauuggguguuccauuucauuugggaaccaggcaagugugcauagcaugguccagcucaaguugucacgauggaaaagcauggcugcauguuuguguaacuggggaugauaaaaaugcaacugcuagcuucauuuacaaugggaggcuuguagauaguauugguucaugguccaaaaaaauauucagaacccagaaguucgaaugcguuuguauccauuggaccuguacaguaguuaugacugaugggagcgcuucaggaaaagcugauacuaaaauacuauucauugaggaggggaaaaucguucauauuagcacauugucaggaagugcucagcaugucgaggagugcuccuguuauccucgauauccuggugucagaugugucugcagagacaacuggaaaggcuccaauaggcccauuguagauauaaauguaaaggauuauagcauuguuuccaguuaugugugcucaggacuuguuggagacacacccagaaaaaacgacagcuucagcaguagccauugccuagauccuaacaaugaggaagguggucauggagugaaaggcugggccuuugaugauggaaaugacguguggaugggaagaacgaucagcgagaaguuacgcucagguuaugaaaccuucaaagucaucgaaggcugguccaaaccuaacuccaaauuacagauaaauaggcaaguuauaguugaaagagguaacagguccgguuauucugguauuuucuccguugaaggcaaaagcugcaucaaucggugcuuuuauguggaguugauaaggggaaggaaagaggaaacugaagucugguggaccucaaacaguauuguuguguuuuguggcaccucagguacauauggaacaggcucauggccugauggagcggacaucaaucucaugccuauauaa

SEQ ID NO: 46517 - RNA, 1413 nt, Artificial Sequence
  derived and/or modified CDS sequence (wt) from neuraminidase__InfluenzaA__ABB51958
augaauccaaaucaaaaaauaauaaccauuggaucaaucaguauagcaaucggaauaauuagccuaauguugcaaauaggaaacauuauuucaauaugggcuagucacucaauccaaacuggaagucaaaaccacacuggaguaugcaaccaaagaaucaucacauaugaaaacagcaccugggugaaucacacauauguuaguauuaacaacaccaauguuauugcuggaaaggacaaaacuucagugacauuggccggcaauucaucucuuuguccuauccguggaugggcuauauacacaaaaggcaacagcauaagaauugguuccaaaggagauguuuuugucauaagagagccuuucauaucauguucucacuuggaaugcagaaccuuuuuucugacccaaggugcucuauuaaaugacaaacauucaaaugggaccguuaaggacagaagccccuauagggcuuuaaugagcuguccucuaggugaagcuccguccccauacaauucaaaguuugaaucaguugcuuggucggcaagcgcaugccaugauggcaugggcugguuaacaaucggaauuucugguccagacaauggagcaguggcuguacuaaaauacaacggcauaauaacugaaaccauaaaaaguuggaaaaagcaaauauuaagaacacaggagucugaaugugucugugugaacgggucauguuucaccauaaugaccgauggcccgaguaauggggccgccucguacaaaaucuucaagaucgaaaagggaaagguuacuaaaucaauagaguugaaugcacccaauuuucauuaugaggaauguucccguuacccagacacuggcacagugauguguguaugcagggacaacuggcaugguucaaaucgacccugggugucuuuuaaucaaaaccuggauuaucaaauaggauacaucugcagugggguguucggugacaauccgcgucccaaagauggagagggcagcuguaauccagugacuguugauggagcaaacggaguaaagggguuuucauacaaauaugguaaugguguugggauaggaaggacuauaaguaacagacuuagaaagggguuugagaugauuugggauccuaauggauggacagauaccgacagugauuucucagugaaacaggauguuguggcaauaacugauuggucuggguacagcggaaguuucguucaacauccugaguuaacaggauuggacuguauaagaccuugcuucuggguugaguuagucagaggacugccaaaagaaaauacaacaaucuggacuagugggagcagcauuucuuuuuguggcguaaauagugauacugcaaacuggucuuggccagacggugcugaguugccguuuaccauugacaaguaa

SEQ ID NO: 46518 - RNA, 1410 nt, Artificial Sequence
  derived and/or modified CDS sequence (wt) from neuraminidase__InfluenzaA__ABB51959
augaauccaaaucaaaagauaauaacgauuggcucuguuucucucaccauuuccacaauaugcuucuuuaugcaaauugccaucuugauaacuacuguaacauugcauuucaagcaauaugaauucaacucccccccaaacaaccaagugaugcugugugaaccaacaauaauagaaaggaacauaacagagauaguguaucugaccaacaccaccauagagaaggaaauaugccccaaacuagcagaauacagaaauuggucaaagccgcaaugugacauuacaggauuugcaccuuuuucuaaggacaauucgauuaggcuuuccgcugguggggacaucugggugacaagagaaccuuaugugucaugcgauccugacaaauguuaucaauuugcccuuggacagggaacaacacuaaacaacgugcauucaaaugacacaguacaugguaggaccccuuaucggacccuauugaugaaugaguuagguguuccauuucaucuggggacuaagcaagugugcauagcaugguccagcucaaguugucacgauggaaaagcauggcugcauguuuguguaacgggggaugauaaaaaugcaacugcuagcuucauuuacaaugggaggcuuguagauaguauuguuucaugguccaaagaaauccucagaacccaggagucagaaugcguuuguaucaauggaacuuguacaguaguaaugacugaugggagugcuucaggaaaagcugauacuaaaauacuauucaaugaggaggggaaaaucguucauacuagcacauguucaggaagugcccagcaugucgaggagugcucuugcuauucucgauauccuggugucagaugugucugcagagacaacuggaaaggcuccaauagacccaucguagauauaaacauaaaggauuauagcauuguuuccaguuaugugugcucaggacuuguuggagacacacccagaaaaaacgacagcuccagcaguagccauugcuuggauccuaacaaugaagaagguggucauggagugaaaggccgggccuuugaugauggaaaugacguguggaugggaagaacgaucagcgagaaguuacgcucaggauaugaaaccuucaaagucauugaaggcugguccaacccuaauuccaaauugcagauaaauaggcaagucauaguugacagagguaauagguccgguuauucugguauuuucucuguugaaggcaaaagcugcaucaaucggugcuuuuauguggaguugauaaggggaagaaaagaggaaacugaagucuuguggaccucaaacaguauuguuguguuuuguggcaccucagguacauauggaacaggcucauggccugauggggcggacaucaaucucaugccuauauaa

SEQ ID NO: 46519 - RNA, 1413 nt, Artificial Sequence
  derived and/or modified CDS sequence (wt) from neuraminidase__InfluenzaA__ABB51960
augaauccaaaucaaaaaauaauaaccauuggaucaaucaguauagcaaucggaauaauuagccuaauguugcaaauaggaaacauuauuccaauaugggcuagucacucaauccaaacuggaagucaaaaccacacuggaguaugcaaccaaagaaucaucacauaugaaaacagcaccugggugaaucacacauauguuaauauuaacaacaccaauguuauugcuggaaaggacaaaacuucagugacauuggccggcaauucaucucuuuguucuaucaguggaugggcuauauacacaaaagacaacagcauaagaauugguuccaaaggagauguuuuugucauaagagagccuuucauaucauguucucacuuggaaugcagaaccuuuuuuuugacccaaggugcucuauuaaaugacaaacauucaaaugggaccguuaaggacagaagccccuauagggcuuuaaugagcuguccucuaggugaagcuccguccccauacaauucagaguuugaaucaguugcuuggucggcaagcgcaugccaugauggcaugggcugguuaacaaucggaauuucugguccagacaauggagcaguggcuguacuaaaauacaacggcauaauaacugaaaccauaaaaaguuggaaaaagcaaauauuaagaacacaggagucugaaugugucugugugaacgggucauguuucaccauaaugaccgauggcccgaguaauggggccgccucguacaaaaucuucaagaucgaaaagggaaagauuacuaaaucaauagaguugaaugcgcccaauucucauuaugaggaauguuccuguuacccagacacuggcacagugauguguguaugcagggacagcuggcaugguucaaaucgacccugggugucuuuuaaucaaaaccuggauuaucaaauaggauacaucugcagugggguguucggugacaauccgcgucccaaagauggagagggcagcuguaauccagugacuguugauggagcaaacggaguaaagggguuuucauacgaauaugguaauggugauuggauaggaaggacuaaaaguaacagacuuagaaagggguuugagaugauuugggauccugauggauggacagauaccaacagugauuucucagugaaacaggauguuguggcaauaacugauuggucuggguacagcggaaguuucguucaacauccugaguuaacaggauuggucuguauaagaccuugcuucuggguugaguuagucagaggacugccaaaggaaaauacaacaaucuggacuagugggagcagcauuucuuuuuguggcguaaauagugauacugcaaacuggucuuggccagacggugcugaguugccguuuaccauugacaaguaa

SEQ ID NO: 46520 - RNA, 1410 nt, Artificial Sequence; identical to SEQ ID NO: 46355
  derived and/or modified CDS sequence (wt) from neuraminidase__InfluenzaA__ABB53617

SEQ ID NO: 46521 - RNA, 1410 nt, Artificial Sequence
  derived and/or modified CDS sequence (wt) from neuraminidase__InfluenzaA__ABB53721
augaauccaaaucaaaagauaauaacgauuggcucuguuucucucaccauuuccacaauaugcuucuucaugcaaauugccaucuugauaacuacuguaacauugcauuucaagcaauaugaauucaacucccccccaaacaaccaagugaugcugugugaaccaacaauaauagaaagaaacauaacagagauaguguaucugaccaacaccaccauagagaaggaaauaugccccaaacuagcagaauacagaaauuggucaaagccgcaaugugacauuacaggauuugcaccuuuuucuaaggacaauucgauuaggcuuuccucugguggggacaucugggugacaagagagccuuaugugucaugcgauccugacaaguguuaucaauuugcccuuggacagggaacaacacuaaacaacgugcauucaaaugacacaguacaugauaggaccccuuaucggacccuauugaugaaugaguuagguguuccauuucaucuggggaccaagcaagugugcauagcaugguccagcucaaguugucacgauggaaaagcauggcugcauguuuguguaacgggggaugauaaaaaugcaacugcuagcuucauuuacaaugggaggcuuguagauaguauuguuucaugguccaaagaaauccucaggacccaggagucagaaugcguuuguaucaauggaacuuguacaguaguaaugacugaugggagugcuucaggaaaagcggauacuaaaauacuauucauugaggaggggaaaaucguucauacuagcacauugucaggaagugcucagcaugucgaggagugcuccugcuauccucgauauccuggugucagaugugucugcagagacaacuggaaaggcuccaauaggcccauuguagauauaaacauaaaggauuauagcauuguuuccaguuaugugugcucaggacuuguuggagacacacccagaaaaaacgacagcuccagcaguagccauugcuuggauccuaacaaugaagaagguggucauggagugaaaggcugggccuuugaugauggaaaugacguguggaugggaagaacgaucagcgagaaguuacgcucaggauaugaaaccuucaaagucauugaaggcugguccaacccuaauuccaaauugcagauaaauaggcaagucauaguugacagagguaauagguccgguuauucugguauuuucucuguugaaggcaaaagcugcaucaaucggugcuuuuauguggaguugauaaggggaagaaaagaggaaacugaagucuuguggaccucaaacaguauuguuguguuuuguggcaccucagguacauauggaacaggcucauggccugauggggcggacaucaaucucaugccuauauaa

SEQ ID NO: 46522 - RNA, 1410 nt, Artificial Sequence
  derived and/or modified CDS sequence (wt) from neuraminidase__InfluenzaA__ABB53754
augaauccaaaucaaaagauaauaacaauuggcucugucucucucaccauugcaacaauaugcuuccuuaugcaaauugccauccugguaacuacuguaacacugcauuucaagcaauaugagugcagcucccccccaaacaaccaaguaaugccgugugaaccaauaauaauagaaaggaacauaacagagauaguguauuugacuaacaccaccauagagaaagagauaugccccaaauuaguggaauacagaaauuggucaaagccgcaauguaaaauuacaggauuugcaccuuuuucuaaggacaauucaauucggcuuucugcugguggggacauuugggugacgagagaaccuuaugugucaugcgauccuggcaaguguuaucaauuugcacucgggcaggggaccacacuagacaacaagcauucaaaugacacaauacaugauaggaccccucaucgaacccuauugaugaaugaguugggugucccauuucauuugggaaccaggcaaguguguauagcaugguccagcucaaguugucacgauggaaaagcauggcugcauguuugugucacuggguaugauaaaaaugcaacugcuagcuucauuuaugaugggaggcuuguagacaguauugguucaugguccaaaaauauccucaggacccaggagucggaaugcguuuguaucaaugggacuuguacaguaguaaugacugauggaagugcuucagaaagagcugauacuaaaauacuauucauugaagaggggaaaaucguucauauuagcccauugucaggaagugcucagcauguagaggaguguuccuguuauccucgauauccuggugucagaugugucugcagagacaacuggaaaggcuccaauaggcccgucguagauauaaaugugaaagauuauagcauuguuuccaguuaugugugcucagggcuuguuggcgacacacccagaaaaaacgacagaucuagcaguagcuauugccggaauccuaacaaugagaaagggaaucauggagugaaaggcugggccuuugacgauggaaaugacguguggaugggaagaacgaucagcgaggagucacgcucagguuaugaaaccuucaaagucauuggugguugguccacaccuaauuccaaauugcagauaaauaggcaagucauaguugacagcgauaauagguccgguuauucugguauuuucucuguugagggcaaaagcugcaucaauaggugcuuuuauguggaguugauaaggggaagggaacaggaaacuagagucugguggaccucaaacaguauuguuguguuuuguggcacuucagguaccuauggaacaggcucauggccugauggagcggacaucaaucucaugccuauauaa

SEQ ID NO: 46523 - RNA, 1410 nt, Artificial Sequence; identical to SEQ ID NO: 46115
  derived and/or modified CDS sequence (wt) from neuraminidase__InfluenzaA__ABB54517

SEQ ID NO: 46524 - RNA, 1410 nt, Artificial Sequence
  derived and/or modified CDS sequence (wt) from neuraminidase__InfluenzaA__ABB59999
augaauccaaaucaaaagauaauaacgauuggcucuguuucucucacuauugccacaauaugcuuccuuaugcaaauugccauccugguaacuacuguaacauugcauuucaagcaauaugaaugcagcucucccccaaacaaccaaguaaugcugugugaaccaacaauaauagaaagaaacauaacagagauaguguaucugaccaacaccaccauagagaaggaaauaugccccaaacuagcagaauacagaaauuggucaaagccgcaauguaaaauuacaggauuugcaccuuuuucuaaggacaauucaauucggcuuuccgcugguggggacauuugggugacaagggaaccuuaugugucaugcgauccugacaaguguuaucaauuugcccuuggacagggaacaacacuaaacaacaggcauucaaaugacacaguacaugauaggaccccuuaucgaacccuauugaugaaugaguuggguguuccauuucauuugggaaccaagcaagugugcauagcaugguccagcucaaguugucacgauggaaaagcauggcugcauguuuguguaacugggcaugaugaaaaugcaacugcuagcuucauuuacgaugggaggcuuguagauaguauugguucaugguccaaaaaaauccucaggacccaggagucggaaugcguuuguaucaauggaacuuguacaguaguaaugacugaugggagugcuucaggaagagcugauacuaaaauacuauuuauugaggaggggaaaaucguucauaucagcccacuaucaggaagugcucagcaugucgaggagugcuccuguuauccucgauauccuggugucagaugugucugcagagacaacuggaaaggcuccaauaggcccaucguagauauaaauauaaaggauuauagcauuguuuccaguuaugugugcucaggacuuguuggagacacacccagaaaaaacgacagcuccagcaguagucauugccugaauccuaacaaugaggaagggggucauggagugaaaggcugggccuuugaugauggaaaugacguguggaugggaagaacaaucagcgagaaguuccgcucagguuaugaaaccuucaaagucauugaaggcugguccaaaccuaacuccaaauugcagauaaauaggcaagucauaguugacagagguaauagguccgguuauucugguauuuucucuguugaaggcaaaagcugcaucaaucggugcuuuuauguggaguugauaaggggaaggaaacaggaaacugaagucugguggaccucaaacaguauuguuacguuuuguggcaccucagguacauauggaacaggcucauggccugauggggcggacaucaaucucaugccuauauaa

SEQ ID NO: 46525 - RNA, 1410 nt, Artificial Sequence
  derived and/or modified CDS sequence (wt) from neuraminidase__InfluenzaA__ABB60010
augaauccaaaucaaaagauaauaacgauuggcucuguuucucucacuauugccacaauaugcuuccuuaugcaaauugccauccugguaacuacuguaacauugcauuucaagcaauaugaauacagcucucccccaaacaaccaaguaaugcugugugaaccaacaauaauagaaagaaacauaacagagauaguguaucugaccaacaccaccauagagaaggaaauaugccccaaacuagcagaauacagaaauuggucaaagccgcaauguaaaauuacaggauuugcaccuuuuucuaaggacaauucaauuaggcuuuccgcugguggggacauuugggugacaagggaaccuuaugugucaugcgauccugacaaguguuaucaauuugcccuuggacagggaacaacacuaaacaacaggcauucaaaugacacagugcaugauaggaccccuuaucgaacccuauugaugaaugaguuggguguuccauuucauuugggaaccaagcaagugugcauagcaugguccagcucaaguugucacgauggaaaagcauggcugcauguuuguguaacugggcaugaugaaaaugcaacugcuagcuucauuuacgaugggaggcuuguagauaguauugguucaugguccaaaaaaauccucaggacccaggagucggaaugcguuuguaucaauggaacuuguacaguaguaaugacugaugggagugcuucaggaagagcugauacuaaaauacuauucauugaggaggggaaaaucguucauaucagcccacugucaggaagugcucagcaugucgaggagugcuccuguuauccucgauauccuggugucagaugugucugcagagacaacuggaaaggcuccaauaggcccaucguagauauaaauguaaaggauuauagcauuguuucccguuaugugugcucaggacuuguuggagacacacccagaaaaaacgacagcuccagcaguagucauugccugaauccuaacaaugaggaagggggucauggagugaaaggcugggccuuugaugauggaaaugacguguggaugggaagaacgaucagcgaaaaguuccgcucagguuaugaaaccuucaaagucauugaaggcugguccaaaccuaacuccaaauugcagauaaauaggcaagucauaguugacagagguaauagguccgguuauucugguauuuucucuguugaaggcaaaagcugcaucaaucggugcuuuuauguggaguugauaaggggaaggaaacaggaaacugaagucugguggaccucaaacaguauuguuguguuuuguggcacaucagguacauauggaacaggcucauggccugauggggcggacaucaaucucaugccuauauaa

SEQ ID NO: 46526 - RNA, 1410 nt, Artificial Sequence
  derived and/or modified CDS sequence (wt) from neuraminidase__InfluenzaA__ABB77867
augaauccaaaucaaaagauaauaacgauuggcucuguuucucucacuauugccacaauaugcuuccuuaugcaaauugccauccugguaacuacuguaacauugcauuucaagcaauaugaaugcaacucccccccaaacaaccaaguaaugcugugugaaccaacaauaauagaaagaaacauaacagagauaguguaucugaccaacaccaccauagagaaggaaauaugccccaaacuagcagaauacagaaauuggucaaagccgcaauguaaaauuacaggauuugcaccuuuuucaaaggacaauucaauucggcuuuccgcugguggggacauuugggugacaagagaaccuuaugugucaugcgauccugacaaguguuaucaauuugcccuuggacagggaacaacacuaaacaacgggcauucaaaugacacaguacaugauaggaccccuuaucgaacccuauugaugaaugaguuggguguuccauuucauuuaggaaccaagcaagugugcauagcaugguccagcucaaguugucacgauggaaaagcauggcugcauguuuguguaacugggcaugaugaaaaugcaacugcuagcuucauuuacgaugggaggcuuguagauaguauugguucaugguccaaaaaaauccucaggacccaggagucggaaugcguuuguaucaauggaacuuguacaguaguaaugacugaugggagugcuucaggaagagcugauacuaaaauacuauucauugaggaggggaaaaucguucauauuagccaauugucaggaagugcucagcaugucgaggagugcuccuguuauccucgauauccuggugucagaugugucugcagagacaacuggaaaggcuccaauaggcccaucguagauauaaauguaaaggaucauagcauuguuuccaguuaugugugcucaggacuuguuggagacacacccagaaaaaacgacagcuccagcaguagccauugccugaauccuaacaaugaagaagggggucauggagugaaaggcugggccuuugaugauggaaaugacguguggaugggaagaacgaucagcgagaaguuacgcucagguuaugaaaccuucaaagucauugaaggcugguccaaaccuaacuccaaauugcagauaaauaggcaagucauaguugacagagguaauagguccgguuauucugguauuuucucuguugaaggcaaaagcugcaucaaucggugcuuuuauguggaguugauaaggggaaggaaacaggaaacugaagucugguggaccucaaacaguauuguuguguuuugugguaccucagguacauauggaacaggcucauggccugauggggcggacaucaaucucaugccuauauaa

SEQ ID NO: 46527 - RNA, 1410 nt, Artificial Sequence
  derived and/or modified CDS sequence (wt) from neuraminidase__InfluenzaA__ABB79719
augaauccaaaucaaaagauaauaacgauuggcucuguuucucucacuauugccacaauaugcuuccuuaugcaaauugccauccugguaacuacuguaacauugcauuucaagcaauaugaaugcaacucccccccaaacaaccaaguaaugcugugugaaccaacaauaauagaaagaaacauaacagagauaguguaucugaccaacaccaccauagagaaggaaauaugccccaaacuagcagaauacagaaauuggucaaagccgcaauguaaaauuacaggauuugcaccuuuuucaaaggacaauucaauucggcuuuccgcugguggggacauuugggugacaagagaaccuuaugugucaugcgauccugacaaguguuaucaauuugcccuuggacagggaacaacacuaaacaacgggcauucaaaugacacaguacaugauaggaccccuuaucgaacccuauugaugaaugaguuggguguuccauuucauuuaggaaccaagcaagugugcauagcaugguccagcucaaguugucacgauggaaaagcauggcugcauguuuguguaacugggcaugaugaaaaugcaacugcuagcuucauuuacgaugggaggcuuguagauaguauugguucaugguccaaaaaaauccucaggacccaggagucggaaugcguuuguaucaauggaacuuguacaguaguaaugacugaugggagugcuucaggaagagcugauacuaaaauacuauucauugaggaggggaaaaucguucauauuagccaauugucaggaagugcucagcaugucgaggagugcuccuguuauccucgauauccuggugucagaugugucugcagagacaacuggaaaggcuccaauaggcccaucguagauauaaauguaaaggaucauagcauuguuuccaguuaugugugcucaggacuuguuggagacacacccagaaaaaacgacagcuccagcaguagccauugccugaauccuaacaaugaagaagggggucauggagugaaaggcugggccuuugaugauggaaaugacguguggaugggaagaacgaucagcgagaaguuacgcucagguuaugaaaccuucaaagucauugaaggcugguccaaacccaacuccaaauugcagauaaauaggcaagucauaguugacagagguaauagguccgguuauucugguauuuucucuguugaaggcaaaagcugcaucaaucggugcuuuuauguggaguugauaaggggaaggaaacaggaaacugaagucugguggaccucaaacaguauuguuguguuuugugguaccucagguacauauggaacaggcucauggccugauggggcggacaucaaucucaugccuauauaa

SEQ ID NO: 46528 - RNA, 1410 nt, Artificial Sequence
  derived and/or modified CDS sequence (wt) from neuraminidase__InfluenzaA__ABB79734
augaauccaaaucaaaagauaauaacgauuggcucuguuucucucacccuuuccacaauaugcuucuucaugcaaauugccaucuugauaacuacuguaacauugcauuucaagcaauaugaauucaacucccccccaaacaaccaagugaugcugugugaaccaacaauaauagaaagaaacauaacagagauaguguaucugaccaacaccaccauagagaaggaaauaugccccaaacuagcagaauacagaaauuggucaaagccgcaaugugacaucacaggauuugcaccuuuuucuaaggacaauucgauuaggcuuuccgcugguggggacaucugggugacaagagaaccuuaugugucaugcgauccugacaaguguuaucaauuugcccucggacagggaacaacacuaaacaacgugcauucaaaugacacaguacaugauaggaccccuuaucggacccuauugaugaaugaguuagguguuccauuucaucuggggaccaagcaagugugcauagcaugguccagcucaaguugucacgauggaaaagcauggcugcauguuuguguaacgggggaugauaaaaaugcaacugcuagcuucauuuacaaugggaggcuuguagauaguauuguuucaugguccaaaaaaauccucaggacccaggagucagaaugcguuuguaucaauggaacuuguacaguaguaaugacugaugggagugcuucaggaaaagcugauacuaaaauauuauucauugaggaggggaaaaucguucauacuagcacauugucaggaagugcucagcaugucgaggagugcuccugcuauccucgauauccuggugucagaugugucugcagagacaacuggaaaggcuccaauaggcccaucguagauauaaacauaaaggauuauagcauuguuuccaguuaugugugcucaggacuuguuggagacacacccagaaaaaacgacagcuccagcaguagccauugcuuggauccuaacaaugaagaagguggucauggagugaaaggcugggccuuugaugauggaaaugacguguggaugggaagaacgaucagcgagaaguuacguucaggauaugaaacuuucaaagucauugaaggcugguccaacccuaauucuaaauugcagauaaauaggcaagucauaguugacagagguaauagguccgguuauucugguauuuucucuguugaaggcaaaagcugcaucaaucgaugcuuuuauguggaguugauaaggggaagaaaagaggaaacugaagucuuguggaccucaaacaguauuguuguguuuuguggcaccucagguacauauggaacaggcucauggccugauggggcggacaucaaucucaugccuauauaa

SEQ ID NO: 46529 - RNA, 1410 nt, Artificial Sequence
  derived and/or modified CDS sequence (wt) from neuraminidase__InfluenzaA__ABB79791
augaauccaaaucaaaagauaauaacaauuggcucuguuucucucaccauugcaacaauaugcuuccuuaugcaaauugccauccugguaacuacuguaacauugcauuucaagcaauaugagugcagcucccccccaaacaaccaaguaaugccgugugaaccaauaauaauagaaagaaacauaacagagauaguguauuugacuaacaccaccauagagaaagagauaugccccaaacuaguggaauacagaaauuggucaaagccgcaauguaaaauuacaggauuugcaccuuuuucuaaggacaauucaauucggcuuuccgcugguggggacauuugggugacgagagaaccuuaugugucaugcgauccuggcaaguguuaucaauuugcacuugggcagggaaccacacuaaacaacaagcauucaaaugacacaauacaugauaggaccccuuaucgaacccuauugaugaaugaguuggguguuccauuucauuugggaaccaagcaagugugcauagcaugguccagcucaaguugucacgauggaaaagcauggcugcauguuugugucacugggcaugauaaaaaugcaacugcuagcuucauuuacgaugggaggcuuguagacaguauugguucaugguccaaaaauauccucaggacccaggagucggaaugcguuuguaucaaugggacuuguacaguaguaaugacugauggaagugcuucagaaagagcugauacuaaaauacuauucauugaagaggggaaaaucguucauauuagcccauugucaggaagugcucagcauguagaggaguguuccuguuauccucgauauccuggugucagaugugucugcagagacaacuggaaaggcuccaauaggcccaucguagauauaaaugugaaagauuauagcauuguuuccaguuaugugugcucagggcuuguuggcgacacacccagaaaaaacgacagauccagcaguagcuauugccggaauccuaacaaugagaaagggaaucauggagugaaaggcugggccuuugacgauggaaaugacguguggaugggaagaacgauuggcgaggaguuacgcucagguuaugaaaccuucaaagucauuggugguugguccacaccuaacuccaaauugcagauaaauaggcaagucauaguugacagcgauaauagguccgguuauucugguauuuucucuguugagggcaaaagcugcaucaauaggugcuuuuauguggaguugauaaggggaagggaacaggaaacuagagucugguggaccucaaacaguauuguuguguuuuguggcaccucagguacauauggaacaggcucauggccugauggagcggacaucaaucucaugccuauauaa

SEQ ID NO: 46530 - RNA, 1410 nt, Artificial Sequence
  derived and/or modified CDS sequence (wt) from neuraminidase__InfluenzaA__ABB79802
augaauccaaaucaaaagauaauaacaauuggcucuguuucucucaccauugcaacaauaugcuuccuuaugcaaauugccauccugguaacuacuguaacauugcauuucaagcaauaugagugcagcucccccccaaacaaccaaguaaugccgugugaaccaauaauaauagaaagaaacauaacagagauaguguauuugacuaacaccaccauagagaaagagauaugccccaaacuaguagaauacagaaauuggucaaagccgcaauguaaaauuacaggauuugcaccuuuuucuaaggacaauucaauucggcuuuccgcugguggagacauuugggugacgagagaaccuuaugugucaugcgauccuggcaaguguuaucaauuugcacuugggcagggaaccacacuaaacaacaagcauucaaaugacacaauacaugauaggaccccuuaucgaacccucuuaaugaaugaguuggguguuccauuucauuugggaaccaagcaagugugcauagcaugguccagcucaaguugucacgauggaaaagcauggcugcauguuugugucacugggcaugaugaaaaugcaacugcuagcuucauuuacgaugggaggcuuguagacaguauugguucaugguccaaaaauauccucaggacccaggagucggaaugcguuuguaucaaugggacuuguacaguaguaaugacugauggaagugcuucagaaagagcugauacuaaaauacuauucauugaagaggggaaaaucguucauauuagcccauugucaggaagugcucagcauguagaggaguguuccuguuauccucgauauccuggugucagaugugucugcagagacaacuggaaaggcuccaauaggcccaucguagauauaaaugugaaagauuauagcauuguuuccaguuaugugugcucagggcuuguuggcgacacacccagaaaaaacgacagauccagcaguagcuauugccggaauccuaacaaugagaaagggagucauggagugaaaggcugggccuuugacgauggaaaugacguguggaugggaagaacgaucggcgaggaguuacgcucagguuaugaaaccuucaaagucauuggugguugguccacaccuaacuccaaauugcagauaaauaggcaagucauaguugacagcgguaauagguccgguuauucugguauuuucucuguugagggcaaaagcugcaucaauaggugcuuuuauguggaguugauaaggggaagggaacaggaaacuagagucugguggaccucaaacaguauuguuguguuuuguggcaccucagguacauauggaacaggcucauggccugauggagcggauaucaaucucaugccuauauaa

SEQ ID NO: 46531 - RNA, 1410 nt, Artificial Sequence
  derived and/or modified CDS sequence (wt) from neuraminidase__InfluenzaA__ABB79813
augaauccaaaucaaaagauaauaacaauuggcucuguuucucucacuauugccacaauaugcuuccuuaugcaaauugccauccugguaacuacuguaacauugcauuucaagcaauaugagugcaacucccccccaaacaaccaaguaaugcugugugaaccaacaauaauagaaagaaacauaacagagauaguguaucugaccaacaccaccauagagaaagaaguaugccccaaacuagcagaauacagaaauuggucaaagccgcaauguaaaauuacaggauuugcaccuuuuucuaaggacaauucaauucggcuuuccgcugguggagacauuugggugacaagagaaccuuaugugucaugcgauccuggcaaguguuaucaauuugcccuuggacagggaacaacacuaaacaacaggcacucaaaugacacaguacaugauaggaccccuuaucgaacccuauugaugaaugaguuggguguuccauuucauuugggaaccaagcaagugugcauagcaugguccagcucaaguugucacgauggaaaagcauggcugcauguuuguguaacugggcaugaugaaaaugcaacugcuagcuucauuuacgaugggaggcuuguagauaguauugguucaugguccaaaaauauccucaggacccaggagucggaaugcguuuguaucaauggaacuuguacaguaguaaugacugauggaagugcuucagaaagagcugauacuaaaauacuauucauugaagaggggaaaaucguucauauuagcccauugucaggaagugcucagcaugucgaggagugcuccuguuauccucgauauccuggugucagaugugucugcagagacaauuggaaaggcuccaauaggcccaucguagauauaaaugugaaagauuauagcauuguuuccaguuaugugugcucaggacuuguuggagacacacccagaaaaaacgacagcuccagcaguagcuauugccggaauccuaacaaugagaaagggagucauggagugaaaggcugggccuuugaugauggaaaugacguguggaugggaagaacgaucagcgaggaguuacgcucagguuaugaaaccuucaaagucauuggaggcugguccaaaccuaacuccaaauugcagauaaauaggcaagucauaguugacagagguaauagguccgguuauucugguauuuucucuguugaaggcaaaagcugcaucaaucggugcuuuuauguggaguugauaaggggaaggaaacaggaaacugaagucugguggaccucaaacaguauuguuguguuuuguggcaccucagguacauauggaacaggcucauggccugauggggcggacaucaaucucaugccuauauaa

SEQ ID NO: 46532 - RNA, 1410 nt, Artificial Sequence; identical to SEQ ID NO: 46531
  derived and/or modified CDS sequence (wt) from neuraminidase__InfluenzaA__ABB79960

SEQ ID NO: 46533 - RNA, 1410 nt, Artificial Sequence; identical to SEQ ID NO: 46531
  derived and/or modified CDS sequence (wt) from neuraminidase__InfluenzaA__ABB79971

SEQ ID NO: 46534 - RNA, 1413 nt, Artificial Sequence
  derived and/or modified CDS sequence (wt) from neuraminidase__InfluenzaA__ABB79982
augaaugcaaaucaaaaaauaauaaccauuggaucaaucaguauagcaaucggaauaauuagccuaauguugcaaauaggaaacauuauuucaauaugggcuagucacucaauccaaacuggaagucaaaaccacacuggaguaugcaaccaaagaaucaucacauaugaaaacagcaccugggugaaucacacauauguuaauauuaacaacaccaauguuauugcuggaaaggacaaaacuucagugacauuggccggcaauucaucucuuuguucuaucaguggaugggcuauauacacaaaagacaacagcauaagaauugguuccaaaggagauguuuuugucauaagagagccuuucauaucauguucucacuuggaaugcagaaccuuuuuucugacccaaggugcucuauuaaaugacaaacauucaaaugggaccguuaaggacagaagucccuauagggcuuuaaugagcuguccucuaggugaagcuccguccccauacaauucaaaguuugaaucaguugcuuggucagcaagcgcaugccaugauggcaugggcugguuaacaaucggaauuucugguccagacaauggagcaguggcuguacuaaaauacaacggcauaauaacugaaaccauaaaaaguuggaaaaagcaaauauuaagaacacaagagucugaaugugucugugugaacgggucauguuucaccauaaugaccgauggcccgaguaauggggccgccucguacaaaaucuucaagaucgaaaagggaaagguuacuaaaucaauagaguugaaugcacccaauuuucauuaugaggaauguuccuguuacccagacacuggcacagugauguguguaugcagggacaacuggcaugguucaaaucgacccugggugucuuuuaaucaaaaccuggauuaucaaauaggauacaucugcagugggguguucggugacaauccgcgucccaaagauggagagggcagcuguaauccagugacuguugauggagcaaacggaguaaagggguuuucauacaaauaugguaaugguguuuggauaggaaggacuaaaaguaacagacuuagaaagggguuugagaugauuugggauccuaauggauggacagauaccgacagugauuucucagugaaacaggauguuguggcaauaacugauuggucaggguacagcggaaguuucguucaacauccugaguuaacaggauuggacuguauaagaccuugcuucuggguugaguuagucagaggacugccaaaagaaaauacaacaaucuggacuagugggagcagcauuucuuuuuguggcguaaauagugauacugcaaacuggucuuggccagacggugcugaguugccguuuaccauugacaaguag

SEQ ID NO: 46535 - RNA, 1413 nt, Artificial Sequence
  derived and/or modified CDS sequence (wt) from neuraminidase__InfluenzaA__ABB79993
augaauccaaaucaaaaaauaauaaccauuggaucaaucaguauagcaaucggaauaauuagccuaauguugcaaauaggaaacauuauuucaauaugggcuagucacucaauccaaacuggaagucaaaaccacacuggaguaugcaaccaaagaaucaucacauaugaaaacagcaccugggugaaucacacauauguuaauauuaacaacaccaauguuauugcuggaaaggacaaaacuucagugacauuggccggcaauucaucucuuuguucuaucaguggaugggcuauauacacaaaagacaacagcauaagaauugguuccaaaggagauguuuuugucauaagagagccuuucauaucauguucucacuuggaaugcagaaccuuuuuucugacccaaggugcucuauuaaaugacaaacauucaaaugggaccguuaaggacagaagucccuauagggcuuuaaugagcuguccucuaggugaagcuccguccccauacaauucaaaguuugaaucaguugcuuggucagcaagcgcaugccaugauggcaugggcugguuaacaaucggaauuucugguccagacaauggagcaguggcuguacuaaaauacaacggcauaauaacugaaaccauaaaaaguuggaaaaagcaaauauuaagaacacaagagucugaaugugucugugugaacgggucauguuucaccauaaugaccgauggcccgaguaauggggccgccucguacaaaaucuucaagaucgaaaagggaaagguuacuaaaucaguagaguugaaugcacccaauuuucauuaugaggaauguuccuguuacccagacacuggcacagugauguguguaugcagggacaacuggcaugguucaaaucgaccuugggugucuuuuaaucaaaaccuggauuaucaaauaggauacaucugcagugggguguucggugacaauccgcgucccaaagauggagagggcagcuguaauccagugacuguugauggagcaaauggaguaaagggguuuucauacaaauaugguaaugguguuuggauaggaaggacuaaaaguaacagacuuagaaagggguuugagaugauuugggauccuaauggauggacagauaccgacagugauuucucagugaaacaggauguuguggcaauaacugauuggucaggguacagcggaaguuucguucaacauccugaguuaacaggauuggacuguauaagaccuugcuucuggguugaguuagucagaggacugccuaaagaaaauacaacaaucuggacuagugggagcagcauuucuuuuuguggcguaaauagugauacugcaaacuggucuuggccagacggugcugaguugccguucaccauugacaaguag

SEQ ID NO: 46536 - RNA, 1410 nt, Artificial Sequence
  derived and/or modified CDS sequence (wt) from neuraminidase__InfluenzaA__ABB80004
augaauccaaaucaaaagauaauaacgauuggcucuguuucucucaccauuucuacaauaugcuucuucaugcaaauugccaucuugauaacuacuguaacauugcauuucaagcaauaugaauucaacucccccccaaacaaccaagugaugcugugugaaccaacaauaauagaaagaaacauaacagagauaguguaucugaccaacaccaccauagagaaggaaauaugccccaaacuagcagaauacagaaauuggucaaagccgcaaugugacauuacaggauuugcaccuuuuucuaaggacaauucgauuaggcuuuccgcugguggggacaucugggugacaagagaaccuuaugugucaugcgauccugacaaguguuaucaauuugcccuuggacagggaacaacacuaaacaacgugcauucaaaugacacaguacaugauaggaccccuuaucggacccuauugaugaaugaguuagguguuccauuucaucuggggaccaagcaagugugcauagcaugguccagcucaaguugucacgauggaaaagcauggcugcauguuuguguaacaggggaugauaaaaaugcaacugcuagcuucauuuacaaugggaggcuuguagauaguauuguuucaugguccaaagaaauccucaggacccaggagucagaaugcguuuguaucaauggaacuuguacaguaguaaugacugaugggagugcuucaggaaaagcugauacuaaaauacuauucauugaggaggggaaaaucguucauacuagcacauugucaggaagugcucagcaugucgaggagugcuccugcuauccucgauauccuggugucagaugugucugcagagacaacuggaaaggcuccaauaggccaaucguagauauaaacauaaaggauuauagcacuguuuccaguuaugugugcucaggacuuguuggagacacacccagaaaaaacgacagcuccagcaguagccauugcuuggauccuaacaacgaagaagguggucauggagugaaaggcugggccuuugaugauggaaaugacguguggaugggaagaacgaucagcgagaaguuacgcucgggauaugaaaccuucaaagucauugaaggcugguccaacccuaauuccaaauugcagauaaauaggcaagucauaguugacagagguaauagguccgguuauucugguauuuucucuguugaaggcaaaagcugcaucaaucggugcuuuuauguggaguugauaaggggaagaaaagaggaaacugaagucuuguggaccucaaacaguauuguuguguuuuguggcaccucagguacauauggaacaggcucauggccugauggggcggacaucaaucucaugccuauauaa

SEQ ID NO: 46537 - RNA, 1410 nt, Artificial Sequence
  derived and/or modified CDS sequence (wt) from neuraminidase__InfluenzaA__ABB80015
augaauccaaaucaaaagauaauaacgauuggcucuguuucucucaccauuuccacaauaugcuucuucaugcaaauugccaucuugauaacuacuguaacauugcauuucaagcaauaugaauucaacucccccccaaacaaccaagugaugcugugugaaccaacaauaauagaaagaaacauaacagagauaguguaucugaccaacaccaccauagagaaggaaauaugccccaaacuagcagaauacagaaauuggucaaagccgcaaugugacauuacaggauuugcaccuuuuucuaaggacaauucgauuaggcuuuccucugguggggacaucugggugacaagagaaccuuaugugucaugcgauccugacaaguguuaucaauuugcccuuggacagggaacaacacuaaacaacgugcauucaaaugacacaguacaugauaggaccccuuaucggacccuauugaugaaugaguuagguguuccauuucaucuggggaccaagcaagugugcauagcaugguccagcucaaguugucacgauggaaaagcauggcugcauguuuguguaacgggggaugauaaaaaugcaacugcuagcuucauuuacaaugggaggcuuguagauaguauuguuucaugguccaaagaaauccucaggacccaggagucagaaugcguuuguaucaauggaacuuguacaguaguaaugacugaugggagugcuucaggaaaagcggauacuaaaauacuauucauugaggaggggaaaaucguucauacuagcacauugucaggaagugcucagcaugucgaggagugcuccugcuauccucgauauccuggugucagaugugucugcagagacaacuggaaaggcuccaauaggcccauuguagauauaaacauaaaggauuauagcauuguuuccaguuaugugugcucaggacuuguuggagacacacccagaaaaaacgacagcuccagcaguagccauugcuuggauccuaacaaugaagaagguggucauggagugaaaggcugggccuuugaugauggaaaugacguguggaugggaagaacgaucagcgagaaguuacgcucaggauaugaaaccuucaaagucauugaaggcugguccaacccuaauuccaaauugcagauaaauaggcaagucauaguugacagagguaauagguccgguuauucugguauuuucucuguugaaggcaaaagcugcaucaaucggugcuuuuauguggaguugauaaggggaagaaaagaggaaacugaagucuuguggaccucaaacaguauuguuguguuuuguggcaccucagguacauauggaacaggcucauggccugauggggcggacaucaaucucaugccuauauaa

SEQ ID NO: 46538 - RNA, 1410 nt, Artificial Sequence
  derived and/or modified CDS sequence (wt) from neuraminidase__InfluenzaA__ABB80037
augaauccaaaucaaaagauaauaacaauuggcucugucucucucaccauugcaacaguaugcuuccucaugcagauugccauccugguaacuacuguaacauugcauuucaagcaauaugagugcgacucccccgcgaacaaccaaguaaugccgugugaaccaauaauaauagaaaggaacauaacagagauaguguauuugaauaacaccaccauagagaaagagauaugccccaaauuaguggaauacagaaauuggucaaagccgcaauguaaaauuacaggauuugcaccuuuuucuaaggacaauucaauccggcuuucugcugguggggacauuugggugacgagagaaccuuaugugucaugcgauccuggcaaguguuaucaauuugcacucgggcaggggaccacacuagacaacaaacauucaaaugacacaauacaugauagaaucccucaucgaacccuauugaugaaugaguuggguguuccauuucauuuaggaaccaggcaaguguguauagcaugguccagcucaaguugucacgauggaaaagcauggcugcauguuugugucacuggggaugauaaaaaugcaacugcuagcuucauuuaugacgggaggcuuguggacaguauugguucauggucucaaaauauccucaggacccaggagucagaaugcguuuguaucaaugggacuuguacaguaguaaugacugauggaagugcuucaggaagagcugauacuagaauacuauucauugaagaggggaaaauuguccauauuagcccauugucaggaagugcucagcauguagaggaguguuccuguuauccucgauauccuggcgucagauguaucugcagagacaacuggaaaggcucuaauaggcccgucguagauauaaauguggaagauuauagcauugauuccaguuaugugugcucagggcuuguuggcgacacacccagaaacaacgacagaucuagcaauagcaauugcaggaauccuaacaaugagagagggaaucacggagugaaaggcugggccuuugacgauggaaaugacguauggaugggaagaacgaucagcaaggauuuacgcucagguuaugaaaccuucaaagucauuggugguugguccacaccuaauuccaaaucgcagauaaauaggcaagucauaguugacagcgauaauaggucagguuauucugguauuuucucuguugagggcaaaagcugcaucaauaggugcuuuuauguggaguugauaaggggaagggaacaggagacuagaguaugguggaccucaaacaguauuguuguguuuuguggcacuucagguacauauggaacaggcucauggccugauggggcggacaucaaucucaugccuauauaa

SEQ ID NO: 46539 - RNA, 1413 nt, Artificial Sequence
  derived and/or modified CDS sequence (wt) from neuraminidase__InfluenzaA__ABB80048
augaauccaaaucaaaaaauaauaaccauuggaucaaucaguauagcaaucggaauaauuagccuaauguugcaaauaggaaacauuauuucaauaugggcuagucacucaauccaaacuggaagucaaaaccacacuggaguaugcaaccaaagaaucaucacauaugaaaacagcaccugggugaaucacacauauguuaauauuaacaacaccaauguuauugcuggaaaggacaaaacuucagugacauuggccggcaauucaucucuuuguucuaucaguggaugggcuauauacacaaaagacaacagcauaagaauugguuccaaaggagauguuuuugucauaagagagccuuucauaucauguucucacuuggaaugcagaaccuuuuuucugacccaaggugcucuauuaaaugacaaacauucaaaugggaccguuaaggacagaagucccuauagggcuuuaaugagcuguccucuaggugaagcuccguccccauacaauucaaaguuugaaucaguugcuuggucagcaagcgcaugccaugauggcaugggcugguuaacaaucggaauuucugguccagacaauggagcaguggcuguacuaaaauacaacggcauaauaacugaaaccauaaaaaguuggaaaaagcaaauauuaagaacacaagagucugaaugugucugugugaacgggucauguuucaccauaaugaccgauggcccgaguaauggggccgccucguacaaaaucuucaagaucgaaaagggaaagguuacuaaaucaguagaguugaaugcacccaauuuucauuaugaggaauguuccuguuacccagacacuggcacagugauguguguaugcagggacaacuggcaugguucaaaucgaccuugggugucuuuuaaucaaaaccuggauuaucaaauaggauacaucugcagugggguguucggugacaauccgcgucccaaagauggagagggcagcuguaauccagugacuguugauggagcaaauggaguaaagggguuuucauacaaauaugguaaugguguuuggauaggaaggacuaaaaguaacagacuuagaaagggguuugagaugauuugggauccuaauggauggacagauaccgacagugauuucucagugaaacaggauguuguggcaauaacugauuggucaggguacagcggaaguuucguucaacauccugaguuaacaggauuggacuguauaagaccuugcuucuggguugaguuagucagaggacugccuaaagaaaauacaacaaucuggacuagugggagcagcauuucuuuuuguggcguaaauggugauacugcaaacuggucuuggccagacggugcugaguugccguucaccauugacaaguag

SEQ ID NO: 46540 - RNA, 1410 nt, Artificial Sequence
  derived and/or modified CDS sequence (wt) from neuraminidase__InfluenzaA__ABB80084
augaauccaaaucaaaagauaauaacgauuggcucuguuucucucacuauugccacaauaugcuuccuuaugcaaauugccauccugguaacuacuguaacauugcauuucaagcaauaugaaugcaacucccccucaaacaaccaaguaaugcugugugaaccaacaauaauagaaagaaacauaacagagauaguguaucugaccaacaccaccauagagaaggaaauaugccccaaacuagcagaauacagaaauuggucaaagccgcaauguaaaauuacaggauuugcaccuuuuucaaaggacaauucaauucggcuuuccgcugguggggacauuugggugacaagagaaccuuaugugucaugcgauccugacaaguguuaucaauuugcccuuggacagggaacaacacuaaacaacgggcauucaaaugacacaguacaugauaggaccccuuaucgaacccuauugaugaaugaguuggguguuccauuucauuuaggaaccaagcaagugugcauagcaugguccagcucaaguugucacgauggaaaagcauggcugcauguuuguguaacugggcaugaugaaaaugcaacugcuagcuucauuuacgaugggaggcuuguagauaguauugguucaugguccaaaaaaauccucaggacccaggagucggaaugcguuuguaucaauggaacuuguacaguaguaaugacugaugggagugcuucaggaagagcugauacuaaaauacuauucauugaggaggggaaaaucguucauauuagccaauugucaggaagugcucagcaugucgaggagugcuccuguuauccucgauauccuggugucagaugugucugcagagacaacuggaaaggcuccaauaggcccaucguagauauaaauguaaaggaucauagcauuguuuccaguuaugugugcucaggacuuguuggagacacacccagaaaaaacgacagcuccagcaguagccauugccugaauccuaacaaugaagaagggggucauggagugaaaggcugggccuuugaugauggaaaugacguguggaugggaagaacgaucagcgagaaguuacgcucagguuaugaaaccuucaaagucauugaaggcugguccaaacccaacuccaaauugcagauaaauaggcaagucauaguugacagagguaauagguccgguuauucugguauuuucucuguugaaggcaaaagcugcaucaaucggugcuuuuauguggaguugauaaggggaaggaaacaggaaacugaagucugguggaccucaaacaguauuguuguguuuugugguaccucagguacauauggaacaggcucauggccugauggggcggacaucaaucucaugccuauauaa

SEQ ID NO: 46541 - RNA, 1410 nt, Artificial Sequence; identical to SEQ ID NO: 46526
  derived and/or modified CDS sequence (wt) from neuraminidase__InfluenzaA__ABB80095

SEQ ID NO: 46542 - RNA, 1410 nt, Artificial Sequence
  derived and/or modified CDS sequence (wt) from neuraminidase__InfluenzaA__ABB80162
augaauccaaaucaaaagauaauaacgauuggcucuguuucucucacuauugccacaauaugcuuccuuaugcaaauugccauccugguaacuacuguaacauugcauuucaagcaauaugaaugcaacucccccccgaacaaccaaguaaugcugugugaaccaacaauaauagaaagaaacauaacagagauaguguaucugaccaacaccaccauagagaaggaaauaugccccaaacuagcagaauacagaaauuggucaaagccgcaauguaaaauuacaggauuugcaccuuuuucaaaggacaauucaauucggcuuuccgcugguggggacauuugggugacaagagaaccuuaugugucaugcgauccugacaaguguuaucaauuugcccuuggacagggaacaacacuaaacaacgggcauucaaaugacacaguacaugauaggaccccuuaucgaacccuauugaugaaugaguuggguguuccauuucauuuaggaaccaagcaagugugcauagcaugguccagcucaaguugucacgauggaaaagcauggcugcauguuuguguaacugggcaugaugaaaaugcaacugcuagcuucauuuacgaugggaggcuuguagauaguauugguucaugguccaaaaaaauccucaggacccaggagucggaaugcguuuguaucaauggaacuuguacaguaguaaugacugaugggagugcuucaggaagagcugauacuaaaauacuauucauugaggaggggaaaaucguucauauuagccaauugucaggaagugcucagcaugucgaggagugcuccuguuauccucgauauccuggugucagaugugucugcagagacaacuggaaaggcuccaauaggcccaucguagauauaaauguaaaggaucauagcauuguuuccaguuaugugugcucaggacuuguuggagacacacccagaaaaaacgacagcuccagcaguagccauugccugaauccuaacaaugaagaagggggucauggagugaaaggcugggccuuugaugauggaaaugacguguggaugggaagaacgaucagcgagaaguuacgcucagguuaugaaaccuucaaagucauugaaggcugguccaaaccuaacuccaaauugcagauaaauaggcaagucauaguugacagagguaauagguccgguuauucugguauuuucucuguugaaggcaaaagcugcaucaaucggugcuuuuauguggaguugauaaggggaaggaaacaggaaacugaagucugguggaccucaaacaguauuguuguguuuugugguaccucagguacauauggaacaggcucauggccugauggggcggacaucaaucucaugccuauauaa

SEQ ID NO: 46543 - RNA, 1410 nt, Artificial Sequence
  derived and/or modified CDS sequence (wt) from neuraminidase__InfluenzaA__ABB80199
augaauccaaaucaaaagauaauaacgauuggcucuguuucucucacuauugccacaauaugcuuccuuaugcaaauugccauccugguaacuacuguaacauugcauuucaagcaauaugaaugcaacucccccccaaacaaccaaguaaugcugugugaaccaacaauaauagaaagaaacauaacagaaauaguguaucugaccaacaccaccauagagaaggaaauaugccccaaacuagcagaauacagaaauuggucaaagccacaauguaaaauuacaggauuugcaccuuuuucaaaggacaauucaauucggcuuuccgcugguggggacauuugggugacaagagaaccuuaugugucaugcgauccugacaaguguuaucaauuugcccuuggacagggaacaacacuaaacaacgggcauucaaaugacacaguacaugauaggaccccuuaucgaacccuauugaugaaugaguuggguguuccauuucauuuaggaaccaagcaagugugcauagcaugguccagcucaaguugucacgauggaaaagcauggcugcauguuuguguaacugggcaugaugaaaaugcaacugcuagcuucauuuacgaugggaggcuuguagauaguauugguucaugguccaaaaaaauccucaggacccaggagucggaaugcguuuguaucaauggaacuuguacaguaguaaugacugaugggagugcuucaggaagagcugauacuaaaauacuauucauugaggaggggaaaaucguucauauuagccaauugucaggaagugcucagcaugucgaggagugcuccuguuauccucgauauccuggugucagaugugucugcagagacaacuggaaaggcuccaauaggcccaucguagauauaaauguaaaggaucauagcauuguuuccaguuaugugugcucaggacuuguuggagacacacccagaaaaaacgacagcuccagcaguagccauugccugaauccuaacaaugaagaagggggucauggagugaaaggcugggccuuugaugauggaaaugacguguggaugggaagaacgaucagcgagaaguuacgcucagguuaugaaaccuucaaagucauugaaggcugguccaaaccuaacuccaaauugcagauaaauaggcaagucauaguugacagagguaauagguccgguuauucugguauuuucucuguugaaggcaaaagcugcaucaaucggugcuuuuauguggaguugauaaggggaaggaaacaggaaacugaagucugguggaccucaaacaguauuguuguguuuugugguaccucagguacauauggaacaggcucauggccugauggggcggacaucaaucucaugccuauauaa

SEQ ID NO: 46544 - RNA, 1410 nt, Artificial Sequence
  derived and/or modified CDS sequence (wt) from neuraminidase__InfluenzaA__ABB80210
augaauccaaaucaaaagauaauaacgauuggcucuguuucucucacuauugccacaauaugcuuccuuaugcaaauugccauccugguaacuacuguaacauugcauuucaagcaauaugaaugcagcucucccccaaacaaccaaguaaugcugugugaaccaacaauaauagaaagaaacauaacagagauaguguaucugaccaacaccaccauagagaaggaaauaugccccaaacuagcagaauacagaaauuggucaaagccacaauguaaaauuacaggauuugcaccuuuuucuaaggacaauucaauucggcuuuccgcugguggggacauuugggugacaagggaaccuuaugugucaugcgauccugacaaguguuaucaauuugcccuuggacagggaacaacacuaaacaacaggcauucaaaugacacaguacaugauaggaccccuuaucgaacccuauugaugaaugaguuggguguuccauuucauuugggaaccaagcaagugugcauagcaugguccagcucaaguugucacgauggaaaagcauggcugcauguuuguguuacugggcaugaugaaaaugcaacugcuagcuucauuuacgaugggaggcuuguagauaguauugguucaugguccaaaaaaauccucaggacccaggagucggaaugcguuuguaucaauggaacuuguacaguaguaaugacugaugggagugcuucaggaagagcugauacuaaaauacuauucauugaggaggggaaaaucguucauaucagcccacuaucaggaagugcucagcaugucgaggagugcuccuguuauccucgauauccuggugucagaugugucugcagagacaacuggaaaggcuccaauaggcccaucguagauauaaauguaaaggauuauagcauuguuuccaguuaugugugcucaggacuuguuggagacacacccagaaaaaacgacagcuccagcaguagucauugccugaauccuaacaaugaggaagggggucauggagugaaaggcugggccuuugaugauggaaaugacguguggaugggaagaacaaucagcgagaaguuccgcucagguuaugaaaccuucaaagucauugaaggcugguccaaaccuaacuccaaauugcagauaaauaggcaagucauaguugacagagguaauagguccgguuauucugguauuuucucuguugaaggcaaaagcugcaucaaucggugcuuuuauguggaguugauaaggggaaggaaacaggaaacugaagucugguggaccucaaacaguauuguuguguuuuguggcaccucagguacauauggaacaggcucauggccugauggggcggacaucggucucaugccuauauaa

SEQ ID NO: 46545 - RNA, 1410 nt, Artificial Sequence
  derived and/or modified CDS sequence (wt) from neuraminidase__InfluenzaA__ABB80232
augaauccaaaucaaaagauaauaacgauuggcucuguuucucucacuauugccacaauaugcuuccuuaugcaaauugccauccugguaacuacuguaacauugcauuucaagcaauaugaaugcaacucccccccaaacaaccaaguaaugcugugugaaccaacaauaauagaaagaaacauaacagagauaguguaucugaccaacaccaccauagagaaggaaauaugccccaaacuagcagaauacagaaauuggucaaagccgcaauguaaaauuacaggauuugcaccuuuuucuaaggacaauucaauucggcuugccgcugguggggacauuugggugacaagagaaccuuaugugucaugcgauccugacaaguguuaucaauuugcccuuggacagggaacaacacuaaacaacaggcauucaaaugacacaguacaugauaggaccccuuaucgaacccuauugaugaaugaguuggguguuccauuucauuugggaaccaagcaagugugcauagcaugguccagcucaaguugucacgauggaaaagcauggcugcauguuuguguaacugggcaugaugaaaaugcaacugcuagcuucauuuacgaugggaggcuuguagauaguauugguucaugguccaaaaaaauccucaggacccaggagucggaaugcguuuguaucaauggaacuuguacaguaguaaugacugaugggagugcuucaggaagagcugauacuaaaauacuauucauugaggaggggaaaaucguucauauuagccaauugucaggaagugcucagcauguugaggagugcuccuguuauccucgauauccuggugucagaugugucugcagagacaacuggaaaggcuccaauaggcccaucguagauauaaauguaaaggauuauagcauuguuuccaguuaugugugcucaggacuuguuggagacacacccagaaaaaacgacagcuccagcaguagccauugccugaauccuaacaaugaagaagggggucauggagugaaaggcugggccuuugaugauggagaugacguguggaugggaagaacgaucagcgagaaguuacgcucagguuaugaaaccuucaaagucauugagggcugguccaaaccuaacuccaaauugcagauaaauaggcaagucauaguugacagagguaauagguccgguuauucugguauuuucucuguugaaggcaaaagcugcaucaaucggugcuuuuauguggaguugauaaggggaaggaaacaggaaacugaagucugguggaccucaaacaguauuguuguguuuuguggcacuucagguacauauggaacaggcucauggccugauggggcggacaucaaucucaugccuauauaa

SEQ ID NO: 46546 - RNA, 1410 nt, Artificial Sequence
  derived and/or modified CDS sequence (wt) from neuraminidase__InfluenzaA__ABB80243
augaauccaaaucaaaagauaauaacgauuggcucuguuucucucacuauugccacaauaugcuuccuuaugcaaauugccauccugguaacuacuguaacauugcauuucaagcaauaugaaugcaacucccccccaaacaaccaaguaaugcugugugaaccaacaauaauagaaagaaacauaacagagauaguguaucugaccaacaccaccauagagaaggaaauaugccccaaacuagcagaauacagaaauuggucaaagccgcaauguaaaauuacaggauuugcaccuuuuucaaaggacaauucaauucggcuuuccgcugguggggacauuugggugacaagagaaccuuaugugucaugcgauccugacaaguguuaucaauuugcccuuggacagggaacaacacuaaacaacgggcauucaaaugacacaguacaugauaggaccccuuaucgaacccuauugaugaaugaguuggguguuccauuucauuuaggaaccaagcaagugugcauagcaugguccagcucaaguugucacgauggaaaagcauggcugcauguuuguguaacugggcaugaugaaaaugcaacugcuagcuucauuuacgaugggaggcuuguagacaguauugguucaugguccaaaaaaauccucaggacccaggagucggaaugcguuuguaucaauggaacuuguacaguaguaaugacugaugggagugcuucaggaagagcugauacuaaaauacuauucauugaggaggggaaaaucguucauauuagccaauugucaggaagugcucagcaugucgaggagugcuccuguuauccucgauauccuggugucagaugugucugcagagacaacuggaaaggcuccaauaggcccaucguagauauaaauguaaaggaucauagcauuguuuccaguuaugugugcucaggacuuguuggagacacacccagaaaaaacgacagcuccagcaguagccauugccugaauccuaacaaugaagaagggggucauggagugaaaggcugggccuuugaugauggaaaugacguguggaugggaagaacgaucagcgagaaguuacgcucagguuaugaaaccuucaaagucauugaaggcugguccaaaccuaacuccaaauugcagauaaauaggcaagucauaguugacagagguaauagguccgguuauucugguauuuucucuguugaaggcaaaagcugcaucaaucggugcuuuuauguggaguugauaaggggaaggaaaaaggaaaaugaagucugguggaccucaaacaguauuguuguguuuugugguaccucagguacauauggaacaggcucauggccugauggggcggacaucaaucucaugccuauauaa

SEQ ID NO: 46547 - RNA, 1410 nt, Artificial Sequence
  derived and/or modified CDS sequence (wt) from neuraminidase__InfluenzaA__ABB80254
augaauccaaaucaaaagauaauaacgauuggcucuguuucucucacuauugccacaauaugcuuccuuaugcaaauugccauccugguaacuacuguaacauugcauuucaagcaauaugaaugcagcucucccccaaacaaccaaguaaugcugugugaaccaacaauaauagaaagaaacauaacagagauaguguaucugaccaacaccaccauagagaaggaaauaugccccaaacuagcagaauacagaaauuggucaaagccgcaauguaaaauuacaggauuugcaccuuuuucuaaggacaauucaauucggcuuuccgcugguggggacauuugggugacaagggaaccuuaugugucaugcgguccugacaaguguuaucaauuugcccuuggacagggaacaacacuaaacaacaggcauucaaaugacacagugcaugauaggaccccuuaucgaacccuauugaugaaugaguuggguguuccauuucauuugggaaccaagcaagugugcauagcaugguccagcucaaguugucacgauggaaaagcauggcugcauguuuguguaacugggcaugaugaaaaugcaacugcuagcuucauuuacgaugggaggcuuguagauaguauugguucaugguccaaaaaaauccucaggacccaggagucggaaugcguuuguaucaauggaauuuguacaguaguaaugacugaugggagugcuucaggaagagcugauacuaaaauacuauucauugaggaggggaaaaucguucauaucagcccacugucaggaagugcucagcaugucgaggagugcuccuguuauccucgauauccuggugucagaugugucugcagagacaacuggaaaggcuccaauaggcccaucguagauauaaauguaaaggauuauagcauuguuuccaguuaugugugcucaggacuuguuggagacacacccagaaaaaacgacagcuccagcaguagucauugccugaauccuaacaaugaggaagggggucauggagugaaaggcugggccuuugaugauggaaaugacguguggaugggaagaacgaucagcgaaaaguuccgcucagguuaugaaaccuucaaagucauugaaggcugguccaaaccuaacuccaaauugcagauaaauaggcaagucauaguugacagagguaauagguccgguuauucugguauuuucucuguugaaggcaaaagcugcaucaaucggugcuuuuauguggaguugauaaggggaaggaaacaggaaacugaagucugguggaccucaaacaguauuguuguguuuuguggcacaucagguacauauggaacaggcucauggccugauggggcggacaucaaucucaugccuauauaa

SEQ ID NO: 46548 - RNA, 1410 nt, Artificial Sequence
  derived and/or modified CDS sequence (wt) from neuraminidase__InfluenzaA__ABB80495
augaauccaaaucaaaagauaauaacgauuggcucuguuucucucacuauugccacaauaugcuuccuuaugcaaauugccauccugguaacuacuguaacauugcauuucaagcaauaugaaugcagcucucccccaaacaaccaaguaaugcugugugaaccaacaauaauagaaagaaacauaacagagauaguguaucugaccaacaccaccauagagaaggaaauaugccccaaacuagcagaauacagaaauuggucaaagccgcaauguaaaauuacaggauuugcaccuuuuucuaaggacaauucaauucggcuuuccgcugguggggacauuugggugacaagggaaccuuaugugucaugugauccugacaaguguuaucaauuugcccuuggacagggaacaacacuaaacaacaggcauucaaaugacacaguacaugauaggaccccuuaucgaacccuauugaugaaugaguuggguguuccauuucauuugggaaccaagcaagugugcauagcaugguccagcucaaguugucacgauggaaaagcauggcugcauguuuguguaacugggcaugaugaaaaugcaacugcuagcuucauuuacgaugggaggcuuguagauaguauugguucaugguccaaaaaaauccucaggacccaggagucggaaugcguuuguaucaauggaaccuguacaguaguaaugacugaugggagugcuucaggaagagcugauacuaaaauacuauucauugaggaggggaaaaucguucauaucagcccacugucaggaagugcucagcaugucgaggagugcuccuguuauccucgauauccuggugucagaugugucugcagagacaacuggaaaggcuccaauaggcccaucguagauauaaauguaaaggauuauagcauuguuuccaguuaugugugcucaggacuuguuggagacacacccagaaaaaacgacagcuccagcaguagucauugccugaauccuaacaaugaggaagggggucauggagugaaaggcugggccuuugaugauggaaaugacguguggaugggaagaacaaucagcgagaaguuccgcucagguuaugaaaccuucaaagucauugaaggcugguccaaaccuaacuccaaauugcagauaaauaggcaagucauaguugacagagguaauaggucugguuauucugguauuuucucuguugaaggcaaaagcugcaucaaucggugcuuuuauguggaguugauaaggggaaggaaacaggaaacugaagucugguggaccucaaacaguauuguugcguuuuguggcaccucagguacauauggaacaggcucauggccugauggggcggacaucaaucucaugccuauauaa

SEQ ID NO: 46549 - RNA, 1410 nt, Artificial Sequence
  derived and/or modified CDS sequence (wt) from neuraminidase__InfluenzaA__ABB80506
augaauccaaaucaaaagauaauaacgauuggcucuguuucucucacuauugccacaauaugcuuccuuaugcaaauugccauccugguaacuacuguaacauugcauuucaagcaauaugaaugcaacucccccccaaacaaccaaguaaugcugugugaaccaacaauaauagaaagaaacauaacagagauaguguaucugaccaacaccaccauagagaaggaaauaugccccaaacuagcagaauacagaaauuggucaaagccgcaauguaaaauuacaggauuugcaccuuuuucaaaggacaauucaauucggcuuuccgcugguggggacauuugggugacaagagaaccuuaugugucaugcgauccugacaaguguuaucaauuugcccuuggacagggaacaacacuaaacaacgggcauucaaaugacacaguacaugauaggaccccuuaucgaacccuauugaugaaugaguuggguguuccauuucauuuaggaaccaagcaagugugcauagcaugguccagcucaaguugucacgauggaaaagcauggcugcauguuuguguaacugggcaugaugaaaaugcaacugcuagcuucauuuacgaugggaggcuuguagauaguauugguucaugguccaaaaaaauccucaggacccaggagucggaaugcguuuguaucaauggaacuuguacaguaguaaugacugaugggagugcuucaggaagagcugauacuaaaauacuauucauugaggaggggaaaaucguucauauuagccaauugucaggaagugcucaacaugucgaggagugcuccuguuauccucgauauccuggugucagaugugucugcagagacaacuggaaaggcuccaauaggcccaucguagauauaaauguaaaggaucauagcauuguuuccaguuaugugugcucaggacuuguuggagacacacccagaaaaaacgacagcuccagcaguagccauugccugaauccuaacaaugaagaagggggucauggagugaaaggcugggccuuugaugauggaaaugacguguggaugggaagaacgaucagcgagaaguuacgcucagguuaugaaaccuucaaagucauugaaggcugguccaaaccuaacuccaaauugcagauaaauaggcaagucauaguugacagagguaauagguccgguuauucugguauuuucucuguugaaggcaaaagcugcaucaaucggugcuuuuauguggaguugauaaggggaaggaaacaggaaacugaagucugguggaccucaaacaguauuguuguguuuugugguaccucagguacauauggaacaggcucauggccugauggggcggacaucaaucucaugccuauauaa

SEQ ID NO: 46550 - RNA, 1410 nt, Artificial Sequence; identical to SEQ ID NO: 46526
  derived and/or modified CDS sequence (wt) from neuraminidase__InfluenzaA__ABB80517

SEQ ID NO: 46551 - RNA, 1410 nt, Artificial Sequence; identical to SEQ ID NO: 46526
  derived and/or modified CDS sequence (wt) from neuraminidase__InfluenzaA__ABB80532

SEQ ID NO: 46552 - RNA, 1410 nt, Artificial Sequence
  derived and/or modified CDS sequence (wt) from neuraminidase__InfluenzaA__ABB80644
augaauccaaaucaaaagauaauaacgauuggcucuguuucucucacuauugccacaauaugcuuccuuaugcaaauugccauccugguaacuacuguaacauugcauuucaagcaauaugaaugcagcucucccccaaacaaccaaguaaugcugugugaaccaacaauaauagaaagaaacauaacagagauaguguaucugaccaacaccaccauagagaaggaaauaugccccaaacuagcagaauacagaaauuggucaaagccgcaauguaaaauuacaggauuugcaccuuuuucuaaggacaauucaauucggcuuuccgcugguggggacauuugggugacaagggaaccuuaugugucaugcgauccugacaaguguuaucaauuugcccuuggacagggaacaacacuaaacaacaggcauucaaaugacacaguacaugauaggaccccuuaucgaacccuauugaugaaugaguuggguguuccauuucauuugggaaccaagcaagugugcauagcaugguccagcucaaguugucacgauggaaaagcauggcugcauguuuguguaacugggcaugaugaaaaugcaacugcuagcuucauuuacgaugggaggcuuguagauaguauugguucaugguccaacaaaauccucaggacccaggagucggaaugcguuuguaucaauggaacuuguacaguaguaaugacugaugggagugcuucaggaagagcugauacuaaaauacuauucauugaggaggggaaaaucguucauaucagcccacugucaggaagugcucagcaugucgaggagugcuccuguuauccucgauauccuggugucagaugugucugcagagacaacuggaaaggcuccaauaggcccaucguagauauaaauguaaaggauuauagcauuguuuccaguuaugugugcucaggacuuguuggagacacacccagaaaaaacgacagcuccagcaguagucauugccugaauccuaacaaugaggaagggggucauggagugaaaggcugggccuuugaugauggaaaugacguguggaugggaagaacgaucagcgagaaguuccgcucagguuaugaaaccuucaaagucauugaaggcugguccaaaccuaacuccaaauugcagauaaauaggcaagucauaguugacagagguaauagguccgguuauucugguauuuucucuguugaaggcaaaagcugcaucaaucggugcuuuuauguggaguugauaaggggaaggaaacaggaaacugaagucugguggaccucaaacaguauuguuguguuuuguggcaccucagguacauauggaacaggcucauggccugauggggcggacaucaaucucaugccuauauaa

SEQ ID NO: 46553 - RNA, 1410 nt, Artificial Sequence
  derived and/or modified CDS sequence (wt) from neuraminidase__InfluenzaA__ABB80664
augaauccaaaucaaaagauaauaacgauuggcucuguuucucucacuauugccacaauaugcuuccuuaugcaaauugccauccugguaacuacuguaacauugcauuucaagcaauaugaaugcagcucucccccaaacaaccaaguaaugcugugugaaccaacaauaauagaaagaaacauaacagagauaguguaucugaccaacaccaccauagagaaggaaauaugccccaaacuagcagaauacagaaauuggucaaagccgcaauguaaaauuacaggauuugcaccuuuuucuaaggacaauucaauucggcuuuccgcugguggggacauuugggugacaagggaaccuuaugugucgugcgauccugacaaguguuaucaauuugcccuuggacagggaacaacacuaaacaacaggcauucaaaugacacaguacaugauaggaccccuuaucgaacccuauugaugaaugaguuggguguuccauuucauuugggaaccaagcaagugugcauagcaugguccagcucaaguugucacgauggaaaagcauggcugcauguuuguguaacugggcaugaugaaaaugcaacugcuagcuucauuuacgaugggaggcuuguagauaguauugguucaugguccaaaaaaauccucaggacccaggagucggaaugcguuugcaucaauggaacuuguacaguaguaaugacugaugggagugcuucaggaagagcugauacuaaaguacuauucauugaggaggggaaaaucguucauaucagcccacugucaggaagugcucagcaugucgaggagugcuccuguuauccucgauauccuggugucagaugugucugcagagacaacuggaaaggcuccaauaggcccaucguagauauaaauguaaaggauuauagcauuguuuccaguuaugugugcucaggacuuguuggagacacacccagaaaaaacgacagcuccagcaguagucauugccugaauccuaacaaugaggaagggggucauggagugaaaggcugggccuuugaugauggaaaugacguguggaugggaagaacgaucagcgagaaguuccgcucagguuaugaaaccuucaaagucauugaaggcugguccaaaccuaacuccaaauugcagauaaauaggcaagucauaguugacagagguaauagguccgguuauucugguauuuucucuguugaaggcaaaagcugcaucaaucggugcuuuuauguggaguugauaaggggaaggaaacaggaaacugaagucugguggaccucaaacaguauuguuguguuuuguggcaccucagguacauauggaacaggcucauggccugauggggcggacaucaaucucaugccuauauaa

SEQ ID NO: 46554 - RNA, 1410 nt, Artificial Sequence
  derived and/or modified CDS sequence (wt) from neuraminidase__InfluenzaA__ABB80675
augaauccaaaucaaaagauaauaacgauuggcucuguuucucucacuauugccacaauaugcuuccuuaugcaaauugccauccugguaacuacuguaacauugcauuucaagcaauaugaaugcaacucccccccaaacaaccaaguaaugcugugugaaccaacaauaauagaaagaaacauaacagagauaguguaucugaccaacaccaccauagagaaggaaauaugccccaaacuagcagaauacagaaauuggucaaagccgcaauguaaaauuacaggauuugcaccuuuuucuaaggacaauucaauucggcuugccgcugguggggacauuugggugacaagagaaccuuaugugucaugcgauccugacaaguguuaucaauuugcccuuggacagggaacaacacuaaacaacaggcauucaaaugacacaguacaugauaggaccccuuaucgaacccuauugaugaaugaguuggguguuccauuucauuugggaaccaagcaagugugcauagcaugguccagcucaaguugucacgauggaaaagcauggcugcauguuugugugacugggcaugaugaaaaugcaacugcuagcuucauuuacgaugggaggcuuguagauaguauugguucaugguccaaaaaaauccucaggacccaggagucggaaugcguuuguaucaauggaacuuguacaguaguaaugacugaugggagugcuucaggaagagcugauacuaaaauacuauucauugaggaggggaaaaucguucauauuagccaauugucaggaagugcucagcaugucgaggagugcuccuguuauccucgauauccuggugucagaugugucugcagagacaacuggaaaggcuccaauaggcccaucguagauauaaauguaaaggauuauagcauuguuuccaguuaugugugcucaggacuuguuggagacacacccagaaaaaacgacagcuccagcaguagcuauugccugaauccuaacaaugaagaagggggucauggagugaaaggcugggccuuugaugauggggaugacguguggaugggaagaacgaucagcgagaaguuacgcucagguuaugaaaccuucaaagucauugaaggcugguccaaaccuaacuccaaauugcagauaaauaggcaagucauaguugacagagguaauagguccgguuauucugguauuuucucuguugaaggcaaaagcugcaucaaucggugcuuuuauguggaguugauaaggggaaggaaacaggaaacugaagucugguggaccucaaacaguauuguuguguuuuguggcaccucagguacauauggaacaggcucauggccugauggggcggacaucaaucucaugccuauauaa

SEQ ID NO: 46555 - RNA, 1410 nt, Artificial Sequence
  derived and/or modified CDS sequence (wt) from neuraminidase__InfluenzaA__ABB80685
augaauccaaaucaaaagauaauaacgauuggcucuguuucucucacuauugccacaauaugcuuccuuaugcaaauugccauccugguaauuacuguaacauugcauuucaagcaauaugaaugcaacucccccccaaacaaccaaguaaugcugugugaaccaacaauaauagaaagaaacauaacagagauaguguaucugaccaacaccaccauagagaaggaaauaugccccaaacuagcagaauacagaaauuggucaaagccgcaauguaaaauuacaggauuugcaccuuuuucaaaggacaauucaauucggcuuuccgcugguggggacauuugggugacaagagaaccuuaugugucaugcgauccugacaaguguuaucaauuugcccuuggacagggaacaacacuaaacaacgggcauucaaaugacacaguacaugauaggaccccuuaucgaacccuauugaugaaugaguuggguguuccauuucauuuaggaaccaagcaagugugcauagcaugguccagcucaaguugucacgauggaaaagcauggcugcauguuuguguaacugggcaugaugaaaaugcaacugcuagcuucauuuacgaugggaggcuuguagauaguauugggucaugguccaaaaaaauccucaggacccaggagucggaaugcguuuguaucaauggaacuuguacaguaguaaugacugaugggagugcuucaggaagagcugauacuaaaauacuauucauugaggaggggaaaaucguucauauuagccaauugucaggaagugcucagcaugucgaggagugcuccuguuauccucgauauccuggugucagaugugucugcagagacaacuggaaaggcuccaauaggcccaucguagauauaaauguaaaggaucauagcauuguuuccaguuaugugugcucaggacuuguuggagacacacccagaaaaaacgacagcuccagcaguagccauugccugaauccuaacaaugaagaagggggucauggagugaaaggcugggccuuugaugauggaaaugacguguggaugggaagaacgaucagcgagaaguuacgcucagguuaugaaaccuucaaagucauugaaggcugguccaaaccuaacuccaaauugcagauaaauaggcaagucauaguugacagagguaauagguccgguuauucugguauuuucucuguugaaggcaaaagcugcaucaaucggugcuuuuauguggaguugauaaggggaaggaaacaggaaacugaagucugguggaccucaaacaguauuguuguguuuugugguaccucagguacauauggaacaggcucauggccugauggggcggacaucaaucucaugccuauauaa

SEQ ID NO: 46556 - RNA, 1410 nt, Artificial Sequence; identical to SEQ ID NO: 46543
  derived and/or modified CDS sequence (wt) from neuraminidase__InfluenzaA__ABB80696

SEQ ID NO: 46557 - RNA, 1410 nt, Artificial Sequence
  derived and/or modified CDS sequence (wt) from neuraminidase__InfluenzaA__ABB80707
augaauccaaaucaaaagauaauaacgauuggcucuguuucucucacuauugccacaauaugcuuccuuaugcaaauugccauccugguaacuacuguaacauugcauuucaagcaauaugaaugcagcucucccccaaacaaccaaguaaugcugugugaaccaacaauaauagaaagaaacauaacagagauaguguaucugaccaacaccaccauagagaaggaaauaugccccaaacuagcagaauacagaaauuggucaaagccgcaauguaaaauuacaggauuugcaccuuuuucuaaggacaauucaauucggcuuuccgcugguggggacauuugggugacaagggaaccuuaugugucgugcgguccugacaaguguuaucaauuugcccuuggacagggaacaacacuaaacaacaggcauucaaaugacacaguacaugauaggaccccuuaucgaacccuauugaugaaugaguuggguguuccauuucauuugggaaccaagcaagugugcauagcaugguccagcucaaguugucacgauggaaaagcauggcugcauguuuguguaacugggcaugaugaaaaugcaacugcuagcuucauuuacgaugggaggcuuguagauaguauugguucaugguccaaaaaaauccucaggacccaggagucggaaugcguuuguaucaauggaacuuguacaguaguaaugacugaugggagugcuucaggaagagcugauacuaaaauacuauucauugaggaggggaaaaucguucauaucagcccacugucaggaagugcucagcaugucgaggagugcuccuguuauccucgauauccuggugucagaugugucugcagagacaacuggaaaggcuccaauaggcccaucguagauauaaauguaaaggauuauagcauuguuuccaguuaugugugcucaggacuuguuggagacacacccagaaaaaacgacagcuccagcaguagucauugccugaauccuaacaaugaggaagggggucauggagugaaaggcugggccuuugaugauggaaaugacguguggaugggaagaacgaucagcgagaaguuccgcucagguuaugaaaccuucaaagucauugaaggcugguccaaaccuaacuccaaauugcagauaaauaggcaagucauaguugacagagguaauagguccgguuauucugguauuuucucuguugaaggcaaaagcugcaucaaucggugcuuuuauguggaguugauaaggggaaggaaacaggaaacugaagucugguggaccucaaacaguauuguuguguuuuguggcaccucagguacauauggaacaggcucauggccugauggggcggacaucaaucucaugccuauauaa

SEQ ID NO: 46558 - RNA, 1410 nt, Artificial Sequence; identical to SEQ ID NO: 46526
  derived and/or modified CDS sequence (wt) from neuraminidase__InfluenzaA__ABB80716

SEQ ID NO: 46559 - RNA, 1410 nt, Artificial Sequence
  derived and/or modified CDS sequence (wt) from neuraminidase__InfluenzaA__ABB80725
augaauccaaaucaaaagauaauaacgauuggcucuguuucucucacuauugccacaauaugcuuccuuaugcaaauugccauccugguaacuacuguaacauugcauuucaagcaauaugaaugcagcucucccccaaacaaccaaguaaugcugugugaaccaacaguaauagaaagaaacauaacagagauaguguaucugaccaacaccaccauagagaaggaaauaugccccaaacuagcagaauacagaaauuggucaaagccgcaauguaaaauuacaggauuugcaccuuuuucuaaggacaauucaauucggcuuuccgcugguggggacauuugggugacaagggaaccuuaugugucaugcgacccugacaaguguuaucaauuugcccuuggacagggaacaacacuaaacaacaggcauucaaaugacacaguacaugauaggaccccuuaucgaacccuauugaugaaugaguuggguguuccauuucauuugggaaccaagcaagugugcauagcaugguccagcucaaguugucacgauggaaaagcauggcugcauguuuguguaacugggcaugaugaaaaugcaacugcuagcuucauuuacgaugggaggcuuguagauaguauugguucaugguccaaaaaaauccucaggacccaggagucggaaugcguuuguaucaauggaacuuguacaguaguaaugacugaugggagugcuucaggaagagcugauacuaaaauauuauucauugaggaggggaaaaucguucauaucagcccacugucaggaagugcucagcaugucgaggagugcuccuguuauccucgauauccuggugucagaugugucugcagagacaacuggaaaggcuccaauaggcccaucguagauauaaauguaaaggauuauagcauuguuuccaguuaugugugcucaggacuuguuggagacacacccagaaaaaacgacagcuccagcaguagucauugccugaauccuaacaaugaggaagggggucauggagugaaaggcugggccuuugaugauggaaaugacguguggaugggaagaacaaucagcgagaaguuccgcucagguuaugaaaccuucaaagucauugaaggcugguccaaaccuaacuccaaauugcaaauaaauaggcaagucauaguugacagagguaauagguccgguuauucugguauuuucucuguugaaggcaaaagcugcaucaaucggugcuuuuauguggaguugauaaggggaaggaaacaggaaacugaagucugguggaccucaaacaguauuguugcguuuuguggcaccucagguacauauggaacaggcucauggccugauggggcggacaucaaucucaugccuauauaa

SEQ ID NO: 46560 - RNA, 1410 nt, Artificial Sequence
  derived and/or modified CDS sequence (wt) from neuraminidase__InfluenzaA__ABB80740
augaauccaaaucaaaagauaauaacgauuggcucuguuucucucacuauugccacaauaugcuuccuuaugcaaauugccauccugguaacuacuguaacauugcauuucaagcaauaugaaugcugcucucccccaaacaaccaaguaaugcugugugaaccaacaauaauagaaagaaacauaacagagauaguguaucugaccaacaccaccauagagaaggaaauaugccccaaacuagcagaauacagaaauuggucaaagccgcaauguaaaauuacaggauuugcaccuuuuucuaaggacaauucaauucggcuuuccgcugguggggacauuugggugacaagggaaccuuaugugucaugcgauccugacaaguguuaucaauuugcccuuggacagggaacaacacuaaacaacaggcauucaaaugacacaguacaugauaggaccccuuaucgaacccuauugaugaaugaguuggguguuccauuucauuugggaaccaagcaagugugcauagcaugguccagcucaaguugucacgauggaaaagcauggcugcauguuuguguaacugggcaugaugaaaaugcaacugcuagcuucauuuacgaugggaggcuuguagauaguauugguucaugguccaaaaaaauccucaggacccaggagucggaaugcguuuguaucaauggaacuuguacaguaguaaugacugaugggagugcuucaggaagagcugauacuaaaauacuauucauugaggaggggaaaaucguucauaucagcccacugucaggaagugcucagcaugucgaggagugcuccuguuauccucgauauccuggugucagaugugucugcagagacaacuggaaaggcuccaauaggcccaucguagauauaaauguaaaggauuauagcauuguuuccaguuaugugugcucaggacuuguuggagacacacccagaaaaaacgacagcuccagcaguagucauugccugaauccuaacaaugaggaagggggucauggagugaaaggcugggccuuugaugauggaaaugacguguggaugggaagaacaaucagcgagaaguuccgcucagguuaugaaaccuucaaagucauugaaggcugguccaaaccuaacuccaaauugcagauaaauaggcaagucauaguugacagagguaauagguccgguuauucugguauuuucucuguugaaggcaaaagcugcaucaaucggugcuuuuauguggaguugauaaggggaaggaaacaggaaacugaagucugguggaccucaaacaguauuguugcguuuuguggcaccucagguacauauggaacaggcucauggccugauggggcggacaucaaucucaugccuauauaa

SEQ ID NO: 46561 - RNA, 1410 nt, Artificial Sequence; identical to SEQ ID NO: 46526
  derived and/or modified CDS sequence (wt) from neuraminidase__InfluenzaA__ABB80751

SEQ ID NO: 46562 - RNA, 1410 nt, Artificial Sequence
  derived and/or modified CDS sequence (wt) from neuraminidase__InfluenzaA__ABB82186
augaauccaaaucaaaagauaauaacgauuggcucuguuucucuaacuauugccacaauaugcuuccuuaugcaaauagccauccugguaacuacuguaacauugcauuucaagcaauaugaaugcaacucccccccaaacaaccaaguaaugcugugugaaccaacaauaauagaaagaaacauaacagagauaguguaucugaccaacaccaccauagagaaggaaauaugccccaaacuagcagaauauagaaauuggucaaagccgcaauguaaaauuacaggauuugcaccuuuuucuaaggacaauucaauucggcuuuccgcugguggggacauuugggugacaagagaaccuuaugugucaugcgauccugacaaguguuaucaauuugcccuuggacagggaacaacacuaaacaacaggcauucaaaugacacaguacaugauaggaccccuuaccgaacccuauugaugaaugaguuggguguuccauuucauuugggaaccaagcaaguaugcauagcaugguccagcucaaguugucacgauggaaaagcauggcugcauguuuguguaacugggcaugaugaaaaugcaacugcuagcuucauuuacgaugggagacuuguagauaguauugguucaugguccaaaaaaauccucaggacccaggagucggaaugcguuuguaucaauggaacuuguacaguaguaaugacugaugggagugcuucaggaagagcugauaccaaaauacuauucauugaggaggggaaaaucguucauacuagcaaauugucaggaagugcucagcaugucgaggagugcuccuguuauccucgauauccuggugucagaugugucugcagagacaacuggaaaggcuccaauaggcccaucguagauauaaauguaaaggauuauagcauuguuuccaguuaugugugcucaggacuuguuggagacacacccagaaaaaacgacagcuccagcaguagccauugccuggauccuaacaaugaagaagggggucauggagugaaaggcugggccuuugaugauggaaaugacguguggaugggcagaacgaucagcgagaagucacgcucagguuaugaaaccuucaaggucauugaaggcugguccaaacccaacuccaaauugcagauaaauaggcaagucauaguugaaagagguaauaggucugguuauucugguauuuuuucuguugaaggcaaaagcugcaucaaucggugcuuuuauguggaguugauaaggggaaggaaaccggaaacugaagucugguggaccucaaacaguauuguuguguucuguggcaccucagguacauauggaacaggcucauggccugauggggcggacaucaaucucaugccuauauaa

SEQ ID NO: 46563 - RNA, 1413 nt, Artificial Sequence; identical to SEQ ID NO: 46408
  derived and/or modified CDS sequence (wt) from neuraminidase__InfluenzaA__ABB82197

SEQ ID NO: 46564 - RNA, 1413 nt, Artificial Sequence
  derived and/or modified CDS sequence (wt) from neuraminidase__InfluenzaA__ABB82208
augaauccaaaucaaaaaauaauaaccauuggaucaaucaguauagcaaucggaauaauuagucuaauguugcaaauaggaaauauuauuucaauaugggcuagucacucaauccaaacuggaagucaaaaccacacuggaauaugcaaccaaagaaucaucacauaugaaaacagcaccugggugaaucacacauauguuaauauuaacaacacuaauguuguugcuggaaaggacaaaacuucagugacauuggccggcaauucaucucuuuguucuaucaguggaugggcuauauacacaaaagacaacagcauaagaauuggcuccaaaggagauguuuuugucauaagagaaccuuucauaucauguucucacuuggaaugcagaaccuuuuuucugacccaaggugcucuauuaaaugacaaacauucaaauggaaccguuaaggacagaaguccuuauagggccuuaaugagcuguccucuaggugaagcuccguccccauacaauucaaaguuugaaucaguugcauggucagcaagcgcaugucaugauggcaugggcugguuaacaaucggaauuucugguccagacaauggagcuguggcuguacuaaaauacaacggaauaauaacugaaaccauaaaaaguuggaaaaagcgaauauugagaacacaagagucugaauguguuugugugaacgggucauguuucaccauaaugaccgauggcccgaguaauggggccgccucguacaaaaucuucaagaucgaaaaggggaagguuacuaaaucaauagaguugaaugcacccaauuuucauuaugaggaauguuccuguuacccagacacuggcacagugauguguguaugcagggacaacuggcaugguucaaaucgaccuugggugucuuuuaaucaaaacuuggauuaucaaauaggauacaucugcaguggaguguucggugacaauccgcgucccaaagauggaaagggcagcuguaauccagugacuguugauggagcagacggaguuaagggguuuucauacaaauaugguaaugguguuuggauaggaaggacuaaaaguaacagacuuagaaagggguuugagaugauuugggauccuaauggauggacagauaccgacagugauuucucagugaaacaggauguuguggcaauaacugauuggucaggguacagcggaaguuucguucaacauccugaguuaacaggauuggacuguauaagaccuugcuucuggguugaguuagucagaggacugccuagagaaaauacaacaaucuggacuagugggagcagcauuucuuuuuguggcguugauagugauacugcaaacuggucuuggccagacggugcugaguugccguucaccauugacaaguag

SEQ ID NO: 46565 - RNA, 1413 nt, Artificial Sequence
  derived and/or modified CDS sequence (wt) from neuraminidase__InfluenzaA__ABB82219
augaauccaaaucaaaaaauaauaaccauuggaucaaucaguauagcaaucggaauaauuagucuaauguugcaaauaggaaauauuauuucaauaugggcuagucacucaauccaaacuggaagucaaaaccacacuggaauaugcaaccaaagaaucaucacauaugaaaacagcaccugggugaaucacacauauguuaauauuaacaacacuaauguuauugcugaaaaggacaaaacuucagugacauuggccggcaauucaucucuuuguuccaucaguggaugggcuauauacacaaaagacaacagcauaagaauuggcuccaaaggagauguuuuugucauaagagaaccuuucauaucauguucuaacuuggaaugcagaaccuuuuuucugacccaaggugcucuauuaaaugacaaacauucaaaugggaccguuaaggacagaaguccuuauagggccuuaaugagcuguccucuaggugaagcuccguccccauacaauucaaaguuugaaucaguugcauggucagcaagcgcaugccaugauggcaugggcugguuaacaaucggaauuucugguccagacaauggagcuguggcuguacuaaaauacaacggaauaauaacugaaaccauaaaaaguuggaaaaagcgaauauuaagaacacaagagucugaaugugucugugugaacgggucauguuucaccauaaugaccgauggcccgaguaauggggccgccucguacaaaaucuucaagaucgaaaaggggaagguuacuaaaucaauagaguugaaugcacccaauuuucauuaugaggaauguuccuguuacccagacacuggcacagugauguguguaugcagggacaacuggcaugguucaaaucgaccuugggugucuuuuaaucaaaacuuggauuaucaaauaggauacaucugcaguggaguguucggugacaauccucgucccaaagauggagagggcagcuguaauccagugacuguugauggagcagacggaguaaagggguuuucauacaaauaugguaaugguguuuggauaggaaggacuaaaaguaacagacuuagaaagggguuugagaugauuugggauccuaauggauggacagauaccgacagugauuucucagugaaacaggauguuguggcaauaacugauuggucaggguacagcggaaguuuuguucaacauccugaguuaacaggauuggacuguauaagaccuugcuucuggguugaguuagucagaggacugccuagagaaaauacaacaaucuggacuagugggagcagcauuucuuuuuguggcguuaauagugaugcugcagacuggucuuggccagacggugcugaguugccguucaccauugacaaguag

SEQ ID NO: 46566 - RNA, 1410 nt, Artificial Sequence
  derived and/or modified CDS sequence (wt) from neuraminidase__InfluenzaA__ABB82230
augaauccaaaucaaaagauaauaacaauuggcucugucucucucaccauugcaacaguaugcuuccucaugcagauugccauccugguaacuacuguaacauugcauuucaagcaauaugagugcgacucccccgcgaacaaccaaguaaugccgugugaaccaauaauaauagaaaggaacauaacagagauaguguauuugacuaacaccaccauagagaaagagauaugccccaaauuaguggaauacagaaauuggucaaagccgcaauguaaaauuacaggauuugcaccuuuuucuaaggacaauucaauucggcuuucugcugguggggacauuugggugacgagagaaccuuaugugucaugcgauccuggcaaguguuaucaauuugcacucgggcaggggaccacacuagacaacaaacauucaaaugacacaauacaugauagaaucccucaucgaacccuauugaugaaugaguuggguguuccauuucauuuaggaaccaggcaaguguguauagcaugguccagcucaaguugucacgauggaaaagcauggcugcauguuugugucacuggggaugauaaaaaugcaacugcuagcuucauuuacgaugggaggcuuguggacaguauugguucauggucucaaaauauccucaggacccaggagucggaaugcguuuguaucaaugggacuuguacaguaguaaugacugauggaagugcuucaggaagagcugauacuagaauacuauucauugaagaggggaaaauuguccauauuagcccauugucaggaagugcucagcauguagaggaguguuccuguuauccucgauauccuggcgucagauguaucugcagagacaacuggaaaggcucuaauaggcccaucguagauauaaaugugaaagauuauagcauugauucccguuaugugugcucagggcuuguuggcgacacacccagaaacaacgacagaucuagcaauagcaauugcaggaauccuaacaaugauaaagggaaucauggagugaaaggcugggccuuugacgauggaaaugacguguggaugggaagaacgaucagcaaggauucacgcucagguuaugaaaccuucaaagucauuggugguugguccacaccuaauuccaaaucgcagauaaauaggcaagucauaguugacagcgauaauaggucagguuauucugguauuuucucuguugagggcaaaagcugcaucaauaggugcuuuuacguggaguugauaaggggaagggaacaggagacuagaguaugguggaccucaaacaguauuguuguguuuuguggcacuucagguaccuaugggacaggcucauggccugauggggcggacaucaaucucaugccuauauaa

SEQ ID NO: 46567 - RNA, 1410 nt, Artificial Sequence
  derived and/or modified CDS sequence (wt) from neuraminidase__InfluenzaA__ABB83018
augaauccaaaucaaaaaauaauaacgauuggcucuguuucucucaccauugccacaauaugcuuccuuacgcaaauugccauccugguaacuacuguaacauugcauuucaagcaauauggaugcaacucccccccaaacaaccaagugaugcugugugaaccaacaauaauagaaagaaacauaacagagauaguguaucugaccaacaccaccauagagaaggaaauaugccccaaacuagcagaauacagaaauuggucaaagccgcaauguaacauuacuggauuugcaccuuuuucuaaggacaauucgauucggcuuuccgcugguggggacaucuggguuacaagagaaccuuaugugucaugcgauccugacaaguguuaucaauuugcccuuggacagggaacaacacuaaacaacgggcauucaaaugacacaguacaugauaggaccccuuaucggacccuauugaugaaugaguuggguguuccauuucauuugggaaccaagcaagugugcauagcaugguccagcucaaguugucacgaugggaaagcauggcugcauguuuguguaacgggggaugauaaaaaugcaacugcuagcuucauuuacaaugggaggcuuguagauaguauagguucaugguccaaaaaaauccucaggacccaggagucggaaugcguuuguaucaauggaacuuguacaguaguaaugacugaugggagugcuucaggaaaagcugauacuaaaauacuauucauugaggaggggaaaauuguucauacuagccuauugucagggagugcucagcaugucgaggagugcuccuguuauccucgauauccuggugucagaugugucugcagagacaacuggaaaggcuccaauaggcccaucguagauauaaauguaaaggauuauagcauuguuuccaguuaugugugcucaggacuuguuggagacacacccagaaaaaacgacagcuccagcaguagccauugcuuggauccuaacaaugaggaagguggucauggagugaaagggugggccuuugaugauggaaaugacguguggaugggaagaacgaucagcgagaaguuacgcucaggauaugaaaccuucaaagucauugaaggcugguccaaaccuaacuccaaacugcagauaaauaggcaagucauaguugacagagguaauagguccgguuauucugguauuuucucuguugaaggcaaaagcugcaucaaucggugcuuuuauguggagcugauaaggggaaggaaccaggaaacugaagucuuguggaccucaaacaguauuguuguguuuuguggcaccucagguacauauggaacaggcucauggccugauggggcggacaucaaucucaugccuauauaa

SEQ ID NO: 46568 - RNA, 1410 nt, Artificial Sequence
  derived and/or modified CDS sequence (wt) from neuraminidase__InfluenzaA__ABB83029
augaauccaaaucaaaaaauaauaacgauuggcucuguuucucucaccauugccacaauaugcuuccuuacgcaaauugccauccugguaacuacuguaacauugcauuucaagcaauauggaugcaacucccccccaaacaaccaagugaugcugugugaaccaacaauaauagaaagaaacauaacagagauaguguaucugaccaacaccaccauagagaaggaaauaugccccaaacuagcagaauacagaaauuggucaaagccgcaauguaacauuacuggauuugcaccuuuuucuaaggacaauucgauucggcuuuccgcugguggggacaucuggguuacaagagaaccuuaugugucaugcgauccugacaaguguuaucaauuugcccuuggacagggaacaacacuaaacaacgggcauucaaaugacacaguacaugauaggaccccuuaucggacccuauugaugaaugaguuggguguuccauuucauuugggaaccaagcaagugugcauagcaugguccagcucaaguugucacgauggaaaagcauggcugcauguuuguguaacgggggaugauaaaaaugcaacugcuagcuucauuuacaaugggaggcuuguagauaguauagguucaugguccaaaaaaauccucaggacccaggagucggaaugcguuuguaucaauggaacuuguacaguaguaaugacugaugggagugcuucaggaaaagcugauacuaaaauacuauucauugaggaggggaaaauuguucauacuagccuauugucagggagugcucagcaugucgaggagugcuccuguuauccucgauauccuggugucagaugugucugcagagacaacuggaaaggcuccaauaggcccaucguagauauaaauguaaaggauuauagcauuguuuccaguuaugugugcucaggacuuguuggagacacacccagaaaaaacgacagcuccagcaguagccauugcuuggauccuaacaaugaggaagguggucauggagugaaagggugggccuuugaugauggaaaugacguguggaugggaagaacgaucagcgagaaguuacgcucaggauaugaaaccuucaaagucauugaaggcugguccaaaccuaacuccaaacugcagauaaauaggcaagucauaguugacagagguaauagguccgguuauucugguauuuucucuguugaaggcaaaagcugcaucaaucggugcuuuuauguggagcugauaaggggaaggaaccaggaaacugaagucuuguggaccucaaacaguauuguuguguuuuguggcaccucagguacauauggaacaggcucauggccugauggggcggacaucaaucucaugccuauauaa

SEQ ID NO: 46569 - RNA, 1410 nt, Artificial Sequence
  derived and/or modified CDS sequence (wt) from neuraminidase__InfluenzaA__ABB83130
augaauccaaaucaaaaaauaauaacgauuggcucuguuucucucaccauugccacaauaugcuuccuuacgcaaauugccauccugguaacuacuguaacauugcauuucaagcaauaugaaugcaacucccccccaaacaaccaagugaugcugugugaaccaacaauaauagaaagaaacauaacagagauaguguaucugaccaacaccaccauagagaaggaaauaugccccaaacuagcagaauacagaaauuggucaaagccgcaaugcaacauuacuggauuugcaccuuuuucuaaggacaauucgauucggcuuuccgcugguggggacaucuggguuacaagagaaccuuaugugucaugcgauccugacaaguguuaucaauuugcccuuggacagggaacaacacuaaacaacgggcauucaaaugacacaguacaugauaggaccccuuauaggacccuauugaugaaugaguuggguguuccauuucauuugggaaccaagcaagugugcauagcaugguccagcucaaguugucacgauggaaaagcauggcugcauguuuguguaacgggggaugauaaaaaugcaacugcuagcuucauuuacaaugggaggcuuguagauaguauagguucaugguccaaaaaaauccucaggacccaggagucggaaugcguuuguaucaauggaacuuguacaguaguaaugacugaugggagugcuucaggaaaagcugauacuaaaauacuauucauugaggaggggaaaaucguucauacuagccuauugucagggagugcucagcaugucgaggagugcuccuguuauccucgauauccuggugucagaugugucugcagagacaacuggaaaggcuccaauaggcccaucguagauauaaauguaaaggauuauagcauuguuuccaguuaugugugcucaggacuuguuggagacacacccagaaaaaacgacagcuccagcaguagccauugcuuggauccuaacaaugaggaagguggucauggagugaaaggcugggccuuugaugauggaaaugacguguggaugggaagaacgaucagcgagaaguuacgcucaggauaugaaaccuucaaagucauugaaggcugguccaaaccuaacuccaaacugcagauaaauaggcaagucauaguugacagagauaauagguccgguuauucugguauuuucucuguugaaggcaaaagcugcaucaaucggugcuuuuauguggaguuaauaaggggaaggaaccaggaaacugaagucuuguggaccucaaacaguauuguuguguuuuguggcaccucagguacauauggaacaggcucauggccugauggggcggacaucaaucucaugccuauauaa

SEQ ID NO: 46570 - RNA, 1410 nt, Artificial Sequence
  derived and/or modified CDS sequence (wt) from neuraminidase__InfluenzaA__ABB83141
augaauccaaaucaaaaaauaauaacgauuggcucuguuucucucaccauugccacaauaugcuuccuuucgcaaauugccauccugguaacuacuguaacauugcauuucaagcaauaugaaugcaacucccccccaaacaaccaagugaugcugugugaaccaacaauaauagaaagaaacauaacagagauaguguaucugaccaacaccaccauagagaaggaaauaugccccaaacuagcagaauacagaaauuggucaaagccgcaaugcaacauuacuggauuugcaccuuuuucuaaggacaauucgauucggcuuuccgcugguggggacaucuggguuacaagagaaccuuaugugucaugcgauccugacaaguguuaucaauuugcccuuggacagggaacaacacuaaacaacgggcauucaaaugacacaguacaugauaggaccccuuauaggacccuauugaugaaugaguuggguguuccauuucauuugggaaccaagcaagugugcauagcaugguccagcucaaguugucacgauggaaaagcauggcugcauguuuguguaacgggggaugauaaaaaugcaacugcuagcuucauuuacaaugggaggcuuguagauaguauagguucaugguccaaaaaaauccucaggacccaggagucggaaugcguuuguaucaauggaacuuguacaguaguaaugacugaugggagugcuucaggaaaagcugauacuaaaauacuauucauugaggaggggaaaaucguucauacuagccuauugucagggagugcucagcaugucgaggagugcuccuguuauccucgauauccuggugucagaugugucugcagagacaacuggaaaggcuccaauaggcccaucguagauauaaauguaaaggauuauagcauuguuuccaguuaugugugcucaggacuuguuggagacacacccagaaaaaacgacagcuccagcaguagccauugcuuggauccuaacaaugaggaagguggucauggagugaaaggcugggccuuugaugauggaaaugacguguggaugggaagaacgaucagcgagaaguuacgcucaggauaugaaaccuucaaagucauugaaggcugguccaaaccuaacuccaaacugcagauaaauaggcaagucauaguugacagagauaauagguccgguuauucugguauuuucucuguugaaggcaaaagcugcaucaaucggugcuuuuauguggaguugauaaggggaaggaaccaggaaacugaagucuuguggaccucaaacaguauuguuguguuuuguggcaccucagguacauauggaacaggcucauggccugauggggcggacaucaaucucaugccuauauaa

SEQ ID NO: 46571 - RNA, 1410 nt, Artificial Sequence
  derived and/or modified CDS sequence (wt) from neuraminidase__InfluenzaA__ABB86876
augaauacaaaucaaagaauaauaaccauugggacaguuugucugauaguuggaauaauuagucuauuguugcagauaggaaacauagucucguuauggauuagccacucaauucaaaccggaggaaaaaaucacucugaaaugugcaaccaaaaugucauuacauauguaaauaacacaugggugaaccgaacuuauguaaacauuagcaauaccaauauugcuacuguacaggaugugacuucaguaauauuagccggcaauucaucucuuugcucaguaagugggugggcuauauacagcaaagacaauagcauaaggauugguucuaaaggggacauuuuugucauaagagaaccauucauuucaugcucucacuuggaaugcagaacuuuuuuucugacccaaggcgcuuugcugaaugacaagcauucuaauggaaccgucaaggacaggagucccuauagaaccuuaaugaguugccccaucggugaagcuccauccccguauaacucaagguuugaaucaguugcuuggucagcaagugcaugccaugaugggaugggaugguuaacaaucggaaucuccgguccagauaauggagcaguagcuguuuuaaaauacaacgguauaauaacagauacaauaaaaaguuggagaaacaaaauauuaagaacacaagagucagaauguguuuguaugaacgguucauguuuuacuguauuaacugauggcccaagcaaugggcaagccucguacaaaauauucaaaguggaaaaagggaaaauaauuaagucaauugagcuggaugcaccuaauuaccacuaugaggaaugcuccuguuauccugauacaggcaaaguaauguguguuugcagagacaauuggcaugccucgaaccgaccaugggucucuuucgaucagaaccuugacuaucagauaggguacauaugcagugggguuuucggugauaacccgcguucuaaugaugggaagggcaauuguggcccaguacuuucuaauggagcaaauggagugaaaggauucucauuuagauauggcaaugguguuuggauaggaagaacuaaaaguauaaacuccagaagcggguuugagaugauuugggauccaaauggguggacugggacugauaguagcuucucuaugaagcaggauauuauagcauuaacugauuggucaggauauaguggaaguuuuguccaacauccugaauuaacaggaaugaauugcauaaggccuuguuucuggguagaauuaaucagagggcaacccaaggaaagcacaaucugggcuagcggaagcagcaucucuuucuguggcguagacagugaaaccacaagcuggucauggccagacggagcugaucugccauucaccauugacaaguag

SEQ ID NO: 46572 - RNA, 1410 nt, Artificial Sequence
  derived and/or modified CDS sequence (wt) from neuraminidase__InfluenzaA__ABB86886
augaauacaaaucaaagaauaaucaccauugggacagccuguuuggcaauuggaauaguuaguuuguuauuacagauaggaaauauagucucguuguggauaagccauucaauucaaacugaagaaaaaaaccacucugaaacaugcagccaaaauuucauuacacaugaaaacaacacaugggugaaccaaacuuauauaaacauuaguaauaccaacaauguugucggacagggcgugacuucaauaaugcuagccggcaauuccucucuuugcccaauaagugguugggcuauauacagcaaagacaacagcauaaggauugguuccaaaggagacauuuuugucauaagggaaccauucauuucaugcucucacuuggagugcagaacauuuuuucugacccaaggugcuuugcugaaugacaagcauucuaaugguaccgucaaagacaggagccccuauagaaccuuaaugagcugccccaucggugaagcuccaucuccauacaauucaagguuugaaucaguugcuuggucagcaagugcaugccacgauggaaugggauggcuaacaaucgggauuuccgguccagauaauggggcaguggcuguuuuuaaauacaaugguauaauaacagauacaauaaaaaguuggagaaacaaaauauuaagaacacaagagucagaauguguuuguauaaacgguucauguuuuaccauaaugaccgauggcccaagcaacgggcaggccucguacaaaauauucaaaauggagaaagggaagauuauuaagucaguugagcuggaugcaccuaauuaccacuaugaggaauccuccuguuacccugauacaggcaaaguggugugugugugcagagacaauuggcaugcuucgaaucgaccaugggucucuuucgaucagaaucuugauuaucagauaggguacauaugcagugggguuuucggugauaacccgcguucuaaugaugggaaaggcaauuguggcccaguacuuucuaauggagcaaauggagugaaggaggucucauuuagauauggcaaugguguuuggauaggaagaacuaaaaguaucagcucuagaaguggauuugagaugauuugggauccaaauggauggacggaaacugauaguaguuucucuauaaagcaggauauuauagcauuaacugauuggucaggauacaguggaaguuuuguccaacaucccgaauuaacaggaaugaacugcauaaagccuuguuucuggguagaguuaaucagaggacaacccaaggagagcacaaucuggacuaguggaagcagcauuucuuucuguggcguggacagugaaaccgcaagcuggucauggccagacggagcugaucugccauucaccauugacaaguag

SEQ ID NO: 46573 - RNA, 1410 nt, Artificial Sequence
  derived and/or modified CDS sequence (wt) from neuraminidase__InfluenzaA__ABB86898
augaauccaaaucaaaagauaauaacaauuggcucuguuucucucacccuugccacaauaugcuuccuuaugcaaauugccauccugguaacuacuguaacauugcauuucaagcagcaggaaugcaacucccccccaaacaaccaaguaaugcugugugaaccaacaauaauagaaagaaacauaacagagauaguguaucugaccaacaccacuauagagaaggaaauaugccccaaacuagcagaauacagaaauuggucaaagccgcaauguaacauuacaggauuugcaccuuuuucuaaggacaauucgauucggcuuuccgcugguggggacaucugggugacaagagaaccuuaugugucaugcgauccugacaaguguuaucaauuugcccuugggcagggaacaacacuaaacaacgggcauucaaauaacacaguacaugauaggaccccuuaccggacccuauugaugaaugaauuggguguuccauuucauuugggaaccaggcaagugugcauagcaugguccagcucaaguugucacgauggaaaagcauggcugcauguuuguauaacuggggaugauaaaaaugcaacugcuagcuucauuuacaaugggaggcuuguagauaguauugguucaugguccaaaaaaauacucagaacccaggagucggaaugcguuuguaucaauggaacuuguacaguaguaaugacugaugggagcgcuucaggaaaagcugauacuaaaauacuauucauugaggaggggaaaauuguucauauuagcacauugucaggaagugcucagcaugucgaggagugcuccuguuauccucgauauccuggugucagaugugucugcagagacaacuggaaaggauccaacaggcccauuguagauauaaauguaaaggauuauagcauuguuuccaguuaugugugcucaggacuuguuggagacacacccagaaaaaacgacagcuucagcaguagccauugccuagauccuaacaaugaggaagguggucauggagugaaaggcugggccuuugaugauggaaaugacguguggaugggacgaacgaucagcgagaaguuacgcucagguuaugaaaccuucaaagucaucgaaggaugguccaaaccuaacuccaaauuacagauaaauaggcaaguuauaguugaaagagguagcagguccgguuauucugguauuuucuccguugaaggcaaaagcugcaucaaucggugcuuuuauguggaguugauaaggggaaggaaagaggaaacuaaagucugguggaccucaaacaguauuguuguguuuuguggcaccucagguacauauggaacaggcucauggccugauggggcggauaucaaucucaugccuauauaa

SEQ ID NO: 46574 - RNA, 1410 nt, Artificial Sequence
  derived and/or modified CDS sequence (wt) from neuraminidase__InfluenzaA__ABB86906
augaauacaaaucaaagaauaauaaccauugggacaguuugucugauaguuggaauaauuagucuauuguugcagauaggaaacauagucucguuauggauuagccacucaauucaaaccggaggaaaaaaucacucugaaaugugcaaccaaaaugucauuacauauguaaauaacacaugggugaaccgaacuuauguaaacauuagcaauaccaauauugcuacuguacaggaugugacuucaguaauauuagccggcaauucaucucuuugcucaguaagugggugggcuauauacagcaaagacaauagcauaaggauugguucuaaaggggacauuuuugucauaagagaaccauucauuucaugcucucacuuggaaugcagaacuuuuuuucugacccaaggcgcuuugcugaaugacaagcacucuaauggaaccgucaaggacaggagucccuauagaaccuuaaugaguugccccaucggugaagcuccaucuccguauaacucaagauucgaaucaguugcuuggucagcaagugcaugccaugaugggaugggaugguuaacaaucgggaucuccgguccggauaauggagcaguagcuguuuuaaaauacaacgguauaauaacagauacaauaaaaaguuggagaaacaaaauauugagaacacaagagucagaauguguuuguaugaacgguucauguuuuacuguauuaacugauggcccaagcaaugggcaagccucguacgaaauauucaaaguggaaaaggggaaaauaauuaagucgauugagcuggaugcaccuaauuaccauuaugaggaaugcucuuguuauccugauacaggcaaaguaaugugugugugcagagacaauuggcaugccucgaaccgaccauggguuucuuucgaucagaaucuuaacuaucagauaggguacauaugcagugggguuuucggugauaacccgcguucuaaugaugggaagggcaauuguggcccaguacuuucuaauggagcaaauggagugaaaggauucucauuuagauaugguaaugguguuuggauaggaagaacuaaaaguaucagcuccagaaguggguuugagaugguuugggauccaaauggguggacugggacugauaguagguuuucuaugaagcaggauauuauagcauuaacugauuggucaggauacaguggaaguuuuguccaacauccugaauuaacaggaaugaauugcauaaggccuuguuucuggguagaauuaaucagagggcaacccaaggaaagcacaaucugggcuagcggaaguagcaucucuuucugcggcguaaauagugaaaccgcaagcuggucauggccagacggagcugaucugccauucacuauugacaaguag

SEQ ID NO: 46575 - RNA, 1410 nt, Artificial Sequence
  derived and/or modified CDS sequence (wt) from neuraminidase__InfluenzaA__ABB86916
augaauccaaaucaaaagauaauaacgauuggcucuguuucucucaccauugccacaauaugcuuccuuacgcaaauugccauccugguaacuacuguaacauugcauuucaagcaauaugaaugcaacucccccccaaacaaccaagugaugcugugugaaccaacaauaauagaaagaaacauaacagagauaguguaucugaccaacaccaccauagagaaggaaauaugccccaaacuagcagaauacagaaauuggucaaagccgcaaugcaacauuacuggauuugcaccuuuuucuaaggacaauucgauucggcuuuccgcugguggggacaucuggguuacaagagaaccuuaugugucaugcgauccugacaaguguuaucaauuugcccuuggacagggaacaacacuaaacaacgggcauucaaaugacacaguacaugauaggaccccuuacaggacccuauugaugaaugagcuggguguuccauuucauuugggaaccaagcaagugugcauagcaugguccagcucaaguugucacgauggaaaagcauggcugcauguuuguauaacgggggaugauaaaaaugcaacugcuagcuucauuuacaaugggaggcuuguagauaguauaaguucgugguccaaaaaaauccucaggacccaggagucggaaugcguuuguaucaauggaacuuguacaguaguaaugacugaugggagugcuucaggaaaagcugauacuaaaauacuauucauugaggaggggaaaaucguucauacuagccuauugucggggagugcucagcaugucgaggagugcuccuguuauccucgauauccuggugucagaugugucugcagagacaacuggaaaggcuccaauaggcccaucguagauauaaauguaaaggauuauagcauuguuuccaguuaugugugcucaggacuuguuggagacacacccagaaaaaacgacagcuccagcaguagccauugcuuggauccuaacaaugaggaagguggucauggggugaaaggcugggccuuugaugauggaaaugacguguggaugggaagaacgaucagcgagaaguuacgcucaggauaugaaaccuucaaagucauugaaggcugguccaaaccuaacuccaaacugcagauaaauaggcaagucauaguugacagagauaauagguccgguuauucugguauuuucucuguugaaggcaaaagcugcaucaaucggugcuuuuauguggaguugauaaggggaaggaaccaggaaacugaagucuuguggaccucaaacaguauuguuguguuuuguggcaccucagguacauauggaacaggcucauggccugauggggcggacaucaaucucaugccuauauaa

SEQ ID NO: 46576 - RNA, 1410 nt, Artificial Sequence
  derived and/or modified CDS sequence (wt) from neuraminidase__InfluenzaA__ABB86928
augaauccaaaucaaaagauaauaacaauuggcucuguuucucucaccauugccacaauaugcuuccuuaugcaaauugccauccugguaacuacuguaacauugcauuucaagcaguaugaaugcaacucccccccaaacaaccaaguaaugcugugugaaccaacaauaauagaaagaaacauaacagagauaguguaccugaccaacaccaccauagagaaggaaauaugccccaaacuagcagaauacagaaauuggucaaagccgcaauguaacauuacaggauuugcaccuuuuucuaaggacaauucgauucggcuuuccgcugguggggacaucugggugacaagagaaccuuaugugucaugcgauccugacaaguguuaucaauuugcccuugggcagggaacaacacuaaacaacgggcauucaaaugacacaguacaugauaggaccccuuaccggacccuauugaugaaugaauuggguguuccauuucauuugggaaccaggcaagugugcauagcaugguccagcucaaguugucacgauggaaaagcauggcugcauguuuguauaacuggggaugauaaaaaugcaacugcuagcuucauuuacaaugggaggcuuguagauaguauugguucaugguccaaaaagauacucagaacccaggagucggaaugcguuuguaucaauggaacuuguacaguaguaaugacugaugggagcgcuucaggaaaagcugauacuaaaauacuauucauugaggaggggaaaauuguucauauuagcacauugucaggaagugcucagcaugucgaggagugcuccuguuauccucgauauccuggugucagaugugucugcagagacaacuggaaaggauccaacaggcccauuguagauauaaauguaaaggauuauagcauuguuuccaguuaugugugcucaggacuuguuggagacacacccagaaaaaacgacagcuucagcaguagccauugccuaaauccuaacaaugaggaagguggucauggagugaaaggcugggccuuugaugauggaaaugacguguggaugggacgaacgaucagcgagaaguuacgcucagguuaugaaaccuucaaagucaucgaaggaugguccaaaccuaacuccaaauuacagauaaauaggcaaguuauaguugaaagagguaacagguccgguuauucugguauuuucuccauugaaggcaaaagcugcaucaaucggugcuuuuauguggaguugauaaggggaaggaaagaggaaacuaaagucugguggaccucaaacaguauuguuguguuuuguggcacuucagguacauauggaacaggcucauggccugauggggcggauaucaaucucaugccuauauaa

SEQ ID NO: 46577 - RNA, 1410 nt, Artificial Sequence
  derived and/or modified CDS sequence (wt) from neuraminidase__InfluenzaA__ABB86936
augaauacaaaucaaagaauaauaaccauugggacgguuugccugauaguuggaauaauuagucuauuguugcagauaggaaacauagucucguuauggauuaaccacucaauucagaccgaaggaaaaaaucacucugagaugugcaaccaaaaugucauuacauauguaaauaauacaugggugaaccgaacuuauguaaacauuagcaacaccaauauugcuacuguacaggaugugacuucaguaauauuagcaggcaauuccucucuuugcccagugagugggugggcuauauacagcaaagacaauagcauaaggauuggcucuaaaggggacauuuuugucauaagagaaccauucauuucaugcucucacuuggagugcagaacuuuuuuucugacccaaggcgcuuugcugaaugacaagcauucuaauggaaccgucagggacaggagucccuauagaacuuuaaugagcugccccacuggugaagcuccaucuccguauaacucaagguucgaaucaguugcuuggucagcaagugcaugccaugaugggaugggaugguuaacaaucgggaucuccgguccagauaauggagcaguagcuguuuuaaaauacaaugguauaauaacagauacaauaaaaaguuggagaaacaaaauauuaagaacacaagagucagaauguguuuguaugaacgguucauguuuuacuguauuaacugauggcccaagcaaugggcaagccucguacaaaauauuuaaaguggaaaaagggaaaauaauuaagucaauugagcuggaugcacccaauuaccacuaugaggaaugcuccuguuauccugauacaggcaaaguaauguguguuugcagagacaauuggcaugccucgaaccgaccguggaucuauuuugaucagaaucuugacuaucagauaggguacauaugcagugggguuuucggugauaacccccguucuaaugaugggaagggcaauuguggcccaguacuuucuaauggagcaaauggagugaaaggauucucauuuagauaugguaaugguguuuggauaggaagaacuaaaaguaucaacuccagaaguggguuugagaugauuugggacccaaauggauggacuggaacugauaguaguuucucuaugaagcaggauauucuagcaacaacugauuggucaggauacaguggaaguuuuguccaacauccugaauuaacaggaaugaauugcauaaggccuuguuucuggguagaauuaaucagagggcaacccaaggaaagcacaaucugggcuagcggaagcagcaucucuuucuguggcguaaauagugaaaccgcaaacuggucauggccagacggagcugaucugccauucaccauugacaaguag

SEQ ID NO: 46578 - RNA, 1410 nt, Artificial Sequence
  derived and/or modified CDS sequence (wt) from neuraminidase__InfluenzaA__ABB86947
augaauacaaaucaaagaauaauaaccauugggacaguuugucugauaguuggaauaauuagucuauugucgcagauaggaaacauagucucuuuauggauuauccauucaauucagaccggagggaaaaaucacucugaaaugugcaaccaaaaugucauuacauauguaaauaauacaugggugaaccgaacuuauauaaacauuagcaauaccaacauugcuacuguaaaggaugugacuucaguaauauuagcaggcaauuccucucuuugcccaguaagugggugggcuauauacagcaaagacaauagcauaaggauugguucuaaaggggacauuuuugucauaagagaaccauucauuucaugcucucacuuggaaugcagaacuuuuuuucugacccaaggcgcuuugcugaaugacaagcauuccaauggaaccgucaaggacaggagucccuauagaaccuuaaugagcugccccaucggugaggcuccaucuccauauaacucaagguucgaaucaguugcuuggucagcaagugcaugccaugaugggaugggauggcuaacaaucgggaucuccgguccagauaauggagcaguagcuguuuuaaaauacaacgguauaauaacagauacaauaaaaaguuggagaaacaaaauacuaagaacacaagagucagaauguguuuguaugaacgguucauguuuuacuguguuaacugauggcccaagcaaugggcaagccucguacaaaauauucaaaguggaaaaaggaaaaauaauuaagucaauugagcuggaugcaccuaauuaccacuaugaggaaugcuccuguuauccugacgcaggcaaaguaauguguguuugcagagacaauuggcaugccucgaaccgaccaugggucucuuucgaccagaaucuugacuaucagaugggguacauaugcagugggguuuucggugauaacccgcguucuaaugaugggaagggcaauuguggcccaguacuuucuaauggagcaaauggagugaaaggauucucauuuagauaugguaaugguguuuggauaggaagaacuaaaaguaucaacuccagaaguggguuugagaugauuugggauccaaauggauggacuggaacugauaguaguuucucuaugaagcaggauauuauagcauuaacugauuggucaggauacaguggaaguuuuguccaacauccugaauuaacaggaaugaauugcauaaggccuuguuucuggguagaguuaaucagagggcaacccaaggaaagcacaauaugggcuagcggaagcagcaucuccuucuguggcguaaauagugaaaccgcaagcuggucauggccagauggagcugaucugccauucaccauugacaaguag

SEQ ID NO: 46579 - RNA, 1410 nt, Artificial Sequence
  derived and/or modified CDS sequence (wt) from neuraminidase__InfluenzaA__ABB86957
augaauacaaaucaaagaauaauaaccgucggaacagucugucugauaguuggaauaguuagucuauuauugcagauaggaaauauagucucguuauggauaagccauucaauucaaacuggagaaaaaaaccacucugagguaugcaaccaaaauaucauuacauaugaaaacaaaacaugggugaaccaaacuuauguaaacauuagcaauaccaacauugcugagggacagggcgugacuucaauaauaauggccggcaauuccucucuuugcccaguaagugggugggcuauauacagcaaagacaauagcauaaggauugguuccaaaggagacauuuuugucauaagagaaccauucauuucaugcucucacuuggagugcagaaccuuuuuucugacccaaggugcuuugcuaaaugacaggcauucuaauggaaccguuaaggacaggagcccuuaccgaaccuuaaugagcugcccgaucggugaagcuccauccccauauaauucaagauucgaaucaguugcuuggucagcaagugcaugccaugauggaaugggauggcuaacaaucgggauuuccgguucagauaaugaagcaguggcuguuuugaaguacaaugguauaauaacagauacaauaaaaaguuggagaaacaagauacuaagaacacaagagucagaauguguuuguauaaacgguucguguuuuacuauaaugacugauggcccaagcaaugggcaagccucguacaaaauauucaaaauggagaaagggaagauuauuaagucaguugagcuggaagcaccuaauuaccacuaugaggaaugcuccuguuacccugauacaggcaaaguggugugugugugcagagacaauuggcaugcuucaaaucgaccgugggucucuuucaaucagaaucuugauuaucagauaggguacauaugcagugggguuuucggugauaacccgcguucuaaugaugggaaagguaauuguggcccaguaccuucuaauggagcaaauggagugaagggauucucauuuagauaugguaaugguguuuggauaggaaggacuaaaaguaucuucucuagaaguggauuugagaugauuugggacccaaauggauggacggaaacugauaguaguuucucuauaaagcaggauauuauagcauuaacugauuggucaggauacaguggaaguuuuguccaacauccugaauuaacaggaaugaacugcauaaggccuuguuuuuggguagaguuaaucagaggacaacccaaagagaguacaaucuggacuagugggagcagcauuucuuucugugguguggacagugaaacugcaagcuggucauggccagacggggcugaucugccauucaccauugacaaguag

SEQ ID NO: 46580 - RNA, 1410 nt, Artificial Sequence
  derived and/or modified CDS sequence (wt) from neuraminidase__InfluenzaA__ABB96333
augaauccaaaucaaaagauaauaacaauuggcucugucucucucaccauugcaacaauaugcuuccucaugcaaauugccauccugguaacuacuguaacauugcauuucaagcaauaugauugcgacucccccgcaaacaaccaaguaaugccgugugaaccaauaauaauagaaaggaacauaacagagauaguguauuugacuaacaccaccauagagaaagagauaugccccaaauuaguggaauacagaaauuggucaaagccgcaauguaaaauuacaggauuugcaccuuuuucuaaggacaauucaauucggcuuucugcugguggggacauuugggugacgagagaaccuuaugugucaugcgauccuggcaaguguuaucaauuugcacucgggcaggggaccacacuagacaacaagcauucaaaugacacaauacaugauagaaccccucaucgaacccuauugaugaaugaguuggguguuccauuucauuugggaaccaggcaaguguguauagcaugguccagcucaaguugucacgauggaaaagcauggcugcauguuugugucacuggauaugauaaaaaugcaacugcuagcuucauuuacgaugggaggcuuguagacaguauugguucauggucuaaaaauauccucaggacccaggagucggaaugcguuuguaucaaugggacuuguacaguaguaaugacugauggaagugcuucagaaagagcugauacuaaaauacuauucauugaagaggggaaaauuguucauauuagcccauugucaggaagugcucagcauguagaggaguguuccuguuauccucgauauccuggugucagaugugucugcagagacaacuggaaaggcucuaauaggcccgucguagauauaaaugugaaagauuauagcauugcuuccaguuaugugugcucagggcuuguuggcgacacacccagaaaaaacgacagauauagcaguagcuauugccggaauccuaacaaugagaaagggaaucauggagugaaaggcugggccuuugacgauggaaaugacguguggaugggaagaacgaucagcgaugagucacgcucagguuaugaaacuuucaaagucauuggugguugguccacaccuaauuccaaauugcagauaaauaggcaagucauaguugacagcgauaauagguccgguuauucugguauuuucucuguugagggcaaaagcugcaucaauaggugcuuuuauguggaguugauaaggggaagggaacaggaaacuagagucugguggaccucaaacaguauuguuguguuuuguggcacuucagguaccuaugggacaggcucauggccugauggagcggacaucaaucucaugccuauauaa

SEQ ID NO: 46581 - RNA, 1410 nt, Artificial Sequence
  derived and/or modified CDS sequence (wt) from neuraminidase__InfluenzaA__ABB96344
augaauccaaaucaaaagauaauaacaauuggcucugucucucucaccauugcaacaauaugcuuccucaugcaaauugccauccugguaacuacuguaacauugcauuucaagcaauaugagugcgacucccccgcaaacaaccaaguaaugccgugugaaccaauaauaauagaaaggaacauaacagagauaguguauuugacuaacaccaccauagagaaagagauaugccccaaauuaguggaauacagaaauuggucaaagccgcaauguaaaauuacaggauuugcaccuuuuucuaaggacaauucaauucggcuuucugcugguggggacauuugggugacgagagaaccuuaugugucaugcgauccuggcagguguuaucaauuugcacucgggcaggggaccacacuagacaacaagcauucaaaugacacaauacaugauagaaccccucaucgaacccuauugaugaaugaguuggguguuccauuucauuugggaaccaggcaaguguguauagcaugguccagcucaaguugucacgauggaaaagcauggcugcauguuugugucacuggauaugauaaaaaugcaacugcuagcuucauuuacgaugggaggcuuguagacaguauugguucauggucuaaaaauauccucaggacccaggagucggaaugcguuuguaucaaugggacuuguacaguaguaaugacugauggaagugcuucagaaagagcugauacuaaaguacuauucauugaagaggggaaaauuguucauauuagcccauugucaggaagugcucagcauguagaggaguguuccuguuauccucgauauccuggugucagaugugucugcagagacaacuggaaaggcucuaauaggcccgucguagauauaaaugugaaagauuauagcauugcuuccaguuaugugugcucagggcuuguuggcgacacacccagaaaaaacgacagauauagcaguagcuauugccggaauccuaacaaugagaaagggaaucauggagugaaaggcugggccuuugacgauggaaaugacguguggaugggaagaacgaucagcgaugagucacgcucagguuaugaaacuuucaaagucauuggugguugguccacaccuaauuccaaauugcagauaaauaggcaagucauaguugacagcgauaauagguccgguuauucugguauuuucucuguugagggcaaaagcugcaucaauaggugcuuuuauguggaguugauaaggggaagggaacaggaaacuagagucugguggaccucaaacaguauuguuguguuuuguggcacuucagguaccuaugggacaggcucauggccugauggagcggacaucaaucucaugccuauauaa

SEQ ID NO: 46582 - RNA, 1410 nt, Artificial Sequence
  derived and/or modified CDS sequence (wt) from neuraminidase__InfluenzaA__ABB96398
augaauccaaaucaaaagauaauaacaauuggcucugucucucucaccauugcaacaauaugcuuccucaugcaaauugccauccugguaacuacuguaacauugcauuucaagcaauaugagugcgacucccccgcaaacaaccaaguaaugccgugugaaccaauaauaauagaaaggaacauaacagagauaguguauuugacuaacaccaccauagagaaagagacaugccccaaauuaguggaauacagaaauuggucaaagccgcaauguaaaauuacaggauuugcaccuuuuucuaaggacaauucaauucggcuuucugcugguggggacauuugggugacgagagaaccuuaugugucaugcgauccuggcaaguguuaucaauuugcacucgggcaggggaccacacuagacaacaagcauucaaaugacacaauacaugauagaaccccuuaucgaacccuauugaugaaugaguuggguguuccauuucauuugggaaccaggcaaguguguauagcaugguccagcucaaguugucacgauggaaaagcauggcugcauguuugugucacuggauaugauaaaaaugcaacugcuagcuucauuuacgaugggaggcuuguagacaguauugguucauggucuaaaaauauccucaggacccaggagucggaaugcguuuguaucaaugggacuuguacaguaguaaugacugauggaagugcuucagaaagagcugauacuaaaauacuauucauugaagaggggaaaauuguucauauuagcccauugucaggaagugcucagcauguagaggaguguuccuguuauccucgauauccuggugucagaugugucugcagagacaacuggaaaggcucuaauaggcccgucguagauauaaaugugaaagauuauagcauugcuuccaguuaugugugcucagggcuuguuggcgacacacccagaaaaaacgacagaucuagcaguagcuauugccggaauccuaacaaugagaaagggaaucauggagugaaaggcugggccuuugacgauggaaaugacguguggaugggaagaacgaucagcgaggagucacgcucagguuaugaaaccuucaaagucauuggugguugguccacaccuaauuccaaauugcagauaaauaggcaagucauaguugacagcgauaauagguccgguuacucugguauuuucucuguugagggcaaaagcugcaucaauaggugcuuuuauguggaguugauaaggggaagggaacaggaaacuagagucugguggaccucaaacaguauuguuguguuuuguggcacuucagguaccuaugggacaggcucauggccugauggagcggacaucaaucucaugccuauauaa

SEQ ID NO: 46583 - RNA, 1410 nt, Artificial Sequence; identical to SEQ ID NO: 46394
  derived and/or modified CDS sequence (wt) from neuraminidase__InfluenzaA__ABB96490

SEQ ID NO: 46584 - RNA, 1410 nt, Artificial Sequence
  derived and/or modified CDS sequence (wt) from neuraminidase__InfluenzaA__ABB96501
augaauccaaaucaaaagauaauaacaauuggcucugucucucucaccauugcaacaauaugcuuccuuaugcaaauugccauccugguaacuacuguaacauugcauuucaagcaauaugagugcagcucccccccaaacaaccaaguaaugccgugugaaccaauaauaauagaaaggaacauaacagagauaguguauuugacuaacaccaccauagagaaagagauaugccccaaauuaguggaauacagaaauuggucaaagccgcaauguaaaauuacaggauuugcaccuuuuucuaaggacaauucaauucggcuuucugcugguggggacauuugggugacgagagaaccuuaugugucaugugauccuagcaaguguuaucaauuugcacucgggcaggggaccacacuagacaacaagcauucaaaugacacaauacaugauaggaccccucaucgaacccuauugaugaaugaguuggguguuccauuucauuugggaaccaggcaaguguguauagcaugguccagcucaaguugucacgaugggaaagcauggcugcauguuugugucacuggguaugauaaaaaugcaacugcuagcuucauuuacgaugggaggcuuguagacaguauugguucaugguccaaaaauauccucaggacccaggaaucggaaugcguuuguaucaaugggacuuguacaguaguaaugacugauggaagugcuucagaaagagcugauacuaaaauacuguucauugaagaggggaaaaucguucauauuagcccauugucaggaagugcucagcauguagaggaguguuccuguuauccucgauauccuggugucagaugugucugcagagacaacuggaaaggcuccaauaggcccgucguagacauaaaugugaaagauuauagcauuguuuccaguuaugugugcucagggcuuguuggcgacacacccagaaaaaacgacagaucuagcaguagcuauugccggaauccuaacaaugagaaagggaaucauggagugaaaggcugggccuuugacgauggaaaugacguguggaugggaagaacgaucagcgaggagucacgcucagguuaugaaaccuucaaagucauuggugguugguccacaccuaauuccaaaucgcagauaaauaggcaagucauaguugacagcgguaauagguccgguuauucugguauuuucucuguugagggcaaaagcugcaucaauaggugcuuuuauguggaguugauaaggggaagggaacaggaaacuagagucugguggaccucaaacaguauuguuguguuuuguggcacuucagguaccuauggaacaggcucauggccugauggagcggacaucaaucucaugccuauauaa

SEQ ID NO: 46585 - RNA, 1410 nt, Artificial Sequence
  derived and/or modified CDS sequence (wt) from neuraminidase__InfluenzaA__ABB96534
augaauccaaaucaaaagauaauaacgauuggcucuguuucucucacuauugccacaauaugcuuccuuaugcaaauugccauccugguaacuacuguaacauugcauuucaagcaauaugaaugcagcucucccccaaacaaccaaguaaugcugugugaaccaacaauaauagaaagaaacauaacagagauaguguaucugaccaacaccaccauagagaaggaaauaugccccaaacuagcagaauacagaaauuggucaaaaccgcaauguaaaauuacaggauuugcaccuuuuucuaaggacaauucaauucggcuuuccgcugguggggacauuugggugacaagggaaccuuaugugucgugcgauccugacaaguguuaucaauuugcccuuggacagggaacaacacuaaacaacaggcauucaaaugacacaguacaugauaggaccccuuaucgaacccuauugaugaaugaguuggguguuccauuucauuugggaaccaagcaagugugcauagcaugguccagcucaaguugucacgauggaaaagcauggcugcauguuuguguaacugggcaugaugaaaaugcaacugcuagcuucauuuacgaugggaggcuuguagauaguauugguucaugguccaaaaaaauccucaggacccaggagucggaaugcguuuguaucaauggaacuuguacaguaguaaugacugaugggagugcuucaggaagagcugauacuaaaauacuauucauugaggaggggaaaaucguucauaucagcccacugucaggaagugcucagcaugucgaggagugcuccuguuauccucgauauccuggugucagaugugucugcagagacaacuggaaaggcuccaauaggcccaucguagauauaaauguaaaggauuauagcauuguuuccaguuaugugugcucaggacuuguuggagacacacccagaaaaaacgacagcuccagcaguagucauugccugaauccuaacaaugaggaagggggucauggagugaaaggcugggccuuugaugauggaaaugacguguggaugggaagaacgaucagcgagaaguuccgcucagguuaugaaaccuucaaagucauugaaggcugguccaaaccuaacuccaaauugcagauaaauaggcaagucauaguugacagagguaauagguccgguuauucugguauuuucucuguugaaggcaaaagcugcaucaaucggugcuuuuauguggaguugauaaggggaaggaaacaggaaacugaagucugguggaccucaaacaguauuguuguguuuuguggcaccucagguacauauggaacaggcucauggccugauggggcggacaucaaucucaugccuauauaa

SEQ ID NO: 46586 - RNA, 1410 nt, Artificial Sequence
  derived and/or modified CDS sequence (wt) from neuraminidase__InfluenzaA__ABC02237
augaauccaaaucaaaagauaauaacgauuggcucuguuucucucacuauugccacaauaugcuuccuuaugcaaauugccauccugguaacuacuguaacauugcauuucaagcaauaugaaugcagcucucccccaaacaaccaaguaaugcugugugaaccaacaauaauagaaagaaacauaacagagauaguguaucugaccaacaccaccauagagaaggaaauaugccccaaacuagcagaauacagaaauuggucaaagccgcaauguaaaauuacaggauuugcaccuuuuucuaaggacaauucaauucggcuuuccgcugguggggacauuugggugacaagggaaccuuaugugucaugcgauccugacaaguguuaucaauuugcccuuggacagggaacaacacuaaacaacaggcauucaaaugacacaguacaugauaggaccccuuaucgaacccuauugaugaaugaguuggguguuccauuucauuugggaaccaagcaagugugcauagcaugguccagcucaaguugucacgauggaaaagcauggcugcauguuuguguaacugggcaugaugaaaaugcaacugcuagcuucauuuacgaugggaggcuuguagauaguauugguucaugguccaaaaaaauccucaggacccaggagucggaaugcguuuguaucaauggaacuuguacaguaguaaugacugaugggagugcuucaggaagagcugauacuaaaauacuauuuauugaggaggggaaaaucguucauaucagccaacuaucaggaagugcucagcaugucgaggagugcuccuguuauccucgauauccuggugucagaugugucugcagagacaacuggaaaggcuccaauaggcccaucguagauauaaauauaaaggauuauagcauuguuuccaguuaugugugcucaggacuuguuggagacacacccagaaaaaacgacagcuccagcaguagucauugccugaauccuaacaaugaggaagggggucauggagugaaaggcugggccuuugaugauggaaaugacguguggaugggaagaacaaucagcgagaaguuccgcucagguuaugaaaccuucaaagucauugaaggcugguccaaaccuaacuccaaauugcagauaaauaggcaagucauaguugacagagguaauagguccgguuauucugguauuuucucuguugaaggcaaaagcugcaucaaucggugcuuuuauguggaguugauaaggggaaggaaacaggaaacugaagucugguggaccucaaacaguauuguugcguuuuguggcaccucagguacauauggaacaggcucauggccugauggggcggacaucaaucucaugccuauauaa

SEQ ID NO: 46587 - RNA, 1410 nt, Artificial Sequence
  derived and/or modified CDS sequence (wt) from neuraminidase__InfluenzaA__ABC02258
augaauccaaaucaaaagauaauaacaauuggcucugucucucucaccauugcaacaauaugcuuccucaugcagauugccauccugguaacuacuguaacauugcauuucaagcaguaugagugcgacucccccgcgaacaaucaaauaaugccgugugaaccaacaauaauagaaaggaacauaacagagauaguguauuugacuaacaucaccauagaaaaagagauaugccccaaauuaguggaauacaggaauuggucaaagccgcaauguaaaauuacaggauuugcaccuuuuucuaaggacaauucaauucggcuuucugcugguggggacauuugggugacgagagaaccuuaugugucaugcgauccuagcaaguguuaucaauuugcacuugggcaggggaccacacuagacaacaaacauucaaaugacacaauacaugauagaaccccucaucgaacccuauugaugaaugaguuggguguuccauuucauuugggaaccaggcaaguguguauagcaugguccagcucaaguugucacgauggaaaagcauggcugcauguuugugucacuggguaugauaaaaaugcaacugcuagcuucauuuacgaugggaggcuuguagacaguauugguucauggucucaaaauauccucaggacccaggagucggaaugcguuuguaucaaugggacuuguacaguaguaaugacugauggaagugcuucaggaagagcugauacuaaaauacuauucauugaagaggggaaaauuguucauauuagcccauugucaggaagugcucagcauguagaggaguguuccuguuacccucgauauccuggugucagauguaucugcagagacaacuggaaaggcucuaauaggcccgucguagauauaaaugugaaagauuauagcauugauuccaguuaugugugcucagggcuuguuggcgacacacccagaaaaaacgacagaucuagcaauagcuauugccggaauccuaacaaugagaaagggaaucacggagugaaaggcugggccuuugacgauggaaaugacguguggaugggaagaacgaucagcgaggauucacgcucagguuaugaaaccuucaaagucauuggugguugguccacaccuaauuccaaauugcagauaaauaggcaagucauaguugacagcgauaauaggucagguuauucugguauuuucucuguugagggcaaaagcugcaucaauaggugcuuuuauguggaguugauaaggggaagggaacaggaaacuagaguaugguggaccucaaacaguauuguuguguuuuguggcacuucagguaccuauggggcaggcucauggccugauggggcggacaucaaucucaugccuauauaa

SEQ ID NO: 46588 - RNA, 1410 nt, Artificial Sequence
  derived and/or modified CDS sequence (wt) from neuraminidase__InfluenzaA__ABC02269
augaauccaaaucaaaagauaauaacaauuggcucugucucucucaccauugcaacaauaugcuuccucaugcagauugccauccugguaaccacuguaacauugcauuucaagcaauaugagugcgacuccccagcgaacaaccaaguaaugccgugugaaccaauaauaauagaaaggaacauaacagagauaguguauuugacuaacaccaccauagaaaaagagauaugccccaaauuaguggaauacaggaauuggucaaagccacaauguaaaauuacaggauuugcaccuuucucuaaggacaauucaauucggcuuucugcugguggggacauuugggugacgagagaaccuuaugugucaugcgauccuggcaaguguuaucaauuugcacucgggcaggggaccacacuagacaacaaacauucaaaugacacaauacaugauagaaccccucaucgaacccuauugaugaaugaguuggguguuccauuucacuugggaaccaggcaaguguguauagcaugguccagcucaaguugucacgauggaaaagcauggcugcauguuugugucacuggguaugauaaaaaugcaacugcuagcuucauuuacgaugggaggcuuguagacagcauugguucauggucucaaaauauccucaggacccaggagucggaauguguuuguaucaaugggacuuguacaguaguaaugacugauggaagugcuucaggaagagcugauacuaaaauacuauucauugaagaggggaaaauuguucauacuagcccauugucaggaagugcucagcauguagaggaguguuccuguuauccucgauauccuggugucagauguaucugcagagacaacuggaaaggcucuaauaggccagucguagauauaaaugugaaagauuauagcauugauuccaguuaugugugcucagggcuugugggcgacacacccagaaacaacgacagaucuagcaguagcuauugccggaauccuaacaaugaaaaagggacucacggagugaaaggcugggccuuugacgauggaaaugacguguggaugggaagaacgaucagcgaggauucacgcucagguuaugaaaccuucaaagucauuggugguugguccacaccuaauuccaaauugcagauaaauaggcaagucauaguugacagcgauaauaggucagguuauucugguauuuucucuguugagggcaaaagcugcaucaauaggugcuuuuauguggaguugauaaggggaagggaacaggaaacuagaguaugguggaccucaaacaguauuguuguguuuuguggcacuucagguaccuaugggacaggcucauggccugauggggcggacaucaaucucaugccuauauaa

SEQ ID NO: 46589 - RNA, 1413 nt, Artificial Sequence
  derived and/or modified CDS sequence (wt) from neuraminidase__InfluenzaA__ABC02280
augaauccaaaucaaaaaauaauaaccauuggaucaaucaguauagcaaucggaauaauuagccuaauguugcaaauaggaaacauuauuucaauaugggcuagucacucaauccaaacuggaagucaaaaccacacuggaguaugcaaccaaagaaucaucacauaugaaaacagcaccugggugaaucacacauauguuaauauuaacaacaccaauguuauugcuggaaaggacaaaacuucagugacauuggccggcaauucaucucuuuguucuaucaguggaugggcuauauacacaaaagacaacagcauaagaauugguuccaaaggagauguuuuugucauaagagagccuuucauaucauguucucacuuggaaugcagaaccuuuuuucugacccaagguucucuauuaaaugacaaacauucaaaugggaccguuaaggacagaagucccuauagggcuuuaaugagcuguccucuaggugaagcuccguccccauacaauucaaaguuugaaucaguugcuuggucagcaagcgcaugccaugauggcaugggcugguuaacaaucggaauuucugguccagacaauggagcaguggcuguacuaaaauacaacggcauaauaacugaaaccauaaaaaguuggaaaaagcaaauauuaagaacacaagagucugaaugugucugugugaacgggucauguuucaccauaaugaccgauggcccgaguaauggggccgccucguacaaaaucuucaagaucgaaaagggaaagguuacuaaaucaauagaguugaaugcacccaauuuucauuaugaggaauguuccuguuacccagacacuggcacagugauguguguaugcagggacaacuggcaugguucaaaucgacccugggugucuuuuaaucaaaaccuggauuaucaaauaggauacaucugcagugggguguucggugacaauccgcgucccaaagauggagagggcagcuguaauccagugacuguugauggagcaaacggaguaaagggguuuucauacaaauaugguaaugguguuuggauaggaaggacuaaaaguaacagacuuagaaagggguuugagaugauuugggauccuaauggauggacagauaccgacagugauuucucagugaaacaggauguuguggcaauaacugauuggucaggguacagcggaaguuucguucaacauccugaguuaacaggauuggacuguauaagaccuugcuucuggguugaguuagucagaggacugccaaaagaaaauacaacaaucuggacuagugggagcagcauuucuuuuuguggcguaaauagugauacugcaaacuggucuuggccagacggugcugaguugccguuuaccauugacaaguag

SEQ ID NO: 46590 - RNA, 1410 nt, Artificial Sequence
  derived and/or modified CDS sequence (wt) from neuraminidase__InfluenzaA__ABC02302
augaauccaaaucaaaagauaauaacgauuggcucuguuucucucacuauugccacaauaugcuuccuuaugcaaauugccauccugguaacuacuguaacauugcauuucaagcaauaugaaugcagcucucccccaaacaaccaaguaaugcugugugaaccaacaauaauagaaagaaacauaacagagauaguguaucugaccaacaccaccauagagaaggaaauaugccccaaacuagcagaauacagaaauuggucaaagccgcaauguaaaauuacaggauuugcaccuuuuucuaaggacaauucaauucggcuuuccgcugguggggacauuugggugacaagggaaccuuaugugucgugcgauccugacaaguguuaucaauuugcccuuggacagggaacaacacuaaacaacaggcauucaaaugacacaguacaugauaggaccccuuaucgaacccuauugaugaaugaguuggguguuccauuucauuugggaaccaagcaagugugcauagcaugguccagcucaaguugucacgauggaaaagcauggcugcauguuuguguaacugggcaugaugagaaugcaacugcuagcuucauuuacgaugggaggcuuguagauaguauugguucaugguccaaaaaaauccucaggacccaggagucggaaugcguuuguaucaauggaacuuguacaguaguaaugacugaugggagugcuucaggaagagcugauacuaaaauacuauucauugaggaggggaaaaucguucauaucagcccacugucaggaagugcucagcaugucgaggagugcuccuguuauccucgauauccuggugucagaugugucugcagagacaacuggaaaggcuccaauaggcccaucguagauauaaauguaaaggauuauagcauuguuuccaguuaugugugcucaggacuuguuggagacacacccagaaaaaacgacagcuccagcaguagucauugccugaauccuaacaaugaggaagggggucauggagugaaaggcugggccuuugaugauggaaaugacguguggaugggaagaacgaucagcgagaaguuccgcucagguuaugaaaccuucaaagucauugaaggcugguccaaaccuaacuccaaauugcagauaaauaggcaagucauaguugacagagguaauagguccgguuauucugguauuuucucuguugaaggcaaaagcugcaucaaucggugcuuuuauguggaguugauaaggggaaggaaacaggaaacugaagucugguggaccucaaacaguauuguuguguuuuguggcaccucagguacauauggaacaggcucauggccugauggggcggacaucaaucucaugccuauauaa

SEQ ID NO: 46591 - RNA, 1410 nt, Artificial Sequence; identical to SEQ ID NO: 46582
  derived and/or modified CDS sequence (wt) from neuraminidase__InfluenzaA__ABC02313

SEQ ID NO: 46592 - RNA, 1410 nt, Artificial Sequence; identical to SEQ ID NO: 46587
  derived and/or modified CDS sequence (wt) from neuraminidase__InfluenzaA__ABC02324

SEQ ID NO: 46593 - RNA, 1410 nt, Artificial Sequence
  derived and/or modified CDS sequence (wt) from neuraminidase__InfluenzaA__ABC02335
augaauccaaaucaaaagauaauaacaauuggcucugucucucucaccauugcaacaauaugcuuccucaugcagauugccauccugguaacuacuguaacauugcauuucaagcaauaugagugcgacucccccgcgaacaaccaaguaaugccgugugaaccaauaauaauagaaaggaacauaacagagauaguguauuugacuaacaccaccauagagaaagagauaugccccaaauuaguggaauacaggaauuggucaaagccgcaauguaaaauuacaggauuugcaccuuuuucuaaggacaauucaauucggcuuucugcugguggggacauuugggugacgagagaaccuuaugugucaugcgauccuggcaaguguuaucaauuugcacuagggcaggggaccacacuagacaacaaacauucaaaugacacaauacaugauagaaccccucaucgaacccuauugaugaaugaguuggguguuccauuucauuugggaaccaggcaaguguguauagcaugguccagcucaaguugucacgauggaaaagcauggcugcauguuugugucacuggguaugauaaaaaugcaacugcuagcuucauuuacgaugggaggcuuguagacaguauugguucauggucucaaaauauccucaggacccaggagucggaaugcguuuguaucaaugggacuuguacaguaguaaugacugauggaagugcuucaggaagagcugauacuaaaauacuauucauuaaagaggggaaaauuguucauauuagcccauugucaggaagugcucagcauguagaggaguguuccuguuauccucgauauccuggugucagauguaucugcagagacaacuggaaaggcucuaauaggcccgucguagauauaaaugugaaagauuauagcauugauuccaguuaugugugcucagggcuuguuggcgacacacccagaaacaacgacagaucuagcaauagcuauugccggaauccuaacaaugagaaagggaaucacggagugaaaggcugggccuuugaugauggaaaugacguguggaugggaagaacgaucagcgaggauucacgcucagguuaugaaaccuucaaagucauuggugguugguccacaccuaauuccaaauugcagauaaauaggcaagucauaguugacagcgauaauaggucagguuauucugguauuuucucuguugagggcaaaagcugcaucaauaggugcuuuuauguggaguugauaaggggaagggaacaggaaacuagaguaugguggaccucaaacaguauuguuguguuuuguggcacuucagguaccuaugggacaggcucauggccugauggggcggacaucaaucucaugccuauauaa

SEQ ID NO: 46594 - RNA, 1410 nt, Artificial Sequence
  derived and/or modified CDS sequence (wt) from neuraminidase__InfluenzaA__ABC39808
augaauccaaaucaaaagauaauaacaauuggcucugucucucucaccauugcaacaauaugcuuccuuaugcaaauugccauccugguaacuacuguaacauugcauuucaagcaauaugagugcagcucccccccaaacaaccaaguaaugccaugugaaccaauaauaauagaaaggaacauaacagagauaguguauuugacuaacaccaccauagagaaagagauaugccccaaauuaguggaauacagaaauuggucaaagccgcaauguaaaauuacaggauuugcaccuuuuucuaaggacaauucaauucggcuuucugcugguggggacauuugggugacgagagaaccuuaugugucaugugauccuagcaaguguuaucaauuugcacucgggcaggggaccacacuagacaacaagcauucaaaugacacaauacaugauaggaccccucaucgaacccuauugaugaaugaguuggguguuccauuucauuugggaaccaggcaaguguguauagcaugguccagcucaaguugucacgaugggaaagcauggcugcauguuugugucacuggguaugauaaaaaugcaacugcuagcuucauuuacgaugggaggcuuguagacaguauugguucaugguccaaaaauauccucaggacccaggagucggaaugcguuuguaucaaugggacuuguacaguaguaaugacugauggaagugcuucagaaagagcugauacuaaaauacuguucauugaagaggggaaaaucguucauauuagcccauugucaggaagugcucagcauguagaggaguguuccuguuauccucgauauccuggugucagaugugucugcagagacaacuggaaaggcuccaauaggcccgucguagauauaaaugugaaagauuauagcauuguuuccaguuaugugugcucagggcuuguuggcgacacacccagaaaaaacgacagaucuagcaguagcuauugccggaauccuaacaaugagaaaggggaucauggagugaaaggcugggccuuugacgauggaaaugacguguggaugggaagaacgaucagcgaggagucacgcucagguuaugaaaccuucaaagucauuggugguugguccacaccuaauuccaaaucgcagauaaauaggcaagucauaguugacagcgguaauagguccgguuauucugguauuuucucuguugagggcaaaagcugcaucaauaggugcuuuuauguggaguugauaaggggaaggaaacaggaaacuagagucugguggaccucaaacaguauuguuguguuuuguggcacuucagguaccuauggaacaggcucauggccugauggagcggacaucaaucucaugccuauauaa

SEQ ID NO: 46595 - RNA, 1410 nt, Artificial Sequence; identical to SEQ ID NO: 46394
  derived and/or modified CDS sequence (wt) from neuraminidase__InfluenzaA__ABC40525

SEQ ID NO: 46596 - RNA, 1413 nt, Artificial Sequence
  derived and/or modified CDS sequence (wt) from neuraminidase__InfluenzaA__ABC40536
augaauccaaaucaaaaaauaauaaccauuggaucaaucaguauagcaaucggaauaauuagccuaauguugcaaauaggaaacauuauuucaauaugggcuagucacucaauccaaacuggaagucaaaaccacacuggaguaugcaaccaaagaaucaucacauaugaaaacaguaccugggugaaucacacauauguuaauauuaacaacaccaauguuauugcuggaaaggacaaaacuucagugacauuggccggcaauucaucucuuuguucuaucaguggaugggcuauauacacaaaagacaacagcauaagaauugguuccaaaggagauguuuuugucauaagagagccuuucauaucauguucucacuuggaaugcagaaccuuuuuucugacccaaggugcucuauuaaaugacaaacauucaaaugggaccguuaaggacagaagucccuauagggcuuuaaugagcuguccucuaggugaagcuccguccccauacaauucaaaguuugaaucaguugcuuggucagcaagcgcaugccaugauggcaugggcugguuaacaaucggaauuucugguccagacaauggagcaguggcuguacuaaaauacaacggcauaauaacugaaaccauaaaaaguuggaaaaagcaaauauuaagaacacaagagucugaaugugucugugugaacgggucauguuucaccauaaugaccgauggcccgaguaauggggccgccucguacaaaaucuucaagaucgaaaagggaaagguuauuaaaucaauagaguugaaugcacccaauuuucauuaugaggaauguuccuguuacccagacacuggcacagugauguguguaugcagggacaacuggcaugguucaaaucgacccugggugucuuuuaaucaaaaccuggauuaucaaauaggauacaucugcagugggguguucggugacaauccgcgucccaaagauggagagggcagcuguaauccagugacuguugauggagcaaacggaguaaagggguuuucauacaaauaugguaaugguguuuggauaggaaggacuaaaaguaacagacuuagaaagggguuugagaugauuugggauccuaauggauggacagauaccgacagugauuucucagugaaacaggauguuguggcaauaacugauuggucaggguacagcggaaguuucguucaacauccugaguuaacaggauuggacuguauaagaccuugcuucuggguugaguuagucagaggacugccaaaagaaaauacaacaaucuggacuagugggagcagcauuucuuuuuguggcguaaauagugauacugcaaacuggucuuggccagacggugcugaguugccguuuaccauugacaaguag

SEQ ID NO: 46597 - RNA, 1410 nt, Artificial Sequence; identical to SEQ ID NO: 46588
  derived and/or modified CDS sequence (wt) from neuraminidase__InfluenzaA__ABC40547

SEQ ID NO: 46598 - RNA, 1410 nt, Artificial Sequence
  derived and/or modified CDS sequence (wt) from neuraminidase__InfluenzaA__ABC40558
augaauccaaaucaaaagauaauaacaauuggcucugucucucucaccauugcaacaauaugcuuccuuaugcaaauugccauccugguaacuacuguaacauugcauuucaagcaauaugagugcagcucccccccaaacaaccaaguaaugccgugugaaccaauaauaauagaaagaaacauaacagagauaguguauuugacuaacaccaccauagagaaagagauaugccccaaacuaguggaauacagaaauuggucaaagccgcaauguaaaauuacaggauuugcaccuuuuucuaaggacaauucaauucggcuuucugcugguggggacauuugggugacgagagaaccuuaugugucaugcgauccuggcaaguguuaucaauuugcacucgggcaggggaccacacuagacaacaagcauucaaaugacacaauacaugauaggaccccuuaucgaacccuauugaugaaugaguuggguguuccauuucauuugggaaccaggcaaguguguauagcaugguccagcucaaguugucacgauggaaaagcauggcugcauguuugugucacugggcaugauaaaaaugcaacugcuagcuucauuuacgaugggaggcuuguagacaguauugguucaugguccaaaaguauccucaggacccaggagucggaaugcguuuguaucaaugggacuuguacaguaguaaugacugauggaagugcuucagaaagagcugauacuaaaauacuauucauugaagaggggaaaaucguucauauuagcccauugucaggaagugcucagcauguagaggaguguuccuguuauccucgauauccuggugucagaugugucugcagagacaacuggaaaggcuccaauaggcccgucguagauauaaaugugaaagauuauagcauuguuuccaguuaugugugcucagggcuuguuggcgacacacccagaaaaaacgacagaucuagcaguagcuauugccagaauccuaacaaugagaaagggaaucauggagugaaaggcugggccuuugacgauggaaaugacguguggaugggaagaacgaucagugaggagucacgcucagguuaugaaaccuucaaagucauuggugguugguccacaccuaauuccaaauugcagauaaauaggcaagucauaguugacaucgauaauagguccgguuauucugguauuuucucuguugagggcaaaagcugcaucaauaggugcuuuuauguggaguugauaaggggaagggaacaggaaacuagagucugguggaccucaaacaguauuguuguguuuuguggcacuucagguaccuauggaacaggcucauggccugauggagcggacaucaaucucaugccuauauaa

SEQ ID NO: 46599 - RNA, 1410 nt, Artificial Sequence
  derived and/or modified CDS sequence (wt) from neuraminidase__InfluenzaA__ABC40611
augaauccaaaucaaaagauaauaacgauuggcucuauuucucucacuauugccacaauaugcuuccuuaugcaaauugccauccugguaacuacuguaacauugcauuucaagcaauaugaaugcaacucucucccaaacaaccaaguaaugcugugugaaccaacaauaauagaaagaaacauaacagagauaguguaucugaccaacaccaccauagagaaggaaauaugccccaaacuagcagaauacagaaauuggucaaagccgcaauguaaaauuacaggauuugcaccuuuuucuaaggacaauucaauucggcuuuccgcugguggggacauuugggugacaagagaaccuuaugugucaugcgauccugacaaguguuaucaauuugcccuuggacagggaacaacacuaaacaacaggcauucaaaugacacaguacaugauaggaccccuuaucgaacccuauugaugaaugaguuggguguuccauuucauuugggaaccaagcaagugugcauagcaugguccagcucaaguugucacgauggaaaagcauggcugcauguuuguguaacugggcacgaugaaaaugcaacugcuagcuucauuuacgaugggaggcuuguagauaguauugguucaugguccaaaaaaauccucaggacccaggagucggaaugcguuuguaucaauggaacuuguacaguaguaaugacugaugggagugcuucaggaagagcugauacuaaaauacuauucauugaggaggggaaaaucauucauauuagccaauugucaggaagugcucagcaugucgaggagugcucauguuauccucgauauccuggugucagaugugucugcagagacaacuggaaaggcuccaauaggcccauuguagauauaaauguaaaggauuauagcauuguuuccaguuaugugugcucaggacuuguuggagacacacccagaaaaaacgacagcuccagcaguagccauugccugaauccuaacaaugaggaagggggucauggagugaaaggcugggccuuugaugauggaaaugacguguggaugggaagaacgaucagcgagaaauuccgcucagguuaugaaaccuucaaagucauugaaggcugguccaaaccuaacuccaaauugcagauaaauaggcaagucauaguugacagagauaauagguccgguuauucugguauuuucucuguugaaggcaaaagcuguaucaaucggugcuuuuauguggaguugauaaggggaaggaaacaggaaacugaagucugguggaccucaaacaguauuguuguguuuuguggcaccucagguacauauggaacaggcucauggccugauggggcggacaucaaucucaugccuauauaa

SEQ ID NO: 46600 - RNA, 1410 nt, Artificial Sequence
  derived and/or modified CDS sequence (wt) from neuraminidase__InfluenzaA__ABC40622
augaauccaaaucaaaagauaauaacaauuggcucugucucucucaccauugcaacaauaugcuuccucaugcagauugccauccugguaacuacuguaacauugcauuucaagcaguaugagugcgacucccccgcgaacaaccaaguaaugccgugugaaccaauaauaauagaaaggaacauaacagagauaguguauuugacuaacaccaccauagaaaaagagauaugccccaaauuaguggaauacaggaauuggucaaagccgcaauguaaaauuacaggauuugcaccuuuuucuaaggacaauucaauucggcuuucugcugguggggacauuugggugacgagagaaccuuaugugucaugcgauccuggcaaguguuaucaauuugcacucgggcaggggaccacacuagacaacaaacauucaaaugacacaauacaugauagaaccccucaucgaacccuauugaugaaugaguuggguguuccauuucauuugggaaccaggcaaguguguauagcaugguccagcucaaguugucacgauggaaaagcauggcugcauguuugugucacuggguaugauaaaaaugcaacugcuagcuucauuuacgaugggaggcuuguagacaguauugguucauggucucaaaauauccucaggacccaggagucggaaugcguuuguaucaaugggacuuguacaguaguaaugacugauggaaaugcuucaggaagagcugauacuaaaauacuauucauugaagaggggaaaauuguucauauuagcccauugucaggaagugcucagcauguagaggaguguuccuguuauccucgauauccuggugucagauguaucugcagagacaacuggaaaggcucuaauaggcccgucguagauauaaaugugaaagauuauagcauugauuccaguuaugugugcucagggcuuguuggcgacacacccagaaacaacgacagaucuagcaauagcuauugccggaauccuaacaaugagaaagggaaucacggagugaaaggcugggccuuugacgauggaaaugacguguggaugggaagaacgaucagcgaggauucacgcucagguuaugaaaccuucaaagucauuggugguugguccacaccuaauuccaaauugcagauaaauaggcaagucauaguugacagcgauaauaggucagguuauucugguauuuucucuguugagggcaaaagcugcaucaauaggugcuuuuauguggaguugauaaggggaagggaacaggaaacuagaguaugguggaccucaaacaguauuguuguguuuuguggcacuucagguaccuaugggacaggcucauggccugauggggcggacaucaaucucaugccuauauaa

SEQ ID NO: 46601 - RNA, 1410 nt, Artificial Sequence
  derived and/or modified CDS sequence (wt) from neuraminidase__InfluenzaA__ABC40634
augaauccaaaucaaaaaauaauaacgauuggcucuguuucucucaccauugccacaauaugcuuccuuacgcaaauugccauccugguaacuacuguaacauugcauuucaagcaauaugaaugcaacucccccccaaacaaccaagugaugcugugugaaccaacaauaauagaaagaaacauaacagagauaguguaucugaccaacaccaccauagagaaggaaauaugccccaaacuagcagaauacagaaauuggucaaagccgcaauguaacauuacuggauuugcaccuuuuucuaaggacaauucgauucggcuuuccgcugguggggacaucuggguuacaagagaaccuuaugugucaugcgauccugacaaguguuaucaauuugcccuuggacagggaacaacacuaaacaacgggcauucaaaugacacaguacaugauaggaccccuuaucggacccuauugaugaaugaguuggguguuccauuucauuugggaaccaagcaagugugcauagcaugguccagcucaaguugucacgauggaaaagcauggcugcauguuuguguaacgggggaugauaaaaaugcaacugcuagcuucauuuacaaugggaggcuuguagauaguauagguucaugguccaaaaaaauccucaggacccaggagucggaaugcguuuguaucgauggaacuuguacaguaguaaugacugaugggagugcuucaggaaaagcugauacuaaaauacuauucauugaggaggggaaaaucguucauacuagccuauugucagggagugcucagcaugucgaggagugcuccuguuauccucgauauccuggugucagaugugucugcagagacaacuggaaaggcuccaauaggcccaucguagauauaaauguaaaggauuauagcauuguuuccaguuaugugugcucaggacuuguuggagacacacccagaaaaaacgacagcuccagcaguagccauugcuuggauccuaacaaugaggaagguggucauggagugaaaggcugggccuuugaugauggaaaugacguguggaugggaagaacgaucagcgagaaguuacgcucaggauaugaaaccuucaaagucauugaaggcugguccaaaccuaacuccaaacugcagauaaauaggcaagucauaguugacagagguaauagguccgguuauucugguauuuucucuguugaaggcaaaagcugcaucaaucggugcuuuuauguggagcugauaaggggaaggaaccaggaaacugaagucuuguggaccucaaacaguauuguuguguuuuguggcaccucagguacauauggaacaggcucauggccugauggggcggacaucaaucucaugccuauauaa

SEQ ID NO: 46602 - RNA, 1410 nt, Artificial Sequence
  derived and/or modified CDS sequence (wt) from neuraminidase__InfluenzaA__ABC40645
augaauccaaaucaaaagauaauaacgauuggcucuguuucucucaccauuuccacaauaugcuucuucaugcaaauugccauccugauaacuacuguaacauugcauuucaagcaauaugaauucaacucccccccaaacaaccaagugaugcugugugaaccaacaauaauagaaagaaacauaacagagauaguguaucugaccaacaccaccauagagaaggaaauaugccccaaacuagcagaauacagaaauuggucaaagccgcaauguaacauuacaggauuugcaccuuuuucuaaggacaauucgauucggcuuuccgcugguggggacaucugggugacaagagaaccuuaugugucaugcgauccugacaaguguuaucaauuugcccuuggacagggaacaacacuaaacaacgugcauucaaaugacacaguacaugauaggaccccuuaucggacccuauugaugaaugaguuggguguuccauuucaucuggggaccaagcaagugugcauagcaugguccagcucaaguugucacgauggaaaagcauggcugcauguuuguguaacgggggaugaugaaaaugcaacugcuagcuucauuuacaaugggaggcuuguagauaguguuguuucaugguccaaaaaaauccucaggacccaggagucagaaugcguuuguaucaauggaacuuguacaguaguaaugacugaugggagugcuucaggaaaagcugauacuaaaauacuauucauugaggaggggaaaaucguucauacuagcacauugucaggaagugcucagcaugucgaggagugcuccuguuauccucgauauccuggugucagaugugucugcagagacaauuggaaaggcuccaauaggcccaucguagauauaaacauaaaggauuauagcauuguuuccaguuaugugugcucaggacuuguuggagacacacccagaaaaaacgacagcuccagcaguagccauugcuuggauccaaacaaugaggaagguggucauggagugaaaggcugggccuuugaugauggaaaugacguguggaugggaagaacgaucagcgagaaguuacgcucaggauaugaaaccuucaaagucauugaaggcugguccaacccuaacuccaaauugcagauaaauaggcaagucauaguugacagagguaauagguccgguuauucugguauuuucucuguugaaggcaaaagcugcaucaaucggugcuuuuauguggaguugauaagaggaagaaaacaggaaacugaagucuuguggaccucaaacaguauuguuguguuuuguggcaccucagguacauauggaacaggcucauggccugauggggcggacaucaaucucaugccuauauaa

SEQ ID NO: 46603 - RNA, 1410 nt, Artificial Sequence
  derived and/or modified CDS sequence (wt) from neuraminidase__InfluenzaA__ABC41706
augaauccaaaucaaaagauaauaacaauuggcucuguuucucucaccauugccacaauaugcuuccuuaugcaaauugccauccugguaacuacuguaacauugcauuucaagcagcaugaaugcaacucccccccaaacaaccaaguaaugcugugugaaccaacaauaauagaaagaaacauaacagagauaguguaucugaccaacaccaccauagagaaggaaauaugccccaaacuaguagaauacagaaauuggucaaagccgcaauguaacauuacaggauuugcaccuuuuucuaaggacaauucgauucggcuuuccgcugguggggacaucugggugacaagagaaccuuaugugucaugcgauccugacaaguguuaucaauuugcccuugggcagggaacaacacuaaacaacgggcauucaaaugacacaguacaugauaggaccccuuaccggacccuauugaugaaugaauuggguguuccauuucauuugggaaccaggcaagugugcauagcaugguccagcucaaguugucacgauggaaaagcauggcugcauguuuguguaacuggggaugauaaaaaugcaacugcuagcuucauuuacaaugggaggcuuguagauaguauugguucaugguccaaaaaaauacucagaacccaggagucggaaugcguuuguaucaauggaacuuguacaguaguaaugacugaugggagcgcuucaggaaaagcugauacuaaaauacuauucauugaggaggggaaaaucguucauauuagcacauugucaggaagugcucagcaugucgaggagugcuccuguuauccucgauauccuggugucagaugugucugcagagacaacuggaaaggcuccaauaggcccauuguagauauaaauguaaaggauuauagcauuguuuccaguuaugugugcucaggacuuguuggagacacacccagaaaaaacgacagcuucagcaguagccauugccuagauccuaacaaugaggaagguggucauggagugaaaggcugggccuuugaugauggaaaugacguguggaugggaagaacgaucagcgagaaguuacgcucagguuaugaaaccuucaaagucaucgaaggcugguccaaaccuaacuccaaauuacagauaaauaggcaaguuauaguugaaagagguaacagguccgguuauucugguauuuucuccguugaaggcaaaagcugcaucaaucggugcuuuuauguggaguugauaaggggaaggaaagaggaaacugaagucugguggaccucaaacaguauuguuguguuuuguggcaccucagguacauauggaacaggcucauggccugauggggcggauaucaaucucaugccuauauaa

SEQ ID NO: 46604 - RNA, 1413 nt, Artificial Sequence
  derived and/or modified CDS sequence (wt) from neuraminidase__InfluenzaA__ABC41717
augaauccaaaucaaaaaauaauaaccauuggaucaaucaguauagcaaucggaauaauuagucuaauguugcaaauaggaaauauuauuucaauaugggcuagucacucaauccaaacuggaagucaaaaucacacuggaauaugcaaccaaagaaucaucacauaugaaaacagcaccugggugaaucacacauauguuaauauuaacaacacuaauguuguugcuggaaaggacaaaacuucagugacauuggccggcaauucaucucuuuguucuaucaguggaugggcuauauacacaaaagacaacagcauaagaauuggcuccaaaggagauguuuuugucauaagagaaccuuucauaucauguucucacuuggaaugcagaaccuuuuuucugacccaaggugcucuauuaaaugacaaacauucaaauggaaccguuaaggacagaaguccuuauagggccuuaaugagcuguccucuaggugaagcuccguccccauacaauucaaaguuugaaucaguugcauggucagcaagcgcaugccaugauggcaugggcugguuaacaaucggaauuucugguccagacaauggagcuguggcuguacuaaaauacaacggaauaauaacugaaaccauaaaaaguuggaaaaagcgaauauugagaacacaagagucugaaugugucugugugaacgggucauguuucaccauaaugaccgauggcccgaguaauggggccgccucguacaaaaucuucaagaucgaaaaggggaagguuacuaaaucaauagaguugaaugcacccaauuuucauuaugaggaauguuccuguuacccagacacuggcacagugauguguguaugcagggacaacuggcaugguucaaaucgaccuugggugucuuuuaaucaaaacuuggauuaucaaauaggauacaucugcaguggaguguucggugacaauccgcgucccaaagauggaaagggcagcuguaauccagugacuguugauggagcagacggaguuaagggguuuucauacaaauaugguaaugguguuuggauaggaaggacuaaaaguaacagacuuagaaagggguuugagaugauuugggauccuaauggauggacagauaccgacagugauuucucagugaaacaggauguuguggcaguaacugauuggucaggguacagcggaaguuucguucaacauccugaguuaacaggauuggacuguauaagaccuugcuucuggguugaguuagucagaggacugccuagagaaaauacaacaaucuggacuagugggagcagcauuucuuuuuguggcguugauagugauacugcaaacuggucuuggccagacggugcugaauugccguucaccauugacaaguag

SEQ ID NO: 46605 - RNA, 1410 nt, Artificial Sequence
  derived and/or modified CDS sequence (wt) from neuraminidase__InfluenzaA__ABC41728
augaauccaaaucaaaagauaauaacaauuggcucuguuucucucaccauugccacaauaugcuuccuuaugcaaauugccauccugguaacuacuguaacauugcauuucaagcagcaugaaugcaacucccccccaaacaaccaaguaaugcugugugaaccaacaauaauagaaagaaacauaacagagauaguguaucugaccaacaccaccauagagaaggaaauaugccccaaacuaguagaauacagaaauuggucaaagccgcaauguaacauuacaggauuugcaccuuuuucuaaggacaauucgauucggcuuuccgcugguggggacaucugggugacaagagaaccuuaugugucaugcgauccugacaaguguuaucaauuugcccuugggcagggaacaacacuaaacaacgggcauucaaaugacacaguacaugauaggaccccuuaccggacccuauugaugaaugaauuggguguuccauuucauuugggaaccaggcaagugugcauagcaugguccagcucaaguugucacgauggaaaagcauggcugcauguuuguguaacuggggaugauaaaaaugcaacugcuagcuucauuuacaaugggaggcuuguagauaguauugguucaugguccaaaaauauacucagaacccaggagucggaaugcguuuguaucaauggaacuuguacaguaguaaugacugaugggagcgcuucaggaaaagcugauacuaaaauacuauucauugaggaggggaaaaucguucauauuagcacauugucaggaagugcucagcaugucgaggagugcuccuguuauccucgauauccuggugucagaugugucugcagagacaacuggaaaggcuccaauaggcccauuguagauauaaauguaaaggauuauagcauuguuuccaguuaugugugcucaggacuuguuggagacacacccagaaaaaacgacagcuucagcaguagccauugccuagauccuaacaaugaggaagguggucauggagugaaaggcugggccuuugaugauggaaaugacguguggaugggaagaacgaucagcgagaaguuacgcucagguuaugaaaccuucaaagucaucgaaggcugguccaaaccuaacuccaaauuacagauaaauaggcaaguuauaguugaaagagguaacagguccgguuauucugguauuuucuccguugaaggcaaaagcugcaucaaucggugcuuuuauguggaguugauaaggggaaggaaagaggaaacugaagucugguggaccucaaacaguauuguuguguuuuguggcaccucagguacauauggaacaggcucauggccugauggggcggauaucaaucucaugccuauauaa

SEQ ID NO: 46606 - RNA, 1410 nt, Artificial Sequence; identical to SEQ ID NO: 46603
  derived and/or modified CDS sequence (wt) from neuraminidase__InfluenzaA__ABC41742

SEQ ID NO: 46607 - RNA, 1410 nt, Artificial Sequence; identical to SEQ ID NO: 46603
  derived and/or modified CDS sequence (wt) from neuraminidase__InfluenzaA__ABC41956

SEQ ID NO: 46608 - RNA, 1410 nt, Artificial Sequence; identical to SEQ ID NO: 46603
  derived and/or modified CDS sequence (wt) from neuraminidase__InfluenzaA__ABC41967

SEQ ID NO: 46609 - RNA, 1410 nt, Artificial Sequence; identical to SEQ ID NO: 46603
  derived and/or modified CDS sequence (wt) from neuraminidase__InfluenzaA__ABC42017

SEQ ID NO: 46610 - RNA, 1410 nt, Artificial Sequence; identical to SEQ ID NO: 46603
  derived and/or modified CDS sequence (wt) from neuraminidase__InfluenzaA__ABC42117

SEQ ID NO: 46611 - RNA, 1410 nt, Artificial Sequence; identical to SEQ ID NO: 46603
  derived and/or modified CDS sequence (wt) from neuraminidase__InfluenzaA__ABC42128

SEQ ID NO: 46612 - RNA, 1410 nt, Artificial Sequence; identical to SEQ ID NO: 46603
  derived and/or modified CDS sequence (wt) from neuraminidase__InfluenzaA__ABC42139

SEQ ID NO: 46613 - RNA, 1410 nt, Artificial Sequence
  derived and/or modified CDS sequence (wt) from neuraminidase__InfluenzaA__ABC42150
augaauccaaaucaaaagauaauaacaauuggcucuguuucucucaccauugccacaauaugcuuccuuaugcaaauugccauccuggcaaccacuguaacauugcauuucaagcagcaugaaugcaacucccccccaaacaaccaaguaaugcugugugaaccaacaauaauagaaagaaacauaacagagauaguguaucugaccaacaccaccauagagaaggaaauaugccccaaacuaguagaauacagaaauuggucaaagccgcaauguaacauuacaggauuugcaccuuuuucuaaggacaauucgauucggcuuuccgcugguggggacaucugggugacaagagaaccuuaugugucaugcgauccugacaaguguuaucaauuugcccuugggcagggaacaacacuaaacaacgggcauucaaaugacacaguacaugauaggaccccuuaccggacccuauugaugaaugaauuggguguuccauuucauuugggaaccaggcaagugugcauagcaugguccagcucaaguugucacgauggaaaagcauggcugcauguuuguguaacuggggaugauaaaaaugcaacugcuagcuucauuuacaaugggaggcuuguagauaguauugguucaugguccaaaaaaauacucagaacccaggagucggaaugcguuuguaucaauggaacuuguacaguaguaaugacugaugggagcgcuucaggaaaagcugauacuaaaauacuauucauugaggaggggaaaaucguucauauuagcacauugucaggaagugcucagcaugucgaggagugcuccuguuauccucgauauccuggugucagaugugucugcagagacaacuggaaaggcuccaauaggcccauuguagauauaaauguaaaggauuauagcauuguuuccaguuaugugugcucaggacuuguuggagacacacccagaaaaaacgacagcuucagcaguagccauugccuagauccuaacaaugaggaagguggucauggagugaaaggcugggccuuugaugauggaaaugacguguggaugggaagaacgaucagcgggaaguuacgcucagguuaugaaaccuucaaagucaucgaaggcugguccaaaccuaacuccaaauuacagauaaauaggcaaguuauaguugaaagagguaacagguccgguuauucugguauuuucuccguugaaggcaaaagcugcaucaaucggugcuuuuauguggaguugauaaggggaaggaaagaggaaacugaagucugguggaccucaaacaguauuguuguguuuuguggcaccucagguacauauggaacaggcucauggccugauggggcggauaucaaucucaugccuauauaa

SEQ ID NO: 46614 - RNA, 1410 nt, Artificial Sequence; identical to SEQ ID NO: 46603
  derived and/or modified CDS sequence (wt) from neuraminidase__InfluenzaA__ABC42161

SEQ ID NO: 46615 - RNA, 1410 nt, Artificial Sequence
  derived and/or modified CDS sequence (wt) from neuraminidase__InfluenzaA__ABC42172
augaauccaaaucaaaagauaauaacaauuggcucuguuucucucaccauugccacaauaugcucccuuaugcaaauugccauccugguaacuacuguaacauugcauuucaagcagcaugaaugcaacucccccccaaacaaccaaguaaugcugugugaaccaacaauaauagaaagaaacauaacagagauaguguaucugaccaacaccaccauagagaaggaaauaugccccaaacuaguagaauacagaaauuggucaaagccgcaauguaacauuacaggauuugcaccuuuuucuaaggacaauucgauucggcuuuccgcugguggggacaucugggugacaagagaaccuuaugugucaugcgauccugacaaguguuaucaauuugcccuugggcagggaacaacacuaaacaacgggcauucaaaugacacaguacaugauaggaccccuuaccggacccuauugaugaaugaauuggguguuccauuucauuugggaaccaggcaagugugcauagcaugguccagcucaaguugucacgauggaaaagcauggcugcauguuuguguaacuggggaugauaaaaaugcaacugcuagcuucauuuacaaugggaggcuuguagauaguauugguucaugguccaaaaaaauacucagaacccaggagucggaaugcguuuguaucaauggaacuuguacaguaguaaugacugaugggagcgcuucaggaaaagcugauacuaaaauacuauucauugaggaggggaaaaucguucauauuagcacauugucaggaagugcucagcaugucgaggagugcuccuguuauccucgauauccuggugucagaugugucugcagagacaacuggaaaggcuccaauaggcccauuguagauauaaauguaaaggauuauagcauuguuuccaguuaugugugcucaggacuuguuggagacacacccagaaaaaacgacagcuucagcaguagccauugccuagauccuaacaaugaggaagguggucauggagugaaaggcugggccuuugaugauggaaaugacguguggaugggaagaacgaucagcgagaaguuacgcucagguuaugaaaccuucaaagucaucgaaggcugguccaaaccuaacuccaaauuacagauaaauaggcaaguuauaguugaaagagguaacagguccgguuauucugguauuuucuccguugaaggcaaaagcugcaucaaucggugcuuuuauguggaguugauaaggggaaggaaagaggaaacugaagucugguggaccucaaacaguauuguuguguuuuguggcaccucagguacauauggaacaggcucauggccugauggggcggauaucaaucucaugccuauauaa

SEQ ID NO: 46616 - RNA, 1410 nt, Artificial Sequence; identical to SEQ ID NO: 46603
  derived and/or modified CDS sequence (wt) from neuraminidase__InfluenzaA__ABC42183

SEQ ID NO: 46617 - RNA, 1410 nt, Artificial Sequence
  derived and/or modified CDS sequence (wt) from neuraminidase__InfluenzaA__ABC42195
augaauccaaaucaaaagauaauaacaauuggcucuguuucucucaccauugccacaauaugcuuccuuaugcaaauugccauccugguaacuacuguaacauugcauuucaagcagcaugaaugcaacucccccccaaacaaccaaguaaugcugugugaaccaacaauaauagaaagaaacauaacagagauaguguaucugaccaacaccaccauagagaaggaaauaugccccaaacuaguagaauacagaaauuggucaaagccgcaauguaacauuacaggauuugcaccuuuuucuaaggacaauucgauucggcuuuccgcugguggggacaucugggugacaagagaaccuuaugugucaugcgauccugacaaguguuaucaauuugcccuugggcagggaacaacacuaaacaacgggcauucaaaugacacaguacaugauaggaccccuuaccggacccuauugaugaaugaauuggguguuccauuucauuugggaaccaggcaagugugcauagcaugguccagcucaaguugucacgauggaaaagcauggcugcauguuuguguaacuggggaugauaaaaaugcaacugcuagcuucauuuacaaugggaggcuuguagauaguauugguucaugguccaaaaaaauacucagaacccaggagucggaaugcguuuguaucaauggaacuuguacaguaguaaugacugaugggagcgcuucaggaaaagcugauacuaaaauacuauucauugaggaggggaaaaucguucauauuagcacauugucaggaagugcucagcaugucgaggagugcuccuguuauccucgauauccuggugucagaugugucugcagagacaacuggaaaggcuccaauaggcccauuguagauauaaauguaaaggauuauagcauuguuuccaguuaugugugcucaggacuuguuggagacacacccagaaaaaacgacagcuucagcaguagccauugccuagauccuaacaacgaggaagguggucauggagugaaaggcugggccuuugaugauggaaaugacguguggaugggaagaacgaucagcgagaaguuacgcucagguuaugaaaccuucaaagucaucgaaggcugguccaaaccuaacuccaaauuacagauaaauaggcaaguuauaguugaaagagguaacagguccgguuauucugguauuuucuccguugaaggcaaaagcugcaucaaucggugcuuuuauguggaguugauaaggggaaggaaagaggaaacugaagucugguggaccucaaacaguauuguuguguuuuguggcaccucagguacauauggaacaggcucauggccugauggggcggauaucaaucucaugccuauauaa

SEQ ID NO: 46618 - RNA, 1410 nt, Artificial Sequence; identical to SEQ ID NO: 46603
  derived and/or modified CDS sequence (wt) from neuraminidase__InfluenzaA__ABC42310

SEQ ID NO: 46619 - RNA, 1410 nt, Artificial Sequence
  derived and/or modified CDS sequence (wt) from neuraminidase__InfluenzaA__ABC42321
augaauccaaaucaaaagauaauaacaauuggcucuguuucucucaccauugccacaauaugcuuccuuaugcaaauugccauccugguaacuacuguaacauugcauuucaagcagcaugaaugcaacucccccccaaacaaccaaguaaugcugugugagccaacaauaauagaaagaaacauaacagagauaguguaucugaccaacaccaccauagagaaggaaauaugccccaaacuaguagaauacagaaauuggucaaagccgcaauguaacauuacaggauuugcaccuuuuucuaaggacaauucgauucggcuuuccgcugguggggacaucugggugacaagagaaccuuaugugucaugcgauccugacaaguguuaucaauuugcccuugggcagggaacaacacuaaacaacgggcauucaaaugacacaguacaugauaggaccccuuaccggacccuauugaugaaugaauuggguguuccauuucauuugggaaccaggcaagugugcauagcaugguccagcucaaguugucacgauggaaaagcauggcugcauguuuguguaacuggggaugauaaaaaugcaacugcuagcuucauuuacaaugggaggcuuguagauaguauugguucaugguccaaaaaaauacucagaacccaggagucggaaugcguuuguaucaauggaacuuguacaguaguaaugacugaugggagcgcuucaggaaaagcugauacuaaaauacuauucauugaggaggggaaaaucguucauauuagcacauugucaggaagugcucagcaugucgaggagugcuccuguuauccucgauauccuggugucagaugugucugcagagacaacuggaaaggcuccaauaggcccauuguagauauaaauguaaaggauuauagcauuguuuccaguuaugugugcucaggacuuguuggagacacacccagaaaaaacgacagcuucagcaguagccauugccuagauccuaacaaugaggaagguggucauggagugaaaggcugggccuuugaugauggaaaugacguguggaugggaagaacgaucagcgagaaguuacgcucagguuaugaaaccuucaaagucaucgaaggcugguccaaaccuaacuccaaauuacagauaaauaggcaaguuauaguugaaagagguaacagguccgguuauucugguauuuucuccguugaaggcaaaagcugcaucaaucggugcuuuuauguggaguugauaaggggaaggaaagaggaaacugaagucugguggaccucaaacaguauuguuguguuuuguggcaccucagguacauauggaacaggcucauggccugauggggcggauaucaaucucaugccuauauaa

SEQ ID NO: 46620 - RNA, 1410 nt, Artificial Sequence; identical to SEQ ID NO: 46603
  derived and/or modified CDS sequence (wt) from neuraminidase__InfluenzaA__ABC42349

SEQ ID NO: 46621 - RNA, 1410 nt, Artificial Sequence
  derived and/or modified CDS sequence (wt) from neuraminidase__InfluenzaA__ABC42464
augaauccaaaucaaaagauaauaacaauuggcucuguuucucucaccauugccacaauaugcuuccuuaugcaaauugccauccugguaacuacuguaacauugcauuucaagcagcaugaaugcaacucccccccaaacaaccaaguaaugcugugugaaccaacaauaauagaaagaaacauaacagagauaguguaucugaccaacaccaccauagagaaggaaauaugccccaaacuaguagaauacagaaauuggucaaagccgcaauguaacauuacaggauuugcaccuuuuucuaaggacaauucgauucggcuuuccgcugguggggacaucugggugacaagagaaccuuaugugucaugcgauccugacaaguguuaucaauuugcccuugggcagggaacaacacuaaacaacgggcauucaaaugacacaguacaugauaggaccccuuaccggacccuauugaugaaugaauuggguguuccauuucauuugggaaccaggcaagugugcauagcaugguccagcucaaguugucacgauggaaaagcauggcugcauguuuguguaacuggggaugauaaaaaugcaacugcuagcuucauuuacaaugggaggcuuguagauaguauugguucaugguccaaaaaaauacucagaacccaggagucggaaugcguuuguaucaauggaacuuguacaguaguaaugacugaugggagcgcuucaggaaaagcugauacuaaaauacuauucauugaggaggggaaaaucguucauauuagcacauugucaggaagugcucagcaugucgaggagugcuccuguuauccucgauauccuggugucagaugugucugcagagacaacuggaaaggcuccaauaggcccauuguagauauaaauguaaaggauuauagcauuguuuccaguuaugugugcucaggacuuguuggagacacacccagaaaaaacgacagcuucagcaguagccauugucuagauccuaacaaugaggaagguggucauggagugaaaggcugggccuuugaugauggaaaugacguguggaugggaagaacgaucagcgagaaguuacgcucagguuaugaaaccuucaaagucaucgaaggcugguccaaaccuaacuccaaauuacagauaaauaggcaaguuauaguugaaagagguaacagguccgguuauucugguauuuucuccguugaaggcaaaagcugcaucaaucggugcuuuuauguggaguugauaaggggaaggaaagaggaaacugaagucugguggaccucaaacaguauuguuguguuuuguggcaccucagguacauauggaacaggcucauggccugauggggcggauaucaaucucaugccuauauaa

SEQ ID NO: 46622 - RNA, 1410 nt, Artificial Sequence; identical to SEQ ID NO: 46603
  derived and/or modified CDS sequence (wt) from neuraminidase__InfluenzaA__ABC42497

SEQ ID NO: 46623 - RNA, 1410 nt, Artificial Sequence; identical to SEQ ID NO: 46603
  derived and/or modified CDS sequence (wt) from neuraminidase__InfluenzaA__ABC42508

SEQ ID NO: 46624 - RNA, 1410 nt, Artificial Sequence; identical to SEQ ID NO: 46603
  derived and/or modified CDS sequence (wt) from neuraminidase__InfluenzaA__ABC42519

SEQ ID NO: 46625 - RNA, 1410 nt, Artificial Sequence
  derived and/or modified CDS sequence (wt) from neuraminidase__InfluenzaA__ABC42530
augaauccaaaucaaaagauaauaacaauuggcucuguuucucucaccauugccacaauaugcuuccuuaugcaaauugccauccugguaacuacuguaacauugcauuucaagcagcaugaaugcaacucccccccaaacaaccaaguaaugcugugugaaccaacaauaauagaaagaaacauaacagagauaguguaucugaccaacaccaccauagagaaggaaauaugccccaaacuaguagaauacagaaauuggucaaagccgcaauguaacauuacaggauuugcaccuuuuucuaaggacaauucgauucggcuuuccgcugguggggacaucugggugacaagagaaccuuaugugucaugcgauccugacaaguguuaucaauuugcccuugggcagggaacaacacuaaacaacgggcauucaaaugacacaguacaugauaggaccccuuaccggacccuauugaugaaugaauuggguguuccauuucauuugggaaccaggcaagugugcauagcaugguccagcucaaguugucacgauggaaaagcauggcugcauguuuguguaacuggggaugauaaaaaugcaacugcuagcuuuauuuacaaugggaggcuuguagauaguauugguucaugguccaaaaaaauacucagaacccaggagucggaaugcguuuguaucaauggaacuuguacaguaguaaugacugaugggagcgcuucaggaaaagcugauacuaaaauacuauucauugaggaggggaaaaucguucauauuagcacauugucaggaagugcucagcaugucgaggagugcuccuguuauccucgauauccuggugucagaugugucugcagagacaacuggaaaggcuccaauaggcccauuguagauauaaauguaaaggauuauagcauuguuuccaguuaugugugcucaggacuuguuggagacacacccagaaaaaacgacagcuucagcaguagccauugccuagauccuaacaaugaggaagguggucauggagugaaaggcugggccuuugaugauggaaaugacguguggaugggaagaacgaucagcgagaaguuacgcucagguuaugaaaccuucaaagucaucgaaggcugguccaaaccuaacuccaaauuacagauaaauaggcaaguuauaguugaaagagguaacagguccgguuauucugguauuuucuccguugaaggcaaaagcugcaucaaucggugcuuuuauguggaguugauaaggggaaggaaagaggaaacugaagucugguggaccucaaacaguauuguuguguuuuguggcaccucagguacauauggaacaggcucauggccugauggggcggauaucaaucucaugccuauauaa

SEQ ID NO: 46626 - RNA, 1410 nt, Artificial Sequence; identical to SEQ ID NO: 46603
  derived and/or modified CDS sequence (wt) from neuraminidase__InfluenzaA__ABC42577

SEQ ID NO: 46627 - RNA, 1410 nt, Artificial Sequence
  derived and/or modified CDS sequence (wt) from neuraminidase__InfluenzaA__ABC42588
augaauccaaaucaaaagauaauaacaauuggcucuguuucucucaccauugccacaauaugcuuccuuaugcaaauugccauccugguaacuacuguaacauugcauuucaagcagcaugaaugcaacucccccccaaacaaccaaguaaugcugugugaaccaacaauaauagaaagaaacauaacagagauaguguaucugaccaacaccaccauagagaaggaaauaugccccaaacuaguagaauacagaaauuggucaaagccgcaauguaacauuacaggauuugcaccuuuuucuaaggacaauucgauucggcuuuccgcugguggggacaucugggugacaagagaaccuuaugugucaugcgauccugacaaguguuaucaauuugcccuugggcagggaacaacacuaaacaacgggcauucaaaugacacaguacaugauaggaccccuuaccggacccuauugaugaaugaauuggguguuccauuucauuugggaaccaggcaagugugcauagcaugguccagcucaaguugucacgauggaaaagcauggcugcauguuuguguaacuggggaugauaaaaaugcaacugcuagcuucauuuacaaugggaggcuuguagauaguauugguucaugguccaaaaaaauacucagaacccaggagucggaaugcguuuguaucaauggaacuugcacaguaguaaugacugaugggagcgcuucaggaaaagcugauacuaaaauacuauucauugaggaggggaaaaucguucauauuagcacauugucaggaagugcucagcaugucgaggagugcuccuguuauccucgauauccuggugucagaugugucugcagagacaacuggaaaggcuccaauaggcccauuguagauauaaauguaaaggauuauagcauuguuuccaguuaugugugcucaggacuuguuggagacacacccagaaaaaacgacagcuucagcaguagccauugccuagauccuaacaaugaggaagguggucauggagugaaaggcugggccuuugaugauggaaaugacguguggaugggaagaacgaucagcgagaaguuacgcucagguuaugaaaccuucaaagucaucgaaggcugguccaaaccuaacuccaaauuacagauaaauaggcaaguuauaguugaaagagguaacagguccgguuauucugguauuuucuccguugaaggcaaaagcugcaucaaucggugcuuuuauguggaguugauaaggggaaggaaagaggaaacugaagucugguggaccucaaacaguauuguuguguuuuguggcaccucagguacauauggaacaggcucauggccugauggggcggauaucaaucucaugccuauauaa

SEQ ID NO: 46628 - RNA, 1410 nt, Artificial Sequence; identical to SEQ ID NO: 46378
  derived and/or modified CDS sequence (wt) from neuraminidase__InfluenzaA__ABC42599

SEQ ID NO: 46629 - RNA, 1410 nt, Artificial Sequence
  derived and/or modified CDS sequence (wt) from neuraminidase__InfluenzaA__ABC42610
augaauccaaaucaaaagauaauaacgauuggcucuguuucucucaccauuuccacaauaugcuucuuuaugcaaauugccaucuugauaacuacuguaacauugcauuucaagcaauaugaauucaacucccccccaaacaaccaagugaugcugugugaaccaacaauaauagaaagaaacauaacagagauaguguaucugaccaacaccaccauagagaaggaaauaugccccaaacuagcagaauacagaaauuggucaaagccgcaaugugacauuacaggauuugcaccuuuuucuaaggacaauucgauuaggcuuuccgcugguggggacaucugggugacaagagaaccuuaugugucaugcgauccugacaaauguuaucaauuugcccuuggacagggaacaacacuaaacaacgugcauucaaaugacacaguacaugauaggaccccuuaucggacccuauugaugaaugaguuagguguuccauuucaucuggggacuaagcaagugugcauagcaugguccagcucaaguugucacgauggaaaagcauggcugcauguuuguguaacgggggaugauaaaaaugcaacugcuagcuucauuuacaaugggaggcuuguagauaguauuguuucaugguccaaagaaauccucagaacccaggagucagaaugcguuuguaucaauggaacuuguacaguaguaaugaccgaugggagugcuucaggaaaagcugauacuaaaauacuauucauugaggaggggaaaaucguucauacuagcacauugucaggaagugcccagcaugucgaggagugcuccugcuauccucgauauccuggugucagaugugucugcagagacaacuggaaaggcuccaauaggcccaucguagauauaaacauaaaggauuauagcauuguuuccaguuaugugugcucaggacuuguuggagacacacccagaaaaaacgacagcuccagcaguagccauugcuuggauccuaacaaugaagaagguggucauggagugaaaggcugggccuuugaugauggaaaugacguguggaugggaagaacgaucagcgagaaguuacgcucaggauaugaaaccuucaaagucauugaaggcugguccaacccuaauuccaaauugcagauaaauaggcaagucauaguugacagagguaauagauccgguuauucugguauuuucucuguugaaggcaaaagcugcaucaaucggugcuuuuauguggaguugauaaggggaagaaaagaggaaacugaagucuuguggaccucaaacaguauuguuguguuuuguggcaccucagguacauauggaacaggcucauggccugauggggcggacaucaaucucaugccuauauaa

SEQ ID NO: 46630 - RNA, 1410 nt, Artificial Sequence; identical to SEQ ID NO: 46378
  derived and/or modified CDS sequence (wt) from neuraminidase__InfluenzaA__ABC42621

SEQ ID NO: 46631 - RNA, 1410 nt, Artificial Sequence
  derived and/or modified CDS sequence (wt) from neuraminidase__InfluenzaA__ABC42632
augaauccaaaucaaaagauaauaacgauuggcucuguuucucucaccauuuccacaauaugcuucuuuaugcaaauugccaucuugauaacuacuguaacauugcauuucaagcaauaugaauucaacucccccccaaacaaccaagugaugcugugugaaccaacaauaauagaaagaaacauaacagagauaguguaucugaccaacaccaccauagagaaggaaauaugccccaaacuagcagaauacagaaauuggucaaagccgcaaugugacauuacaggauuugcaccuuuuucuaaggacaauucgauuaggcuuuccgcugguggggacaucugggugacaagagaaccuuaugugucaugcgauccugacaaauguuaucaauuugcccuuggacagggaacaacacuaaacaacgugcauucaaaugacacaguacaugauaggaccccuuaucggacccuauugaugaaugaguuagguguuccauuucaucuggggacuaagcaagugugcauagcaugguccagcucaaguugucacgauggaaaagcauggcugcauguuuguguaacgggggaugauaaaaaugcaacugcuagcuucauuuacaaugggaggcuuguagauaguauuguuucaugguccaaagaaauccucagaacccaggagucagaaugcguuuguaucaauggaacuuguacaguaguaaugacugaugggagugcuucaggaaaagcugauacuaaaauacuauucauugaggaggggaaaaucguucauacuagcacauugucaggaagugcccagcauguugaggagugcuccugcuauccucgauauccuggugucagaugugucugcagagacaacuggaaaggcuccaauaggcccaucguagauauaaacauaaaggauuauagcauuguuuccaguuaugugugcucaggacuuguuggagacacacccagaaaaaacgacagcuccagcaguagccauugcuuggauccuaacaaugaagaagguggucauggagugaaaggcugggccuuugaugauggaaaugacguguggaugggaagaacgaucagcgagaaguuacgcucaggauaugaaaccuucaaagucauugaaggcugguccaacccuaauuccaaauugcagauaaauaggcaagucauaguugacagagguaauagguccgguuauucugguauuuucucuguugaaggcaaaagcugcaucaaucggugcuuuuauguggaguugauaaggggaagaaaagaggaaacugaagucuuguggaccucaaacaguauuguuguguuuuguggcaccucagguacauauggaacaggcucauggccugauggggcggacaucaaucucaugccuauauaa

SEQ ID NO: 46632 - RNA, 1410 nt, Artificial Sequence; identical to SEQ ID NO: 46378
  derived and/or modified CDS sequence (wt) from neuraminidase__InfluenzaA__ABC42643

SEQ ID NO: 46633 - RNA, 1410 nt, Artificial Sequence
  derived and/or modified CDS sequence (wt) from neuraminidase__InfluenzaA__ABC42654
augaauccaaaucaaaagauaauaacgauuggcucuguuucucucaccauuuccacaauaugcuucuuuaugcaaauugccaucuugauaacuacuguaacauugcauuucaagcaauaugaauucaacucccccccaaacaaccaagugaugcugugugaaccaacaauaauagaaagaaacauaacagagauaguguaucugaccaacaccaccauagagaaggaaauaugccccaaacuagcagaauacagaaauuggucaaagccgcaaugugacauuacaggauuugcaccuuuuucuaaggacaauucgauuaggcuuuccgcugguggggacaucugggugacaagagaaccuuaugugucaugcgauccugacaaauguuaucaauuugcccuuggacagggaacaacacuaaacaacgugcauucaaaugacacaguacaugauaggaccccuuaucggacccuauugaugaaugaguuagguguuccauuucaucuggggacuaagcaagugugcauagcaugguccagcucaaguugucacgauggaaaagcauggcugcauguuugugugacgggggaugauaaaaaugcaacugcuagcuucauuuacaaugggaggcuuguagauaguauuguuucaugguccaaagaaauccucagaacccaggagucagaaugcguuuguaucaauggaacuuguacaguaguaaugacugaugggagugcuucaggaaaagcugauacuaaaauacuauucauugaggaggggaaaaucguucauacuagcacauugucaggaagugcccagcaugucgaggagugcuccugcuauccucgauauccuggugucagaugugucugcagagacaacuggaaaggcuccaauaggcccaucguagauauaaacauaaaggauuauagcauuguuuccaguuaugugugcucaggacuuguuggagacacacccagaaaaaacgacagcuccagcaguagccauugcuuggauccuaacaaugaagaagguggucauggagugaaaggcugggccuuugaugauggaaaugacguguggaugggaagaacgaucagcgagaaguuacgcucaggauaugaaaccuucaaagucauugaaggcugguccaacccuaauuccaaauugcagauaaauaggcaagucauaguugacagagguaauagguccgguuauucugguauuuucucuguugaaggcaaaagcugcaucaaucggugcuuuuauguggaguugauaaggggaagaaaagaggaaacugaagucuuguggaccucaaacaguauuguuguguuuuguggcaccucagguacauauggaacaggcucauggccugauggggcggacaucaaucucaugccuauauaa

SEQ ID NO: 46634 - RNA, 1410 nt, Artificial Sequence; identical to SEQ ID NO: 46378
  derived and/or modified CDS sequence (wt) from neuraminidase__InfluenzaA__ABC42665

SEQ ID NO: 46635 - RNA, 1410 nt, Artificial Sequence; identical to SEQ ID NO: 46378
  derived and/or modified CDS sequence (wt) from neuraminidase__InfluenzaA__ABC42676

SEQ ID NO: 46636 - RNA, 1410 nt, Artificial Sequence; identical to SEQ ID NO: 46378
  derived and/or modified CDS sequence (wt) from neuraminidase__InfluenzaA__ABC42687

SEQ ID NO: 46637 - RNA, 1410 nt, Artificial Sequence; identical to SEQ ID NO: 46378
  derived and/or modified CDS sequence (wt) from neuraminidase__InfluenzaA__ABC42698

SEQ ID NO: 46638 - RNA, 1410 nt, Artificial Sequence; identical to SEQ ID NO: 46378
  derived and/or modified CDS sequence (wt) from neuraminidase__InfluenzaA__ABC42709

SEQ ID NO: 46639 - RNA, 1410 nt, Artificial Sequence
  derived and/or modified CDS sequence (wt) from neuraminidase__InfluenzaA__ABC42720
augaauccaaaucaaaagauaauaacgauuggcucuguuucucucaccauuuccacaauaugcuucuuuaugcaaauugccaucuugauaacuacuguaacauugcauuucaagcaauaugaauucaacucccccccaaacaaccaagugaugcugugugaaccaacaauaauagaaagaaacauaacagagauaguguaucugaccaacaccaccauagagaaggaaauaugccccaaacuagcagaauacagaaauuggucaaagccgcaaugugacauuacaggauuugcaccuuuuucuaaggacaauucgauuaggcucuccgcugguggggacaucugggugacaagagaaccuuaugugucaugcgauccugacaaauguuaucaauuugcccuuggacagggaacaacacuaaacaacgugcauucaaaugacacaguacaugauaggaccccuuaucggacccuauugaugaaugaguuagguguuccauuucaucuggggacuaagcaagugugcauagcaugguccagcucaaguugucacgauggaaaagcauggcugcauguuuguguaacgggggaugauaaaaaugcaacugcuagcuucauuuacaaugggaggcuuguagauaguauuguuucaugguccaaagaaauccucagaacccaggagucagaaugcguuuguaucaauggaacuuguacaguaguaaugacugaugggagugcuucaggaaaagcugauacuaaaauacuauucauugaggaggggaaaaucguucauacuagcacauugucaggaagugcccagcaugucgaggagugcuccugcuauccucgauauccuggugucagaugugucugcagagacaacuggaaaggcuccaauaggcccaucguagauauaaacauaaaggauuauagcauuguuuccaguuaugugugcucaggacuuguuggagacacacccagaaaaaacgacagcuccagcaguagccauugcuuggauccuaacaaugaagaagguggucauggagugaaaggcugggccuuugaugauggaaaugacguguggaugggaagaacgaucagcgagaaguuacgcucaggauaugaaaccuucaaagucauugaaggcugguccaacccuaauuccaaauugcagauaaauaggcaagucauaguugacagagguaauagguccgguuauucugguauuuucucuguugaaggcaaaagcugcaucaaucggugcuuuuauguggaguugauaaggggaagaaaagaggaaacugaagucuuguggaccucaaacaguauuguuguguuuuguggcaccucagguacauauggaacaggcucauggccugauggggcggacaucaaucucaugccuauauaa

SEQ ID NO: 46640 - RNA, 1410 nt, Artificial Sequence
  derived and/or modified CDS sequence (wt) from neuraminidase__InfluenzaA__ABC42742
augaauccaaaucaaaagauaauaacgauuggcucuguuucucucaccauuuccacaauaugcuucuuuaugcaaauugccaucuugaugacuacuguaacauugcauuucaagcaauaugaauucaacucccccccaaacaaccaagugaugcugugugaaccaacaauaauagaaagaaacauaacagagauaguguaucugaccaacaccaccauagagaaggaaauaugccccaaacuagcagaauacagaaauuggucaaagccgcaaugugacauuacaggauuugcaccuuuuucuaaggacaauucgauuaggcuuuccgcugguggggacaucugggugacaagagaaccuuaugugucaugcgauccugacaaauguuaucaauuugcccuuggacagggaacaacacuaaacaacgugcauucaaaugacacaguacaugauaggaccccuuaucggacccuauugaugaaugaguuagguguuccauuucaucuggggacuaagcaagugugcauagcaugguccagcucaaguugucacgauggaaaagcauggcugcauguuuguguaacgggggaugauaaaaaugcaacugcuagcuucauuuacaaugggaggcuuguagauaguauuguuucaugguccaaagaaauccucagaacccaggagucagaaugcguuuguaucaauggaacuuguacaguaguaaugacugaugggagugcuucaggaaaagcugauacuaaaauacuauucauugaggaggggaaaaucguucauacuagcacauugucaggaagugcccagcaugucgaggagugcuccugcuauccucgauauccuggugucagaugugucugcagagacaacuggaaaggcuccaauaggcccaucguagauauaaacauaaaggauuauagcauuguuuccaguuaugugugcucaggacuuguuggagacacacccagaagaaacgacagcuccagcaguagccauugcuuggauccuaacaaugaagaagguggucauggagugaaaggcugggccuuugaugauggaaaugacguguggaugggaagaacgaucagcgagaaguuacgcucaggauaugaaaccuucaaagucauugaaggcugguccaacccuaauuccaaauugcagauaaauaggcaagucauaguugacagagguaauagguccgguuauucugguauuuucucuguugaaggcaaaagcugcaucaaucggugcuuuuauguggaguugauaaggggaagaaaagaggaaacugaagucuuguggaccucaaacaguauuguuguguuuuguggcaccucagguacauauggaacaggcucauggccugauggggcggacaucaaucucaugccuauauaa

SEQ ID NO: 46641 - RNA, 1410 nt, Artificial Sequence; identical to SEQ ID NO: 46378
  derived and/or modified CDS sequence (wt) from neuraminidase__InfluenzaA__ABC42764

SEQ ID NO: 46642 - RNA, 1410 nt, Artificial Sequence; identical to SEQ ID NO: 46378
  derived and/or modified CDS sequence (wt) from neuraminidase__InfluenzaA__ABC42775

SEQ ID NO: 46643 - RNA, 1410 nt, Artificial Sequence; identical to SEQ ID NO: 46378
  derived and/or modified CDS sequence (wt) from neuraminidase__InfluenzaA__ABC42786

SEQ ID NO: 46644 - RNA, 1410 nt, Artificial Sequence; identical to SEQ ID NO: 46378
  derived and/or modified CDS sequence (wt) from neuraminidase__InfluenzaA__ABC42797

SEQ ID NO: 46645 - RNA, 1410 nt, Artificial Sequence
  derived and/or modified CDS sequence (wt) from neuraminidase__InfluenzaA__ABC42808
augaauccaaaucaaaagauaauaacgauuggcucuguuucucucaccauuuccacaauaugcuucuuuaugcaaauugccaucuugauaacuacuguaacauugcauuucaagcaauaugaauucaacucccccccaaacaaccaagugaugcugugugaaccaacaauaauagaaagaaacauaacagagauaguguaucugaccaacaccaccauagagaaggaaauaugccccaaacuagcagaauacagaaauuggucaaagccgcaaugugacauuacaggauuugcaccuuuuucuaaggacaauucgauuaggcuuuccgcugguggggacaucugggugacaagagaaccuuaugugucaugcgauccugacaaauguuaucaauuugcccuuggacagggaacaacacuaaacaacgugcauucaaaugacacaguacaugauaggaccccuuaucggacccuauugaugaaugaguuagguguuccauuucaucuggggacuaagcaagugugcauagcaugguccagcucaaguugucacgauggaaaagcauggcugcauguuuguguaacgggggaugauaaaaaugcaacugcuagcuucauuuacaaugggaggcuuguagauaguauuguuucaugguccaaagaaauccucagaacccaggagucagaaugcguuuguaucaauggaacuuguacaguaguaaugacugaugggagugcuucaggaaaagcugauacuaaaauacuauucauugaggaggggaaaaucguucauacuagcacauugucaggaagugcccagcaugucgaggagugcuccugcuauccucgauauccuggugucagaugugucugcagagacaacuggaaaggcuccaauaggcccaucguagauauaaacauaaaggauuauagcauuguuuccaguuaugugugcucaggacuuguuggagacacacccagaaaaaacgacagcuccagcaguagccauugcuuggauccuaacaaugaagaagguggucauggagugaaaggcugggccuuugaugauggaaaugacguguggaugggaagaacgaucagcgagaaguuacgcucaggauaugaaaccuucaaagucauugaaggcugguccaacccuaauuccaaguugcagauaaauaggcaagucauaguugacagagguaauagguccgguuauucugguauuuucucuguugaaggcaaaagcugcaucaaucggugcuuuuauguggaguugauaaggggaagaaaagaggaaacugaagucuuguggaccucaaacaguauuguuguguuuuguggcaccucagguacauauggaacaggcucauggccugauggggcggacaucaaucucaugccuauauaa

SEQ ID NO: 46646 - RNA, 1410 nt, Artificial Sequence; identical to SEQ ID NO: 46378
  derived and/or modified CDS sequence (wt) from neuraminidase__InfluenzaA__ABC42819

SEQ ID NO: 46647 - RNA, 1410 nt, Artificial Sequence
  derived and/or modified CDS sequence (wt) from neuraminidase__InfluenzaA__ABC42841
augaauccaaaucaaaagauaauaacgauuggcucuguuucucucaccauuuccacaauaugcuucuuuaugcaaauugccaucuugauaacuacuguaacauugcauuucaagcaauaugaauucaacucccccccaaacaaccaagugaugcugugugaaccaacaauaauagaaagaaacauaacagagauaguguaucugaccaacaccaccauagagaaggaaauaugccccaaacuagcagaauacagaaauuggucaaagccgcaaugugacauuacaggauuugcaccuuuuucuaaggacaauucgauuaggcuuuccgcugguggggacaucugggugacaagagaaccuuaugugucaugcgauccugacaaauguuaucaauuugcccuuggacagggaacaacacuaaacaacgugcauucaaaugacacaguacaugauaggaccccuuaucggacccuauugaugaaugaguuagguguuccauuucaucuggggacuaagcaagugugcauagcaugguccagcucaaguugucacgauggaaaagcauggcugcauguuuguguaacgggggaugauaaaaaugcaacugcuagcuucauuuacaaugggaggcuuguagauaguauuguuucaugguccaaagaaauccucagaacccaggagucagaaugcguuuguaucaauggaacuuguacaguaguaaugacugaugggagugcuucaagaaaagcugauacuaaaauacuauucauugaggaggggaaaaucguucauacuagcacauugucaggaagugcccagcaugucgaggagugcuccugcuauccucgauauccuggugucagaugugucugcagagacaacuggaaaggcuccaauaggcccaucguagauauaaacauaaaggauuauagcauuguuuccaguuaugugugcucaggacuuguuggagacacacccagaaaaaacgacagcuccagcaguagccauugcuuggauccuaacaaugaagaagguggucauggagugaaaggcugggccuuugaugauggaaaugacguguggaugggaagaacgaucagcgagaaguuacgcucaggauaugaaaccuucaaagucauugaaggcugguccaacccuaauuccaaauugcagauaaauaggcaagucauaguugacagagguaauagguccgguuauucugguauuuucucuguugaaggcaaaagcugcaucaaucggugcuuuuauguggaguugauaaggggaagaaaagaggaaacugaagucuuguggaccucaaacaguauuguuguguuuuguggcaccucagguacauauggaacaggcucauggccugauggggcggacaucaaucucaugccuauauaa

SEQ ID NO: 46648 - RNA, 1410 nt, Artificial Sequence
  derived and/or modified CDS sequence (wt) from neuraminidase__InfluenzaA__ABC42852
augaauccaaaucaaaagauaauaacgauuggcucuguuucucucaccauuuccacaauaugcuucuuuaugcaaauugccaucuugauaacuacuguaacauugcauuucaagcaauaugaauucaacucccccccaaacaaccaagugaugcugugugaaccaacaauaauagaaagaaacauaacagagauaguguaucugaccaacaccaccauagagaaggaaauaugccccaaacuagcagaauacagaaauuggucaaagccgcaaugugacauuacaggauuugcaccuuuuucuaaggacaauucgauuaggcuuuccgcugguggggacaucugggugacaagagaaccuuaugugucaugcgauccugacaaauguuaucaauuugcccuuggacagggaacaacacuaaacaacgugcauucaaaugacacaguacaugauaggaccccuuaucggacccuauugaugaaugaguuagguguuccauuucaucuggggacuaagcaagugugcauagcaugguccagcucaaguugucacgauggaaaagcauggcugcauguuuguguaacgggggaugauaaaaaugcaacugcuagcuucauuuacaaugggaggcuuguagauaguauuguuucaugguccaaagaaauccucagaacccaggagucagaaugcguuuguaucaauggaacuuguacaguaguaaugacugaugggagugcuucaggaaaagcugauacuaaaauacuauucauugaggaggggaaaaucguucauacuagcacguugucaggaagugcccagcaugucgaggagugcuccugcuauccucgauauccuggugucagaugugucugcagagacaacuggaaaggcuccaauaggcccaucguagauauaaacauaaaggauuauagcauuguuuccaguuaugugugcucaggacuuguuggagacacacccagaaaaaacgacagcuccagcaguagccauugcuuggauccuaacaaugaagaagguggucauggagugaaaggcugggccuuugaugauggaaaugacguguggaugggaagaacgaucagcgagaaguuacgcucaggauaugaaaccuucaaagucauugaaggcugguccaacccuaauuccaaauugcagauaaauaggcaagucauaguugacagagguaauagguccgguuauucugguauuuucucuguugaaggcaaaagcugcaucaaucggugcuuuuauguggaguugauaaggggaagaaaagaggaaacugaagucuuguggaccucaaacaguauuguuguguuuuguggcaccucagguacauauggaacaggcucauggccugauggggcggacaucaaucucaugccuauauaa

SEQ ID NO: 46649 - RNA, 1410 nt, Artificial Sequence; identical to SEQ ID NO: 46378
  derived and/or modified CDS sequence (wt) from neuraminidase__InfluenzaA__ABC42863

SEQ ID NO: 46650 - RNA, 1410 nt, Artificial Sequence; identical to SEQ ID NO: 46178
  derived and/or modified CDS sequence (wt) from neuraminidase__InfluenzaA__ABC42874

SEQ ID NO: 46651 - RNA, 1410 nt, Artificial Sequence; identical to SEQ ID NO: 46178
  derived and/or modified CDS sequence (wt) from neuraminidase__InfluenzaA__ABC42885

SEQ ID NO: 46652 - RNA, 1410 nt, Artificial Sequence; identical to SEQ ID NO: 46178
  derived and/or modified CDS sequence (wt) from neuraminidase__InfluenzaA__ABC42896

SEQ ID NO: 46653 - RNA, 1410 nt, Artificial Sequence; identical to SEQ ID NO: 46603
  derived and/or modified CDS sequence (wt) from neuraminidase__InfluenzaA__ABC42914

SEQ ID NO: 46654 - RNA, 1410 nt, Artificial Sequence
  derived and/or modified CDS sequence (wt) from neuraminidase__InfluenzaA__ABC42932
augaauccaaaucaaaagauaauaacaauuggcucuguuucucucaccauugccacaauaugcuuccuuaugcaaauugccauccugguaacuacuguaacauugcauuucaagcagcaugaaugcaacucccccccaaacaaccaaguaaugcugugugaaccaacaauaauagaaagaaacauaacagagauaguguaucugaccaacaccaccauagagaaggaaauaugccccaaacuaguagaauacagaaauuggucaaagccgcaauguaacauuacaggauuugcaccuuuuucuaaggacaauucgauuaggcuuuccgcugguggggacaucugggugacaagagaaccuuaugugucaugcgauccugacaaguguuaucaauuugcccuugggcagggaacaacacuaaacaacgggcauucaaaugacacaguacaugauaggaccccuuaccggacccuauugaugaaugaauuggguguuccauuucauuugggaaccaggcaagugugcauagcaugguccagcucaaguugucacgauggaaaagcauggcugcauguuuguguaacuggggaugauaaaaaugcaacugcuagcuucauuuacaaugggaggcuuguagauaguauugguucaugguccaaaaaaauacucagaacccaggagucggaaugcguuuguaucaauggaacuuguacaguaguaaugacugaugggagcgcuucaggaaaagcugauacuaaaauacuauucauugaggaggggaaaaucguucauauuagcacauugucaggaagugcucagcaugucgaggagugcuccuguuauccucgauauccuggugucagaugugucugcagagacaacuggaaaggcuccaauaggcccauuguagauauaaauguaaaggauuauagcauuguuuccaguuaugugugcucaggacuuguuggagacacacccagaaaaaacgacagcuucagcaguagccauugccuagauccuaacaaugaggaagguggucauggagugaaaggcugggccuuugaugauggaaaugacguguggaugggaagaacgaucagcgagaaguuacgcucagguuaugaaaccuucaaagucaucgaaggcugguccaaaccuaacuccaaauuacagauaaauaggcaaguuauaguugaaagagguaacagguccgguuauucugguauuuucuccguugaaggcaaaagcugcaucaaucggugcuuuuauguggaguugauaaggggaaggaaagaggaaacugaagucugguggaccucaaacaguauuguuguguuuuguggcaccucagguacauauggaacaggcucauggccugauggggcggauaucaaucucaugccuauauaa

SEQ ID NO: 46655 - RNA, 1410 nt, Artificial Sequence
  derived and/or modified CDS sequence (wt) from neuraminidase__InfluenzaA__ABC42943
augaauccaaaucaaaagauaauaacaauuggcucuguuucucucaccauugccacaauaugcuuccuuaugcaaauugccauccugguaacuacuguaacauugcauuucaagcagcaugaaugcaacucccccccaaacaaccaaguaaugcugugugaaccaacaauaauagaaagaaacauaacagagauaguguaucugaccaacaccaccauagagaaggaaauaugccccaaacuaguaggauacagaaauuggucaaagccgcaauguaacauuacaggauuugcaccuuuuucuaaggacaauucgauucggcuuuccgcugguggggacaucugggugacaagagaaccuuaugugucaugcgauccugacaaguguuaucaauuugcccuugggcagggaacaacacuaaacaacgggcauucaaaugacacaguacaugauaggaccccuuaccggacccuauugaugaaugaauuggguguuccauuucauuugggaaccaggcaagugugcauagcaugguccagcucaaguugucacgauggaaaagcauggcugcauguuuguguaacuggggaugauaaaaaugcaacugcuagcuucauuuacaaugggaggcuuguagauaguauugguucaugguccaaaaaaauacucagaacccaggagucggaaugcguuuguaucaauggaacuuguacaguaguaaugacugaugggagcgcuucaggaaaagcugauacuaaaauacuauucauugaggaggggaaaaucguucauauuagcacauugucaggaagugcucagcaugucgaggagugcuccuguuauccucgauauccuggugucagaugugucugcagagacaacuggaaaggcuccaauaggcccauuguagauauaaauguaaaggauuauagcauuguuuccaguuaugugugcucaggacuuguuggagacacacccagaaaaaacgacagcuucagcaguagccauugccuagauccuaacaaugaggaagguggucauggagugaaaggcugggccuuugaugauggaaaugacguguggaugggaagaacgaucagcgagaaguuacgcucagguuaugaaaccuucaaagucaucgaaggcugguccaaaccuaacuccaaauuacagauaaauaggcaaguuauaguugaaagagguaacagguccgguuauucugguauuuucuccguugaaggcaaaagcugcaucaaucggugcuuuuauguggaguugauaaggggaaggaaagaggaaacugaagucugguggaccucaaacaguauuguuguguuuuguggcaccucagguacauauggaacaggcucauggccugauggggcggauaucaaucucaugccuauauaa

SEQ ID NO: 46656 - RNA, 1410 nt, Artificial Sequence; identical to SEQ ID NO: 46603
  derived and/or modified CDS sequence (wt) from neuraminidase__InfluenzaA__ABC42954

SEQ ID NO: 46657 - RNA, 1410 nt, Artificial Sequence
  derived and/or modified CDS sequence (wt) from neuraminidase__InfluenzaA__ABC42965
augaauccaaaucaaaagauaauaacaauuggcucuguuucucucaccauugccacaauaugcuuccuuaugcaaauugccauccugguaacuacuguaacauugcauuucaagcagcaugaaugcaacucccccccaaacaaccaaguaaugcugugugaaccaacaauaauagaaagaaacauaacagagauaguguaucugaccaacaccaccauagagaaggaaauaugccccaaacuaguagaauacagaaauuggucaaagccgcaauguaacauuacaggauuugcaccuuuuucuaaggacaauucgauucggcuuuccgcugguggggacaucugggugacaagagaaccuuaugugucaugcgauccugacaaguguuaucaauuugcccuugggcagggaacaacacuaaacaacgggcauucaaaugacacaguacaugauaggaccccuuaccggacccuauugaugaaugaauuggguguuccauuucauuugggaaccaggcaagugugcauagcaugguccagcucaaguugucacgauggaaaagcauggcugcauguuuguguaacuggggaugauaaaaaugcaacugcuagcuucauuuacaaugggaggcuuguagauaguauugguucaugguccaaaaaaauacucagaacccaggagucggaaugcguuuguaucaauggaacuuguacaguaguaaugacugaugggagcgcuucaggaaaagcugauacuaaaauacuauucauugaggaggggaaaaucguucauauuagcacauugucaggaagugcucagcaugucgaggagugcuccuguuauccucgauauccuggugucagaugugucugcagagacaacuggaaaggcuccaauaggcccauuguagauauaaauguaaaggauuauagcauuguuuccaguuaugugugcucaggacuuguuggagacacacccagaaaaaacgacagcuucagcaguagccauugccuagauccuaacaaugaggaagguggucauggagugaaaggcugggccuuugaugauggaaaugacguguggaugggaagaacgaucagcgagaaguuacgcucagguuaugaaaccuucaaagucaucgaaggcugguccaaaccuaacuccaaauuacagauaaauaggcaaguuauaguugaaagagguaacagguccgguuauucugguauuuucuccguugaaggcaaaagcugcaucaaucggugcuuuuauguggaguugauaaggggaaggaaagaggaaacugaagucugguggaccucaaacaguauuguuguguucuguggcaccucagguacauauggaacaggcucauggccugauggggcggauaucaaucucaugccuauauaa

SEQ ID NO: 46658 - RNA, 1410 nt, Artificial Sequence
  derived and/or modified CDS sequence (wt) from neuraminidase__InfluenzaA__ABC42976
augaauccaaaucaaaagauaauaacaauuggcucuguuucucucaccauugccacaauaugcuuccuuaugcaaauugccauccugguaacuacuguaacauugcauuucaagcagcaugaaugcaacucccccccaaacaaccaagcaaugcugugugaaccaacaauaauagaaagaaacauaacagagauaguguaucugaccaacaccaccauagagaaggaaauaugccccaaacuaguagaauacagaaauuggucaaagccgcaauguaacauuacaggauuugcaccuuuuucuaaggacaauucgauucggcuuuccgcugguggggacaucugggugacaagagaaccuuaugugucaugcgauccugacaaguguuaucaauuugcccuugggcagggaacaacacuaaacaacgggcauucaaaugacacaguacaugauaggaccccuuaccggacccuauugaugaaugaauuggguguuccauuucauuugggaaccaggcaagugugcauagcaugguccagcucaaguugucacgauggaaaagcauggcugcauguuuguguaacuggggaugauaaaaaugcaacugcuagcuucauuuacaaugggaggcuuguagauaguauugguucaugguccaaaaaaauacucagaacccaggagucggaaugcguuuguaucaauggaacuuguacaguaguaaugacugaugggagcgcuucaggaaaagcugauacuaaaauacuauucauugaggaggggaaaaucguucauauuagcacauugucaggaagugcucagcaugucgaggagugcuccuguuauccucgauauccuggugucagaugugucugcagagacaacuggaaaggcuccaauaggcccauuguagauauaaauguaaaggauuauagcauuguuuccaguuaugugugcucaggacuuguuggagacacacccagaaaaaacgacagcuucagcaguagccauugccuagauccuaacaaugaggaagguggucauggagugaaaggcugggccuuugaugauggaaaugacguguggaugggaagaacgaucagcgagaaguuacgcucagguuaugaaaccuucaaagucaucgaaggcugguccaaaccuaacuccaaauuacagauaaauaggcaaguuauaguugaaagagguaacagguccgguuauucugguauuuucuccguugaaggcaaaagcugcaucaaucggugcuuuuauguggaguugauaaggggaaggaaagaggaaacugaagucugguggaccucaaacaguauuguuguguuuuguggcaccucagguacauauggaacaggcucauggccugauggggcggauaucaaucucaugccuauauaa

SEQ ID NO: 46659 - RNA, 1410 nt, Artificial Sequence; identical to SEQ ID NO: 46603
  derived and/or modified CDS sequence (wt) from neuraminidase__InfluenzaA__ABC42987

SEQ ID NO: 46660 - RNA, 1410 nt, Artificial Sequence; identical to SEQ ID NO: 46603
  derived and/or modified CDS sequence (wt) from neuraminidase__InfluenzaA__ABC42998

SEQ ID NO: 46661 - RNA, 1410 nt, Artificial Sequence
  derived and/or modified CDS sequence (wt) from neuraminidase__InfluenzaA__ABC43009
augaauccaaaucaaaagauaauaacaauuggcucuguuucucucaccauugccacaauaugcuuccuuaugcaaauugccauccugguaacuacuguaacauugcauuucaagcagcaugaaugcaacucccccccaaacaaccaaguaaugcugugugaaccaacaauaauagaaagaaacauaacagagauaguguaucugaccaacaccaccauagagaaggaaauaugccccaaacuaguagaauacagaaauuggucaaagccgcaauguaacauuacaggauuugcaccuuuuucuaaggacaauucgauucggcuuuccgcugguggggacaucugggugacaagagaaccuuaugugucaugcgauccugacaaguguuaucaauuugcccuugggcagggaacaacacuaaacaacgggcauucaaaugacacaguacaugauaggaccccuuaccggacccuauugaugaaugaauuggguguuccauuucauuugggaaccaggcaagugugcauagcaugguccagcucaaguugucacgauggaaaagcauggcugcauguuuguguaacuggggaugauaaaaaugcaacugcuagcuucauuuacaaugggaggcuuguagauaguauugguucaugguccaaaaaaauacucagaacccaggagucggaaugcguuuguaucaauggaacuuguacaguaguaaugacugaugggagcgcuucaggaaaagcugauacuaaaauacuauucauugaggaggggaaaaucguucauauuagcacauugucaggaagugcucagcaugucgaggagugcuccuguuauccucgauauccuggugucagaugugucugcagagacaacuggaaaggcuccaauaggcccauuguagauauaaauguaaaggauuauagcauuguuuccaguuauguaugcucaggacuuguuggagacacacccagaaaaaacgacagcuucagcaguagccauugccuagauccuaacaaugaggaagguggucauggagugaaaggcugggccuuugaugauggaaaugacguguggaugggaagaacgaucagcgagaaguuacgcucagguuaugaaaccuucaaagucaucgaaggcugguccaaaccuaacuccaaauuacagauaaauaggcaaguuauaguugaaagagguaacagguccgguuauucugguauuuucuccguugaaggcaaaagcugcaucaaucggugcuuuuauguggaguugauaaggggaaggaaagaggaaacugaagucugguggaccucaaacaguauuguuguguuuuguggcaccucagguacauauggaacaggcucauggccugauggggcggauaucaaucucaugccuauauaa

SEQ ID NO: 46662 - RNA, 1410 nt, Artificial Sequence; identical to SEQ ID NO: 46603
  derived and/or modified CDS sequence (wt) from neuraminidase__InfluenzaA__ABC43020

SEQ ID NO: 46663 - RNA, 1410 nt, Artificial Sequence
  derived and/or modified CDS sequence (wt) from neuraminidase__InfluenzaA__ABC43042
augaauccaaaucaaaagauaauaacaauuggcucuguuucucucaccauugccacaauaugcuuccuuaugcaaauugccauccugguaacuacuguaacauugcauuucaagcagcaugaaugcaacucccccccaaacaaccaaguaaugcugugugaaccaacaauaauagaaagaaacauaacagagauaguguaucugaccaacaccaccauagagaaggaaauaugccccaaacuaguagaauacagaaauuggucaaagccgcaauguaacauuacaggauuugcaccuuuuucuaaggacaauucgauucggcuuuccgcugguggggacaucugggugacaagagaaccuuaugugucaugcgauccugacaaguguuaucaauuugcccuugggcagggaacaacacuaaacaacgggcauucaaaugacacaguacaugauaggaccccuuaccggacccuauugaugaaugaauuggguguuccauuucauuugggaaccaggcaagugugcauagcaugguccagcucaaguugucacgauggaaaagcauggcugcauguuuguguaacuggggaugauaaaaaugcaacugcuagcuucauuuacaaugggaggcuuguagauaguauugguucaugguccaaaaaaauacucagaacccaggagucggaaugcguuuguaucaauggaacuuguacaguaguaaugacugaugggagcgcuucaggaaaagcugauacuaaaauacuauucauugaggaggggaaaaucguucauauuagcacauugucaggaagugcucagcaugucgaggagugcuccuguuauccucgauauccuggugucagaugugucugcagagacaacuggaaaggcuccaauaggcccauuguagauauaaauguaaaggauuauagcauuguuuccaguuaugugugcucaggacuuguuggagacacacccagaaaaaacgacagcuucagcaguagccauugccuagauccuaacaaugaggaagguggucauggagugaaaggcugggccuuugaugauggaaaugacguguggaugggaagaacgaucagcgagaaguuacgcucagguuaugaaaccuucaaagucaucgaaggcugguccaaaccuaacuccaaauuacagauaaauaggcaaguuauaguugaaagagguaacagguccgguuauucugguauuuucuccguugaaggcaaaagcugcaucaaucggugcuuuuauguggaguugauaaggggaaggaaagaggaaacugaagucugguggaccucaaacaguauuguuguguuuuguggcaccucagguacauauggaacaggcucauggccugauggggcggauaucaaucucaugucuauauaa

SEQ ID NO: 46664 - RNA, 1410 nt, Artificial Sequence
  derived and/or modified CDS sequence (wt) from neuraminidase__InfluenzaA__ABC43053
augaauccaaaucaaaagauaauaacaauuggcucuguuucucucaccauugccacaauaugcuuccucaugcaaauugccauccugguaacuacuguaacauugcauuucaagcagcaugaaugcaacucccccccaaacaaccaaguaaugcugugugaaccaacaauaauagaaagaaacauaacagagauaguguaucugaccaacaccaccauagagaaggaaauaugccccaaacuaguagaauacagaaauuggucaaagccgcaauguaacauuacaggauuugcaccuuuuucuaaggacaauucgauucggcuuuccgcugguggggacaucugggugacaagagaaccuuaugugucaugcgauccugacaaguguuaucaauuugcccuugggcagggaacaacacuaaacaacgggcauucaaaugacacaguacaugauaggaccccuuaccggacccuauugaugaaugaauuggguguuccauuucauuugggaaccaggcaagugugcauagcaugguccagcucaaguugucacgauggaaaagcauggcugcauguuuguguaacuggggaugauaaaaaugcaacugcuagcuucauuuacaaugggaggcuuguagauaguauugguucaugguccaaaaaaauacucagaacccaggagucggaaugcguuuguaucaauggaacuuguacaguaguaaugacugaugggagcgcuucaggaaaagcugauacuaaaauacuauucauugaggaggggaaaaucguucauauuagcacauugucaggaagugcucagcaugucgaggagugcuccuguuauccucgauauccuggugucagaugugucugcagagacaacuggaaaggcuccaauaggcccauuguagauauaaauguaaaggauuauagcauuguuuccaguuaugugugcucaggacuuguuggagacacacccagaaaaaacgacagcuucagcaguagccauugccuagauccuaacaaugaggaagguggucauggagugaaaggcugggccuuugaugauggaaaugacguguggaugggaagaacgaucagcgagaaguuacgcucagguuaugaaaccuucaaagucaucgaaggcugguccaaaccuaacuccaaauuacagauaaauaggcaaguuauaguugaaagagguaacagguccgguuauucugguauuuucuccguugaaggcaaaagcugcaucaaucggugcuuuuauguggaguugauaaggggaaggaaagaggaaacugaagucugguggaccucaaacaguauuguuguguuuuguggcaccucagguacauauggaacaggcucauggccugauggggcggauaucaaucucaugccuauauaa

SEQ ID NO: 46665 - RNA, 1410 nt, Artificial Sequence
  derived and/or modified CDS sequence (wt) from neuraminidase__InfluenzaA__ABC43064
augaauccaaaucaaaagauaauaacaauuggcucuguuucucucaccauugccacaauaugcuuccuuaugcaaauugccauccugguaacuacuguaacauugcauuucaagcagcaugaaugcaacucccccccaaacaaccaaguaaugcugugugaaccaacaauaauagaaagaaacauaacagagauaguguaucugaccaacaccaccauagagaaggaaauaugccccaaacuaguagaauacagaaauuggucaaagccgcaauguaacauuacaggauuugcaccuuuuucuaaggacaauucgauucggcuuuccgcugguggggacaucugggugacaagagaaccuuaugugucaugcgauccugacaaguguuaucaauuugcccuugggcagggaacaacacuaaacaacgggcauucaaaugacacaguacaugauaggaccccuuaccggacccuauugaugaaugaauuggguguuccauuucauuugggaaccaggcaagugugcauagcaugguccagcucaaguugucacgauggaaaagcauggcugcauguuuguguaacuggggaugauaaaaaugcaacugcuagcuucauuuacaaugggaggcuuguagauaguauugguucaugguccaaaaaaauacucagaacccaggagucggaaugcguuuguaucaauggaacuuguacaguaguaaugacugaugggagcgcuucaggaaaagcugauacuaaaauacuauucauugaggaggggaaaaucguucauauuagcacauugucaggaagugcucagcaugucgaggagugcuccuguuauccucgauauccuggugucagaugugucugcagagacaacuggaaaggcuccaauaggcccauuguagauauaaauguaaaggauuauagcauuguuuccaguuaugugugcucaggacuuguuggagacacacccagaaaaaacgacagcuucagcaguagccauugccuagauccuaacaaugaggaagguggucauggagugaaaggcugggccuuugaugauggaaaugacguguggaugggaagaacgaucagcgagaaguuacgcucagguuaugaaaccuucaaagucaucgaaggcugguccaaaccuaacuccaaauuacagauaaauaggcaaguuauaguugaaagagguaacagguccgguuauucugguauuuucuccguugaaggcaaaagcugcaucaaucggugcuuuuauguggaguugauaaggggaaggaaagagaaaacugaagucugguggaccucaaacaguauuguuguguuuuguggcaccucagguacauauggaacaggcucauggccugauggggcggauaucaaucucaugccuauauaa

SEQ ID NO: 46666 - RNA, 1410 nt, Artificial Sequence; identical to SEQ ID NO: 46603
  derived and/or modified CDS sequence (wt) from neuraminidase__InfluenzaA__ABC43075

SEQ ID NO: 46667 - RNA, 1410 nt, Artificial Sequence
  derived and/or modified CDS sequence (wt) from neuraminidase__InfluenzaA__ABC43086
augaauccaaaucaaaagauaauaacaauuggcucuguuucucucaucauugccacaauaugcuuccuuaugcaaauugccauccugguaacuacuguaacauugcauuucaagcagcaugaaugcaacucccccccaaacaaccaaguaaugcugugugaaccaacaauaauagaaagaaacauaacagagauaguguaucugaccaacaccaccauagagaaggaaauaugccccaaacuaguagaauacagaaauuggucaaagccgcaauguaacauuacaggauuugcaccuuuuucuaaggacaauucgauucggcuuuccgcugguggggacaucugggugacaagagaaccuuaugugucaugcgauccugacaaguguuaucaauuugcccuugggcagggaacaacacuaaacaacgggcauucaaaugacacaguacaugauaggaccccuuaccggacccuauugaugaaugaauuggguguuccauuucauuugggaaccaggcaagugugcauagcaugguccagcucaaguugucacgauggaaaagcauggcugcauguuuguguaacuggggaugauaaaaaugcaacugcuagcuucauuuacaaugggaggcuuguagauaguauugguucaugguccaaaaaaauacucagaacccaggagucggaaugcguuuguaucaauggaacuuguacaguaguaaugacugaugggagcgcuucaggaaaagcugauacuaaaauacuauucauugaggaggggaaaaucguucauauuagcacauugucaggaagugcucagcaugucgaggagugcuccuguuauccucgauauccuggugucagaugugucugcagagacaacuggaaaggcuccaauaggcccauuguagauauaaauguaaaggauuauagcauuguuuccaguuaugugugcucaggacuuguuggagacacacccagaaaaaacgacagcuucagcaguagccauugccuagauccuaacaaugaggaagguggucauggagugaaaggcugggccuuugaugauggaaaugacguguggaugggaagaacgaucagcgagaaguuacgcucagguuaugaaaccuucaaagucaucgaaggcugguccaaaccuaacuccaaauuacagauaaauaggcaaguuauaguugaaagagguaacagguccgguuauucugguauuuucuccguugaaggcaaaagcugcaucaaucggugcuuuuauguggaguugauaaggggaaggaaagaggaaacugaagucugguggaccucaaacaguauuguuguguuuuguggcaccucagguacauauggaacaggcucauggccugauggggcggauaucaaucucaugccuauauaa

SEQ ID NO: 46668 - RNA, 1410 nt, Artificial Sequence; identical to SEQ ID NO: 46603
  derived and/or modified CDS sequence (wt) from neuraminidase__InfluenzaA__ABC43097

SEQ ID NO: 46669 - RNA, 1410 nt, Artificial Sequence; identical to SEQ ID NO: 46603
  derived and/or modified CDS sequence (wt) from neuraminidase__InfluenzaA__ABC43108

SEQ ID NO: 46670 - RNA, 1410 nt, Artificial Sequence; identical to SEQ ID NO: 46661
  derived and/or modified CDS sequence (wt) from neuraminidase__InfluenzaA__ABC43119

SEQ ID NO: 46671 - RNA, 1410 nt, Artificial Sequence; identical to SEQ ID NO: 46378
  derived and/or modified CDS sequence (wt) from neuraminidase__InfluenzaA__ABC43130

SEQ ID NO: 46672 - RNA, 1410 nt, Artificial Sequence; identical to SEQ ID NO: 46378
  derived and/or modified CDS sequence (wt) from neuraminidase__InfluenzaA__ABC43141

SEQ ID NO: 46673 - RNA, 1410 nt, Artificial Sequence; identical to SEQ ID NO: 46378
  derived and/or modified CDS sequence (wt) from neuraminidase__InfluenzaA__ABC43152

SEQ ID NO: 46674 - RNA, 1410 nt, Artificial Sequence; identical to SEQ ID NO: 46378
  derived and/or modified CDS sequence (wt) from neuraminidase__InfluenzaA__ABC43163

SEQ ID NO: 46675 - RNA, 1410 nt, Artificial Sequence; identical to SEQ ID NO: 46378
  derived and/or modified CDS sequence (wt) from neuraminidase__InfluenzaA__ABC43174

SEQ ID NO: 46676 - RNA, 1410 nt, Artificial Sequence
  derived and/or modified CDS sequence (wt) from neuraminidase__InfluenzaA__ABC43185
augaauccaaaucaaaagauaauaacgauuggcucuguuucucucaccauuuccacaauaugcuucuuuaugcaaauugccaucuugauaacuacuguaacauugcauuucaagcaauaugaauucaacucccccccaaacaaccaagugaugcugugugaaccaacaauaauagaaagaaacauaacagagauaguguaucugaccaacaccaccauagagaaggaaauaugccccaaacuagcagaauacagaaauuggucaaagccgcaaugugacauuacaggauuugcaccuuuuucuaaggacaauucgauuaggcuuuccgcugguggggacaucugggugacaagagaaccuuaugugucaugcgauccugacaaauguuaucaauuugcccuuggacagggaacaacacuaaacaacgugcauucaaaugacacaguacaugauaggaccccuuaucggacccuauugaugaaugaguuagguguuccauuucaucuggggacuaagcaagugugcauagcaugguccagcucaaguugucacgauggaaaagcauggcugcauguuuguguaacgggggaugauaaaaaugcaacugcuagcuucauuuacaaugggaggcuuguagauaguauuguuucaugguccaaagaaauccucagaacccaggagucagaaugcguuuguaucaauggaacuuguacaguaguaaugacugaugggagugcuucaggaaaagcugauacuagaauacuauucauugaggaggggaaaaucguucauacuagcacauugucaggaagugcccagcaugucgaggagugcuccugcuauccucgauauccuggugucagaugugucugcagagacaacuggaaaggcuccaauaggcccaucguagauauaaacauaaaggauuauagcauuguuuccaguuaugugugcucaggacuuguuggagacacacccagaaaaaacgacagcuccagcaguagccauugcuuggauccuaacaaugaagaagguggucauggagugaaaggcugggccuuugaugauggaaaugacguguggaugggaagaacgaucagcgagaaguuacgcucaggauaugaaaccuucaaagucauugaaggcugguccaacccuaauuccaaauugcagauaaauaggcaagucauaguugacagagguaauagguccgguuauucugguauuuucucuguugaaggcaaaagcugcaucaaucggugcuuuuauguggaguugauaaggggaagaaaagaggaaacugaagucuuguggaccucaaacaguauuguuguguuuuguggcaccucagguacauauggaacaggcucauggccugauggggcggacaucaaucucaugccuauauaa

SEQ ID NO: 46677 - RNA, 1410 nt, Artificial Sequence; identical to SEQ ID NO: 46378
  derived and/or modified CDS sequence (wt) from neuraminidase__InfluenzaA__ABC43478

SEQ ID NO: 46678 - RNA, 1410 nt, Artificial Sequence; identical to SEQ ID NO: 46378
  derived and/or modified CDS sequence (wt) from neuraminidase__InfluenzaA__ABC43489

SEQ ID NO: 46679 - RNA, 1410 nt, Artificial Sequence
  derived and/or modified CDS sequence (wt) from neuraminidase__InfluenzaA__ABC43500
augaauccaaaucaaaagauaauaacgauuggcucuguuucucucaccauuuccacaauaugcuucuuuaugcaaauugccaucuugauaacuacuguaacauugcauuucaagcaauaugaauucaacucccccccaaacaaccaagugaugcugugugaaccaacaauaauagaaagaaacauaacagagauaguguaucugaccaacaccaccauagagaaggaaauaugccccaaacuagcagaauacagaaauuggucaaagccgcaaugugacauuacaggauuugcaccuuuuucuaaggacaauucgauuaggcuuuccgcugguggggacaucugggugacaagagaaccuuaugugucaugcgauccugacaaauguuaucaauuugcccuuggacagggaacaacacuaaacaacgugcauucaaaugacacaguacaugauaggaccccuuaucggacccuauugaugaaugaguuagguguuccauuucaucuggggacuaagcaagugugcauagcaugguccagcucaaguugucacgauggaaaagcauggcugcauguuuguguaacgggggaugauaaaaaugcaacugcuagcuucauuuacaaugggaggcuuguagauaguauuguuucaugguccaaagaaauccucagaacccaggagucagaaugcguuuguaucaauggaacuuguacaguaguaaugacugaugggagugcuucaggaaaagcugauacuaaaauacuauucauugaggaggggaaaaucguucauacuagcacauugucaggaagugcccagcaugucgaggagugcuccugcuauccucgauauccuggugucagaugugucugcagagacaacuggaaaggcuccaauaggcccaucguagauauaaacauaaaggauuauagcauuguuuccaguuaugugugcucaggacuuguuggagacacaccuagaaaaaacgacagcuccagcaguagccauugcuuggauccuaacaaugaagaagguggucauggagugaaaggcugggccuuugaugauggaaaugacguguggaugggaagaacgaucagcgagaaguuacgcucaggauaugaaaccuucaaagucauugaaggcugguccaacccuaauuccaaauugcagauaaauaggcaagucauaguugacagagguaauagguccgguuauucugguauuuucucuguugaaggcaaaagcugcaucaaucggugcuuuuauguggaguugauaaggggaagaaaagaggaaacugaagucuuguggaccucaaacaguauuguuguguuuuguggcaccucagguacauauggaacaggcucauggccugauggggcggacaucaaucucaugccuauauaa

SEQ ID NO: 46680 - RNA, 1410 nt, Artificial Sequence
  derived and/or modified CDS sequence (wt) from neuraminidase__InfluenzaA__ABC43511
augaauccaaaucaaaagauaauaacgauuggcucuguuucucucaccauuuccacaauaugcuucuuuaugcaaauugccaucuugauaacuacuguaacauugcauuucaagcaauaugaauucaacucccccccaaacaaccaagugaugcugugugaaacaacaauaauagaaagaaacauaacagagauaguguaucugaccaacaccaccauagagaaggaaauaugccccaaacuagcagaauacagaaauuggucaaagccgcaaugugacauuacaggauuugcaccuuuuucuaaggacaauucgauuaggcuuuccgcugguggggacaucugggugacaagagaaccuuaugugucaugcgauccugacaaauguuaucaauuugcccuuggacagggaacaacacuaaacaacgugcauucaaaugacacaguacaugauaggaccccuuaucggacccuauugaugaaugaguuagguguuccauuucaucuggggacuaagcaagugugcauagcaugguccagcucaaguugucacgauggaaaagcauggcugcauguuuguguaacgggggaugauaaaaaugcaacugcuagcuucauuuacaaugggaggcuuguagauaguauuguuucaugguccaaagaaauccucagaacccaggagucagaaugcguuuguaucaauggaacuuguacaguaguaaugacugaugggagugcuucaggaaaagcugauacuaaaauacuauucauugaggaggggaaaaucguucauacuagcacauugucaggaagugcccagcaugucgaggagugcuccugcuauccucgauauccuggugucagaugugucugcagagacaacuggaaaggcuccaauaggcccaucguagauauaaacauaaaggauuauagcauuguuuccaguuaugugugcucaggacuuguuggagacacacccagaaaaaacgacagcuccagcaguagccauugcuuggauccuaacaaugaagaagguggucauggagugaaaggcugggccuuugaugauggaaaugacguguggaugggaagaacgaucagcgagaaguuacgcucaggauaugaaaccuucaaagucauugaaggcugguccaacccuaauuccaaauugcagauaaauaggcaagucauaguugacagagguaauagguccgguuauucugguauuuucucuguugaaggcaaaagcugcaucaaucggugcuuuuauguggaguugauaaggggaagaaaagaggaaacugaagucuuguggaccucaaacaguauuguuguguuuuguggcaccucagguacauauggaacaggcucauggccugauggggcggacaucaaucucaugccuauauaa

SEQ ID NO: 46681 - RNA, 1410 nt, Artificial Sequence
  derived and/or modified CDS sequence (wt) from neuraminidase__InfluenzaA__ABC43522
augaauccaaaucaaaagauaauaacgauuggcucuguuucucucaccauuuccacaauaugcuucuuuaugcaaauugccaucuugauaacuacuguaacauugcauuucaagcaauaugaauucaacucccccccaaacaaccaagugaugcugugugaaccaacaauaauagaaagaaacauaacagagauaguguaucugaccaacaccaccauagagaaggaaauaugccccaaacuagcagaauacagaaauuggucaaagccgcaaugugacauuacaggauuugcaccuuuuucuaaggacaauucgauuaggcuuuccgcugguggggacaucugggugacaagagaaccuuaugugucaugcgauccugacaaauguuaucaauuugcccuuggacagggaacaacacuaaacaacgugcauucaaaugacacaguacaugauaggaccccuuaucggacccuauugaugaaugaguuagguguuccauuucaucuggggacuaagcaagugugcauagcaugguccagcucaaguugucacgauggaaaagcauggcugcauguuuguguaacgggggaugauaaaaaugcaacugcuagcuucauuuacaaugggaggcuuguagauaguauuguuucaugguccaaagaaauccucagaacccaggagucagaaugcguuuguaucaauggaacuuguacaguaguaaugacugaugggagugcuucaggaaaagcugauacuaaaauacuauucauugaggaggggaaaaucguucauacuagcacauugucaggaagugcccagcaugucgaggagugcuccugcuauccucgauauccuggugucagaugugucugcagagacaacuggaaaggcuccaauaggcccaucguagauauaaacauaaaggauuauagcauuguuuccaguuaugugugcucaggacuuguuggagacacacccagaaaaaacgacagcuccagcaguagccauugcuuggauccuaacaaugaagaagguggucauggagugaaaggcugggccuuugaugauggaaaugacguguggaugggaagaacgaucagcgagaaguuacgcucaggauaugaaaccuucaaagucauugagggcugguccaacccuaauuccaaauugcagauaaauaggcaagucauaguugacagagguaauagguccgguuauucugguauuuucucuguugaaggcaaaagcugcaucaaucggugcuuuuauguggaguugauaaggggaagaaaagaggaaacugaagucuuguggaccucaaacaguauuguuguguuuuguggcaccucagguacauauggaacaggcucauggccugauggggcggacaucaaucucaugccuauauaa

SEQ ID NO: 46682 - RNA, 1410 nt, Artificial Sequence; identical to SEQ ID NO: 46378
  derived and/or modified CDS sequence (wt) from neuraminidase__InfluenzaA__ABC43533

SEQ ID NO: 46683 - RNA, 1410 nt, Artificial Sequence; identical to SEQ ID NO: 46378
  derived and/or modified CDS sequence (wt) from neuraminidase__InfluenzaA__ABC43544

SEQ ID NO: 46684 - RNA, 1410 nt, Artificial Sequence; identical to SEQ ID NO: 46418
  derived and/or modified CDS sequence (wt) from neuraminidase__InfluenzaA__ABC43555

SEQ ID NO: 46685 - RNA, 1410 nt, Artificial Sequence
  derived and/or modified CDS sequence (wt) from neuraminidase__InfluenzaA__ABC46557
augaauccaaaucaaaagauaauaacaauuggcucugucucucucaccauugcaacaauaugcuuccucaugcaaauugccauccugguaacuacuguaacauugcauuucaagcaauaugagugcgacucccccgcaaacaaccaaguaaugccgugugaaccaauaauaauagaaaggaacauaacagagauaguguauuugacuaacaccaccauagagaaagagacaugccccaaauuaguggaauacagaaauuggucaaagccgcaauguaaaauuacaggauuugcaccuuuuucuaaggacaauucaauucggcuuucugcugguggggacauuugggugacgagagaaccuuaugugucaugcgauccuggcaaguguuaucaauuugcacucgggcaggggaccacacuagacaacaagcauucaaaugacacaauacaugauagaaccccuuaucgaacccuauugaugaaugaguuggguguuccauuucauuugggaaccaggcaaguguguauagcaugguccagcucaaguugucacgauggaaaagcauggcugcauguuugugucacuggauaugauaaaaaugcaacugccagcuucauuuacgaugggaggcuuguagacaguauugguucauggucuaaaaauauccucaggacccaggagucggaaugcguuuguaucaaugggacuuguacaguaguaaugacugauggaagugcuucagaaagagcugauacuaaaauacuauucauugaagaggggaaaauuguucauauuagcccauugucaggaagugcucagcauguagaggaguguuccuguuauccucgauauccuggugucagaugugucugcagagacaacuggaaaggcucuaauaggcccgucguagauauaaaugugaaagauuauagcauugcuuccaguuaugugugcucagggcuuguuggcgacacacccagaaaaaacgacagaucuagcaguagcuauugccggaauccuaacaaugagaaagggaaucauggagugaaaggcugggccuuugacgauggaaaugacguguggaugggaagaacgaucagcgaggagucacgcucagguuaugaaaccuucaaagucauuggugguugguccacaccuaauuccaaauugcagauaaauaggcaagucauaguugacagcgauaauagguccgguuauucugguauuuucucuguugagggcaaaagcugcaucaauaggugcuuuuauguggaguugauaaggggaagggaacaggaaacuagagucugguggaccucaaacaguauuguuguguuuuguggcacuucagguaccuaugggacaggcucauggccugauggagcggacaucaaucucaugccuauauaa

SEQ ID NO: 46686 - RNA, 1410 nt, Artificial Sequence
  derived and/or modified CDS sequence (wt) from neuraminidase__InfluenzaA__ABC46579
augaauccaaaucaaaagauaauaacaauuggcucugucucucucaccauugcaacaauaugcuuccuuaugcaaauugccauccugguaacuacuguaacauugcauuucaagcaauaugagugcagcucccccccaaacaaccaaguaaugccgugugaaccaauaauaauagaaagaaacauaacagagauaguguauuugacuaacaccaccauagagaaagagauaugccccaaacuaguggaauacagaaauuggucaaagccgcaauguaaaauuacaggauuugcacccuuuucuaaggacaauucaauucggcuuucugcugguggggacauuugggugacgagagaaccuuaugugucaugcgauccuggcaaguguuaucaauuugcacucgggcaggggaccacacuagacaacaagcauucaaaugacacaauacaugauaggaccccuuaucgaacccuauugaugaaugaguuggguguuccauuucauuugggaaccaggcaaguguguauagcaugguccagcucaaguugucacgauggaaaagcauggcugcauguuugugucacugggcaugauaaaaaugcaacugcuagcuucauuuacgaugggaggcuuguagacaguauugguucaugguccaaaaauauccucaggacccaggagucggaaugcguuuguaucaaugggacuuguacaguaguaaugacugauggaagugcuucagaaagagcugauacuaaaauacuauucauugaagaggggaaaauuguucacauuagcccauugucaggaagugcucagcauguagaggaguguuccuguuauccucgauauccuggugucagaugugucugcagagacaacuggaaaggcuccaauaggcccgucguagauauaaaugugaaagauuauagcauuguuuccaguuaugugugcucagggcuuguuggcgacacacccagaaaaaacgacagaucuagcaguagcuauugccggaauccuaacaaugagaaagggaaucauggagugaaaggcugggccuuugacgauggaaaugacguguggaugggaagaacgaucagugaggagucacgcucagguuaugaaaccuucaaagucauuggugguugguccacaccuaauuccaaauugcagauaaauaggcaagucauaguugacagcgauaauagguccgguuauucugguauuuucucuguugagggcaaaagcugcaucaauaggugcuuuuauguggaguugauaaggggaagggaacaggaaacuagagucugguggaccucaaacaguauuguuguguuuuguggcacuucagguaccuauggaacaggcucauggccugauggagcggacaucaaucucaugccuauauaa

SEQ ID NO: 46687 - RNA, 1410 nt, Artificial Sequence; identical to SEQ ID NO: 46526
  derived and/or modified CDS sequence (wt) from neuraminidase__InfluenzaA__ABC50170

SEQ ID NO: 46688 - RNA, 1410 nt, Artificial Sequence; identical to SEQ ID NO: 46526
  derived and/or modified CDS sequence (wt) from neuraminidase__InfluenzaA__ABC50181

SEQ ID NO: 46689 - RNA, 1410 nt, Artificial Sequence; identical to SEQ ID NO: 46526
  derived and/or modified CDS sequence (wt) from neuraminidase__InfluenzaA__ABC50192

SEQ ID NO: 46690 - RNA, 1410 nt, Artificial Sequence; identical to SEQ ID NO: 46178
  derived and/or modified CDS sequence (wt) from neuraminidase__InfluenzaA__ABC50203

SEQ ID NO: 46691 - RNA, 1410 nt, Artificial Sequence
  derived and/or modified CDS sequence (wt) from neuraminidase__InfluenzaA__ABC50214
augaauccaaaucaaaagauaauaacaauuggcucuguuucucucaccauugccacaauaugcuuccuuaugcaaauugccauccugguaacuacuguaacauugcauuucaagcaguaugaaugcaacucccccccaaacaaccaaguaaugcugugugaaccaacaauaauagaaagaaacauaacagagauaguguaucugaccaacaccaccauagagaaggaaauaugccccaaauuagcagaauacagaaauuggucaaagccgcaauguaacauuacaggauuugcaccuuuuucuaaggacaauucgauucggcuuuccgcugguggggacaucugggugacaagagaaccuuaugugucaugcgauccugacaaguguuaucaauuugcccuugggcagggaacaacacuaaacaacgggcauucaaaugacacaguacaugauaggaccccuuaccggacccuauugaugaaugaauuggguguuccauuucauuugggaaccaggcaagugugcauagcaugguccagcucaaguugucacgauggaaaagcauggcugcauguuuguguaacuggggaugaugaaaaugcaacugcuagcuucauuuacaaugggaggcuuguagauaguauugguucaugguccaaaaaaauacucagaacccaggagucggaaugcguuuguaucaauggaacuuguacaguaguaaugacugaugggagcgcuucaggaaaagcugauacuaaaauacuauucauugaggaggggaaaaucguucauauuagcacauugucaggaagugcucagcaugucgaggagugcuccuguuauccucgauauccuggugucagaugugucugcagagacaacuggaaaggcuccaauaggcccaucauagauauaaauguaaaggauuauagcauuguuuccaguuaugugugcucaggacuuguuggagacacacccagaaaaaacgacagcuucagcaguagccauugccuagauccuaacaaugaggaagguggucauggagugaaaggcugggccuuugaugauggaaaugacguguggaugggaagaacgaucagcgagaaguuacgcucagguuaugaaaccuucaaagucaucgaaggcugguccaaaccuaaccccaaauuacagacaaauaggcaagucauaguugaaagagguaacagguccgguuauucugguauuuucuccguugaaggcaaaagcugcaucaaucggugcuuuuauguggaguugauaaggggaaggaaagaggaaacugaagucugguggaccucaaacaguauuguuguguuuuguggcaccucagguacauauggaacaggcucauggccugauggggcggauaucaaucucaugccuauauaa

SEQ ID NO: 46692 - RNA, 1410 nt, Artificial Sequence; identical to SEQ ID NO: 46178
  derived and/or modified CDS sequence (wt) from neuraminidase__InfluenzaA__ABC50225

SEQ ID NO: 46693 - RNA, 1410 nt, Artificial Sequence; identical to SEQ ID NO: 46178
  derived and/or modified CDS sequence (wt) from neuraminidase__InfluenzaA__ABC50247

SEQ ID NO: 46694 - RNA, 1410 nt, Artificial Sequence
  derived and/or modified CDS sequence (wt) from neuraminidase__InfluenzaA__ABC50258
augaauccaaaucaaaagauaauaacaauuggcucuguuucucucaccauugccacaauaugcuuccuuaugcaaauugccauccugguaacuacuguaacauugcauuucaagcaguaugaaugcaacucccccccaaacaaccaaguaaugcugugugaaccaacaauaauagaaagaaacauaacagagauaguguaucugaccaacaccaccauagagaaggaaauaugccccaaauuagcagaauacagaaauuggucaaagccgcaauguaacauuacaggauuugcaccuuuuucuaaggacaauucgauucggcuuuccgcugguggggacaucugggugacaagagaaccuuaugugucaugcgauccugacaaguguuaucaauuugcccuugggcagggaacaacacuaaacaacgggcauucaaaugacacaguacaugauaggaccccuuaccggacccuauugaugaaugaauuggguguuccauuucauuugggaaccaggcaagugugcauagcaugguccagcucaaguugucacgauggaaaagcauggcugcauguuuguguaacuggggaugaugaaaaugcaacugcuagcuucauuuacaaugggaggcuuguagauaguauugguucaugguccaaaaaaauacucagaacccaggagucggaaugcguuuguaucaauggaacuuguacaguaguaaugacugaugggagcgcuucaggaaaagcugauacuaaaauacuauucauugaggaggggaaaaucguucauauuagcacauugucaggaagugcucagcaugucgaggagugcuccuguuauccucgauacccuggugucagaugugucugcagagacaacuggaaaggcuccaauaggcccaucauagauauaaauguaaaggauuauagcauuguuuccaguuaugugugcucaggacuuguuggagacacacccagaaaaaacgacagcuucagcaguagccauugccuagauccuaacaaugaggaagguggucauggagugaaaggcugggccuuugaugauggaaaugacguguggaugggaagaacgaucagcgagaaguuacgcucagguuaugaaaccuucaaagucaucgaaggcugguccaaaccuaacuccaaauuacagacaaauaggcaagucauaguugaaagagguaacagguccgguuauucugguauuuucuccauugaaggcaaaagcugcaucaaucggugcuuuuauguggaguugauaaggggaaggaaagaggaaacugaagucugguggaccucaaacaguauuguuguguuuuguggcaccucagguacauauggaacaggcucauggccugauggggcggauaucaaucucaugccuauauaa

SEQ ID NO: 46695 - RNA, 1410 nt, Artificial Sequence; identical to SEQ ID NO: 46178
  derived and/or modified CDS sequence (wt) from neuraminidase__InfluenzaA__ABC50280

SEQ ID NO: 46696 - RNA, 1410 nt, Artificial Sequence
  derived and/or modified CDS sequence (wt) from neuraminidase__InfluenzaA__ABC50291
augaauccaaaucaaaagauaauaacaauuggcucuguuucucucaccauugccacaauaugcuuccuuaugcaaauugccauccugguaacuacuguaacauugcauuucaagcaguaugaaugcaacucccccccaaacaaccaaguaaugcugugugaaccaacaauaauagaaagaaacauaacagagauaguguaucugaccaacaccaccauagagaaggaaauaugccccaaauuagcagaauacagaaauuggucaaagccgcaauguaacauuacaggauuugcaccuuuuucuaaggacaauucgauucggcuuuccgcugguggggacaucugggugacaagagaaccuuaugugucaugcgauccugacaaguguuaucaauuugcccuugggcagggaacaacacuaaacaacgggcauucaaaugacacaguacaugauaggaccccuuaccggacccuauugaugaaugaauuggguguuccauuucauuugggaaccaggcaagugugcauagcaugguccagcucaaguugucacgauggaaaagcauggcugcauguuuguguaacuggggaugaugaaaaugcaacugcuagcuucauuuacaaugggaggcuuguagauaguauugguucaugguccaaaaaaauacucagaacccaggagucggaaugcguuuguaucaauggaacuuguacaguaguaaugacugaugggagcgcuucaggaaaagcugauacuaaaauacuauucauugaggaggggaaaaucguucauauuagcacauugucaggaagugcucagcacgucgaggagugcuccuguuauccucgauauccuggugucagaugugucugcagagacaacuggaaaggcuccaauaggcccaucguagauauaaauguaaaggauuauagcauuguuuccaguuaugugugcucaggacuuguuggagacacacccagaaaaaacgacagcuucagcaguagccauugccuagauccuaacaaugaggaagguggucauggagugaaaggcugggccuuugaugauggaaaugacguguggaugggaagaacgaucagcgagaaguuacgcucagguuaugaaaccuucaaagucaucgaaggcugguccaaaccuaacuccaaauuacagacaaauaggcaagucauaguugaaagagguaacaggucugguuauucugguauuuucuccguugaaggcaaaagcugcaucaaucggugcuuuuauguggaguugauaaggggaaggaaagaggaaacugaagucugguggaccucaaacaguauuguuguguuuuguggcaccucagguacauauggaacaggcucauggccugauggggcggauaucaaucucaugccuauauaa

SEQ ID NO: 46697 - RNA, 1410 nt, Artificial Sequence
  derived and/or modified CDS sequence (wt) from neuraminidase__InfluenzaA__ABC50302
augaauccaaaucaaaagauaauaacaauuggcucuguuucucucaccauugccacaauaugcuuccuuaugcaaauugccauccugauaacuacuguaacauugcauuucaagcaguaugaaugcaacucccccccaaacaaccaaguaaugcugugugaaccaacaauaauagaaagaaacauaacagagauaguguaucugaccaacaccaccauagagaaggaaauaugccccaaauuagcagaauacagaaauuggucaaagccgcaauguaacauuacaggauuugcaccuuuuucuaaggacaauucgauucggcuuuccgcugguggggacaucugggugacaagagaaccuuaugugucaugcgauccugacaaguguuaucaauuugcccuugggcagggaacaacacuaaacaacgggcauucaaaugacacaguacaugauaggaccccuuaccggacccuauugaugaaugaauuggguguuccauuucauuugggaaccaggcaagugugcauagcaugguccagcucaaguugucacgauggaaaagcauggcugcauguuuguguaacuggggaugaugaaaaugcaacugcuagcuucauuuacaaugggaggcuuguagauaguauugguucaugguccaaaaaaauacucagaacccaggagucggaaugcguuuguaucaauggaacuuguacaguaguaaugacugaugggagcgcuucaggaaaagcugauacuaaaauacuauucauugaggaggggaaaaucguucauauuagcacauugucaggaagugcucagcaugucgaggagugcuccuguuauccucgauauccuggugucagaugugucugcagagacaacuggaaaggcuccaauaggcccaucguagauauaaauguaaaggauuauagcauuguuuccaguuaugugugcucaggacuuguuggagacacacccagaaaaaacgacagcuucagcaguagccauugccuagauccuaacaaugaggaagguggucauggagugaaaggcugggccuuugaugauggaaaugacguguggaugggaagaacgaucagcgagaaguuacgcucagguuaugaaaccuucaaagucaucgaaggcugguccaaaccuaacuccaaauuacagacaaauaggcaagucauaguugaaagagguaacagguccgguuauucugguauuuucuccguugaaggcaaaagcugcaucaaucggugcuuuuauguggaguugauaaggggaaggaaagaggaaacugaagucugguggaccucaaacaguauuguuguguuuuguggcaccucagguacauauggaacaggcucauggccugauggggcggauaucaaucucaugccuauauaa

SEQ ID NO: 46698 - RNA, 1410 nt, Artificial Sequence
  derived and/or modified CDS sequence (wt) from neuraminidase__InfluenzaA__ABC50313
augaauccaaaucaaaagauaauaacaauuggcucuguuucucucaccauugccacaauaugcuuccuuaugcaaauugccauccugguaacuacuguaacauugcauuucaagcagcaugaaugcaacucccccccaaacaaccaaguaaugcugugugaaccaacaauaauagaaagaaacauaacagagauaguguaucugaccaacaccaccauagagaaggaaauaugccccaaauuagcagaauacagaaauuggucaaagccgcaauguaacauuacaggauuugcaccuuuuucuaaggacaauucgauucggcuuuccgcugguggggacaucugggugacaagagaaccuuaugugucaugcgauccugacaaguguuaucaauuugcccuugggcagggaacaacacuaaacaacgggcauucaaaugacacaguacaugauaggaccccuuaccggacccuauugaugaaugaauuggguguuccauuucauuugggaaccaggcaagugugcauagcaugguccagcucaaguugucacgauggaaaagcauggcugcauguuuguguaacuggggaugaugaaaaugcaacugcuagcuucauuuacaaugggaggcuuguagauaguauugguucaugguccaaaaaaauacucagaacccaggagucggaaugcguuuguaucaauggaacuuguacaguaguaaugacugaugggagcgcuucaggaaaagcugauacuaaaauacuauucauugaggaggggaaaaucguucauauuagcacauugucaggaagugcucagcaugucgaggagugcuccuguuauccucgauauccuggugucagaugugucugcagagacaacuggaaaggcuccaauaggcccaucguagauauaaauguaaaggauuauagcauuguuuccaguuaugugugcucaggacuuguuggagacacacccagaaaaaacgacagcuucagcaguagccauugccuagauccuaacaaugaggaagguggucauggagugaaaggcugggccuuugaugauggaaaugacguguggaugggaagaacgaucagcgagaaguuacgcucagguuaugaaaccuucaaagucaucgaaggcugguccaaaccuaacuccaaauuacagacaaauaggcaagucauaguugaaagagguaacagguccgguuauucugguauuuucuccguugaaggcaaaagcugcaucaaucggugcuuuuauguggaguugauaaggggaaggaaagaggaaacugaagucugguggaccucaaacaguauuguuguguuuuguggcaccucagguacauauggaacaggcucauggccugauggggcggauaucaaucucaugccuauauaa

SEQ ID NO: 46699 - RNA, 1410 nt, Artificial Sequence; identical to SEQ ID NO: 46178
  derived and/or modified CDS sequence (wt) from neuraminidase__InfluenzaA__ABC50324

SEQ ID NO: 46700 - RNA, 1410 nt, Artificial Sequence
  derived and/or modified CDS sequence (wt) from neuraminidase__InfluenzaA__ABC50335
augaauccaaaucaaaagauaauaacaauuggcucuguuucucucaccauugccacaauaugcuuccuuaugcaaauugccauccugguaacuacuguaacauugcauuucaagcaguaugaaugcaacucccccccaaacaaccaaguaaugcugugugaaccaacaauaauagaaagaaacauaacagagauaguguaucugaccaauaccaccauagagaaggaaauaugccccaaauuagcagaauacagaaauuggucaaagccgcaauguaacauuacaggauuugcaccuuuuucuaaggacaauucgauucggcuuuccgcugguggggacaucugggugacaagagaaccuuaugugucaugcgauccugacaaguguuaucaauuugcccuugggcagggaacaacacuaaacaacgggcauucaaaugacacaguacaugauaggaccccuuaccggacccuauugaugaaugaauuggguguuccauuccauuugggaaccaggcaagugugcauagcaugguccagcucaaguugucaugauggaaaagcauggcugcauguuuguguaacuggggaugaugaaaaugcaacugcuagcuucauuuacaaugggaggcuuguagauaguauugguucaugguccaaaaaaauacucagaacccaggagucggaaugcguuuguaucaauggaacuuguacaguaguaaugacugaugggagcgcuucaggaaaagcugauacuaaaauacuauucauugaggaggggaaaaucguucauauuagcacauugucaggaagugcucagcaugucgaggagugcuccuguuauccucgauauccuggugucagaugugucugcagagacaacuggaaaggcuccaauaggcccaucguagauauaaauguaaaggauuauagcauuguuuccaguuaugugugcucaggacuuguuggagacacacccagaaaaaacgacagcuucagcaguagccauugccuagauccuaacaaugaggaagguggucauggagugaaaggcugggccuuugaugauggaaaugacguguggaugggaagaacgaucagcgagaaguuacgcucagguuaugaaaccuucaaagucaucgaaggcugguccaaaccuaacuccaaauuacagauaaauaggcaagucauaguugaaagagguaacagguccgguuauucugguauuuucuccguugaaggcaaaagcugcaucaaucggugcuuuuauguggaguugauaaggggaaggaaagaggaaacugaagucugguggaccucaaacaguauuguuguguuuuguggcaccucagguacauauggaacaggcucauggccugauggggcggauaucaaucucaugccuauauaa

SEQ ID NO: 46701 - RNA, 1410 nt, Artificial Sequence
  derived and/or modified CDS sequence (wt) from neuraminidase__InfluenzaA__ABC50346
augaauccaaaucaaaagauaauaacaauuggcucuguuucucucaccauugccacaauaugcuuccuuaugcaaauugccauccugguaacuacuguaacauugcauuucaagcaguaugaaugcaacucccccccaaacaaccaaguaaugcugugugaaccaacaauaauagaaagaaacauaacagagauaguguaucugaccaacaccaccauagagaaggaaauaugccccaaauuagcagaauacagaaauuggucaaagccgcaauguaacauuacaggauuugcaccuuuuucuaaggacaauucgauucggcuuuccgcugguggggacaucugggugacaagagaaccuuaugugucaugcgauccugacaaguguuaucaauuugcccuugggcagggaacaacacuaaacaacgggcauucaaaugacacaguacaugauaggaccccuuaccggacccuauugaugaaugaauuggguguuccauuucauuugggaaccaggcaagugugcauagcaugguccagcucaaguugucacgauggaaaagcauggcugcauguuuguguaacuggggaugaugaaaaugcaacugcuagcuucauuuacaaugggaggcuuguagauaguauugguucaugguccaaaaaaauacucagaacccaggagucggaaugcguuuguaucaauggaacuuguacaguaguaaugacugaugggagcgcuucaggaaaagcugauacuaaaauacuauucauugaggaggggaaaaucguucauauuagcacauugucaggaagugcucagcaugucgaggagugcuccuguuauccucgauauccuggugucagaugugucugcagagacaacuggaaaggcuccaauaggcccaucauagauauaaauguaaaggauuauagcauuguuuccaguuaugugugcucaggacuuguuggagacacacccagaaaaaacgacagcuucagcaguagccauugccuagauccuaacaaugaggaagguggucauggagugaaaggcugggccuuugaugauggaaaugacguguggaugggaagaacgaucagcgagaaguuacgcucagguuaugaaaccuucaaagucaucgaaggcugguccaaaccuaacuccaaauuacagacaaauaggcaagucauaguugaaagagguaacagguccgguuauucugguauuuucuccguugaaggcaaaagcugcaucaaucggugcuuuuauguggaguugauaaggggaaggaaagaggaaacugaagucugguggaccucaaacaguauuguuguguuuuguggcaccucagguacauauggaacaggcucauggccugauggggcggauaucaaucucaugccuauauaa

SEQ ID NO: 46702 - RNA, 1410 nt, Artificial Sequence; identical to SEQ ID NO: 46178
  derived and/or modified CDS sequence (wt) from neuraminidase__InfluenzaA__ABC50357

SEQ ID NO: 46703 - RNA, 1410 nt, Artificial Sequence
  derived and/or modified CDS sequence (wt) from neuraminidase__InfluenzaA__ABC50368
augaauccaaaucaaaagauaauaacaauuggcucuguuucucucaccauugccacaauaugcuuccuuaugcaaauugccauccugguaacuacuguaacauugcauuucaagcaguaugaaugcaacucccccccaaacaaccaaguaaugcugugugaaccaacaauaauagaaagaaacauaacagagauaguguaucugaccaacaccaccauagagaaggaaauaugccccaaauuggcagaauacagaaauuggucaaagccgcaauguaacauuacaggauuugcaccuuuuucuaaggacaauucgauucggcuuuccgcugguggggacaucugggugacaagagaaccuuaugugucaugcgauccugacaaguguuaucaauuugcccuugggcagggaacaacacuaaacaacgggcauucaaaugacacaguacaugauaggaccccuuaccggacccuauugaugaaugaauuggguguuccauuucauuugggaaccaggcaagugugcauagcaugguccagcucaaguugucacgauggaaaagcauggcugcauguuuguguaacuggggaugaugaaaaugcaacugcuagcuucauuuacaaugggaggcuuguagauaguauugguucaugguccaaaaaaauacucagaacccaggagucggaaugcguuuguaucaauggaacuuguacaguaguaaugacugaugggagcgcuucaggaaaagcugauacuaaaauacuauucauugaggaggggaaaaucguucauauuagcacauugucaggaagugcucagcaugucgaggagugcuccuguuauccucgauauccuggugucagaugugucugcagagacaacuggaaaggcuccaauaggcccaucguagauauaaauguaaaggauuauagcauuguuuccaguuaugugugcucaggacuuguuggagacacacccagaaaaaacgacagcuucagcaguagccauugccuagauccuaacaaugaggaagguggucauggagugaaaggcugggccuuugaugauggaaaugacguguggaugggaagaacgaucagcgagaaguuacgcucagguuaugaaaccuucaaagucaucgaaggcugguccaaaccuaacuccaaauuacagacaaauaggcaagucauaguugaaagagguaacagguccgguuauucugguauuuucuccguugaaggcaaaagcugcaucaaucggugcuuuuauguggaguugauaaggggaaggaaagaggaaacugaagucugguggaccucaaacaguauuguuguguuuuguggcaccucagguacauauggaacaggcucauggccugauggggcggauaucaaucucaugccuauauaa

SEQ ID NO: 46704 - RNA, 1410 nt, Artificial Sequence; identical to SEQ ID NO: 46178
  derived and/or modified CDS sequence (wt) from neuraminidase__InfluenzaA__ABC50379

SEQ ID NO: 46705 - RNA, 1410 nt, Artificial Sequence
  derived and/or modified CDS sequence (wt) from neuraminidase__InfluenzaA__ABC50390
augaauccaaaucaaaagauaauaacaauuggcucuguuucucucaccauugccacaauaugcuuccuuaugcaaauugccauccugguaacuacuguaacauugcauuucaagcaguaugaaugcaacucccccccaaacaaccaaguaaugcugugugaaccaacaauaauagaaagaaacauaacagagauaguguaucugaccaacaccaccauagagaaggaaauaugccccaaauuagcagaauacagaaauuggucaaagccgcaauguaacauuacaggauuugcaccuuuuucuaaggacaauucgauucggcuuuccgcugguggggacaucugggugacaagagaaccuuaugugucaugcgauccugacaaguguuaucaauuugcccuugggcagggaacaacacuaaacaacgggcauucaaaugacacaguacaugauaggaccccuuaccggacccuauugaugaaugaauuggguguuccauuucauuugggaaccaggcaagugugcauagcaugguccagcucaaguugucacgauggaaaagcauggcugcauguuuguguaacuggggaugaugaaaaugcaacugcuagcuucauuuacaaugggaggcuuguagauaguauugguucaugguccaaaaaaauacucagaacccaggagucggaaugcguuuguaucaauggaacuuguacaguaguaaugacugaugggagcgcuucaggaaaagcugauacuaaaauacuauucauugaggaggggaaaaucguucauauuagcacauugucaggaagugcucagcaugucgaggagugcuccuguuauccucgauauccuggugucagaugugucugcagagacaacuggaaagguuccaauaggcccaucguagauauaaauguaaaggauuauagcauuguuuccaguuaugugugcucaggacuuguuggagacacacccagaaaaaacgacagcuucagcaguagccauugccuagauccuaacaaugaggaagguggucauggagugaaaggcugggccuuugaugauggaaaugacguguggaugggaagaacgaucagcgagaaguuacgcucagguuaugaaaccuucaaagucaucgaaggcugguccaaaccuaacuccaaauuacagacaaauaggcaagucauaguugaaagagguaacagguccgguuauucugguauuuucuccguugaaggcaaaagcugcaucaaucggugcuuuuauguggaguugauaaggggaaggaaagaggaaacugaagucugguggaccucaaacaguauuguuguguuuuguggcaccucagguacauauggaacaggcucauggccugauggggcggauaucaaucucaugccuauauaa

SEQ ID NO: 46706 - RNA, 1410 nt, Artificial Sequence
  derived and/or modified CDS sequence (wt) from neuraminidase__InfluenzaA__ABC50412
augaauccaaaucaaaagauaauaacgauuggcucuguuucucucaccauuuccacaauaugcuucuuuaugcaaauugccaucuugauaacuacuguaacauugcauuucaagcaauaugaauucaacucccccccaaacaaccaagugaugcugugugaaccaacaauaauagaaagaaacauaacagagauaguguaucugaccaacaccaccauagagaaggaaauaugccccaaacuagcagaauacagaaauuggucaaagccgcaaugugacauuacaggauuugcaccuuuuucuaaggacaauucgauuaggcuuuccgcugguggggacaucugggugacaagagaaccuuaugugucaugcgauccugacaaauguuaucaauuugcccuuggacagggaacaacauuaaacaacgugcauucaaaugacacaguacaugauaggaccccuuaucggacccuauugaugaaugaguuagguguuccauuucaucuggggacuaagcaagugugcauagcaugguccagcucaaguugucacgauggaaaagcauggcugcauguuuguguaacgggggaugauaaaaaugcaacugcuagcuucauuuacaaugggaggcuuguagauaguauuguuucaugguccaaagaaauccucagaacccaggagucagaaugcguuuguaucaauggaacuuguacaguaguaaugacugaugggagugcuucaggaaaagcugauacuaaaauacuauucauugaggaggggaaaaucguucauacuagcacauugucaggaagugcccagcaugucgaggagugcuccugcuauccucgauauccuggugucagaugugucugcagagacaacuggaaaggcuccaauaggcccaucguagauauaaacauaaaggauuauagcauuguuuccaguuaugugugcucaggacuuguuggagacacacccagaaaaaacgacagcuccagcaguagccauugcuuggauccuaacaaugaagaagguggucauggagugaaaggcugggccuuugaugauggaaaugacguguggaugggaagaacgaucagcgagaaguuacgcuuaggauaugaaaccuucaaagucauugaaggcugguccaacccuaauuccaaauugcagauaaauaggcaagucauaguugacagagguaauagauccgguuauucugguauuuucucuguugaaggcaaaagcugcaucaaucggugcuuuuauguggaguugauaaggggaagaaaagaggaaacugaagucuuguggaccucaaacaguauuguuguguuuuguggcaccucagguacauauggaacaggcucguggccugauggggcggacaucaaucucaugccuauauaa

SEQ ID NO: 46707 - RNA, 1410 nt, Artificial Sequence; identical to SEQ ID NO: 46706
  derived and/or modified CDS sequence (wt) from neuraminidase__InfluenzaA__ABC50423

SEQ ID NO: 46708 - RNA, 1410 nt, Artificial Sequence; identical to SEQ ID NO: 46293
  derived and/or modified CDS sequence (wt) from neuraminidase__InfluenzaA__ABC54671

SEQ ID NO: 46709 - RNA, 1410 nt, Artificial Sequence; identical to SEQ ID NO: 46423
  derived and/or modified CDS sequence (wt) from neuraminidase__InfluenzaA__ABC54682

SEQ ID NO: 46710 - RNA, 1410 nt, Artificial Sequence; identical to SEQ ID NO: 46603
  derived and/or modified CDS sequence (wt) from neuraminidase__InfluenzaA__ABC67322

SEQ ID NO: 46711 - RNA, 1410 nt, Artificial Sequence; identical to SEQ ID NO: 46178
  derived and/or modified CDS sequence (wt) from neuraminidase__InfluenzaA__ABC67474

SEQ ID NO: 46712 - RNA, 1410 nt, Artificial Sequence; identical to SEQ ID NO: 46701
  derived and/or modified CDS sequence (wt) from neuraminidase__InfluenzaA__ABC67546

SEQ ID NO: 46713 - RNA, 1410 nt, Artificial Sequence
  derived and/or modified CDS sequence (wt) from neuraminidase__InfluenzaA__ABC67557
augaauccaaaucaaaagauaauaacgauuggcucugugucucucaccauuuccacaauaugcuucuucaugcaaauugccaucuugguaacuacuguaacauugcauuuuaagcaauaugaauucaacucccccccaaacaaccaagugaugcugugugaaccaacaauaauagaaagaaacauaacagagauaguguaucugaccaacaccaccauagagaaggaaauaugccccaaacuagcagaauacaggaauuggucaaagccgcaaugugacauuacaggauuugcaccuuuuucuaaggacaauucgauuaggcuuuccgcugguggggacaucugggugacaagagaaccuuaugugucaugcgauccugacaaauguuaucaauuugcccuuggacagggaacaacacuaaacaacgugcauucaaaugacacaguacaugauaggaccccuuaucggacccuauugaugaaugaguuagguguuccauuucaucuggggaccaagcaagugugcauagcaugguccagcucaaguugucacgauggaaaagcauggcugcauguuuguguaacgggggaugauaaaaacgcaacugcuagcuucauuuacaaugggaggcuuguagauaguauuguuucaugguccaaaaaaauccucaggacccaggagucagaaugcguuuguaucaauggaacuuguacaguaguaaugacugaugggagugcuucaggcaaagcugauacuaaaauacuauucauugaggaggggaaaauaguucauacuagcacauugucaggaagugcucagcaugucgaggagugcuccugcuauccucgauauccuggugucagaugugucugcagagacaacuggaaaggcuccaauaggcccaucguagauauaaacauaaaggauuauagcauuguuuccaguuaugugugcucaggacuuguuggagacacaccuagaaaaaacgacagcuccagcaguagccauugcuuggauccuaacaaugaagaagguggucauggagugaaaggcugggccuuugaugauggaaaugacguguggaugggaagaacgaucagcgagaaguuacgcucaggauaugaaaccuucaaagucauugaaggcugguccaacccuaauuccaaauugcagauaaauaggcaagucauaguugacagagguaauagguccgguuauucugguauuuucucuguugaaggcaaaagcugcaucaaucggugcuuuuauguggaguugauaaggggaagaaaagaggaaacugaagucuuguggaccucaaacaguauuguuguguuuuguggcaccucagguacauauggaacaggcucauggccugauggggcggacaucaaucucaugccuauauaa

SEQ ID NO: 46714 - RNA, 1410 nt, Artificial Sequence
  derived and/or modified CDS sequence (wt) from neuraminidase__InfluenzaA__ABC67568
augaauccaaaucaaaagauaauaacaauuggcucugucucucucaccauugcaacaauaugcuuccucaugcagauugccauccugguaacuacuguaacauugcauuucaagcaauaugagugcgacucccccgcgaacaaccaaguaaugccgugugaaccaauaauaauagaaaggaacauaacagagauaguguauuugacuaacaccaccauagagaaagagauaugccccaaauuaguggaauacaggaauuggucaaagccgcaauguaaaauuacaggauuugcaccuuuuucuaaggacaauucaauucggcuuucugcugguggggacauuugggugacgagagaaccuuaugugucaugcgauccuggcaaguguuaucaauuugcacucgggcaggggaccacacuagacaacaaacauucaaaugacacaauacaugauagaaccccucaucgaacccuauugaugaaugaguuggguguuccauuucauuugggaaccaggcaaguguguauagcaugguccagcucaaguugucacgauggaaaagcauggcugcauguuugugucacuggguaugauaaaaaugcaacugcuagcuucauuuacgaugggaggcuuguagacaguauugguucauggucucaaaauauccucaggacccaggagucggaaugcguuuguaucaaugggacuuguacaguaguaaugacugauggaagugcuucaggaagagcugauacuaaaauacuauucauugaagaggggaaaauuguucauauuagcccauugucaggaagugcucagcauguagaggaguguuccuguuauccucgauauccuggugucagauguaucugcagagacaacuggaaaggcucuaauaggcccgucguagauauaaaugugaaagauuauagcauugauuccaguuaugugugcucagggcuuguuggcgacacacccagaaacaacgacagaucuagcaauagcuauugccggaauccuaacaaugagaaagggaaucacggagugaaaggcugggccuuugacgauggaaaugacguguggaugggaagaacgaucagcgaggauucacgcucagguuaugaaaccuucaaagucauuggugguugguccacaccuaauuccaaauugcagauaaauaggcaagucauaguugacagcgauaauaggucagguuauucugguauuuucucuguugagggcaaaagcugcaucaauaggugcuuuuauguggaguugauaaggggaagggaacaggaaacuagaguaugguggaccucaaacaguauuguuguguuuuguggcacuucagguaccuaugggacaggcucauggccugauggggcgaacaucaaucucaugccuauauaa

SEQ ID NO: 46715 - RNA, 1410 nt, Artificial Sequence
  derived and/or modified CDS sequence (wt) from neuraminidase__InfluenzaA__ABC67579
augaauccaaaucaaaagauaauaacgauuggcucuguuucucucacuauugccacaauaugcuuccuuaugcaaauugccauccugguaacuacuguaacauugcauuucaagcaauaugaaugcaacucccccccaaacaaccaaguaaugcugugugaaccaacaauaauagaaagaaacauaacagagauaguguaucugaccaacaccaccauagagaaggaaauaugccccaaaccagcagaauacagaaauuggucaaagccgcaauguaaaauuacaggauuugcaccuuuuucaaaggacaauucaauucggcuuuccgcugguggggacauuugggugacaagagaaccuuaugugucaugcgauccugacaaguguuaucaauuugcccuuggacagggaacaacacuaaacaacgggcauucaaaugacacaguacaugauaggaccccuuaucgaacccuauugaugaaugaguuggguguuccauuucauuuaggaaccaagcaagugugcauagcaugguccagcucaaguugucacgauggaaaagcauggcugcauguuuguguaacugggcaugaugaaaaugcaacugcuagcuucauuuacgaugggaggcuuguagauaguauugguucaugguccaaaaaaauccucaggacccaggagucggaaugcguuuguaucaauggaacuuguacaguaguaaugacugaugggagugcuucaggaagagcugauacuaaaauacuauucauugaggaggggaaaaucguucauauuagccaauugucaggaagugcucagcaugucgaggagugcuccuguuauccucgauauccuggugucagaugugucugcagagacaacuggaaaggcuccaauaggcccaucguagauauaaauguaaaggaucauagcauuguuuccaguuaugugugcucaggacuuguuggagacacacccagaaaaaacgacagcuccagcaguagccauugccugaauccuaacaaugaagaagggggucauggagugaaaggcugggccuuugaugauggaaaugacguguggaugggaagaacgaucagcgagaaguuacgcucagguuaugaaaccuucaaagucauugaaggcugguccaaaccuaacuccaaauugcagauaaauaggcaagucauaguugacagagguaauagguccgguuauucugguauuuucucuguugaaggcaaaagcugcaucaaucggugcuuuuauguggaguugauaaggggaaggaaacaggaaacugaagucugguggaccucaaacaguauuguuguguuuugugguaccucagguacauauggaacaggcucauggccugauggggcggacaucaaucucaugccuauauaa

SEQ ID NO: 46716 - RNA, 1410 nt, Artificial Sequence; identical to SEQ ID NO: 46378
  derived and/or modified CDS sequence (wt) from neuraminidase__InfluenzaA__ABC67590

SEQ ID NO: 46717 - RNA, 1410 nt, Artificial Sequence; identical to SEQ ID NO: 46378
  derived and/or modified CDS sequence (wt) from neuraminidase__InfluenzaA__ABC67601

SEQ ID NO: 46718 - RNA, 1410 nt, Artificial Sequence; identical to SEQ ID NO: 46178
  derived and/or modified CDS sequence (wt) from neuraminidase__InfluenzaA__ABC67612

SEQ ID NO: 46719 - RNA, 1410 nt, Artificial Sequence; identical to SEQ ID NO: 46178
  derived and/or modified CDS sequence (wt) from neuraminidase__InfluenzaA__ABC67623

SEQ ID NO: 46720 - RNA, 1410 nt, Artificial Sequence
  derived and/or modified CDS sequence (wt) from neuraminidase__InfluenzaA__ABC67634
augaauccaaaucaaaagauaauaacaauuggcucuguuucucucaccauugccacaauaugcuuccuuaugcaaauugccauccugguaacuacuguaacauugcauuucaagcaguaugaaugcaacccccccccaaacaaccaaguaaugcugugugaaccaacaauaauagaaagaaacauaacagagauaguguaucugaccaacaccaccauagagaaggaaauaugccccaaauuagcagaauacagaaauuggucaaagccgcaauguaacauuacaggauuugcaccuuuuucuaaggacaauucgauucggcuuuccgcugguggggacaucugggugacaagagaaccuuaugugucaugcgauccugacaaguguuaucaauuugcccuugggcagggaacaacacuaaacaacgggcauucaaaugacacaguacaugauaggaccccuuaccggacccuauugaugaaugaauuggguguuccauuucauuugggaaccaggcaagugugcauagcaugguccagcucaaguugucacgauggaaaagcauggcugcauguuuguguaacuggggaugaugaaaaugcaacugcuagcuucauuuacaaugggaggcuuguagauaguauugguucaugguccaaaaaaauacucagaacccaggagucggaaugcguuuguaucaauggaacuuguacaguaguaaugacugaugggagcgcuucaggaaaagcugauacuaaaauacuauucauugaggaggggaaaaucguucauauuagcacauugucaggaagugcucagcaugucgaggagugcuccuguuauccucgauauccuggugucagaugugucugcagagacaacuggaaaggcuccaauaggcccaucguagauauaaauguaaaggauuauagcauuguuuccaguuaugugugcucaggacuuguuggagacacacccagaaaaaacgacagcuucagcaguagccauugccuagauccuaacaaugaggaagguggucauggagugaaaggcugggccuuugaugauggaaaugacguguggaugggaagaacgaucagcgagaaguuacgcucagguuaugaaaccuucaaagucaucgaaggcugguccaaaccuaacuccaaauuacagacaaauaggcaagucauaguugaaagagguaacagguccgguuauucugguauuuucuccguugaaggcaaaagcugcaucaaucggugcuuuuauguggaguugauaaggggaaggaaagaggaaacugaagucugguggaccucaaacaguauuguuguguuuuguggcaccucagguacauauggaacaggcucauggccugauggggcggauaucaaucucaugccuauauaa

SEQ ID NO: 46721 - RNA, 1410 nt, Artificial Sequence; identical to SEQ ID NO: 46178
  derived and/or modified CDS sequence (wt) from neuraminidase__InfluenzaA__ABC67645

SEQ ID NO: 46722 - RNA, 1410 nt, Artificial Sequence
  derived and/or modified CDS sequence (wt) from neuraminidase__InfluenzaA__ABC67656
augaauccaaaucaaaagauaauaacaauuggcucuguuucucucaccauugccacaauaugcuuccuuaugcaaauugccauccugguaacuacuguaacauugcauuucaagcaguaugaaugcaacucccccccaaacaaccaaguaaugcugugugaaccaacaauaauagaaagaaacauaacagagauaguguaucugaccaacaccaccauagagaaggaaauaugccccaaauuagcagaauacagaaauuggucaaagccgcaauguaacauuacaggauuugcaccuuuuucuaaggacaauucgauucggcuuuccgcugguggggacaucugggugacaagagaaccuuaugugucaugcgauccugacaaguguuaucaauuugcccuugggcagggaacaacacuaaacaacgggcauucaaaugacacaguacaugauaggaccccuuaccggacccuauugaugaaugaauuggguguuccauuucauuugggaaccaggcaagugugcauagcaugguccagcucaaguugucacgauggaaaagcauggcugcauguuuguguaacuggggaugaugaaaaugcaacugcuagcuucauuuacaaugggaggcuuguagauaguauugguucaugguccaaaaaaauacucagaacccaggagucggaaugcguuuguaucaauggaacuuguacaguaguaaugacugaugggagcgcuucaggaaaagcugauacuaaaauacuauucauugaggaggggaaaaucguucauauuagcacauugucaggaagugcucagcaugucgaggagugcuccuguuauccucgauauccuggugucagaugugucugcagagacaacuggaaaggcuccaauaggcccaucguagauauaaauguaaaggauuauagcauuguuuccaguuaugugugcucaggacuuguuggagacacacccagaaaaaacgacagcuucagcaguagccauugccuagauccuaacaaugaggaagguggucauggaguaaaaggcugggccuuugaugauggaaaugacguguggaugggaagaacgaucagcgagaaguuacgcucagguuaugaaaccuucaaagucaucgaaggcugguccaaaccuaacuccaaauuacagacaaauaggcaagucauaguugaaagagguaacagguccgguuauucugguauuuucuccguugaaggcaaaagcugcaucaaucggugcuuuuauguggaguugauaaggggaaggaaagaggaaacugaagucugguggaccucaaacaguauuguuguguuuuguggcaccucagguacauauggaacaggcucauggccugauggggcggauaucaaucucaugccuauauaa

SEQ ID NO: 46723 - RNA, 1410 nt, Artificial Sequence
  derived and/or modified CDS sequence (wt) from neuraminidase__InfluenzaA__ABC67700
augaauccaaaucaaaagauaauaacgauuggcucuguuucucucaccauuuccacaauaugcuucuucaugcaaauugccaucuugauaacuacuguaacauugcauuucaagcaauaugaauucaacucccccccaaacaaccaagugaugcugugugaaccaacaauaauagaaagaaacauaacagagauaguguaucugaccaacaccaccauagagaaggaaauaugccccaaacuagcagaauacagaaauuggucaaagccgcaauguaacauuacaggauuugcaccuuuuucuaaggacaauucgauuaggcuuuccgcugguggggacaucugggugacaagagaaccuuaugugucaugcgauccugacaaguguuaucaauuugcccuuggacagggaacaacacuaaacaacgugcauucaaaugacacaguacaugauaggaccccuuaucggacccuauugaugaaugaguuagguguuccauuucaucuggggaccaagcaagugugcauagcaugguccagcucaaguugucacgauggaaaagcauggcugcauguuuguguaacgggggaugauaaaaaugcaacugcuagcuucauuuacaaugggaggcuuguagauaguauuguuucaugguccaaagaaauccucaggacccaggagucagaaugcguuuguaucaauggaacuuguacaguaguaaugacugaugggagugcuucaggaaaagcugauacuaaaauacuauucauugaggaggggaaaaucguucauacuagcacauugucaggaagugcucagcaugucgaggagugcuccugcuauccucgauauccuggugucagaugugucugcagagacaacuggaaaggcuccaauaggcccauaguagauauaaacauaaaggauuauagcauuguuuccaguuaugugugcucaggacuuguuggagacacacccagaaaaaacgacagcuccagcaguagccauugcuuggauccuaacaaugaagaagguggucauggagugaaaggcugggccuuugaugauggaaaugacguguggaugggaagaacgaucagcgagaaguuacgcucaggauaugaaaccuucaaagucauugaaggcugguccaacucuaauuccaaauugcagauaaauaggcaagucauaguugacagagguaauagguccgguuauucugguauuuucucuguugaaggcaaaagcugcaucaaucggugcuuuuauguggaguugauaaggggaagaaaagaggaaacugaagucuuguggaccucaaacaguauuguuguguuuuguggcaccucagguacauauggaacaggcucauggccugauggggcggacaucaaucucaugccuauauaa

SEQ ID NO: 46724 - RNA, 1410 nt, Artificial Sequence
  derived and/or modified CDS sequence (wt) from neuraminidase__InfluenzaA__ABC67711
augaauccaaaucaaaagauaauaacgauugguucuguuucucucaccauuuccacaauaugcuucuucaugcaaauugccaucuugauaacuacuguaacauugcauuucaagcaauaugaauucaacucccccccaaacaaccaagugaugcugugugaaccaacaauaauagaaagaaacauaacagagauaguguaucugaccaacaccaccauagagaaggaaauaugccccaaacuagcagaauacagaaauuggucaaagccgcaauguaacauuacaggauuugcaccuuuuucuaaggacaauucgauuaggcuuuccgcugguggggacaucugggugacaagagaaccuuaugugucaugcgauccugacaaguguuaucaauuugcccuuggacagggaacaacacuaaacaacgugcauucaaaugacacaguacaugauaggaccccuuaucggacccuauugaugaaugaguuagguguuccauuucaucuggggaccaagcaagugugcauagcaugguccagcucaaguugucacgauggaaaagcauggcugcauguuuguguaacgggggaugauaaaaaugcaacugcuagcuucauuuacaaugggaggcuuguagauaguauuguuucaugguccaaagaaauccucaggacccaggagucagaaugcguuuguaucaauggaacuuguacaguaguaaugacugaugggagugcuucaggaaaagcugauacuaaaauacuauucauugaggaggggaaaaucguucauacuagcacauugucaggaagugcucagcaugucgaggagugcuccugcuauccucgauauccuggugucagaugugucugcagagacaacuggaaaggcuccaauaggcccauaguagauauaaacauaaaggauuauagcauuguuuccaguuaugugugcucaggacuuguuggagacacacccagaaaaaacgacagcuccagcaguagccauugcuuggauccuaacaaugaagaagguggucauggagugaaaggcugggccuuugaugauggaaaugacguguggaugggaagaacgaucagcgagaaguuacgcucaggauaugaaaccuucaaagucauugaaggcugguccaacccuaauuccaaauugcagauaaauaggcaagucauaguugacagagguaauagguccgguuauucugguauuuucucuguugaaggcaaaagcugcaucaaucggugcuuuuauguggaguugauaaggggaagaaaagaggaaacugaagucuuguggaccucaaacaguauuguuguguuuuguggcaccucagguacauauggaacaggcucauggccugauggggcggacaucaaucucaugccuauauaa

SEQ ID NO: 46725 - RNA, 1410 nt, Artificial Sequence
  derived and/or modified CDS sequence (wt) from neuraminidase__InfluenzaA__ABC67736
augaauccaaaucaaaagauaauaacgauuggcucuguuucucucaccauuuccacaauaugcuucuucaugcaaauugccaucuugauaacuacuguaacauugcauuucaagcaauaugaauucaacucccccccaaacaaccaagugaugcugugugaaccaacaauaauagaaagaaacauaacagagauaguguaucugaccaacaccaccauagagaaggaaauaugccccaaacuagcagaauacagaaauuggucaaagccgcaauguaacauuacaggauuugcaccuuuuucuaaggacaauucgauuaggcuuuccgcugguggggacaucugggugacaagagaaccuuaugugucaugcgauccugacaaguguuaucaauuugcccuuggacagggaacaacacuaaacaacgugcauucaaaugacacaguacaugauaggaccccuuaucggacccuauugaugaaugaguuagguguuccauuucaucuggggaccaagcaagugugcguagcaugguccagcucaaguugucacgauggaaaagcauggcugcauguuuguguaacgggggaugauaaaaaugcaacugcuaguuucauuuacaaugggaggcuuguagauaguauuguuucaugguccaaagaaauccucaggacccaggagucagaaugcguuuguaucaauggaacuuguacaguaguaaugacugaugggagugcuucaggaaaagcugauacuaaaauacuauucauugaggaggggaaaaucguucauacuagcacauugucaggaagugcucagcaugucgaggagugcuccugcuauccucgauauccuggugucagaugugucugcagagacaacuggaaaggcuccaauaggcccauaguagauauaaacauaaaggauuauagcauuguuuccaguuaugugugcucaggacuuguuggagacacacccagaaaaaacgacagcuccagcaguagccauugcuuggauccuaacaaugaagaagguggucauggagugaaaggcugggccuuugaugauggaaaugacguguggaugggaagaacgaucagcgagaaguuacgcucaggauaugaaaccuucaaagucauugaaggcugguccaacccuaauuccaaauugcagauaaauaggcaagucauaguugacagagguaauagguccgguuauucugguauuuucucuguugaaggcaaaagcugcaucaaucggugcuuuuauguggaguugauaaggggaagaaaagaggaaacugaagucuuguggaccucaaacaguauuguuguguuuuguggcaccucagguacauauggaacaggcucauggccugauggggcggacaucaaucucaugccuauauaa

SEQ ID NO: 46726 - RNA, 1410 nt, Artificial Sequence
  derived and/or modified CDS sequence (wt) from neuraminidase__InfluenzaA__ABC67809
augaauccaaaucaaaagauaauaacgauuggcucuguuucucucaccauuuccacaauaugcuucuucaugcaaauugccaucuugauaacuacuguaacauugcauuuuaagcaauaugaauucaacucccccccaaacaaccaagugaugcugugugaaccaacaauaauagaaagaaacauaacagagauaguguaucugaccaacaccaccauagagaaggaaauaugccccaaacuagcagaauacaggaauuggucaaagccgcaaugugacauuacaggauuugcaccuuuuucuaaggacaauucgauuaggcuuuccgcugguggggacaucugggugacaagagaaccuuaugugucaugcgauccugacaaguguuaucaauuugcccuuggacagggaacaacacuaaacaacgugcauucaaaugacacaguacaugauaggaccccuuaucggacccuauugaugaaugaguuagguguuccauuucaucuggggaccaagcaagugugcauagcaugguccagcucaaguugucacgauggaaaagcauggcugcauguuuguguaacgggggaugauaaaaaugcaacugcuagcuucauuuacaaugggaggcuuguagauaguauuguuucaugguccaaaaaaauccucaggacccaggagucagaaugcguuuguaucaauggaacuuguacaguaguaaugacugaugggagugcuucaggaaaagcugauacuaaaauacuauucauugaggaggggaaaaucguucauacuagcacauugucaggaagugcucagcaugucgaggagugcuccugcuauccucgauauccuggugucagaugugucugcagagacaacuggaaaggcuccaauaggcccaucguagauauaaacauaaaggauuauagcauuguuuccaguuaugugugcucaggacuuguuggagacacacccagaaaaaacgacagcuccagcaguagccauugcuuggauccuaacaaugaagaagguggucauggagugaaaggcugggccuuugaugauggaaaugacguguggaugggaagaacgaucagcgagaaguuacgcucaggauaugaaaccuucaaagucauugaaggcugguccaacccuaauuccaaauugcagauaaauaggcaagucauaguugacagagguaauagguccgguuauucugguauuuucucuguugaaggcaaaagcugcaucaaucggugcuuuuauguggaguugauaaggggaagaaaagaggaaacugaagucuuguggaccucaaacaguauuguuguguuuuguggcaccucagguacauauggaacaggcucauggccugauggggcggacaucaaucucaugccuauauaa

SEQ ID NO: 46727 - RNA, 1410 nt, Artificial Sequence
  derived and/or modified CDS sequence (wt) from neuraminidase__InfluenzaA__ABC67820
augaauccaaaucaaaagauaauaacaauuggcucuguuucucucaccauugccacaauaugcuuccuuaugcaaauugccauccugguaacuacuguaacauugcauuucaagcagcaugaaugcaacucccccccaaacaaccaaguaaugcugugugaaccaacaauaauagaaagaaacauaacagagauaguguaucugaccaacaccaccauagagaaggaaauaugccccaaacuaguagaauacagaaauuggucaaagccgcaauguaacauuacaggauuugcaccuuuuucuaaggacaauucgauucggcuuuccgcugguggggacaucugggugacaagagaaccuuaugugucaugcgauccugacaaguguuaucaauuugcccuugggcagggaacaacacuaaacaacgggcauucaaaugacacaguacaugauaggaccccuuaccggacccuauugaugaaugaauuggguguuccauuucauuugggaaccaggcaagugugcauagcaugguccagcucaaguugucacgauggaaaagcauggcugcauguuuguguaacuggggaugauaaaaaugcaacugcuagcuucauuuacaaugggaggcuuguagauaguauugguucaugguccaaaaaaauacucagaacccaggagucggaaugcguuuguaucaauggaacuuguacaguaguaaugacugauggaagcgcuucaggaaaagcugauacuaaaauacuauucauugaggaggggaaaaucguucauauuagcacauugucaggaagugcucagcaugucgaggagugcuccuguuauccucgauauccuggugucagaugugucugcagagacaacuggaaaggcuccaauaggcccauuguagauauaaauguaaaggauuauagcauuguuuccaguuaugugugcucaggacuuguuggagacacacccagaaaaaacgacagcuucagcaguagccauugccuagauccuaacaaugaggaagguggucauggagugaaaggcugggccuuugaugauggaaaugacguguggaugggaagaacgaucagcgagaaguuacgcucagguuaugaaaccuucaaagucaucgaaggcugguccaaaccuaacuccaaauuacagauaaauaggcaaguuauaguugaaagagguaacagguccgguuauucugguauuuucuccguugaaggcaaaagcugcaucaaucggugcuuuuauguggaguugauaaggggaaggaaagaggaaacugaagucugguggaccucaaacaguauuguuguguuuuguggcaccucagguacauauggaacaggcucauggccugauggggcggauaucaaucucaugccuauauaa

SEQ ID NO: 46728 - RNA, 1410 nt, Artificial Sequence; identical to SEQ ID NO: 46582
  derived and/or modified CDS sequence (wt) from neuraminidase__InfluenzaA__ABC67842

SEQ ID NO: 46729 - RNA, 1410 nt, Artificial Sequence; identical to SEQ ID NO: 46178
  derived and/or modified CDS sequence (wt) from neuraminidase__InfluenzaA__ABC67853

SEQ ID NO: 46730 - RNA, 1410 nt, Artificial Sequence; identical to SEQ ID NO: 46582
  derived and/or modified CDS sequence (wt) from neuraminidase__InfluenzaA__ABC67864

SEQ ID NO: 46731 - RNA, 1410 nt, Artificial Sequence; identical to SEQ ID NO: 46701
  derived and/or modified CDS sequence (wt) from neuraminidase__InfluenzaA__ABC67886

SEQ ID NO: 46732 - RNA, 1410 nt, Artificial Sequence; identical to SEQ ID NO: 46178
  derived and/or modified CDS sequence (wt) from neuraminidase__InfluenzaA__ABC67897

SEQ ID NO: 46733 - RNA, 1410 nt, Artificial Sequence
  derived and/or modified CDS sequence (wt) from neuraminidase__InfluenzaA__ABC67970
augaauccaaaucaaaagauaauaacaauuggcucuguuucucucaccauugccacaauaugcuuccuuaugcaaauugccauccugguaacuacuguaacauugcauuucaagcaguaugaaugcaacucccccccaaacaaccaaguaaugcugugugaaccaacaauaauagaaagaaacauaacagagauaguguaucugaccaacaccaccauagagaaggaaauaugccccaaauuagcagaauacagaaauuggucaaagccgcaguguaacauuacaggauuugcaccuuuuucuaaggacaauucgauucggcuuuccgcugguggggacaucugggugacaagagaaccuuaugugucaugcgauccugacaaguguuaucaauuugcccuugggcagggaacaacacuaaacaacgggcauucaaaugacacaguacaugauaggaccccuuaccggacccuauugaugaaugaauuggguguuccauuucauuugggaaccaggcaagugugcauagcaugguccagcucaaguugucacgauggaaaagcauggcugcauguuuguguaacuggggaugaugaaaaugcaacugcuagcuucauuuacaaugggaggcuuguagauaguauugguucaugguccaaaaaaauacucagaacccaggagucggaaugcguuuguaucaauggaacuuguacaguaguaaugacugaugggagcgcuucaggaaaagcugauacuaaaauacuauucauugaggaggggaaaaucguucauauuagcacauugucaggaagugcucagcaugucgaggagugcuccuguuauccucgauauccuggugucagaugugucugcagagacaacuggaaaggcuccaauaggcccaucguagauauaaauguaaaggauuauagcauuguuuccaguuaugugugcucaggacuuguuggagacacacccagaaaaaacgacagcuucagcaguagccauugccuagauccuaacaaugaggaagguggucauggagugaaaggcugggccuuugaugauggaaaugacguguggaugggaagaacgaucagcgagaaguuacgcucagguuaugaaaccuucaaagucaucgaaggcugguccaaaccuaacuccaaauuacagacaaauaggcaagucauaguugaaagagguaacagguccgguuauucugguauuuucuccguugaaggcaaaagcugcaucaaucggugcuuuuauguggaguugauaaggggaaggaaagaggaaacugaagucugguggaccucaaacaguauuguuguguuuuguggcaccucagguacauauggaacaggcucauggccugauggggcggauaucaaucucaugccuauauaa

SEQ ID NO: 46734 - RNA, 1410 nt, Artificial Sequence
  derived and/or modified CDS sequence (wt) from neuraminidase__InfluenzaA__ABC67981
augaauccaaaucaaaagauaauaacaauuggcucuguuucucucaccauugccacaauaugcuuccuuaugcaaauugccauccugguaacuacuguaacauugcauuucaagcaguaugaaugcaacucccccccaaacaaccaaguaaugcugugugaaccaacaauaauagaaagaaacauaacagagauaguguaucugaccaacaccaccauagagaaggaaauaugccccaaauuagcagaauacagaaauuggucaaagccgcaauguaacauuacaggauuugcaccuuuuucuaaggacaauucgauucggcuuuccgcugguggggacaucugggugacaagagaaccuuaugugucaugcgauccugacaaguguuaucaauuugcccuugggcagggaacaacacuaaacaacgggcauucaaaugacacaguacaugauaggaccccuuaccggacccuauugaugaaugaauuggguguuccauuucauuugggaaccaggcaagugugcauagcaugguccagcucaaguugucacgauggaaaagcauggcugcauguuuguguaacuggggaugaugaaaaugcaacugcuagcuucauuuacaaugggaggcuuguagauaguauugguucaugguccaaaaaaauacucagaacccaggagucggaaugcguuuguaucaauggaacuuguacaguaguaaugacugaugggagcgcuucaggaaaagcugauacuaaaauacuauucauugaggaggggaaaaucguucauauuagcacauugucaggaagugcucagcaugucgaggagugcuccuguuauccucaauauccuggugucagaugugucugcagagacaacuggaaaggcuccaauaggcccaucguagauauaaauguaaaggauuauagcauuguuuccaguuaugugugcucaggacuuguuggagacacacccagaaaaaacgacagcuucagcaguagccauugccuagauccuaacaaugaggaagguggucauggagugaaaggcugggccuuugaugauggaaaugacguguggaugggaagaacgaucagcgagaaguuacgcucagguuaugaaaccuucaaagucaucgaaggcugguccaaaccuaacuccaaauuacagacaaauaggcaagucauaguugaaagagguaacagguccgguuauucugguauuuucuccguugaaggcaaaagcugcaucaaucggugcuuuuauguggaguugauaaggggaaggaaagaggaaacugaagucugguggaccucaaacaguauuguuguguuuuguggcaccucagguacauauggaacaggcucauggccugauggggcggauaucaaucucaugccuauauaa

SEQ ID NO: 46735 - RNA, 1410 nt, Artificial Sequence
  derived and/or modified CDS sequence (wt) from neuraminidase__InfluenzaA__ABC67992
augaauccaaaucaaaagauaauaacaauuggcucuguuucucucaccauugccacaauaugcuuccuuaugcaaauugccauccugguaacuacuguaacauugcauuucaagcaguaugaaugcaacucccccccaaacaaccaaguaaugcugugugaaccaacaauaauagaaagaaacauaacagagauaguguaucugaccaacaccaccauagagaaggaaauaugccccaaauuagcagaauacagaaauuggucaaagccgcaauguaacauuacaggauuugcaccuuuuucuaaggacaauucgauucggcuuuccgcugguggggacaucugggugacaagagaaccuuaugugucaugcgauccugacaaguguuaucaauuugcccuugggcagggaacaacacuaaacaacgggcauucaaaugacacaguacaugauaggaccccuuaccggacccuauugaugaaugaauuggguguuccauuucauuugggaaccaggcaagugugcauagcaugguccagcucaaguugucacgauggaaaagcauggcugcauguuuguguaacuggggaugaugaaaaugcaacugcuagcuucauuuacaaugggaggcuuguagauaguauugguucaugguccaaaaaaauacucagaacccaggagucggaaugcguuuguaucaauggaacuuguacaguaguaaugacugaugggagcgcuucaggaaaagcugauacuaaaauacuauucauugaggaggggaaaaucguucauauuagcacauugucaggaagugcucagcaugucgaggagugcuccuguuauccucgauauccuggugucagaugugucugcagagacaacuggaaaggcuccaauaggcccaucguagauauaaauguaaaggauuauagcauuguuuccaguuaugugugcucaggacuuguuggagacacacccagaaaaaacaacagcuucagcaguagccauugccuagauccuaacaaugaggaagguggucauggagugaaaggcugggccuuugaugauggaaaugacguguggaugggaagaacgaucagcgagaaguuacgcucagguuaugaaaccuucaaagucaucgaaggcugguccaaaccuaacuccaaauuacagacaaauaggcaagucauaguugaaagagguaacagguccgguuauucugguauuuucuccguugaaggcaaaagcugcaucaaucggugcuuuuauguggaguugauaaggggaaggaaagaggaaauugaagucugguggaccucaaacaguauuguuguguuuuguggcaccucagguacauauggaacaggcucauggccugauggggcggauaucaaucucaugccuauauaa

SEQ ID NO: 46736 - RNA, 1410 nt, Artificial Sequence; identical to SEQ ID NO: 46701
  derived and/or modified CDS sequence (wt) from neuraminidase__InfluenzaA__ABC68003

SEQ ID NO: 46737 - RNA, 1410 nt, Artificial Sequence
  derived and/or modified CDS sequence (wt) from neuraminidase__InfluenzaA__ABC68052
augaauccaaaucaaaagauaauaacaauuggcucuguuucucucaccauugccacaauaugcuuccuuaugcaaauugccauccugguaacuacuguaacauugcauuucaagcaguaugaaugcaacucccccccaaacaaccaaguaaugcugugugaaccaacaauaauagaaagaaacauaacagagauaguguaucugaccaacaccaccauagagaaggaaauaugccccaaauuagcagaauacagaaauuggucaaagccgcaauguaacauuacaggauuugcaccuuuuucuaaggacaauucgauucggcuuuccgcugguggggacaucugggugacaagagaaccuuaugugucaugcgauccugacaaguguuaucaauuugcccuugggcagggaacaacacuaaacaacgggcauucaaaugacacaguacaugauaggaccccuuaccggacccuauugaugaaugaauuggguguuccauuucauuugggaaccaggcaagugugcauagcaugguccagcucaaguugucacgauggaaaagcauggcugcauguuuguguaacuggggaugaugaaaaugcaacugcuagcuucauuuacaaugggaggcuuguagauaguauugguucaugguccaaaaaaauacucagaacccaggagucggaaugcguuuguaucaauggaacuuguacaguaguaaugauugaugggagcgcuucaggaaaagcugauacuaaaauacuauucauugaggaggggaaaaucguucauauuagcacauugucaggaagugcucagcaugucgaggagugcuccuguuauccucgauauccuggugucagaugugucugcagagacaacuggaaagguuccaauaggcccaucguagauauaaauguaaaggauuauagcauuguuuccaguuaugugugcucaggacuuguuggagacacacccagaaaaaacgacagcuucagcaguagccauugccuagauccuaacaaugaggaagguggucauggagugaaaggcugggccuuugaugauggaaaugacguguggaugggaagaacgaucagcgagaaguuacgcucagguuaugaaaccuucaaagucaucgaaggcugguccaaaccuaacuccaaauuacagacaaauaggcaagucauaguugaaagagguaacagguccgguuauucugguauuuucuccguugaaggcaaaagcugcaucaaucggugcuuuuauguggaguugauaaggggaaggaaagaggaaacugaagucugguggaccucaaacaguauuguuguguuuuguggcaccucagguacauauggaacaggcucauggccugauggggcggauaucaaucucaugccuauauaa

SEQ ID NO: 46738 - RNA, 1410 nt, Artificial Sequence; identical to SEQ ID NO: 46178
  derived and/or modified CDS sequence (wt) from neuraminidase__InfluenzaA__ABC68063

SEQ ID NO: 46739 - RNA, 1410 nt, Artificial Sequence; identical to SEQ ID NO: 46178
  derived and/or modified CDS sequence (wt) from neuraminidase__InfluenzaA__ABC68074

SEQ ID NO: 46740 - RNA, 1410 nt, Artificial Sequence
  derived and/or modified CDS sequence (wt) from neuraminidase__InfluenzaA__ABC68085
augaauccaaaucaaaagauaauaacgauuggcucuguuucucucaccauuuccacaauaugcuucuucaugcaaauugccaucuugauaacuacuguaacauugcauuucaagcaauaugaauucaacucccccccaaacaaccaagugaugcugugugaaccaacaauaauagaaagaaacauaacagagauaguguaucugaccaacaccaccauagagaaggaaauaugccccaaacuagcagaauacagaaauuggucaaagccgcaauguaacauuacaggauuugcaccuuuuucuaaggacaauucgauuaggcuuuccgcugguggggacaucugggugacaagagaaccuuaugugucaugcgauccugacaaguguuaucaauuugcccuuggacagggaacaacacuaaacaacgugcauucaaaugacacaguacaugauaggaccccuuaucggacccuauugaugaaugaguuagguguuccauuucaucuggggaccaagcaagugugcauagcaugguccagcucaaguugucacgauggaaaagcauggcugcauguuuguguaacgggggaugauaaaaaugcaacugcuagcuucauuuacaaugggaggcuuguagauaguauuguuucaugguccaaagaaauccucaggacccaggagucagaaugcguuuguaucaauggaacuuguacaguaguaaugacugaugggagugcuucaggaaaagcugauacuaaaauacuauucauugaggaggggaaaaucguucauacuagcacauugucaggaagugcucagcaugucgaggagugcuccugcuauccucgauauccuggugucagaugugucugcagagacaacuggaaaggcuccaauaggcccauaguagauauaaacauaaaggauuauagcauuguuuccaguuaugugugcucaggacuuguuggagacacacccagaaaaaacgacagcuccagcaguagccauugcuuggauccuaacaaugaagaagguggucauggagugaaaggcugggccuuugaugauggaaaugacguguggaugggaagaacgaucagcgagaaguuacgcucaggauaugaaaccuucaaagucauugaaggcugguccaacccuaauuccaaauugcagauaaauaggcaagucauaguugacagagguaauagguccgguuauucugguauuuucucuguugaaggcaaaagcugcaucaaucggugcuuuuauguggaguugauaaggggaagaaaagaggaaacugaagucuuguggaccucaaacaguauuguuguguuuuguggcaccucagguacauauggaacaggcucauggccugauggggcggacaucaaucucaugccuauauaa

SEQ ID NO: 46741 - RNA, 1410 nt, Artificial Sequence
  derived and/or modified CDS sequence (wt) from neuraminidase__InfluenzaA__ABC68096
augaauccaaaucaaaagauaauaacaauuggcucuguuucucucaccauugccacaauaugcuuccuuaugcaaauugccauccugguaacuacuguaacauugcauuucaagcaguaugaaugcaacucccccccaaacaaccaaguaaugcugugugaaccaacaauaauagaaagaaacauaacagaaauaguguaucugaccaauaccaccauagagaaggaaauaugccccaaauuagcagaauacagaaauuggucaaagccgcaauguaacauuacaggauuugcaccuuuuucuaaggacaauucgauucggcuuuccgcugguggggacaucugggugacaagagaaccuuaugugucaugcgauccugacaaguguuaucaauuugcccuugggcagggaacaacacuaaacaacgggcauucaaaugacacaguacaugauaggaccccuuaccggacccuauugaugaaugaauuggguguuccauuucauuugggaaccaggcaagugugcauagcaugguccagcucaaguugucacgauggaaaagcauggcugcauguuuguguaacuggggaugaugaaaaugcaacugcuagcuucauuuacaaugggaggcuuguagauaguauugguucaugguccaaaaaaauacucagaacccaggagucggaaugcguuuguaucaaugggacuuguacaguaguaaugacugaugggagcgcuucaggaaaagcugauacuaaaauacuauucauugaggaggggaaaaucguucauauuagcacauugucaggaagugcucagcaugucgaggagugcuccuguuauccucgauauccuggugucagaugugucugcagagacaacuggaaaggcuccaauaggcccaucguagauauaaauguaaaggauuauagcauuguuuccaguuaugugugcucaggacuuguuggagacacacccagaaaaaacgacagcuucagcaguagccauugccuagauccuaacaaugaggaagguggucauggagugaaaggcugggccuuugaugauggaaaugacguguggaugggaagaacgaucagcgagaaguuacgcucagguuaugaaaccuucaaagucaucgaaggcugguccaaaccuaacuccaaauuacauauaaauaggcaagucauaguugaaagagguaacagguccgguuauucugguauuuucuccguugaaggcaaaagcugcaucaaucggugcuuuuauguggaguugauaaggggaaggaaagaggaaacugaagucugguggaccucaaacaguauuguuguguuuuguggcaccucagguacauauggaacaggcucauggccugauggggcggauaucaaucucaugccuauauaa

SEQ ID NO: 46742 - RNA, 1410 nt, Artificial Sequence
  derived and/or modified CDS sequence (wt) from neuraminidase__InfluenzaA__ABC68225
augaauccaaaucaaaagauaauaacgauuggcucuguuucucucaccauugccacaauaugcuuccuuaugcaaauugccauccugguaacuacuguaacguugcauuucaagcaauaugaaugcaacucccccccaaacaaccaagugaugcugugugaaccaacaauaauagaaagaaacauaacagagauaguguaucugaccaacaccaccauagagaaggaaauaugccccaaacuagcagaauacagaaauuggucaaagccgcaauguaacauuacaggauuugcaccuuuuucuaaggacaauucgauucggcuuuccgcugguggggacaucugggugacaagagaaccuuaugugucaugcgauccugacaaguguuaucaauuugcccuuggacagggaacaacacuaaacaacgggcauucaaaugacacaguacaugauaggaccccuuaucgaacccuauugaugaaugaguuggguguuccauuucauuugggaaccaagcaagugugcauagcaugguccagcucaagcugucacgauggaaaagcauggcugcauguuuguguaacgggggaugaugaaaaugcaacugcuagcuucauuuacaaugggaggcuuguagauaguaucgguucaugguccaaaaaaauccucaggacccaggagucggaaugcguuuguaucaauggaacuuguacaguaguaaugacugaugggagugcuucaggaaaagcugauacuaaaauacuauucauugaggaggggaaaaucguucauacuagcucauugucaggaagugcucagcaugucgaggagugcuccuguuauccucgauauccuggugucagaugugucugcagagacaacuggaaaggcuccaauaggcccaucguagauauaaauguaaaggauuauagcauuguuuccaguuaugugugcucaggacuuguuggagacacacccagaaaaaacgacagcuccagcaguagccauugcuuggauccuaacaaugaggaagguggucauggagugaaaggcugggccuuugaugauggaaaugacguguggaugggaagaacgaucagcgagaaguuacgcucaggauaugaaaccuucaaagucauugaaggcugguccaaaccuaacuccaaauugcagauaaauaggcaagucauaguugacagagguaauagguccgguuauucugguauuuucucuguugaaagcaaaagcugcaucaauaggugcuuuuauguggaguugauaaggggaaggaaacaggaaacugaagucuuguggaccucaaacaguauuguuguguuuuguggcaccucagguacauauggaacaggcucauggccugauggggcggacaucaaucucaugccuauauaa

SEQ ID NO: 46743 - RNA, 1410 nt, Artificial Sequence; identical to SEQ ID NO: 46531
  derived and/or modified CDS sequence (wt) from neuraminidase__InfluenzaA__ABC68236

SEQ ID NO: 46744 - RNA, 1350 nt, Artificial Sequence
  derived and/or modified CDS sequence (wt) from neuraminidase__InfluenzaA__ABC72646
augaauccgaauaagaagauaauaaccaucggaucaaucuguaugguaacuggaaugguuagcuuaauguuacaaauugggaacuugaucucaauaugggucagucauucaauucacacagggaaucaacagaaagcugaaccaaucagcaauacuaauuuucuuacugagaaagcuguggcuucaguaaaauuagcgggcaauucaucucuuugcccuauuaaugggugggcuguauacaguaaggacaacaguauaaggaucgguuccaagggggauguguuuguuauaagagagccauucaucucaugcucccacuuggaaugcagaacuuucuuuuugacucagggauccuugcugaaugacaagcacuccaaugggacugucaaagacaggaguccucacagaacauuaaugaguuguccugugggugaggcucccuccccauauaacucaagguuugagucuguugcuuggucagcaagugcuugccaugauggcaccaguugguugacaauuggaauuucuggcccagacaguggggcuguggcuguauugaaauacaauggcauaauaacagacacuaucaagaguuggaggaauaacauacugagaacucaagagucugaaugugcauguguaaauggcucuugcuuuacuguaaugacugacggaccaaguaauggucaggcaucacauaagaucuucaaaauggacaaagggaaagugguuaaaucagucgaauuggaugcuccuaauuaucacuaugaggaaugcuccuguuauccugaugccggcgaaaucacaugugugugcagggauaauuggcauggcucaaaucggccauggguaucuuucaaucaaaauuuggaguaucaaauaggauauauaugcaguggaguuuucggagacacuccacgccccaaugauggaacagguaguugugguccgguguccucuaacgggacauaugggguaaaaggguuuucauuuaaauacggcaauggugucuggaucgggagaacaaaaagcacuaauuccagaagcggcuuugaaaugauuugggauccaaauggguggacugaaacggacaguagcuuuucagugaaacaagauaucguagcaauaacugauuggucaggauauagcgggaguuuuguccagcauccagaacugacaggacuagauugcauaagaccuuguuucuggguugaguugaucagagggcggcccaaagagagcacaauuuggacuagugggagcagcauaucuuuuugugguguaaauagugacacuguggguuggucuuggccagacggugcugaguugcccuucaccauugacaaguag

SEQ ID NO: 46745 - RNA, 1410 nt, Artificial Sequence; identical to SEQ ID NO: 46111
  derived and/or modified CDS sequence (wt) from neuraminidase__InfluenzaA__ABC84392

SEQ ID NO: 46746 - RNA, 1410 nt, Artificial Sequence; identical to SEQ ID NO: 46537
  derived and/or modified CDS sequence (wt) from neuraminidase__InfluenzaA__ABC84403

SEQ ID NO: 46747 - RNA, 1410 nt, Artificial Sequence; identical to SEQ ID NO: 46526
  derived and/or modified CDS sequence (wt) from neuraminidase__InfluenzaA__ABC84414

SEQ ID NO: 46748 - RNA, 1410 nt, Artificial Sequence
  derived and/or modified CDS sequence (wt) from neuraminidase__InfluenzaA__ABC84425
augaauccaaaucaaaagauaauaacgauuggcucuguuucucucaccauuuccacaauaugcuucuucaugcaaauugccaucuugauaacuacuguaacauugcauuucaagcaauaugaauucaacucccccccaaacaaccaggugaugcugugugaaccaacaauaauagaaagaaacauaacagagauaguguaucugaccaacaccaccauagagaaggaaauaugccccaaacuagcggaauacagaaauuggucaaagccgcaaugugacauuacaggauuugcaccuuuuucuaaggacaauucgauuaggcuuuccgcugguggggacaucugggugacaagagaaccuuaugugucaugcgauccugacaaguguuaucaauuugcccuuggacaggggacaacacuaaacaacgugcauucaaaugacacaguacaugauaggaccccuuaucggacccuauugaugaaugaguuagguguuccauuucaucuggggaccaagcaagugugcauagcaugguccagcucaaguugucacgauggaaaagcauggcugcauguuuguguaacgggggaugauaaaaaugcaacugcuagcuucauuuacaaugggaggcuuguagauaguauuguuucaugguccaaagaaauccucaggacccaggagucagaaugcguuuguaucaauggaacuuguacaguaguaaugacugaugggagugcuucaggaaaagcugauacuaaaauacuauucauugaggaggggaaaauuguucauacuagcacauugucaggaagugcucagcaugucgaggaguguuccugcuauccucgauauccuggugucagaugugucugcagagacaacuggaaaggcuccaauaggcccaucguagauauaaacauaaaggauuauagcauuguuuccaguuaugugugcucaggacuuguuggagacacacccagaaaaaacgacagcuccagcaguagccauugcuuggauccuaacaaugaagaagguggucauggagugaaaggcugggccuuugaugauggaaaugacguguggaugggaagaacgaucagcgagaaguuacgcucaggauaugaaaccuucaaagucauugaaggcugguccaacccuaauuccaaauugcagauaaauaggcaagucauaguugacagagguaauagguccgguuauucugguauuuucucuguugaaggcaaaaacugcaucaaucggugcuuuuauguggaguugauaaggggaagaaaagaggaaacugaagucuuguggaccucaaacaguauuguuguguuuuguggcaccucagguacauauggaacaggcucauggccugauggggcggacaucaaucucaugccuauauaa

SEQ ID NO: 46749 - RNA, 1410 nt, Artificial Sequence; identical to SEQ ID NO: 46378
  derived and/or modified CDS sequence (wt) from neuraminidase__InfluenzaA__ABC84436

SEQ ID NO: 46750 - RNA, 1410 nt, Artificial Sequence
  derived and/or modified CDS sequence (wt) from neuraminidase__InfluenzaA__ABC84447
augaauccaaaucaaaagauaauaacaauuggcucuguuucucucaccauugccacaauaugcuuccuuaugcaaauugccauccugguaacuacuguaacauugcauuucaagcaguaugaaugcaacucccccccaaacaaccaaguaaugcugugugaaccaacaauaauagaaagaaacauaacagagauagugcaucugaccaacaccaccauagagaaggaaauaugccccaaauuagcagaauacagaaauuggucaaagccgcaauguaacauuacaggauuugcaccuuuuucuaaggacaauucgauucggcuuuccgcugguggggacaucugggugacaagagaaccuuaugugucaugcgauccugacaaguguuaucaauuugcccuugggcagggaacaacacuaaacaacgggcauucaaaugacacaguacaugauaggaccccuuaccggacccuauugaugaaugaauuggguguuccauuucauuugggaaccaggcaagugugcauagcaugguccagcucaaguugucacgauggaaaagcauggcugcauguuuguguaacuggggaugaugaaaaugcaacugcuagcuucauuuacaaugggaggcuuguagauaguauugguucaugguccaaaaaaauacucagaacccaggagucggaaugcguuuguaucaauggaacuuguacaguaguaaugacugaugggagcgcuucaggaaaagcugauacuaaaauacuauucauugaggaggggaaaaucguucauauuagcacauugucaggaagugcucagcaugucgaggagugcuccuguuauccucgauauccuggugucagaugugucugcagagacaacuggaaaggcuccaauaggcccaucguagauauaaauguaaaggauuauagcauuguuuccaguuaugugugcucaggacuuguuggagacacacccagaaaaaacgacagcuucagcaguagccauugccuagauccuaacaaugaggaagguggucauggagugaaaggcugggccuuugaugauggaaaugacguguggaugggaagaacgaucagcgagaaguuacgcucagguuaugaaaccuucaaagucaucgaaggcugguccaaaccuaacuccaaauuacagacaaauaggcaagucauaguugaaagagguaacagguccgguuauucugguauuuucuccguugaaggcaaaagcugcaucaaucggugcuuuuauguggaguugauaaggggaaggaaagaggaaacugaagucugguggaccucaaacaguauuguuguguuuuguggcaccucagguacauauggaacaggcucauggccugauggggcggauaucaaucucaugccuauauaa

SEQ ID NO: 46751 - RNA, 1410 nt, Artificial Sequence; identical to SEQ ID NO: 46726
  derived and/or modified CDS sequence (wt) from neuraminidase__InfluenzaA__ABC84501

SEQ ID NO: 46752 - RNA, 1410 nt, Artificial Sequence
  derived and/or modified CDS sequence (wt) from neuraminidase__InfluenzaA__ABC84512
augaauccaaaucaaaagauaauaacgauuggcucuguuucucucaccauuuccacaauaugcuucuucaugcaaauugccaucuugauaacuacuguaacauugcauuuuaagcaauaugaauucaacucccccccaaacaaccaagugaugcugugugaaccaacaauaauagagagaaacauaacagagauaguguaucugaccaacaccaccauagagaaggaaauaugccccaaacuagcagaauacaggaauuggucaaagccgcaaugugacauuacaggauuugcaccuuuuucuaaggacaauucgauuaggcuuuccgcugguggggacaucugggugacaagagaaccuuaugugucaugcgauccugacaaguguuaucaauuugcccuuggacagggaacaacacuaaacaacgugcauucaaaugacacaguacaugauaggaccccuuaucggacccuauugaugaaugaguuagguguuccauuucaucuggggaccaagcaagugugcauagcaugguccagcucaaguugucacgauggaaaagcauggcugcauguuuguguaacgggggaugauaaaaaugcaacugcuagcuucauuuacaaugggaggcuuguagauaguauuguuucaugguccaaaaaaauccucaggacccaggagucagaaugcguuuguaucaauggaacuuguacaguaguaaugacugaugggagugcuucaggaaaagcugauacuaaaauacuauucauugaggaggggaaaaucguucauacuagcacauugucaggaagugcucagcaugucgaggagugcuccugcuauccucgauauccuggugucagaugugucugcagagacaacuggaaaggcuccaauaggcccaucguagauauaaacauaaaggauuauagcauuguuuccaguuaugugugcucaggacuuguuggagacacacccagaaaaaacgacagcuccagcaguagccauugcuuggauccuaacaaugaagaagguggucauggagugaaaggcugggccuuugaugauggaaaugacguguggaugggaagaacgaucagcgagaaguuacgcucaggauaugaaaccuucaaagucauugaaggcugguccaacccuaauuccaaauugcagauaaauaggcaagucauaguugacagagguaauagguccgguuauucugguauuuucucuguugaaggcaaaagcugcaucaaucggugcuuuuauguggaguugauaaggggaagaaaagaggaaacugaagucuuguggaccucaaacaguauuguuguguuuuguggcaccucagguacauauggaacaggcucauggccugauggggcggacaucaaucucaugccuauauaa

SEQ ID NO: 46753 - RNA, 1410 nt, Artificial Sequence
  derived and/or modified CDS sequence (wt) from neuraminidase__InfluenzaA__ABC84523
augaauccaaaucaaaagauaauaacgauuggcucuguuucucucaccauuuccacaauaugcuucuucaugcaaauugccaucuugauaacuacuguaacauugcauuucaagcaauaugaauucaacucccccccaaacaaccaagugaugcugugugaaccaacaauaauagaaagaaacauaacagagauaguguaucugaccaacaccaccauagagaaggaaauaugccccaaacuagcagaauacagaaauuggucaaagccgcaauguaacauuacaggauuugcaccuuuuucuaaggacaauucgauuaggcuuuccgcugguggagacaucugggugacaagagaaccuuaugugucaugcgauccugacaaguguuaucaauuugcccuuggacagggaacaacacuaaacaacgugcauucaaaugacacaguacaugauaggaccccuuaucggacccuauugaugaaugaguuagguguuccauuucaucuggggaccaagcaagugugcauagcaugguccagcucaaguugucacgauggaaaagcauggcugcauguuuguguaacgggggaugauaaaaaugcaacugcuagcuucauuuacaaugggaggcuugcagauaguauuguuucaugguccaaagaaauccucaggacccaggagucagaaugcguuuguaucaauggaacuuguacaguaguaaugacugaugggagugcuucaggaaaagcugauacuaaaauacuauucauugaggaggggaaaaucguucauacuagcacauugucaggaagugcucagcaugucgaggagugcuccugcuauccucgauauccuggugucagaugugucugcagagacaacuggaaaggcuccaauaggcccauaguagauauaaacauaaaggauuauagcauuguuuccaguuaugugugcucaggacuuguuggagacacacccagaaaaaacgacagcuccagcaguagccauugcuuggauccuaacaaugaagaagguggucauggagugaaaggcugggccuuugaugauggaaaugacguguggaugggaagaacgaucagcgagaaguuacgcucaggauaugaaaccuucaaagucauugaaggcugguccaacccuaauuccaaauugcagauaaauaggcaagucauaguugacagagguaauagguccgguuauucugguauuuucucuguugaaggcaaaagcugcaucaaucggugcuuuuauguggaguugauaaggggaagaaaagaagaaacugaagucuuguggaccucaaacaguauuguuguguuuuguggcaccucagguacauauggaacaggcucauggccugauggggcggacaucaaucucaugccuauauaa

SEQ ID NO: 46754 - RNA, 1410 nt, Artificial Sequence
  derived and/or modified CDS sequence (wt) from neuraminidase__InfluenzaA__ABC84545
augaauccaaaucaaaagauaauaacaauuggcucugucucucucaccauugcaacaauaugcuuccucaugcagauugccauccugguaacuacuguaacauugcauuucaagcaauaugagugcgacucccccgcgaacaaccaaguaaugccgugugaaccaauaauaauagaaaggaacauaacagagauaguguauuugacuaacaccaccauagagaaagagauaugccccaaauuaguggaauacaggaauuggucaaagccgcaauguaaaauuacaggauuugcaccuuuuucuaaggacaauucaauucggcuuucugcugguggggacauuugggugacgagagaaccuuaugugucaugcgauccuggcaaguguuaucaauuugcacucgggcaggggaccacacuagacaacaaacauucaaaugacacaauacaugauagaaccccucaucgaacccuauugaugaaugaguuggguguuccauuucauuugggaaccaggcaaguguguauagcaugguccagcucaaguugucacgauggaaaagcauggcugcauguuugugucacuggguaugauaaaaaugcaacugcuagcuucauuuacgaugggaggcuuguagacaguauugguucauggucucaaaauauccucaggacccaggagucggaaugcguuuguaucaaugggacuuguacaguaguaaugacugauggaagugcuucaggaagcgcugauacuaaaauacuauucauugaagaggggaaaauuguucauauuagcccauugucaggaagugcucagcauguagaggaguguuccuguuauccucgauauccuggugucagauguaucugcagagacaacuggaaaggcucuaauaggcccgucguagauauaaaugugaaagaucauagcauugauuccaguuaugugugcucagggcuuguuggcgacacacccagaaacaacgacagaucuagcaauagcuauugccggaauccuaacaaugagaaagggaaucacggagugaaaggcugggccuuugacgauggaaaugacguguggaugggaagaacgaucagcgaggauucacgcucagguuaugaaaccuucaaagucauuggugguugguccacaccuaauuccaaauugcagauaaauaggcaagucauaguugacagcgauaauaggucagguuauucugguauuuucucuguugagggcaaaagcugcaucaauagguguuuuuauguggaguugauaaggggaagggaacaggaaacuagaguaugguggaccucaaacaguauuguuguguuuuguggcacuucagguaccuaugggacaggcucauggccugauggggcggacaucaaucucaugccuauauaa

SEQ ID NO: 46755 - RNA, 1410 nt, Artificial Sequence
  derived and/or modified CDS sequence (wt) from neuraminidase__InfluenzaA__ABC84574
augaauccaaaucaaaagauaauaacgauuggcucuguuucucucaccauugccacaauaugcuuccuuaugcaaauugccauccugguaacuacuguaacguugcauuucaagcaauaugaaugcaacucccccccaaacaaccaagugaugcugugugaaccaacaauaauagaaagaaacauaacagagauaguguaucugaccaacaccaccauagagaaggaaauaugccccaaacuagcagaauacagaaauuggucaaagccgcaauguaacauuacaggauuugcaccuuuuucuaaggacaauucgauucggcuuuccgcugguggggacaucugggugacaagagaaccuuaugugucaugcgauccugacaaguguuaucaauuugcccuuggacagggaacaacacuaaacaacgggcauucaaaugacacaguacaugauaggaccccuuaucgaacccuauugaugaaugaguuggguguuccauuucauuugggaaccaagcaagugugcauagcaugguccagcucaaguugucacgauggaaaagcauggcugcauguuuguguaacgggggaugaugaaaaugcaacugcuagcuucauuuacaaugggaggcuuguagauaguaucgguucaugguccaaaaaaauccucaggacccaggagucggaaugcguuuguaucaauggaacuuguacaguaguaaugacugaugggagugcuucaggaaaagcugauacuaaaauacuauucauugaggaggggaaaaucguucauacuagcucauugucaggaagugcucagcaugucgaggagugcuccuguuauccucgauauccuggugucagaugugucugcagagacaacuggaaaggcuccaauaggcccaucguagauauaaauguaaaggauuauagcauuguuuccaguuaugugugcucaggacuuguuggagacacacccagaaaaaacgacagcuccagcaguagccauugcuuggauccuaacaaugaggaagguggucauggagugaaaggcugggccuuugaugauggaaaugacguguggaugggaagaacgaucagcgagaaguuacgcucaggauaugaaaccuucaaagucauugaaggcugguccaaaccuaacuccaaauugcagauaaauaggcaagucauaguugacagagguaauagguccgguuauucugguauuuucucuguugaaagcaaaagcugcaucaauaggugcuuuuauguggaguugauaaggggaaggaaacaggaaacugaagucuuguggaccucaaacaguauuguuguguuuuguggcaccucagguacauauggaacaggcucauggccugauggggcggacaucaaucucaugccuauauaa

SEQ ID NO: 46756 - RNA, 1410 nt, Artificial Sequence; identical to SEQ ID NO: 46742
  derived and/or modified CDS sequence (wt) from neuraminidase__InfluenzaA__ABC85757

SEQ ID NO: 46757 - RNA, 1410 nt, Artificial Sequence; identical to SEQ ID NO: 46753
  derived and/or modified CDS sequence (wt) from neuraminidase__InfluenzaA__ABC85768

SEQ ID NO: 46758 - RNA, 1410 nt, Artificial Sequence; identical to SEQ ID NO: 46755
  derived and/or modified CDS sequence (wt) from neuraminidase__InfluenzaA__ABC85779

SEQ ID NO: 46759 - RNA, 1410 nt, Artificial Sequence; identical to SEQ ID NO: 46742
  derived and/or modified CDS sequence (wt) from neuraminidase__InfluenzaA__ABC85790

SEQ ID NO: 46760 - RNA, 1410 nt, Artificial Sequence; identical to SEQ ID NO: 46726
  derived and/or modified CDS sequence (wt) from neuraminidase__InfluenzaA__ABC85801

SEQ ID NO: 46761 - RNA, 1410 nt, Artificial Sequence
  derived and/or modified CDS sequence (wt) from neuraminidase__InfluenzaA__ABC85812
augaauccaaaucaaaagauaauaacgauuggcucuguuucucucaccauuuccacaauaugcuucuucaugcaaauugccaucuugauaacuacuguaacauugcauuuuaagcaauaugaauucaacucccccccaaacaaccaagugaugcugugugaaccaacaauaauagaaagaaacauaacagagauaguguaucugaccaacaccaccauagagaaggaaauaugccccaaacuagcagaauacaggaauuggucaaaaccgcaaugugacauuacaggauuugcaccuuuuucuaaggacaauucgauuaggcuuuccgcugguggggacaucugggugacaagagaaccuuaugugucaugcgauccugacaaguguuaucaauuugcccuuggacagggaacaacacuaaacaacgugcauucaaaugacacaguacaugauaggaccccuuaucggacccuauugaugaaugaguuagguguuccauuucaucuggggaccaagcaagugugcauagcaugguccagcucaaguugucacgauggaaaagcauggcugcauguuuguguaacgggggaugauaaaaaugcaacugcuagcuucauuuacaaugggaggcuuguagauaguauuguuucaugguccaaaaaaauccucaggacccaggagucagaaugcguuuguaucaauggaacuuguacaguaguaaugacugaugggagugcuucaggaaaagcugauacuaaaauacuauucauugaggaggggaaaaucguucauacuagcacauugucaggaagugcucagcaugucgaggagugcuccugcuauccucgauauccuggugucagaugugucugcagagacaacuggaaaggcuccaauaggcccaucguagauauaaacauaaaggauuauagcauuguuuccaguuaugugugcucaggacuuguuggagacacacccagaaaaaacgacagcuccagcaguagccauugcuuggauccuaacaaugaagaagguggucauggagugaaaggcugggccuuugaugauggaaaugacguguggaugggaagaacgaucagcgagaaguuacgcucaggauaugaaaccuucaaagucauugaaggcugguccaacccuaauuccaaauugcagauaaauaggcaagucauaguugacagagguaauagguccgguuauucugguauuuucucuguugaaggcaaaagcugcaucaaucggugcuuuuauguggaguugauaaggggaagaaaagaggaaacugaagucuuguggaccucaaacaguauuguuguguuuuguggcaccucagguacauauggaacaggcucauggccugauggggcggacaucaaucucaugccuauauaa

SEQ ID NO: 46762 - RNA, 1410 nt, Artificial Sequence; identical to SEQ ID NO: 46753
  derived and/or modified CDS sequence (wt) from neuraminidase__InfluenzaA__ABC85823

SEQ ID NO: 46763 - RNA, 1410 nt, Artificial Sequence; identical to SEQ ID NO: 46725
  derived and/or modified CDS sequence (wt) from neuraminidase__InfluenzaA__ABC85834

SEQ ID NO: 46764 - RNA, 1410 nt, Artificial Sequence; identical to SEQ ID NO: 46726
  derived and/or modified CDS sequence (wt) from neuraminidase__InfluenzaA__ABC85845

SEQ ID NO: 46765 - RNA, 1410 nt, Artificial Sequence; identical to SEQ ID NO: 46753
  derived and/or modified CDS sequence (wt) from neuraminidase__InfluenzaA__ABC85856

SEQ ID NO: 46766 - RNA, 1410 nt, Artificial Sequence; identical to SEQ ID NO: 46725
  derived and/or modified CDS sequence (wt) from neuraminidase__InfluenzaA__ABC85867

SEQ ID NO: 46767 - RNA, 1410 nt, Artificial Sequence
  derived and/or modified CDS sequence (wt) from neuraminidase__InfluenzaA__ABC85900
augaauccaaaucaaaagauaauaacgauuggcucuguuucucucaccauuuccacaauaugcuucuucaugcaaauugccaucuugauaacuacuguaacauugcauuucaagcaauaugaauucaacucccccccaaacaaccaagugaugcugugugaaccaacaauaauagaaagaaacauaacagagauaguguaucugaccaacaccaccauagagaaggaaauaugccccaaacuagcagaauacagaaauuggucaaagccgcaauguaacauuacaggauuugcaccuuuuucuaaggacaauucgauuaggcuuuccgcugguggggacaucugggugacaagagaaccuuaugugucaugcgauccugacaaguguuaucaauuugcccuuggacagggaacaacacuaaacaacgugcauucaaaugacacaguacaugauaggaccccuuaucggacccuauugaugaaugaguuagguguuccauuucaucuggggaccaagcaagugugcauagcaugguccagcucaaguugucacgauggaaaagcauggcugcauguuuguguaacgggggaugauaaaaaugcaacugcuagcuucauuuacaaugggaggcuuguagauaguauuguuucaugguccaaagaaauccucaggacccaggagucagaaugcguuuguaucaauggaacuuguacaguaguaaugacugaugggagugcuucaggaaaagcugauacuaaaauacuauucauugaggaggggaaaaucguucauacuagcacauugucaggaagugcucagcaugucgaggagugcuccugcuauccucgauauccuggugucagaugugucugcagagacaacuggaaaggcuccaauaggcccauaguagauauaaacauaaaggauuauagcauuguuuccaguuaugugugcucaggacuuguuggagacacacccagaaaaaacgacagcuccagcaguagccauugcuuggauccuaacaaugaagaagguggucauggagugaaaggcugggccuuugaugauggaaaugacguguggauggggagaacaaucagcgagaaguuacgcucaggauaugaaaccuucaaagucauugaaggcugguccaacccuaauuccaaauugcagauaaauaggcaagucauaguugacagagguaauagguccgguuauucugguauuuucucuguugaaggcaaaagcugcaucaaucggugcuuuuauguggaguugauaaggggaagaaaagaggaaacugaagucuuguggaccucaaacaguauuguuguguuuuguggcaccucagguacauauggaacaggcucauggccugauggggcggacaucaaucucaugccuauauaa

SEQ ID NO: 46768 - RNA, 1410 nt, Artificial Sequence
  derived and/or modified CDS sequence (wt) from neuraminidase__InfluenzaA__ABC85911
augaauccaaaucaaaagauaauaacaauuggcucuguuucucucaccauugccacaauaugcuuccuuaugcaaauugccauccugguaacuacuguaacauugcauuucaagcaguaugaaugcaacucccccccaaacaaccaaguaaugcugugugaaccaacaauaauagaaagaaacauaacagagauaguguaucugaccaacaccaccauagagaaggaaauaugccccaaauuagcagaauacagaaauuggucaaagccgcaauguaacauuacaggauuugcaccuuuuucuaaggacaauucgauucggcuuuccgcugguggggacaucugggugacaagagaaccuuaugugucaugcgauccugacaaguguuaucaauuugcccuugggcagggaacaacacuaaacaacgggcauucaaaugacacaguacaugauaggaccccuuaccggacccuauugaugaaugaauuggguguuccauuucauuugggaaccaggcaagugugcauagcaugguccagcucaaguugucacgauggaaaagcauggcugcauguuuguguaacuggggaugaugaaaaugcaacugcuagcuucauuuacaaugggaggcuuguagauaguauugguucaugguccaaaaaaauacucagaacccaggagucggaaugcguuuguaucaauggaacuuguacaguaguaaugacugaugggagcgcuucaggaaaagcugauacuaaaauacuauucauugaggaggggaaaaucguucauauuagcacauugucaggaagugcucagcaugucgaggagugcuccuguuauccucgauauccuggugucagaugugucugcagagacaacuggaaaggcuccaauaggcccaucguagauauaaauguaaaggauuauagcauuguuuccaguuaugugugcucaggacuuguuggagacacacccagaaaaaacgacagcuucagcaguagccauugccuagauccuaacaaugaggaagguggucauggagugaaaggcugggccuuugaugauggaaaugacauguggaugggaagaacgaucagcgagaaguuacgcucagguuaugaaaccuucaaagucaucgaaggcugguccaaaccuaacuccaaauuacagacaaauaggcaagucauaguugaaagagguaacagguccgguuauucugguauuuucuccguugaaggcaaaagcugcaucaaucggugcuuuuauguggaguugauaaggggaaggaaagaggaaacugaagucugguggaccucaaacaguauuguuguguuuuguggcaccucagguacauauggaacaggcucauggccugauggggcggauaucaaucucaugccuauauaa

SEQ ID NO: 46769 - RNA, 1410 nt, Artificial Sequence
  derived and/or modified CDS sequence (wt) from neuraminidase__InfluenzaA__ABC85922
augaauccaaaucaaaagauaauaacaauuggcucuguuucucucaccauugccacaauaugcuuccuuaugcaaauugccauccugguaacuacuguaacauugcauuucaagcaguaugaaugcaacucccccccaaacaaccaaguaaugcugugugaaccaacaacaauagaaagaaacauaacagagauaguguaucugaccaacaccaccauagagaaggaaauaugccccaaauuagcagaauacagaaauuggucaaagccgcaauguaacauuacaggauuugcaccuuuuucuaaggacaauucgauucggcuuuccgcugguggggacaucugggugacaagagaaccuuaugugucaugcgauucugacaaguguuaucaauuugcccuugggcagggaacaacacuaaacaacgggcauucaaaugacacaguacaugauaggaccccuuaccggacccuauugaugaaugaauuggguguuccauuucauuugggaaccaggcaagugugcauagcaugguccagcucaaguugucacgauggaaaagcauggcugcauguuuguguaacuggggaugaugaaaaugcaacugcuagcuucauuuacaaugggaggcuuguagauaguauugguucaugguccaaaaaaauacucagaacccaggagucggaaugcguuuguaucaauggaacuuguacaguaguaaugacugaugggagcgcuucaggaaaagcugauacuaaaauacuauucauugaggaggggaaaaucguucauauuagcacauugucaggaagugcucagcaugucgaggagugcuccuguuauccucgauauccuggugucagaugugucugcagagacaacuggaaaggcuccaauaggcccaucguagauauaaauguaaaggauuauagcauuguuuccaguuaugugugcucaggacuuguuggagacacacccagaaaaaacgacagcuucagcaguagccauugccuagauccuaacaaugaggaagguggucauggagugaaaggcugggccuuugaugauggaaaugacguguggaugggaagaacgaucagcgagaaguuacgcucagguuaugaaaccuucaaagucaucgaaggcugguccaaaccuaacuccaaauuacagacaaauaggcaagucauaguugaaagagguaacagguccgguuauucugguauuuucuccguugaaggcaaaagcugcaucaaucggugcuuuuauguggaguugauaaggggaaggaaagaggaaacugaagucugguggaccucaaacaguauuguuguguuuuguggcaccucagguacauauggaacaggcucauggccugauggggcggauaucaaucucaugccuauauaa

SEQ ID NO: 46770 - RNA, 1410 nt, Artificial Sequence; identical to SEQ ID NO: 46178
  derived and/or modified CDS sequence (wt) from neuraminidase__InfluenzaA__ABC85933

SEQ ID NO: 46771 - RNA, 1410 nt, Artificial Sequence
  derived and/or modified CDS sequence (wt) from neuraminidase__InfluenzaA__ABC85955
augaauccaaaucaaaagauaauaacaauuggcucuguuucucucaccauugccacaauaugcuuccuuaugcaaauugccauccugguaacuacuguaacauugcauuucaagcaguaugaaugcaacucccccccaaacaaccaaguaaugcugugugaaccaacaauaauagaaagaaacauaacagagauaguguaucugaccaacaccaccauagagaaggaaauaugccccaaauuagcagaauacagaaauuggucaaagccgcaauguaacauuacaggauuugcaccuuuuucuaaggacaauucgauucggcuuuccgcugguggggacaucugggugacaagagaaccuuaugugucaugcgauccugacaaguguuaucaauuugcccuugggcagggaacaacacuaaacaacgggcauucaaaugacacaguacaugauaggaccccuuaccggacccuauugaugaaugaauuggguguuccauuucauuugggaaccaggcaagugugcauagcaugguccagcucaaguugucacgauggaaaagcauggcugcauguuuguguaacuggggaugaugaaaaugcaacugcuagcuucauuuacaaugggaggcuuguagauaguauugguucaugguccaaaaaaauacucagaacccaggagucggaaugcguuuguaucaauggaacuuguacaguaguaaugacugaugggagcgcuucaggaaaagcugauacuaaaauacuauucauugaggaggggaaaaucguucauauuagcacauugucaggaagugcucagcaugucgaggagugcuccuguuauccucgauauccuggugucagaugugucugcagagacaacuggaaaggcuccaauaggcccaucguagauauaaauguaaaggauuauagcauuguuuccaguuaugugugcucaggacuuguuggagacacacccagaaaaaacgacagcuucagcaguagccauugccuagauccuaacaaugaggaagguggucauggagugaaaggcugggccuuugaugauggaaaugacguguggaugggaagaacgaucagcgagaaguuacgcucagguuaugaaaccuucaaagucaucgaaggcugguccaaaccuaacuccaaauuacagacaaauaggcaagucauaguugaaagagguaacagguccgguuauucugguauuuucuccguugaaggcaaaagcugcaucaaucggugcuuuuauguggaguugauaaggggaaggaaagaggaaacugaagucugguggaccucaaacaguauuguuguguuuuguggcaccucagguacauauggaacaggcucauggccugauggggcggauaucaaucgcaugccuauauaa

SEQ ID NO: 46772 - RNA, 1410 nt, Artificial Sequence; identical to SEQ ID NO: 46178
  derived and/or modified CDS sequence (wt) from neuraminidase__InfluenzaA__ABC85966

SEQ ID NO: 46773 - RNA, 1410 nt, Artificial Sequence; identical to SEQ ID NO: 46178
  derived and/or modified CDS sequence (wt) from neuraminidase__InfluenzaA__ABC85977

SEQ ID NO: 46774 - RNA, 1410 nt, Artificial Sequence
  derived and/or modified CDS sequence (wt) from neuraminidase__InfluenzaA__ABC85988
augaauccaaaucaaaagauaauaacaauuggcucuguuucucucaccauugccacaauaugcuuccuuaugcaaauugccauccugguaacuacuguaacauugcauuucaagcaguaugaaugcaacucccccccaaacaaccaaguaaugcugugugaaccaacaauaauagaaagaaacauaacagagauaguguaucugaccaacaccaccauagagaagggaauaugccccaaauuagcagaauacagaaauuggucaaagccgcaauguaacauuacaggauuugcaccuuuuucuaaggacaauucgauucggcuuuccgcugguggggacaucugggugacaagagaaccuuaugugucaugcgauccugacaaguguuaucaauuugcccuugggcagggaacaacacuaaacaacgggcauucaaaugacacaguacaugauaggaccccuuaccggacccuauugaugaaugaauuggguguuccauuucauuugggaaccaggcaagugugcauagcaugguccagcucaaguugucacgauggaaaagcauggcugcauguuuguguaacuggggaugaugaaaaugcaacugcuagcuucauuuacaaugggaggcuuguagauaguauugguucaugguccaaaaaaauacucagaacccaggagucggaaugcguuuguaucaauggaacuuguacaguaguaaugacugaugggagcgcuucaggaaaagcugauacuaaaauacuauucauugaggaggggaaaaucguucauauuagcacauugucaggaagugcucagcaugucgaggagugcuccuguuauccucgauauccuggugucagaugugucugcagagacaacuggaaaggcuccaauaggcccaucguagauauaaauguaaaggauuauagcauuguuuccaguuaugugugcucaggacuuguuggagacacacccagaaaaaacgacagcuucagcaguagccauugccuagauccuaacaaugaggaagguggucauggagugaaaggcugggccuuugaugauggaaaugacguguggaugggaagaacgaucagcgagaaguuacgcucagguuaugaaaccuucaaagucaucgaaggcugguccaaaccuaacuccaaauuacagacaaauaggcaagucauaguugaaagagguaacagguccgguuauucugguauuuucuccguugaaggcaaaagcugcaucaaucggugcuuuuauguggaguugauaaggggaaggaaagaggaaacugaagucugguggaccucaaacaguauuguuguguuuuguggcaccucagguacauauggaacaggcucauggccugauggggcggauaucaaucucaugccuauauaa

SEQ ID NO: 46775 - RNA, 1410 nt, Artificial Sequence; identical to SEQ ID NO: 46378
  derived and/or modified CDS sequence (wt) from neuraminidase__InfluenzaA__ABC85999

SEQ ID NO: 46776 - RNA, 1410 nt, Artificial Sequence; identical to SEQ ID NO: 46378
  derived and/or modified CDS sequence (wt) from neuraminidase__InfluenzaA__ABC86010

SEQ ID NO: 46777 - RNA, 1410 nt, Artificial Sequence
  derived and/or modified CDS sequence (wt) from neuraminidase__InfluenzaA__ABC86021
augaauccaaaucaaaagauaauaacgauuggcucuguuucucucaccauuuccacaauaugcuucuuuaugcaaauugccaucuugauaacuacuguaacauugcauuucaagcaauaugaauucaacucccccccaaacaaccaagugaugcugugugaaccaacaauaauagaaagaaacauaacagagauaguguaucugaccaacaccaccauagagaaggaaauaugccccaaacuagcagaauacagaaauuggucaaagccgcaaugugacauuacaggauuugcaccuuuuucuaaggacaauucgauuaggcuuuccgcugguggggacaucugggugacaagagaaccuuaugugucaugcgauccugacaaauguuaucaauuugcccuuggacagggaacaacacuaaacaacgugcauucaaaugacacaguacaugauaggaccccuuaucggacccuauugaugaaugaguuagguguuccauuucaucuggggacuaagcaagugugcauagcaugguccagcucaaguugucacgauggaaaagcauggcugcauguuuguguaacgggggaugauaaaaaugcaacugcuagcuucauuuacaaugggaggcuuguagauaguauuguuucaugguccaaagaaauccucagaacccaggagucagaaugcguuuguaucaauggaacuuguacaguaguaaugacugaugggagugcuucaggaaaagcugauacuaaaauacuauucauugaggaggggaaaaucguucauacuagcacauugucaggaagugcccagcaugucgaggagugcuccugcuauccucgauauccuggugucagaugugucugcagagacaacuggaaaggcuccaauaggcccaucguagauauaaacauaaaggauuauagcauuguuuccaguuaugugugcucaggacuuguuggagacacacccagaaaaaacgacagcuccagcaguagccauugcuuggauccuaacaaugaagaagguggucauggagugaaaggcugggccuuugaugauggaaaugacguguggaugggaagaacgaucagcgagaaguuacgcucaggauaugaaaccuucaaagucauugaaggcugguccaacccuaauuccaaauugcagauaaauaggcaagucauaguugacagagguaauagguccgguuauucugguauuuucucuguugaaggcaaaagcugcaucaaucggugcuuuuauguggaguugauaaggggaagaaaagaggaaacugaagucuuguggaccucaaacaguauuguuguguuuuguggcaccucagguacauauggaacaggcucauggccugauggggcgaacaucaaucucaugccuauauaa

SEQ ID NO: 46778 - RNA, 1410 nt, Artificial Sequence
  derived and/or modified CDS sequence (wt) from neuraminidase__InfluenzaA__ABC86127
augaauccaaaucaaaagauaauaacaauuggcucuguuucucucaccauugccacaauaugcuuccuuaugcaaauugccauccugguaacuacuguaacauugcauuucaagcagcaugaaugcaacucccccccaaacaaccaaguaaugcugugugaaccaacaauaauagaaagaaacauaacagagauaguguaucugaccaacaccaccauagagaaggaaauaugccccaaacuaguagaguacagaaauuggucaaagccgcaauguaacauuacaggauuugcaccuuuuucuaaggacaauucgauucggcuuuccgcugguggggacaucugggugacaagagaaccuuaugugucaugcgauccugacaaguguuaucaauuugcccuugggcagggaacaacacuaaacaacgggcauucaaaugacacaguacaugauaggaccccuuaccggacccuauugaugaaugaauuggguguuccauuucauuugggaaccaggcaagugugcauagcaugguccagcucaaguugucacgauggaaaagcauggcugcauguuuguguaacuggggaugauaaaaaugcaacugcuagcuucauuuacaaugggaggcuuguagauaguauugguucaugguccaaaaaaauacucagaacccaggagucggaaugcguuuguaucaauggaacuuguacaguaguaaugacugaugggagcgcuucaggaaaagcugauacuaaaauacuauucauugaggaggggaaaaucguucauauuagcacauugucaggaagugcucagcaugucgaggagugcuccuguuauccucgauauccuggugucagaugugucugcagagacaacuggaaaggcuccaauaggcccauuguagauauaaauguaaaggauuauagcauuguuuccaguuaugugugcucaggacuuguuggagacacacccagaaaaaacgacagcuucagcaguagccauugccuagauccuaacaaugaggaagguggucauggagugaaaggcugggccuuugaugauggaaaugacguguggaugggaagaacgaucagcgagaaguuacgcucagguuaugaaaccuucaaagucaucgaaggcugguccaaaccuaacuccaaauuacagauaaauaggcaaguuauaguugaaagagguaacagguccgguuauucugguauuuucuccguugaaggcaaaagcugcaucaaucggugcuuuuauguggaguugauaaggggaaggaaagaggaaacugaagucugguggaccucaaacaguauuguuguguuuuguggcaccucagguacauauggaacaggcucauggccugauggggcggauaucaaucucaugccuauauaa

SEQ ID NO: 46779 - RNA, 1410 nt, Artificial Sequence
  derived and/or modified CDS sequence (wt) from neuraminidase__InfluenzaA__ABC86140
augaauccaaaucaaaagauaauaacaauuggcucugucucucucaccauugcaacaauaugcuuccuuaugcaaauugccauccugguaacuacuguaacauugcauuucaagcaauaugagugcagcucccccccaaacaaccaaguaaugccgugugaaccaauaauaauagaaagaaacauaacagagauaguguauuugacuaacaccaccauagagaaagagauaugccccaaacuaguggaauacagaaauuggucaaagccgcaauguaaaauuacaggauuugcacccuuuucuaaggacaauucaauucggcuuucugcugguggggacauuugggugacgagagaaccuuaugugucaugcgauccuggcaaguguuaucaauuugcacucgggcaggggaccacacuagacaacaagcauucaaaugacacaauacaugauaggaccccuuaucgaacccuauugaugaaugaguuggguguuccauuucauuugggaaccaggcaaguguguauagcaugguccagcucaaguugucacgauggaaaagcauggcugcauguuugugucacugggcaugauaaaaaugcaacugcuagcuucauuuacgaugggaggcuuguagacaguauugguucaugguccaaaaauauccucaggacccaggagucggaaugcguuuguaucaaugggacuuguacaguaguaaugacugauggaagugcuucagaaagagcugauacuaaaauacuauucauugaagaggggaaaaucguucauauuagcccauugucaggaagugcucagcauguagaggaguguuccuguuauccucgauauccuggugucagaugugucugcagagacaacuggaaaggcuccaauaggcccgucguagauauaaaugugaaagauuauagcauuguuuccaguuaugugugcucagggcuuguuggcgacacacccagaaaaaacgacagaucuagcaguagcuauugccggaauccuaacaaugagaaagggaaucauggagugaaaggcugggccuuugacgauggaaaugacguguggaugggaagaacgaucagugaggagucacgcucagguuaugaaaccuucaaagucauuggugguugguccacaccuaauuccaaauugcagauaaauaggcaagucauaguugacagcgauaauagguccgguuauucugguauuuucucuguugagggcaaaagcugcaucaauaggugcuuuuauguggaguugauaaggggaagggaacaggaaacuagagucugguggaccucaaacaguauuguuguguuuuguggcacuucagguaccuauggaacaggcucauggccugauggagcggacaucaaucucaugccuauauaa

SEQ ID NO: 46780 - RNA, 1410 nt, Artificial Sequence
  derived and/or modified CDS sequence (wt) from neuraminidase__InfluenzaA__ABC86151
augaauccaaaucaaaagauaauaacaauuggcucuguuucucucaccauugcaacaauaugcuuccuuaugcaaauugccauccugguaacuacuguaacauugcauuucaagcaauaugagugcagcucccccccaaacaaccaaguaaugccgugugaaccaauaauaauagaaagaaacauaacagagauaguguauuugacuaacaccaccauagagaaagagauaugccccaaacuaguagaauacagaaauuggucaaagccgcaauguaaaauuacaggauuugcaccuuuuucuaaggacaauucaauucggcuuuccgcugguggagacauuugggugacgagagaaccuuaugugucaugcgauccuggcaaguguuaucaauuugcacuugggcagggaaccacacuaaacaacaagcauucaaaugacacaguacaugauaggaccccuuaucgaacccucuugaugaaugaguuggguguuccauuucauuugggaaccaagcaagugugcauagcaugguccagcucaaguugucacgauggaaaagcauggcugcauguuugugucacugggcaugauaaaaaugcaacugcuagcuucauuuacgaugggaggcuuguagacaguauugguucaugguccaaaaauauccucaggacccaggagucggaaugcguuuguaucaaugggacuuguacaguaguaaugacugauggaagugcuucagaaagagcugauacuaaaauacuauucauugaagaggggaaaaucguucauauuagcccauugucaggaagugcucagcauguagaggaguguuccuguuauccucgauauccuggugucagaugugucugcagagacaacuggaaaggcuccaauaggcccaucguagauauaaaugugaaagauuauagcauuguuuccaguuaugugugcucagggcuuguuggcgacacacccagaaaaaacgacagauccagcaguagcuauugccggaauccuaacaaugagaaagggagucauggagugaaaggcugggccuuugacgauggaaaugacguguggaugggaagaacgaucggcgaggaguuacgcucagguuaugaaaccuucaaagucauuggugguugguccacaccuaacuccaaauugcagauaaauaggcaagucauaguugacagcgguaauagguccgguuauucugguauuuucucuguugagggcaaaagcugcaucaauaggugcuuuuauguggaguugauaaggggaagggaacaggaaacuagagucugguggaccucaaacaguauuguuguguuuuguggcaccucagguacauauggaacaggcucauggccugauggagcggacaucaaucucaugccuauauaa

SEQ ID NO: 46781 - RNA, 1413 nt, Artificial Sequence
  derived and/or modified CDS sequence (wt) from neuraminidase__InfluenzaA__ABC86240
augaauccaaaucaaaaaauaauaaccauuggaucaaucaguguggcaaucggaauaauuagucuaauauugcaaauaggaaauauuauuucaauaugggcuagccacucaauccaaacuggaagucaaaacuacacuggaauaugcaaccaaaaaaucauuacauaugaaaauagaaccuggguaaaucaaacauauguuaauauuaacaacacuaauguuguugcuggaaaggacaaaaccucgaugacauuggccggcaauucaucucuuugcccuauccguggaugggcaauauacacaaaagacaacagcauaagaauugguuccaaaggagauguuuuugucauaagagagccuuuuauaucauguucucacuuggaaugcagaaccuuuuuucugacccaaggugcucuauuaaaugacaagcauucaaaugggaccauuaaggacagaagcccuuuuagggccuuaaugagcuguccucugggugaagcuccgucuccauacaauucaagauuugaaucaguugcuuggucagcaagcgcaugccaugauggccugggcuggcuaacaaucggaauuucugguccagauaauggagcaguggcuguacuaaaauacaacggcauaauaacugaaaccauaaaaaguuggaaaaagcaaauccuaagaacacaagagucugaaugugucugugugaacgguucauguuuuaccauaaugaccgauggcccgaguaacagggccgcaucguacagaaucuucaaaauugagaaggggagaguuacuaaaucaauagaguuggaugcacccaauuaccauuacgaggaauguuccuguuauccagacaccggcacaguaaugugugugugcagggacaauuggcacgguucaaaucgaccuuggguguccuuuaaucaaaaccuggauuaucaaauaggauacaucugcagugggguguucggugacaauccgcgucccaaagauggagaaggcagcuguaauccagugacuguugauggagcagacggaguaaagggguuuucauacagauaugguaaugguguuuggauaggaaggacuaaaaguaacagacuaagaaagggauuugagaugauuugggauccuaauggauggacagauaccgacagugauuucucaaugaaacaggaugucguggcaaugacugauuggucaggguacagcggaaguuuuguucaacauccugagcuaacaggauuggacuguaugagaccuugcuucuggguugaauuagucagagggcuaccuagagaaaauacaacaaucuggacuagugggagcagcauuucuuuuuguggcgugaauagcgagacugcaaacuggucuuggccagacggugcugaguugccauucaccauugacaaguag

SEQ ID NO: 46782 - RNA, 1410 nt, Artificial Sequence
  derived and/or modified CDS sequence (wt) from neuraminidase__InfluenzaA__ABC97377
augaauccaaaucaaaagauaauaacaauuggcucugucucucucaccauugcaacaauaugcuuccucaugcagauugccauccugguaacuacuguaacauugcauuucaagcaauaugagugcgacucccccgcgaacaaccaaguaaugccgugugaaccaauaauaauagaaaggaacauaacagagauaguguauuugacuaacaccaccauagagaaagagauaugccccaaauuaguggaauacaggaauuggucaaagccgcaauguaaaauuacaggauuugcaccuuuuucuaaggacaauucaauucggcuuucugcugguggggacauuugggugacgagagaaccuuaugugucaugcgauccuggcaaguguuaucaauuugcacucgggcaggggaccacacuagacaacaaacauucaaaugacacaauacaugauagaaccccucaucgaacccuauugaugaaugaguuggguguuccauuucauuugggaaccaggcaaguguguauagcaugguccagcucaaguugucacgauggaaaagcauggcugcauguuugugucacuggguaugauaaaaaugcaacugcuagcuucauuuacgaugggaggcuuguagacaguauugguucauggucucaaaauauccucaggacccaggagucggaaugcguuuguaucaaugggacuuguacaguaguaaugacugauggaagugcuucaggaagcgcugauacuaaaauacuauucauugaagaggggaaaauuguucauauuagcccauugucaggaagugcucagcauguagaggaguguuccuguuauccucgauauccuggugucagauguaucugcagagacaacuggaaaggcucuaauaggcccgucguagauauaaaugugaaagauuauagcauugauuccaguuaugugugcucagggcuuguuggcgacacacccagaaacaacgacagaucuagcaauagcuauugccggaauccuaacaaugagaaagggaaucacggagugaaaggcugggccuuugacgauggaaaugacguguggaugggaagaacgaucagcgaggauucacgcucagguuaugaaaccuucaaagucauuggugguugguccacaccuaauuccaaauugcagauaaauaggcaagucauaguugacagcgauaauaggucagguuauucugguauuuucucuguugagggcaaaagcugcaucaauagguguuuuuauguggaguugauaaggggaagggaacaggaaacuagaguaugguggaccucaaacaguauuguuguguuuuguggcacuucagguaccuaugggacaggcucauggccugauggggcggacaucaaucucaugccuauauaa

SEQ ID NO: 46783 - RNA, 1410 nt, Artificial Sequence
  derived and/or modified CDS sequence (wt) from neuraminidase__InfluenzaA__ABD15452
augaauccaaaucaaaagauaauaacaauuggcucuguuucucucaccauugccacaauaugcuuccuuaugcaaauugccauccugguaacuacuguaacauugcauuucaagcagcaugaaugcaacucccccccaaacaaccaaguaaugcugugugaaccaacaauaauagaaagaaacauaacagagauaguguaucugaccaacaccaccauagagaaggaaauaugccccaaacuagcagaauacagaaauuggucaaagccgcaauguaacauuacaggauuugcaccuuuuucuaaggacaauucgauucggcuuuccgcugguggugacaucugggugacaagagaaccuuaugugucaugcgacccugacaaguguuaucaauuugcccuugggcagggaacaacacuaaacaacgggcauucaaaugacacaguacaugauaggaccccuuaccggacccuauugaugaaugaauuggguguuccauuucauuugggaaccaggcaagugugcauagcaugguccagcucaaguugucacgauggaaaagcauggcugcauguuuguguaacuggggaugauaaaaaugcaacugcuagcuucauuuacaaugggaggcuuguagauaguauugguucaugguccaaaaaaauacucagaacccaggagucggaaugcguuuguaucaauggaacuuguacaguaguaaugacugaugggagcgcuucaggaaaagcugauacuaaaauacuauucauugaggaggggaaaaucguucauauuagcacauugucaggaagugcucagcaugucgaggaguguuccuguuauccucgauauccuggugucagaugugucugcagagacaacuggaaaggcuccaauaggcccauuguagauauaaauguaaaggauuauagcauuguuuccaguuaugugugcucaggacuuguuggagacacacccagaaaaaacgacagcuccagcaguagccauugccuagauccuaacaaugaggaagguggucauggagugaaaggcugggccuuugaugauggaaaugacguguggaugggaagaacgaucagcgagaaguuacgcucagguuaugaaaccuucaaagucaucgaaggcugguccaaaccuaacuccaaauuacagauaaauaggcaaguuauaguugaaagagguaacagguccgguuauucugguauuuucuccguugaaggcaaaagcugcaucaaucggugcuuuuauguggaguugauaaggggaaggaaagaggaaacugaagucugguggaccucaaacaguauuguuguguuuuguggcaccucagguacauauggaacaggcucauggccugauggggcggacaucaaucucaugccuauauaa

SEQ ID NO: 46784 - RNA, 1410 nt, Artificial Sequence
  derived and/or modified CDS sequence (wt) from neuraminidase__InfluenzaA__ABD15463
augaauccaaaucaaaagauaauaacaauuggcucuguuucucucaccauugccgcaauaugcuuccuuaugcaaauugccauccugguaacuacuguaacauugcauuucaagcagcaugaaugcaacucccccccaaacaaccaaguaaugcugugugaaccaacaauaauagaaagaaacauaacagagauaguguaucugaccaacaccaccauagagaaggaaauaugccccaaacuagcagaauacagaaauuggucaaagccgcaauguaacauuacaggauuugcaccuuuuucuaaggacaauucgauucggcuuuccgcugguggggacaucugggugacaagagaaccuuaugugucaugcgauccugacaaguguuaucaauuugcccuugggcagggaacaacacuaaacaacgggcauucaaaugacacaguacaugauaggaccccuuaccggacccuauugaugaaugaauuggguguuccauuucauuugggaaccaggcaagugugcauagcaugguccagcucaaguugucacgauggaaaagcguggcugcauguuuguguaacuggggaugauaaaaaugcaacugcuagcuucauuuacaaugggaggcuuguagauaguauugguucaugguccaaaaaaauacucagaacccaggagucggaaugcguuuguaucaauggaacuuguacagugguaaugacugauggaagcgcuucaggaaaagcugauacuaaaauacuauucauugaggaggggaaaaucguucauauuagcacauugucaggaagugcucagcaugucgaggagugcuccuguuauccucgauauccuggugucagaugugucugcagagacaacuggaaaggcuccaauaggcccauuguagauauaaauguaaaggauuauagcauuguuuccaguuaugugugcucaggacuuguuggagacacacccagaaaaaacgacagcuucagcaguagccauugccuagauccuaacaaugaggaagguggucauggagugaaaggcugggccuuugaugauggaaaugacguguggaugggaagaacgaucagcgagaaguuacgcucagguuaugaaaccuucaaagucaucgaaggcugguccaaaccuaacuccaaauuacagauaaauaggcaaguuauaguugaaagagguaacagguccgguuauucugguauuuucuccguugaaggcaaaagcugcaucaaucggugcuuuuauguggaguugauaaggggaaggaaagaggaaacugaagucugguggaccucaaacaguauuguuguguuuuguggcaccucagguacauauggaacaggcucauggccugauggggcggauaucaaucucaugccuauauaa

SEQ ID NO: 46785 - RNA, 1410 nt, Artificial Sequence; identical to SEQ ID NO: 46217
  derived and/or modified CDS sequence (wt) from neuraminidase__InfluenzaA__ABD15474

SEQ ID NO: 46786 - RNA, 1410 nt, Artificial Sequence
  derived and/or modified CDS sequence (wt) from neuraminidase__InfluenzaA__ABD15485
augaauccaaaucaaaagauaauaacaauuggcucuguuucucucaccauugccacaauaugcuuccuuaugcaaauugccaucuugguaacuacuguaacauugcauuucaagcagcaugaaugcaacucccccccaaacaaccaaguaaugcugugugaaccaacaauaauagaaagaaacauaacagagauaguguaucugaccaacaccaccauagagaaggaaauaugccccaaacuagcagaauacagaaauuggucaaagccgcaauguaacauuacaggauuugcaccuuuuucuaaggacaauucgauucggcuuuccgcugguggggacaucugggugacaagagaaccuuaugugucaugcgauccugacaaguguuaucaauuugcccuugggcagggaacaacacuaaacaacgggcauucaaaugacacaguacaugauaggaccccuuaccggacccuauugaugaaugaauuggguguuccauuucauuugggaaccaggcaagugugcauagcaugguccagcucaaguugucacgauggaaaagcauggcugcauguuuguguaacuggggaugauaaaaaugcaacugcuagcuucauuuacaaugggaggcuuguagauaguauugguucaugguccaaaaaaauacucagaacccaggagucggaaugcguuuguaucaauggaacuuguacaguaguaaugacugaugggagcgcuucaggaaaagcugauacuaaaauacuauucauugaggaggggaaaaucguucauauuagcacauugucaggaagugcucagcaugucgaggagugcuccuguuauccucgauauccuggugucagaugugucugcagagacaacuggaaaggcuccaauaggcccauuguagauauaaauguaaaggauuauagcauuguuuccaguuaugugugcucaggacuuguuggagacacacccagaaaaaacgacagcuucagcaguagccauugccuagauccuaacaaugaggaagguggucauggagugaaaggcugggccuuugaugauggaaaugacguguggaugggaagaacgaucagcgagaaguuacgcucagguuaugaaaccuucaaagucaucgaaggcugguccaaaccuaacuccaaauuacagauaaauaggcaaguuauaguugaaagagguaacagguccgguuauucuggcauuuucuccguugaaggcaaaagcugcaucaaucggugcuuuuauguggaguugauaaggggaaggaaagaggaaacugaagucugguggaccucaaacaguauuguuguguuuuguggcaccucagguacauauggaacaggcucauggccugauggggcgaacaucaaucucaugccuauauaa

SEQ ID NO: 46787 - RNA, 1410 nt, Artificial Sequence
  derived and/or modified CDS sequence (wt) from neuraminidase__InfluenzaA__ABD15496
augaauccaaaucaaaagauaauaacaauuggcucuguuucucucaccauugccgcaauaugcuuccuuaugcaaauugccauccugguaacuacuguaacauugcauuucaagcagcaugaaugcaacucccccccaaacaaccaaguaaugcugugugagccaacaauaauagaaagaaacauaacagagauaguguaucugaccaacaccaccauagagaaggaaauaugccccaaacuagcagaauacagaaauuggucaaagccgcaauguaacauuacaggauuugcaccuuuuucuaaggacaauucgauucggcuuuccgcugguggggacaucugggugacaagagaaccuuaugugucaugcgauccugacaaguguuaucaauuugcccuugggcagggaacaacacuaaacaacgggcauucaaaugacacaguacaugauaggaccccuuaccggacccuauugaugaaugaauuggguguuccauuucauuugggaaccaggcaagugugcauagcaugguccagcucaaguugucacgauggaaaagcguggcugcauguuuguguaacuggggaugauaaaaaugcaacugcuagcuucauuuacaaugggaggcuuguagauaguauugguucaugguccaaaaaaauacucagaacccaggagucggaaugcguuuguaucaauggaacuuguacagugguaaugacugauggaagcgcuucaggaaaagcugauacuaaaauacuauucauugaggaggggaaaaucguucauauuagcacauugucaggaagugcucagcaugucgaggagugcuccuguuauccucgauauccuggugucagaugugucugcagagacaacuggaaaggcuccaauaggcccauuguagauauaaauguaaaggauuauagcauuguuuccaguuaugugugcucaggacuuguuggagacacacccagaaaaaacgacagcuucagcaguagccauugccuagauccuaacaaugaggaagguggucauggagugaaaggcugggccuuugaugauggaaaugacguguggaugggaagaacgaucagcgagaaguuacgcucagguuaugaaaccuucaaagucaucgaaggcugguccaaaccuaacuccaaauuacagauaaauaggcaaguuauaguugaaagagguaacagguccgguuauucugguauuuucuccguugaaggcaaaagcugcaucaaucggugcuuuuauguggaguugauaaggggaaggaaagaggaaacugaagucugguggaccucaaacaguauuguuguguuuuguggcaccucagguacauauggaacaggcucauggccugauggggcggauaucaaucucaugccuauauaa

SEQ ID NO: 46788 - RNA, 1410 nt, Artificial Sequence
  derived and/or modified CDS sequence (wt) from neuraminidase__InfluenzaA__ABD15507
augaauccaaaucaaaagauaauaacaauuggcucuguuucucucaccauugccacaauaugcuuccuuaugcaaauugccaucuugguaacuacuguaacauugcauuucaagcagcaugaaugcaacucccccccaaacaaccaaguaaugcugugugaaccaacaauaauagaaagaaacauaacagagauaguguaucugaccaacaccaccauagagaaggaaauaugccccaaacuagcagaauacagaaauuggucaaagccgcaauguaacauuacaggauuugcaccuuuuucuaaggacaauucgauucggcuuuccgcugguggggacaucugggugacaagagaaccuuaugugucaugcgauccugacaaguguuaucaauuugcccuugggcagggaacaacacuaaacaacgggcauucaaaugacacaguacaugauaggaccccuuaccggacccuauugaugaaugaacuggguguuccauuucauuugggaaccaggcaagugugcauagcaugguccagcucaaguugucacgauggaaaagcauggcugcauguuuguguaacuggggaugauaaaaaugcaacugcuagcuucauuuacaaugggaggcuuguagauaguauugguucaugguccaaaaaaauacucagaacccaggagucggaaugcguuuguaucaauggaacuuguacaguaguaaugacugaugggagcgcuucaggaaaagcugauacuaaaauacuauucauugaggaggggaaaaucguucauauuagcacauugucaggaagugcucagcaugucgaggagugcuccuguuauccucgauauccuggugucagaugugucugcagagacaacuggaaaggcuccaauaggcccauuguagauauaaauguaaaggauuauagcauuguuuccaguuaugugugcucaggacuuguuggagacacacccagaaaaaacgacagcuucagcaguagccauugccuagauccuaacaaugaggaagguggucauggagugaaaggcugggccuuugaugauggaaaugacguguggaugggaagaacgaucagcgagaaguuacgcucagguuaugaaaccuucaaagucaucgaaggcugguccaaaccuaacuccaaauuacagauaaauaggcaaguuauaguugaaagagguaacagguccgguuauucuggcauuuucuccguugaaggcaaaagcugcaucaaucggugcuuuuauguggaguugauaaggggaaggaaagaggaaacugaagucugguggaccucaaacaguauuguuguguuuuguggcaccucagguacauauggaacaggcucauggccugauggggcggacaucaaucucaugccuauauaa

SEQ ID NO: 46789 - RNA, 1413 nt, Artificial Sequence
  derived and/or modified CDS sequence (wt) from neuraminidase__InfluenzaA__ABD15518
augaauccaaaucaaaaaauaauaaccauuggaucaaucaguauagcaaucggaauaauuagucuaauguugcaaauaggaaauauuauuucaauaugggcuagucacucaauccaaacuggaagucaaaaccacacuggaauaugcaaccaaagaaucaucacauaugaaaacagcaccugggugaaucacacauauguuaauauuaacaacacuaauguuguugcuggaaaggacaaaacuucagugacauuggccggcaauucaucucuuuguucuaucaguggaugggcuauauacacaaaagacaacagcauaagaauuggcuccaaaggagauguuuuugucauaagagaaccuuucauaucauguucucacuuggaaugcagaaccuuuuuucugacccaaggugcucuauuaaaugacaaacauucaaauggaaccguuaaggacagaaguccuuauagggccuuaaugagcuguccucuaggugaagcuccguccccauacaauucaaaguuugaaucaguugcauggucagcaagcgcaugccaugauggcaugggcugguuaacaaucggaauuucugguccagacaauggagcuguggcuguacuaaaauacaacggaauaauaacugaaaccauaaaaaguuggaaaaagcgaauauugagaacacaagagucugaaugugucugugugaacgggucauguuucaccauaaugaccgauggcccgaguaaugggggcgccucguacaaaaucuucaagaucgaaaaggggaagguuacuaaaucaauagaguugaaugcacccaauuuccauuaugaggaauguuccuguuacccagacacuggcacagugauguguguaugcagggacaacuggcaugguucaaaucgaccuugggugucuuuuaaucaaaacuuggauuaucaaauaggauacaucugcaguggaguguucggugacaauccgcgucccaaagauggaaagggcagcuguaauccagugacuguugauggagcagacggaguuaagggguuuucauacaaauaugguaaugguguuuggauaggaaggacuaaaaguaacagacuuagaaagggguuugagaugauuugggauccuaauggauggacagauaccgacagugauuucucagugaaacaggauguuguggcaauaacugauuggucaggguacagcggaaguuucguucaacauccugaguuaacaggauuggacuguauaagaccuugcuucuggguugaguuagucagaggacugccuagagaaaauacaacaaucuggacuagugggagcagcauuucuuuuuguggcguugauagugauacugcaaacuggucuuggccagacggugcugaguugccguucaccauugacaaguag

SEQ ID NO: 46790 - RNA, 1410 nt, Artificial Sequence; identical to SEQ ID NO: 46344
  derived and/or modified CDS sequence (wt) from neuraminidase__InfluenzaA__ABD15529

SEQ ID NO: 46791 - RNA, 1410 nt, Artificial Sequence; identical to SEQ ID NO: 46526
  derived and/or modified CDS sequence (wt) from neuraminidase__InfluenzaA__ABD15551

SEQ ID NO: 46792 - RNA, 1410 nt, Artificial Sequence
  derived and/or modified CDS sequence (wt) from neuraminidase__InfluenzaA__ABD15562
augaauccaaaucaaaagauaauaacgauuggcucuguuucucucacuauugccacaauaugcuuccuuaugcaaauugccauccugguaacuacuguaacauugcauuucaagcaauaugaaugcagcucucccccaaacaaccaaguaaugcugugugaaccaacaauaauagaaagaaacauaacagagauaguguaucugaccaacaccaccauagagaaggaaauaugccccaaacuagcagaauacagaaauuggucaaagccgcaauguaaaauuacaggauuugcaccuuuuucuaaggacaauucaauucggcuuuccgcugguggggacauuugggugacaagggaaccuuaugugucgugugauccugacaaguguuaucaauuugcccuuggacagggaacaacacuaaacaacaggcauucaaaugacacaguacaugauaggaccccuuaucgaacccuauugaugaaugaguuggguguuccauuucauuugggaaccaagcaagugugcauagcaugguccagcucaaguugucacgauggaaaagcauggcugcauguuuguguaacugggcaugaugaaaaugcaacugcuagcuucauuuacgaugggaggcuuguagauaguauugguucaugguccaaaaaaauccucaggacccaggagucggaaugcguuuguaucaauggaacuuguacaauaguaaugacugaugggagugcuucaggaagagcugauacuaaaauacuauucauugaggaggggaaaaucguucauaucagcccacugucaggaagugcucagcaugucgaggagugcuccuguuauccucgauauccuggugucagaugugucugcagagacaacuggaaaggcuccaauaggcccaucguagauauaaauguaaaggauuauagcauuguuuccaguuaugugugcucaggacuuguuggagacacacccagaaaaaacgacagcuccagcaguagucauugccugaauccuaacaaugaggaagggggucauggagugaaaggcugggccuuugaugauggaaaugacguguggaugggaagaacgaucagcgagaaguuccgcucagguuaugaaaccuucaaagucauugaaggcugguccaaaccuaacuccaaauugcagauaaauaggcaagucauaguugacagagguaauagguccgguuauucugguauuuucucuguugaaggcaaaagcugcaucaaucggugcuuuuauguggaguugauaaggggaaggaaacaggaaacugaagucugguggaccucaaacaguauuguuguguuuuguggcaccucagguacauauggaacaggcucauggccugauggggcggacaucaaucucaugccuauauaa

SEQ ID NO: 46793 - RNA, 1410 nt, Artificial Sequence
  derived and/or modified CDS sequence (wt) from neuraminidase__InfluenzaA__ABD15573
augaauccaaaucaaaagauaauaacgauuggcucuguuucucucacuauugccacaauaugcuuccuuaugcaaauugccauccugguaacuacuguaacauugcauuucaagcaauaugaaugcaacucccccccaaacaaccaaguaaugcugugugaaccaacaauaauagaaagaaacauaacagagauaguguaucugaccaacaccaccauagagaaggaaauaugccccaaacuagcagaauacagaaauuggucaaagccgcaauguaaaauuacaggauuugcaccuuuuucaaaggacaauucaauucggcuuuccgcugguggggacauuugggugacaagagaaccuuaugugucaugcgauccugacaaguguuaucaauuugcccuuggacagggaacaacacuaaacaacgggcauucaaaugacacaguacaugauaggaccccuuaucgaacccuauugaugaaugaguuggguguuccauuucauuuaggaaccaagcaagugugcauggcaugguccagcucaaguugucacgauggaaaagcauggcugcauguuuguguaacugggcaugaugaaaaugcaacugcuagcuucauuuacgaugggaggcuuguagauaguauugguucaugguccaaaaaaauccucaggacccaggagucggaaugcguuuguaucaauggaacuuguacaguaguaaugacugaugggagugcuucaggaagagcugauacuaaaauacuauucauugaggaggggaaaaucguucauauuagccaauugucaggaagugcucagcaugucgaggagugcuccuguuauccucgauauccuggugucagaugugucugcagagacaacuggaaaggcuccaauaggcccaucguagauauaaauguaaaggaucauagcauuguuuccaguuaugugugcucaggacuuguuggagacacacccagaaaaaacgacagcuccagcaguagccauugccugaauccuaacaaugaagaagggggucauggagugaaaggcugggccuuugaugauggaaaugacguguggaugggaagaacgaucagcgagaaguuacgcucagguuaugaaaccuucaaagucauugaaggcugguccaaaccuaacuccaaauugcagauaaauaggcaagucauaguugacagagguaauagguccgguuauucugguauuuucucuguugaaggcaaaagcugcaucaaucggugcuuuuauguggaguugauaaggggaaggaaacaggaaacugaagucugguggaccucaaacaguauuguuguguuuugugguaccucagguacauauggaacaggcucauggccugauggggcggacaucaaucucaugccuauauaa

SEQ ID NO: 46794 - RNA, 1410 nt, Artificial Sequence
  derived and/or modified CDS sequence (wt) from neuraminidase__InfluenzaA__ABD15584
augaauccaaaucaaaagauaauaacgauuggcucuguuucucucacuauugccacaauaugcuuccuuaugcaaauugccauccugguaacuacuguaacauugcauuucaagcaauaugaaugcagcucucccccaaacaaccaaguaaugcugugugaaccaacaauaauagaaagaaacauaacagagauaguguaucugaccaacaccaccauagagaaggaaauaugccccaaacuagcagaauacagaaauuggucaaagccgcaauguaaaauuacaggauuugcaccuuuuucuaaggacaauucaauucggcuuuccgcugguggggacauuugggugacaagggaaccuuaugugucgugcgauccugacaaguguuaucaauuugcccuuggacagggaacaacacuaaacaacaggcauucaaaugacacaguacaugauaggaccccuuaucgaacccuauugaugaaugaguuggguguuccauuucauuugggaaccaagcaagugugcauagcaugguccagcucaaguugucacgauggaaaagcauggcugcauguuuguguaacugggcaugaugaaaaugcaacugcuagcuucauuuacgaugggaggcuuguagauaguauugguucaugguccaaaaaaauccucaggacccaggagucggaaugcguuuguaucaauggaacuuguacaguaguaaugacugaugggagugcuucaggaagagcugauacuaaaauacuauucauugaggaggggaaaaucguucauaucagcccacugucaggaagugcucagcaugucgaggagugcuccuguuauccucgauauccuggugucagaugugucugcagagacaacuggaaaggcuccaauaggcccaucguagauauaaauguaaaggauuauagcauuguuuccaguuaugugugcucaggacuuguuggagacacacccagaaaaaacgacagcuccagcaguagucauugccugaauccuaacaaugaggaagggggucauggagugaaaggcugggccuuugaugaugaaaaugacguguggaugggaagaacgaucagcgagaaguuccgcucagguuaugaaaccuucaaagucauugaaggcugguccaaaccuaacuccaaauugcagauaaacaggcaagucauaguugacagagguaauagguccgguuauucugguauuuucucuguugaaggcaaaagcugcaucaaucggugcuuuuauguggaguugauaaggggaaggaaacaggaaacugaagucugguggaccucaaacaguauuauuguguuuuguggcaccucagguacauauggaacaggcucauggccugauggggcggacaucaaucucaugccuauauaa

SEQ ID NO: 46795 - RNA, 1410 nt, Artificial Sequence
  derived and/or modified CDS sequence (wt) from neuraminidase__InfluenzaA__ABD15595
augaauccaaaucaaaagauaauaacgauuggcucuguuucucucacuauugccacaauaugcuuccuuaugcaaauugccauccugguaacuacuguaacauugcauuucaagcaauaugaaugcaacucccccccgaacaaccaaguaaugcugugugaaccaacaauaauagaaagaaauauaacagagauaguguaucugaccaacaccaccauagagaaggaaauaugccccaaacuagcagaauacagaaauuggucaaagccgcaauguaaaauuacaggauuugcaccuuuuucaaaggacaauucaauucggcuuucagcugguggggacauuugggugacaagagaaccuuaugugucaugcgauccugacaaguguuaucaauuugcccuuggacagggaacaacacuaaacaacgggcauucaaaugacacaguacaugauaggaccccuuaucgaacccuauugaugaaugaguuggguguuccauuucauuuaggaaccaagcaagugugcauagcaugguccagcucaaguugucacgauggaaaagcauggcugcauguuuguguaacugggcaugaugaaaaugcaacugcuagcuucauuuacgaugggaggcuuguagauaguauugguucaugguccaaaaaaauccucaggacccaggagucggaaugcguuuguaucaauggaacuuguacaguaguaaugacugaugggagugcuucaggaagagcugauacuaaaauacuauucauugaggaggggaaaaucguucauauuagccaauugucaggaagugcucagcaugucgaggagugcuccuguuauccucgauauccuggugucagaugugucugcagagacaacuggaaaggcuccaauaggcccaucguagauauaaauguaaaggaucauagcauuguuuccaguuaugugugcucaggacuuguuggagacacacccagaaaaaacgacagcuccagcaguagccauugccugaauccuaacaaugaagaagggggucauggagugaaaggcugggccuuugaugauggaaaugacguguggaugggaagaacgaucagcgagaaguuacgcucagguuaugaaaccuucaaagucauugaaggcugguccaaaccuaacuccaaauugcagauaaauaggcaagucauaguugacagagguaauagguccgguuauucugguauuuucucuguugaaggcaaaagcugcaucaaucggugcuuuuauguggaguugauaaggggaaggaaacaggaaacugaagucugguggaccucaaacaguauuguuguguuuugugguaccucagguacauauggaacaggcucauggccugauggggcggacaucaaucucaugccuauauaa

SEQ ID NO: 46796 - RNA, 1410 nt, Artificial Sequence
  derived and/or modified CDS sequence (wt) from neuraminidase__InfluenzaA__ABD15606
augaauccaaaucaaaagauaauaacgauuggcucuguuucucucacuauugccacaauaugcuuccuuaugcaaauugccauccugguaacuacuguaacauugcauuucaagcaauaugaaugcaacucccccccaaacaaccaaguaaugcugugugaaccaacaauaauagaaagaaacauaacagagauaguguaucugaccaacaccaccauagagaaggaaauaugccccaaacuagcagaauacagaaauuggucaaagccgcaauguaaaauuacaggauuugcaccuuuuucaaaggacaauucaauucggcuuuccgcugguggggacauuugggugacaagagaaccuuaugugucaugcgauccugacaaguguuaucaauuugcccuuggacagggaacaacacuaaacaacgggcauucaaaugacacaguacaugauaggaccccuuaucgaacccuauugaugaaugaguuggguguuccauuucauuuaggaaccaagcaagugugcauagcaugguccagcucaaguugucacgauggaaaagcauggcugcauguuuguguaacugggcaugaugaaaaugcaacugcuagcuucauuuacgaugggaggcuuguagauaguauugguucaugguccaaaaaaauccucaggacccaggagucggaaugcguuuguaucaauggaacuuguacaguaguaaugacugaugggagugcuucaggaagagcugauacuaaaauacuauucauugaggaggggaaaaucguucauauuagccaauugucaggaagugcucagcaugucgaggagugcuccuguuauccucgauauccuggugucagaugugucugcagagacaacuggaaaggcuccaauaggcccaucguagauauaaauguaaaggaucauagcauuguuuccaguuaugugugcucaggacuuguuggagacacacccagaaaaaacgacagcuccagcaguagccauugccugaauccuaacaaugaagaagggggucauggagugaaaggcugggccuuugaugauggaaaugacguguggaugggaagaacaaucagcgagaaguuacgcucagguuaugaaaccuucaaagucauugaaggcugguccaaaccuaacuccaaauugcagauaaauaggcaagucauaguugacagagguaauagguccgguuauucugguauuuucucuguugaaggcaaaagcugcaucaaucggugcuuuuauguggaguugauaaggggaaggaaacaggaaacugaagucugguggaccucaaacaguauuguuguguuuugugguaccucagguacauauggaacaggcucauggccugauggggcggacaucaaucucaugccuauauaa

SEQ ID NO: 46797 - RNA, 1410 nt, Artificial Sequence; identical to SEQ ID NO: 46526
  derived and/or modified CDS sequence (wt) from neuraminidase__InfluenzaA__ABD15617

SEQ ID NO: 46798 - RNA, 1410 nt, Artificial Sequence
  derived and/or modified CDS sequence (wt) from neuraminidase__InfluenzaA__ABD15639
augaauccaaaucaaaagauaauaacgauuggcucuguuucucucacuauugccacaauaugcuuccuuaugcaaauugccauccugguaacuacuguaacauugcauuucaagcaauaugaaugcagcucucccccaaacaaccaaguaaugcugugugaaccaacaauaauagaaagaaacauaacagagauaguguaucugaccaacaccaccauagagaaggaaauaugccccaaacuagcagaauacagaaauuggucaaagccgcaauguaaaauuacaggauuugcaccuuuuucuaaggacaauucaauucggcuuuccgcugguggggacauuugggugacaagggaaccuuaugugucgugcgauccugacaaguguuaucaauuugcccuuggacagggaacaacacuaaacaacaggcauucaaaugacacaguacaugauaggaccccuuaucgaacccuauugaugaaugaguuggguguuccauuucauuugggaaccaagcaagugugcauagcaugguccagcucaaguugucacgauggaaaagcauggcugcauguuuguguaacugggcaugaugaaaaugcaacugcuagcuucauuuacgaugggaggcuuguagauaguauugguucaugguccaaaaaaauccucaggacccaggagucggaaugcguuuguaucaauggaacuuguacaguaguaaugacugaugggagugcuucaggaagagcugauacuaaaauacuauucauugaggaggggaaaaucguucauaucagcccacugucaggaagugcucagcaugucgaggagugcuccuguuauccucgauauccuggugucagaugugucugcagagacaacuggaaaggcuccaauaggcccaucguagauauaaauguaaaggauuauagcauuguuuccaguuaugugugcucaggacuuguuggagacacacccagaaaaaacgacagcuccagcaguagucauugccugaauccuaacaaugaggaagggggucauggagugaaaggcugggccuuugaugauggaaaugacguguggaugggaagaacgaucagcgagaaguuccgcucagguuaugaaaccuucaaagucauugaaggcugguccaaaccuaauuccaaauugcagauaaauaggcaagucauaguugacagagguaauagguccgguuauucugguauuuucucuguugaaggcaaaagcugcaucaaucggugcuuuuauguggaguugauaaggggaaggaaacaggaaacugaagucugguggaccucaaacaguauuguuguguuuuguggcaccucagguacauauggaacaggcucauggccugauggggcggacaucaaucucaugccuauauaa

SEQ ID NO: 46799 - RNA, 1410 nt, Artificial Sequence; identical to SEQ ID NO: 46755
  derived and/or modified CDS sequence (wt) from neuraminidase__InfluenzaA__ABD15650

SEQ ID NO: 46800 - RNA, 1410 nt, Artificial Sequence
  derived and/or modified CDS sequence (wt) from neuraminidase__InfluenzaA__ABD15661
augaauccaaaucaaaagauaauaacgauuggcucuguuucucucaccauugccacaauaugcuuccuuaugcaaauugccauccugguaacuacuguaacauugcauuucaagcaauaugaaugcaacucccccccaaacaaccaagugaugcugugugaaccaacaauaauagaaagaaacauaacagagauaguauaucugaccaacaccaccauagagaaggaaauaugccccaaacuagcagaauacagaaauuggucaaagccgcaauguaacauuacaggauuugcaccuuuuucuaaggacaauucgauucggcuuuccgcugguggggacaucugggugacaagagaaccuuaugugucaugcgauccugacaaguguuaucaauuugcccuuggacagggaacaacacuaaacaacgggcauucaaaugacacaguacaugauaggaccccuuaucgaacccuauugaugaaugaguuggguguuccauuucauuugggaaccaagcaagugugcauagcaugguccagcucaaguugucacgauggaaaagcauggcugcauguuuguguaacgggggaugaugaaaaugcaacugcuagcuucauuuacaaugggaggcuuguagauaguauugguucaugguccaaaaaaauccucaggacccaggagucggaaugcguuuguaucaauggaacuuguacaguaguaaugacugaugggagugcuucaggaaaagcugauacuaaaauucuauucauugaggaggggaaaaucguucauacuagcucauugucaggaagugcucagcaugucgaggagugcuccuguuauccucgauauccuggugucagaugugucugcagagacaacuggaaaggcuccaauaggcccaucguagauauaaauguaaaggauuauagcauuguuuccaguuaugugugcucaggacuuguuggagacacacccagaaaaaacgacagcuccagcaguagccauugcuuggauccuaacaaugaggaagguggucauggagugaaaggcugggccuuugaugauggaaaugacguguggaugggaagaacgaucagcgagaaguuacgcucaggauaugaaaccuucaaagucauugaaggcugguccaaaccuaacuccaaauugcagauaaauaggcaagucauaguugacagaggcaauagguccgguuauucugguauuuucucuguugaaggcaaaagcugcaucaaucggugcuuuuauguggaguugauaaggggaaggaaacaggaaacugaagucuuguggaccucaaacaguauuguuguguuuuguggcaccucagguacauauggaacaggcucauggccugauggggcggacaucaaucucaugccuauauaa

SEQ ID NO: 46801 - RNA, 1410 nt, Artificial Sequence; identical to SEQ ID NO: 46755
  derived and/or modified CDS sequence (wt) from neuraminidase__InfluenzaA__ABD15683

SEQ ID NO: 46802 - RNA, 1410 nt, Artificial Sequence; identical to SEQ ID NO: 46800
  derived and/or modified CDS sequence (wt) from neuraminidase__InfluenzaA__ABD15694

SEQ ID NO: 46803 - RNA, 1410 nt, Artificial Sequence; identical to SEQ ID NO: 46755
  derived and/or modified CDS sequence (wt) from neuraminidase__InfluenzaA__ABD15705

SEQ ID NO: 46804 - RNA, 1410 nt, Artificial Sequence; identical to SEQ ID NO: 46755
  derived and/or modified CDS sequence (wt) from neuraminidase__InfluenzaA__ABD15727

SEQ ID NO: 46805 - RNA, 1410 nt, Artificial Sequence
  derived and/or modified CDS sequence (wt) from neuraminidase__InfluenzaA__ABD15749
augaauccaaaucaaaagauaauaacgauuggcucuguuucucucaccauugccacaauaugcuuccuuaugcaaauugccguccugguaacuacuguaacauugcauuucaagcaauaugaaugcaacucccccccaaacaaccaagugaugcugugugaaccaacaauaauagaaagaaacauaacagagauaguguaucugaccaacaccaccauagagaaggaaauaugccccaaacuagcagaauacagaaauuggucaaagccgcaauguaacauuacaggauuugcaccuuuuucuaaggacaauucgauucggcuuuccgcugguggggacaucugggugacaagagaaccuuaugugucaugcgauccugacaaguguuaccaauuugcccuuggacagggaacaacacuaaacaacggacauucaaaugacacaguacaugauaggaccccuuaucggacccuauugaugaaugaguuggguguuccauuucauuugggaaccaagcaagugugcauagcaugguccagcucaaguugucacgauggaaaagcauggcugcauguuuguguaacgggggaugaugaaaaugcaacugcuagcuucauuuacaaugggaggcuuguagauaguauugguucaugguccaaaaaaauccucaggacccaggagucggaaugcguuuguaucaauggaacuuguacaguaguaaugacugaugggagugcuucaggaaaagcugauacuaaaauacuauucauugaggaggggaaaaucguucauacuagccuauugucaggaagugcucagcaugucgaggagugcuccuguuauccucgauacccuggugucagaugugucugcagagacaacuggaaaggcuccaauaggcccaucguagauauaaauguaaaggauuauagcauuguuuccaguuaugugugcucaggacuuguuggagacacacccagaaaaaacgacagcuccagcaguagccauugcuuggauccuaacaaugaggaagguggucauggagugaaaggcugggccuuugaugauggaaaugacguguggaugggaagaacgaucagcgagaaguuacgcucaggauaugaaaccuucaaagucauugaaggcugguccaaaccuaacuccaaauugcagauaaauaggcaagucauaguugacagagguaauagguccgguuauucugguauuuucucuguugaaggcaaaagcugcaucaaucggugcuuuuauguggaguugauaaggggaaggaaacaggaaacugaagucuuguggaccucaaacaguauuguuguguuuuguggcaccucagguacauauggaacaggcucauggccugauggggcggacaucaaucucaugccuauauaa

SEQ ID NO: 46806 - RNA, 1410 nt, Artificial Sequence
  derived and/or modified CDS sequence (wt) from neuraminidase__InfluenzaA__ABD15760
augaauccaaaucaaaagauaauaacgauuggcucuguuucucucaccauugccacaauaugcuuccuuaugcaaauugccguccugguaacuacuguaacauugcauuucaagcaauaugaaugcaacucccccccaaacaaccaagugaugcugugugaaccaacaauaauagaaagaaacauaacagagauaguguaucugaccaacaccaccauagagaaggaaauaugccccaaacuagcagaauacagaaauuggucaaagccgcaauguaacauuacaggauuugcaccuuuuucuaaggacaauucgauucggcuuuccgcugguggggacaucugggugacaagagaaccuuaugugucaugcgauccugacaaguguuaccaauuugcccuuggacagggaacaacacuaaacaacggacauucaaaugacacaguacaugauaggaccccuuaucggacccuauugaugaaugaguuggguguuccauuucauuugggaaccaagcaagugugcauagcaugguccagcucaaguugucacgauggaaaagcauggcugcauguuuguguaacgggggaugaugaaaaugcaacugcuagcuucauuuacaaugggaggcuuguagauaguauugguucaugguccaaaaaaauccucaggacccaggaaucggaaugcguuuguaucaauggaacuuguacaguaguaaugacugaugggagugcuucaggaaaagcugauacuaaaauacuauucauugaggaggggaaaaucguucauacuagccuauugucaggaagugcucagcaugucgaggagugcuccuguuauccucgauacccuggugucagaugugucugcagagacaacuggaaaggcuccaauaggcccaucguagauauaaauguaaaggauuauagcauuguuuccaguuaugugugcucaggacuuguuggagacacacccagaaaaaacgacagcuccagcaguagccauugcuuggauccuaacaaugaggaagguggucauggagugaaaggcugggccuuugaugauggaaaugacguguggaugggaagaacgaucagcgagaaguuacgcucaggauaugaaaccuucaaagucauugaaggcugguccaaaccuaacuccaaauugcagauaaauaggcaagucauaguugacagagguaauagguccgguuauucugguauuuucucuguugaaggcaaaagcugcaucaaucggugcuuuuauguggaguugauaaggggaaggaaacaggaaacugaagucuuguggaccucaaacaguauuguuguguuuuguggcaccucagguacauauggaacaggcucauggccugauggggcggacaucaaucucaugccuauauaa

SEQ ID NO: 46807 - RNA, 1410 nt, Artificial Sequence
  derived and/or modified CDS sequence (wt) from neuraminidase__InfluenzaA__ABD15771
augaauccaaaucaaaagauaauaacgauuggcucuguuucucucacaauugccacaauaugcuuccuuaugcaaauugccauccugguaacuacuguaacguugcauuucaagcaauaugaaugcaacucccccccaaacaaccaagugaugcugugugaaccaacaauaauagaaagaaacauaacagagauaguguaucugaccaacaccaccauagagaaggaaauaugccccaaacuagcagaauacagaaauuggucaaagccgcaauguaacauuacaggauuugcaccuuuuucuaaggacaauucgauucggcuuuccgcugguggggacaucugggugacaagagaaccuuaugugucaugcgauccugacaaguguuaucaauuugcccuuggacagggaacaacacuaaacaacgggcauucaaaugacacaguacaugauaggaccccuuaucgaacccuauugaugaaugaguuggguguuccauuucauuugggaaccaagcaagugugcauagcaugguccagcucaaguugucacgauggaaaagcauggcugcauguuuguguaacgggggaugaugaaaaugcaacugcuagcuucauuuacaaugggaggcuuguagauaguaucgguucaugguccaaaaaaauccucaggacccaggagucggaaugcguuuguaucaauggaacuuguacaguaguaaugacugaugggagugcuucaggaaaagcugauacuaaaauacuauucauugaggaggggaaaaucguucauacuagcucauugucaggaagugcucagcaugucgaggagugcuccuguuauccucgauauccuggugucagaugugucugcagagacaacuggaaaggcuccaauaggcccaucguagauauaaauguaaaggauuauagcauuguuuccaguuaugugugcucaggacuuguuggagacacacccagaaaaaacgacagcuccagcaguagccauugcuuggauccuaacaaugaggaagguggucauggagugaaaggcugggccuuugaugauggaaaugacguguggaugggaagaacgaucagcgagaaguuacgcucaggauaugaaaccuucaaagucauugaaggcugguccaaaccuaacuccaaauugcagauaaauaggcaagucauaguugacagagguaauagguccgguuauucugguauuuucucuguugaaagcaaaagcugcaucaauaggugcuuuuauguggaguugauaaggggaaggaaacaggaaacugaagucuuguggaccucaaacaguauuguuguguuuuguggcaccucagguacauauggaacaggcucauggccugauggggcggacaucaaucucaugccuauauaa

SEQ ID NO: 46808 - RNA, 1410 nt, Artificial Sequence; identical to SEQ ID NO: 46755
  derived and/or modified CDS sequence (wt) from neuraminidase__InfluenzaA__ABD15782

SEQ ID NO: 46809 - RNA, 1410 nt, Artificial Sequence; identical to SEQ ID NO: 46755
  derived and/or modified CDS sequence (wt) from neuraminidase__InfluenzaA__ABD15793

SEQ ID NO: 46810 - RNA, 1410 nt, Artificial Sequence; identical to SEQ ID NO: 46726
  derived and/or modified CDS sequence (wt) from neuraminidase__InfluenzaA__ABD16306

SEQ ID NO: 46811 - RNA, 1410 nt, Artificial Sequence
  derived and/or modified CDS sequence (wt) from neuraminidase__InfluenzaA__ABD16317
augaauccaaaucaaaagauaauaacgauuggcucuguuucucucaccauuucuacaauaugcuucuucaugcaaauugccaucuugauaacuacuguaacauugcauuucaagcaauaugaauucaacucccccccaaacaaccaagugaugcugugugaaccaacaauaauagaaagaaacauaacagagauaguguaucugaccaacaccaccauagagaaggaaauaugccccaaacuagcagaauacagaaauuggucaaagccgcaauguaacauuacaggauuugcaccuuuuucuaaggacaauucgauuaggcuuuccgcugggggggacaucugggugacaagagaaccuuaugugucaugcgauccugacaaguguuaucaauuugcccuuggacagggaacaacacuaaacaacgugcauucaaaugacacaguacgugauaggaccccuuaucggacccuauugaugaaugaguuagguguuccauuucaucuggggaccaagcaagugugcauagcaugguccagcucaaguugucacgauggaaaagcauggcugcauguuuguguaacgggggaugauaaaaaugcaacugcuagcuucauuuacaaugggaggcuuguagauaguauuguuucaugguccaaagaaauccucaggacccaggagucagaaugcguuuguaucaauggaacuuguacaguaguaaugacugaugggagugcuucaggaaaagcugauacuaaaauacuauucauugaggaggggaaaaucguucauacuagcacauugucaggaagugcucagcaugucgaggagugcuccugcuauccucgauauccuggugucagaugugucugcagagacaacuggaaaggcuccaauaggcccauaguagauauaaacauaaaggauuauagcauuguuucuaguuaugugugcucaggacuuguuggagacacacccagaaaaaacgacagcuccagcaguagccauugcuuggauccuaacaaugaagaagguggucauggagugaaaggcugggccuuugaugauggaaaugacguguggaugggaagaacgaucagcgagaaguuacgcucaggauaugaaaccuucaaagucauugaaggcugguccaacccuaauuccaaauugcagauaaauaggcaagucauaguugacagagguaauagguccgguuauucugguauuuucucuguugaaggcaaaagcugcaucaaucggugcuuuuauguggaguugauaaggggaagaaaagaggaaacugaagucuuguggaccucaaacaguauuguuguguuuuguggcaccucagguacauauggaacaggcucauggccugauggggcggacaucaaucucaugccuauauaa

SEQ ID NO: 46812 - RNA, 1410 nt, Artificial Sequence
  derived and/or modified CDS sequence (wt) from neuraminidase__InfluenzaA__ABD16328
augaauccaaaucaaaagauaauaacgauuggcucuguuucucucaccauuuccacaauaugcuucuucaugcaaauugccaucuugauaacuacuguaacauugcauuuuaagcaauaugaauucaacucccccccaaacaaccaagugaugcugugugaaccaacaauaauagaaagaaacauaacagagauaguguaucugaccaacaccaccauagagaaggaaauaugccccaaacuagcagaauacaggaauuggucaaagccgcaaugugacauuacaggauuugcaccuuuuucuaaggacaauucgauuaggcuuuccgcugguggggacaucugggugacaagagaaccuuaugugucaugcgauccugacaaguguuaucaauuugcccuuggacagggaacaacacuaaacaacgugcauucaaaugacacaguacaugauaggaccccuuaucggacccuauugaugaaugaguuagguguuccauuucaucuggggaccaagcaagugugcauagcaugguccagcucaaguugucacgauggaaaagcauggcuacauguuuguguaacgggggaugauaaaaaugcaacugcuagcuucauuuacaaugggaggcuuguagauaguauuguuucaugguccaaaaaaauccucagaacccaggagucagaaugcguuuguaucaauggaacuuguacaguaguaaugacugaugggagugcuucaggaaaagcugauacuaaaauacuauucauugaggaggggaaaaucguucauacuagcacauugucaggaagugcucagcaugucgaggagugcuccugcuauccucgauauccuggugucagaugugucugcagagacaacuggaaaggcuccaauaggcccaucguagauauaaacauaaaggauuauagcauuguuuccaguuauguuugcucaggacuuguuggagacacacccagaaaaaacgacagcuccagcaguagccauugcuuggauccuaacaaugaagaagguggucauggagugaaaggcugggccuuugaugauggaaaugacguguggaugggaagaacgaucagcgagaaguuacgcucaggauaugaaaccuucaaagucauugaaggcugguccaacccuaauuccaaauugcagauaaauaggcaagucauaguugacagagguaauagguccgguuauucugguauuuucucuguugaaggcaaaagcugcaucaaucggugcuuuuauguggaguugauaaggggaagaaaagaggaaacugaagucuuguggaccucaaacaguauuguuguguuuuguggcaccucagguacauauggaacaggcucauggccugauggggcggacaucaaucucaugccuauauaa

SEQ ID NO: 46813 - RNA, 1410 nt, Artificial Sequence
  derived and/or modified CDS sequence (wt) from neuraminidase__InfluenzaA__ABD16339
augaauccaaaucaaaagauaauaacgauuggcucuguuucucucaccauuuccacaauaugcuucuucaugcaaauugccaucuugauaacuacuguaacauugcauuuuaagcaauaugaauucaacucccccccaaacaaccaagugaugcugugugaaccaacaauaauagaaagaaacauaacagagauaguguaucugaccaacaccaccauagagaaggaaauaugccccaaacuagcagaauacaggaauuggucaaagccgcaaugugacauuacaggauuugcaccuuuuucuaaggacaauucgauuaggcuuuccgcugguggggacaucugggugacaagagaaccuuaugugucaugcgauccugacaaguguuaucaauuugcccuuggacagggaacaacacuaaacaacgugcauucaaaugacacaguacaugauaggaccccuuaucggacccuauugaugaaugaguuagguguuccauuucaucuggggaccaagcaagugugcauagcaugguccagcucaaguugucacgauggaaaagcauggcugcauguuuguguaacgggggaugauaaaaaugcaacugcuagcuucauuuacaaugggaggcuuguagauaguauuguuucaugguccaaaaaaauccucaggacccaggagucagaaugcguuuguaucaauggaacuuguacaguaguaaugacugaugggagugcuucaggaaaagcugauacuaaaauacuauucauugaggaggggaaaaucguucauacuagcacauugucaggaagugcucagcaugucgaggagugcuccugcuauccucgauauccuggugucagaugugucugcagagacaacuggaaaggcuccaauaggcccaucguagauauaaacauaaaggauuauagcauuguuuccaguuaugugugcucaggacuuguuggagacacacccagaaaaaacgacagcuccagcaguggccauugcuuggauccuaacaaugaagaagguggucauggagugaaaggcugggccuuugaugauggaaaugacguguggaugggaagaacgaucagcgagaaauuacgcucaggauaugaaaccuucaaagucauugaaggcugguccaacccuaauuccaaauugcagauaaauaggcaagucauaguugacagagguaauagguccgguuauucugguauuuucucuguugaaggcaaaagcugcaucaaucggugcuuuuauguggaguugauaaggggaagaaaagaggaaacugaagucuuguggaccucaaacaguauuguuguguuuuguggcaccucagguacauauggaacaggcucauggccugauggggcggacaucaaucucaugccuauauaa

SEQ ID NO: 46814 - RNA, 1410 nt, Artificial Sequence
  derived and/or modified CDS sequence (wt) from neuraminidase__InfluenzaA__ABD16361
augaauccaaaucaaaagauaauaacgauuggcucuguuucucucaccauuuccacaauaugcuucuucaugcaaauugccaucuugauaacuacuguaacauugcauuuuaagcaauaugaauucaacucccccccaaacaaccaagugaugcugugugaaccaacaauaauagaaagaaacauaacagagauaguguaucugaccaacaccaccauagagaaggaaauaugccccaaacuagcagaauacaggaauuggucaaagccgcaaugugacauuacaggauuugcaccuuuuucuaaggacaauucgauuaggcuuuccgcugguggggacaucugggugacaagagaaccuuaugugucaugcgauccugacaaguguuaucaauuugcccuuggacagggaacaacacuaaacaacgugcauucaaaugacacaguacaugauaggaccccuuaucggacccuauugaugaaugaguuagguguuccauuucaucuggggaccaagcaagugugcauagcaugguccagcucaaguugucacgauggaaaagcauggcugcauguuuguguaacgggggaugauaaaaaugcaacugcuagcuucauuuacaaugggaagcuuguagauaguauuguuucaugguccaaaaaaauccucaggacccaggagucagaaugcguuuguaucaauggaacuuguacaguaguaaugacugaugggagugcuucaggaaaagcugauacuaaaauacuauucauugaggaggggaaaaucguucauacuagcacauugucaggaagugcucagcaugucgaggagugcuccugcuauccucgauauccuggugucagaugugucugcagagacaacuggaaaggcuccaauaggcccaucguagauauaaacauaaaggauuauagcauuguuuccaguuaugugugcucaggacuuguuggagacacacccagaaaaaacgacagcuccagcaguagccauugcuuggauccuaacaaugaagaagguggucauggagugaaaggcugggccuuugaugauggaaaugacguguggaugggaagaacgaucagcgagaaguuacgcucaggauaugaaaccuucaaagucauugaaggcugguccaacccuaauuccaaauugcagauaaauaggcaagucauaguugacagagguaauagguccgguuauucugguauuuucucuguugaaggcaaaagcugcaucaaucggugcuuuuauguggaguugauaaggggaagaaaagaggaaacugaagucuuguggaccucaaacaguauuguuguguuuuguggcaccucagguacauauggaacaggcucauggccugauggggcggacaucaaucucaugccuauauaa

SEQ ID NO: 46815 - RNA, 1410 nt, Artificial Sequence; identical to SEQ ID NO: 46726
  derived and/or modified CDS sequence (wt) from neuraminidase__InfluenzaA__ABD16475

SEQ ID NO: 46816 - RNA, 1410 nt, Artificial Sequence; identical to SEQ ID NO: 46726
  derived and/or modified CDS sequence (wt) from neuraminidase__InfluenzaA__ABD16486

SEQ ID NO: 46817 - RNA, 1410 nt, Artificial Sequence; identical to SEQ ID NO: 46753
  derived and/or modified CDS sequence (wt) from neuraminidase__InfluenzaA__ABD16497

SEQ ID NO: 46818 - RNA, 1410 nt, Artificial Sequence; identical to SEQ ID NO: 46726
  derived and/or modified CDS sequence (wt) from neuraminidase__InfluenzaA__ABD16508

SEQ ID NO: 46819 - RNA, 1410 nt, Artificial Sequence
  derived and/or modified CDS sequence (wt) from neuraminidase__InfluenzaA__ABD16519
augaauccaaaucaaaagauaauaacgauuggcucuguuucucucaccauuuccacaauaugcuucuucaugcaaauugccaucuugauaacuacuguaacauugcauuucaagcaauaugaauucaacucccccccaaacaaccaagugaugcugugugaaccaacaauaauagaaagaaacauaacagagauaguguaucugaccaacaccaccauagagaaggaaauaugccccaaacuagcagaauacagaaauuggucaaagccgcaaugugacauuacaggauuugcaccuuuuucuaaggacaauucgauuaggcuuuccgcugguggggacaucugggugacaagagaaccuuaugugucaugcgauccugacaaguguuaucaauuugcccuuggacagggaacaacacuaaacaacgugcauucaaaugacacaguacaugauaggaccccuuaucggacccuauugaugaaugaguuagguguuccauuucaucuggggaccaagcaagugugcauagcaugguccagcucaaguugucacgauggaaaagcauggcugcauguuuguguaacgggggaugauaaaaaugcaacugcuagcuucauuuacaaugggaggcuuguagauaguauuguuucaugguccaaagauauccucaggacccaggagucagaaugcguuuguaucaauggaacuuguacaguaguaaugacugaugggagugcuucaggaaaagcugauacuaaaauacuauucauugaggaggggaaaaucguucauacuagcacauugucaggaagugcucagcaugucgaggagugcuccugcuauccucgauauccuggugucagaugugucugcagagacaacuggaaaggcucaaauaggcccauuguagauauaaacauaaaggauuauagcauuguuuccaguuaugugugcucaggacuuguuggagacacacccagaaaaaccgacagcuccagcaguagccauugcuuggauccuaacaaugaagaagguggucauggagugaaaggcugggccuuugaugauggaaaugacguguggaugggaagaacgaucagcgagaaguuacgcuuaggauaugaaaccuucaaagucauugaaggcugguccaacccuaauuccaaauugcagauaaauaggcaagucauaguugacagagguaauagguccgguuauucugguauuuucucuguugaaggcaaaaguugcaucaaucggugcuuuuauguggaguugauaaggggaagaaaagaggaaacugaagucuuguggaccucaaacaguauuguuguauuuuguggaaccucagguacauauggaacaggcucauggccugauggggcggacaucaaucucaugccuauauaa

SEQ ID NO: 46820 - RNA, 1410 nt, Artificial Sequence
  derived and/or modified CDS sequence (wt) from neuraminidase__InfluenzaA__ABD16530
augaauccaaaucaaaagauaauaacaauuggcucuguuucucucaccauugccacaauaugcuuccuuaugcaaauugccauccugguaacuacuguaacauugcauuucaagcagcaugaaugcaacucccccccaaacaaccaaguaaugcugugugaaccaacaauaauagaaagaaacauaacagagauaguguaucugaccaacaccaccauagagaaggaaauaugccccaaacuaguagaauacagaaauuggucaaagccgcaauguaacauuacaggauuugcaccuuuuucuaaggacaauucgauucggcuuuccgcugguggggacaucugggugacaagagaaccuuaugugucaugcgauccugacaaguguuaucaauuugcccuugggcagggaacaacacuaaacaacgggcauucaaaugacacaguacaugauaggaccccuuaccggacccuauugaugaaugaauuggguguuccauuucauuugggaaccaggcaagugugcauagcaugguccagcucaaguugucacgauggaaaagcauggcugcauguuuguguaacuggggaugauaaaaaugcaacugcuagcuucauuuacaaugggaggcuuguagauaguauugguucaugguccaaaaaaauacucagaacccaggagucggaaugcguuuguaucaauggaacuuguacaguaguaaugacugaugggagcgcuucaggaaaagcugauacuaaaauacuauucauugaggaggggaaaaucguucauauuagcacauugucaggaagugcucagcaugucgaggagugcuccuguuauccucgauauccuggugucagaugugucugcagagacaacuggaaaggcuccaauaggcccauuguagauauaaauguaaaggauuauagcauuguuuccaguuaugugugcucaggacuuguuggagacacacccagaaaaaacgacagcuucagcaguagccauugccuagauccuaacaaugaggaagguggucauggagugaaaggcugggccuuugaugauggaaaugacguguggaugggaagaacgaucagcgagaaguuacgcucagguuaugaaaccuucaaagucaucgaaggcugguccaaaccuaacuccaaauuacagauaaauaggcaaguuauaguugaaagagguaacagguccgguuauucugguauuuucuccguugaaggcaaaagaugcaucaaucggugcuuuuauguggaguugauaaggggaaggaaagaggaaacugaagucugguggaccucaaacaguauuguuguguuuuguggcaccucagguacauauggaacaggcucauggccugauggggcggauaucaaucucaugccuauauaa

SEQ ID NO: 46821 - RNA, 1410 nt, Artificial Sequence; identical to SEQ ID NO: 46603
  derived and/or modified CDS sequence (wt) from neuraminidase__InfluenzaA__ABD16541

SEQ ID NO: 46822 - RNA, 1410 nt, Artificial Sequence; identical to SEQ ID NO: 46726
  derived and/or modified CDS sequence (wt) from neuraminidase__InfluenzaA__ABD16552

SEQ ID NO: 46823 - RNA, 1410 nt, Artificial Sequence; identical to SEQ ID NO: 46725
  derived and/or modified CDS sequence (wt) from neuraminidase__InfluenzaA__ABD16563

SEQ ID NO: 46824 - RNA, 1410 nt, Artificial Sequence
  derived and/or modified CDS sequence (wt) from neuraminidase__InfluenzaA__ABD16574
augaauccaaaucaaaagauaauaacaauuggcucuguuucucucaccauugccacaauaugcuuccuuaugcaaauugccauccugguaacuacuguaacauugcauuucaagcaauaugagugcagcucccccccaaacaaccaaguaaugccgugugaaccaacaauaauagaaagaaacauaacagagauaguguauuugacuaacaccaccauagagaaagagauaugccccaaacuaguagaauacagaaauuggucaaagccgcaauguaagauuacaggauuugcaccuuuuucuaaggacaauucaauucggcuuuccgcugguggagauauuugggugacaagagaaccuuaugugucaugcgauccuggcaaguguuaucaauuugcacuugggcagggaaccacccuaaacaacaggcauucaaaugacacaguacaugauaggaccccuuaucgaacccucuugaugaaugaguuggguguuccauuucauuugggaaccaagcaaguaugcauagcaugguccagcucaaguugucacgauggaaaagcauggcugcauguuugugucacugggcaugaugaaaaugcaacugcuagcuucauuuacgaugggaggcuuguagacaguauugguucaugguccaaaaauauccucaggacccaggagucugaaugcguuuguaucaaugggacuuguacaguaguaaugacugauggaagugcuucagaaagagcugauacuaaaauacuauucauugaagaggggaaaaucguucauauuagcccauugucaggaagugcucagcauguagaggagugcuccuguuauccucgauauccuggugucagaugugucugcagagacaacuggaaaggcuccaauaggcccaucguagauauaaaugugaaagauuauagcauuguuuccaguuaugugugcucagggcuggucggagacacacccagaaaaaacgacagauccagcaguagcuauugccggaauccuaacaaugagaaagggagucauggagugaaaggcugggccuuugacgauggaaaugacguguggaugggaagaacgaucggcgaggaguuacgcucagguuaugaaaccuucaaagucauuggagguugguccacaccuaacuccaaauugcagauaaauaggcaagucauaguugacagcgguaauagguccgguuauucugguauuuucucuguugagggcaaaagcugcaucaaucggugcuuuuauguggaguugauaaggggaaggaaaaaggaaacuagagucugguggaccucaaacaguauuguuguguuuuguggcaccucagguacauauggaacaggcucauggccugauggggcggacaucaaucucaugccuauauaa

SEQ ID NO: 46825 - RNA, 1410 nt, Artificial Sequence
  derived and/or modified CDS sequence (wt) from neuraminidase__InfluenzaA__ABD16585
augaauccaaaucaaaagauaauaacaauuggcucuguuucucucaccauugccacaauaugcuuucuuaugcaaauugccauucugguaacuacuguaacauugcauuucaagcaauaugagugcagcucccccccaaacaaccaaguaaugccgugugaaccaacaauaauagaaagaaacauaacagagauaguguauuugacuaacaccaccauagagaaagagauaugccccaaacuaguagaauacagaaauuggucaaagccgcaauguaaaauuacaggauuugcaccuuuuucuaaggacaauucaauucggcuuuccgcugguggagacauuugggugacaagagaaccuuaugugucaugcgauccuggcaaguguuaucaauuugcacuugggcagggaaccacacuaaacaacaggcauucaaaugacacaguacaugauaggaccccuuaucgaacccucuugaugaaugaguuggguguuccauuucauuugggaaccaagcaggugugcauagcaugguccagcucaaguugucacgauggaaaagcaugguugcauguuugugucacugggcaugauaaaaaugcaacugcuagcuucauuuacgaugggaggcuuguagacaguauugguucaugguccaaaaauauccucaggacccaggagucggaaugcguuuguaucaaugggacuuguacaguaguaaugacugauggaagugcuucagaaagagcugauacuaaaauacuauucauugaagaggggaaaaucguucauauuagcccauugucaggaagugcucagcauguagaggagugcuccuguuauccucgauauccuggugucagaugugucugcagagacaacuggaaaggcuccaauaggcccaucguagauauaaaugugaaagauuauagcauuguuuccaguuaugugugcucagggcuuguuggagacacacccagaaaaaacgacagauccagcaguagcuauugccggaauccuaacaaugagaaagggagucauggagugaaaggcugggccuuugacgauggaaaugacguguggaugggaagaacgaucggcgaggaguuacgcucagguuaugaaaccuucaaagucauuggagguugguccacaccuaacuccaaauugcagauaaauaggcaagucauaguugacagcgguaauagguccgguuauucugguauuuucucuguugagggcaaaagcugcaucaaucggugcuuuuauguggaguugauaaggggaagggaacaggaaacuagagucugguggaccucaaacaguauuguuguguuuuguggcaccucagguacauauggaacaggcucauggccugacggggcggacaucaaucucaugccuauauaa

SEQ ID NO: 46826 - RNA, 1410 nt, Artificial Sequence
  derived and/or modified CDS sequence (wt) from neuraminidase__InfluenzaA__ABD16721
augaauccaaaucaaaagauaauaacaauuggcucuguuucucucaccauugcaacaauaugcuuccuuaugcaaauugccauccugguaacuacuguaacacugcauuucaagcaauaugagugcagcucccccccaaacaaucaaguaaugccgugugaaccaauaauaauagaaagaaacauaacaaagauaguguauuugacuaacaccaccauagagaaagagauaugccccaaacuaguggaauacagaaauuggucaaagccgcaauguaaaauuacaggauuugcacccuuuucuaaggacaauucaauucggcuuuccgcugguggggacauuugggugacgagagaaccuuaugugucaugcgauccuggcaaguguuaucaauuugcacucgggcagggaaccacacuaaacaacaagcauucaaaugacacaauacaugauaggaccccuuaucgaacccuauugaugaaugaguugggggucccauuucauuugggaaccaagcaagugugcauagcaugguccagcucaaguugucacgauggaaaagcauggcugcauguuugugucacugggcaugauaaaaaugcaacugcuagcuucauuuacgaugggaggcuuguagacaguauugguucaugguccaaaaauauucucaggacccaggagucggagugcguuuguaucaauggaacuuguacaguaguaaugacugauggaagugcuucagaaagagcugauacuaaaauacuauucauugaagaggggaaaaucguucauauuagcccauugucaggaagugcucagcauguagaggaguguuccuguuauccucgguauccuggugucagaugugucugcagagacaacuggaaaggcuccaauaggcccaucguagauauaaaugugaaagauuauagcauuguuuccaguuaugugugcucagggcuuguuggcgacacacccagaaaaaacgacagauccagcaguagcuauugccagaauccuaacaaugagaaagggaaucauggagugaaaggcugggccuuugacgauggaaaugacguguggaugggaagaacgauuggcgaggaguuacgcucagguuaugaaaccuucaaagucauuggugguugguccacaccuaacuccaaauugcagauaaauaggcaagucauaguugacagcaaaaauaggucagguuauucugguauuuucucuguugagggcaaaagcugcaucaauaggugcuuuuauguggaguugauaaggggaagggaacaggaaacuagagucugguggaccucaaacaguauuguuguguuuuguggcaccucagguacauauggaacaggcucauggccugauggagcggacaucaaucucaugccuauauaa

SEQ ID NO: 46827 - RNA, 1410 nt, Artificial Sequence
  derived and/or modified CDS sequence (wt) from neuraminidase__InfluenzaA__ABD16732
augaauccaaaucaaaagauaauaacaauuggcucuguuucucucaccauugcaacaauaugcuuccuuaugcaaauugccauccugguaacuacuguaacauugcauuucaagcaauaugagugcagcucccccccaaacaaccaaguaaugccgugugaaccaauaauaauagaaagaaacauaacagagauaguguauuugacuaacaccaccauagagaaagagauaugccccaaacuaguagaauacagaaauuggucaaaaccgcaauguaaaauuacaggauuugcaccuuuuucuaaggacaauucaauucggcuuucugcugguggagacauuugggugacgagagaaccuuaugugucaugcgauccuggcaaguguuaucaauuugcacuugggcagggaaccacacuaaacaacaagcauucaaaugacacaguacaugauaggaccccuuaucgaacccucuugaugaaugaguuggguguuccauuucauuugggaaccaagcaagugugcauagcaugguccagcucaaguugucacgauggaaaagcauggcugcauguuugugucacugggcaugauaaaaaugcaacugcuagcuucauuuacgaugggaggcuuguagacaguauugguucaugguccaaaaauauccucaggacccaggagucggaaugcguuuguaucaaugggacuuguacaguaguaaugacugauggaagugcuucagaaagagcugauacuaaaauacuauucauugaagaggggaaaaucguucauauuagcccauugucaggaagugcgcagcauguagaggaguguuccuguuauccucgauauccuggugucagaugugucugcagagacaacuggaaaggcuccaauaggcccaucguagauauaaaugugaaagauuauagcauuguuuccaguuaugugugcucagggcuuguuggcgacacacccagaaaaaacgacagauccagcaguagcuauugccggaauccuaacaaugagaaagggagucauggagugaaaggcugggccuuugacgauggaaaugacguguggaugggaagaacgaucggcgaggaguuacgcucagguuaugaaaccuucaaagucauuggugguugguccacaccuaacuccaaauugcagauaaauaggcaagucauaguugacagcgguaauagguccgguuauucugguauuuucucuguugagggcaaaagcugcaucaauaggugcuuuuauguggaguugauaaggggaagggaacaggaaacuagagucugguggaccucaaacaguauuguuguguuuuguggcaccucagguacauauggaacaggcucauggccugauggagcggacaucaaucucaugccuauauaa

SEQ ID NO: 46828 - RNA, 1410 nt, Artificial Sequence
  derived and/or modified CDS sequence (wt) from neuraminidase__InfluenzaA__ABD16743
augaauccaaaucaaaagauaauaacaauuggcucugucucucucaccauugcaacaauaugcuuccucaugcagauugccauccugguaaccacuguaacauugcauuucaagcaauaugagugcgacuccccagcgaacaaccaaguaaugccgugugaaccaauaauaauagaaaggaacauaacagagauaguguauuugacuaacaccaccauagaaaaagagauaugccccaaauugguggaauacaggaauuggucaaagccacaauguaaaauuacaggauuugcaccuuucucuaaggacaauucaauucggcuuucugcugguggggacauuugggugacgagagaaccuuaugugucaugcgauccuggcaaguguuaucaauuugcacucgggcaggggaccacacuagacaacaaacauucaaaugacacaauacaugauagaaccccucaucgaacccuauugaugaaugaguuggguguuccauuucacuugggaaccaggcaaguguguauagcaugguccagcucaaguugucacgauggaaaagcauggcugcauguuugugucacuggguaugauaaaaaugcaacugcuagcuucauuuacgaugggaggcuuguagacagcauugguucauggucucaaaauauccucaggacccaggagucggaauguguuuguaucaaugggacuuguacaguaguaaugacugauggaagugcuucaggaagagcugauacuaaaauacuauucauugaagaggggaaaauuguucauacuagcccauugucaggaagugcucagcauguagaggaguguuccuguuauccucgauauccuggugucagauguaucugcagagacaacuggaaaggcucuaauaggccagucguagauauaaaugugaaagauuauagcauugauuccaguuaugugugcucagggcuugugggcgacacacccagaaacaacgacagaucuagcaguagcuauugccggaauccuaacaaugaaaaagggacucacggagugaaaggcugggccuuugacgauggaaaugacguguggaugggaagaacgaucagcgaggauucacgcucagguuaugaaaccuucaaagucauuggugguugguccacaccuaauuccaaauugcagaugaauaggcaagucauaguugacagcgauaauaggucagguuauucugguauuuucucuguugagggcaaaagcugcaucaauaggugcuuuuauguggaguugauaaggggaagggaacaggaaacuagaguaugguggaccucaaacaguauuguuguguuuuguggcacuucagguaccuaugggacaggcucauggccugauggggcggacaucaaucucaugccuauauaa

SEQ ID NO: 46829 - RNA, 1410 nt, Artificial Sequence; identical to SEQ ID NO: 46588
  derived and/or modified CDS sequence (wt) from neuraminidase__InfluenzaA__ABD16754

SEQ ID NO: 46830 - RNA, 1410 nt, Artificial Sequence; identical to SEQ ID NO: 46779
  derived and/or modified CDS sequence (wt) from neuraminidase__InfluenzaA__ABD16765

SEQ ID NO: 46831 - RNA, 1410 nt, Artificial Sequence; identical to SEQ ID NO: 46345
  derived and/or modified CDS sequence (wt) from neuraminidase__InfluenzaA__ABD17326

SEQ ID NO: 46832 - RNA, 1410 nt, Artificial Sequence
  derived and/or modified CDS sequence (wt) from neuraminidase__InfluenzaA__ABD38137
augaauccaaaucaaaagauaauaacaauuggcucuguuucucucaccauugccacaauaugcuuccuuaugcaaauugccauccugguaacuacuguaacauugcauuucaagcaguaugaaugcaacucccccccaaacaaccaaguaaugcugugugaaccaacaauaauagaaagaaacauaacagagauaguguaucugaccaacaccaccauagagaaggaaauaugccccaaauuagcagaauacagaaauuggucaaagccgcaauguaacauuacaggauuugcaccuuuuucuaaggacaauucgauucggcuuuccgcugguggggacaucugggugacaagagaaccuuaugugucaugcgauccugacaaguguuaucaauuugcccuugggcagggaacaacacuaaacaacgggcauucaaaugacacaguacaugauaggaccccuuaccggacccuauugaugaaugaauuggguguuccauuucauuugggaaccaggcaagugugcauagcaugguccagcucaaguugucacgauggaaaagcauggcugcauguuuguguaacuggggaugaugaaaaugcaacugcuagcuucauuuacaaugggaggcuuguagauaguauugguucaugguccaaaaaaauacucagaacccaggagucggaaugcguuuguaucaauggaacuuguacaguaguaaugacugaugggagcgcuucaggaaaagcugauacuaaaauacuauucauugaggaggggaaaaucguucauauuagcacauugucaggaagugcucagcaugucgaggagugcuccuguuauccucgauauccuggugucagaugugucugcagagacaacuggaaaggcuccaauaggcccaucauagauauaaauguaaaggauuauagcauuguuuccaguuaugugugcucaggacuuguuggagacacacccagaaaaaacgacagcuucagcaguagccauugccuagauccuaacaaugaggaagguggucauggagugaaaggcugggccuuugaugauggaaaugacguguggaugggaagaacgaucagcgagaaguuacgcucagguuaugaaaccuucaaagucaucgaaggcugguccaaaccuaacuccaaauuacagacaaauaggcaagucauaguugaaagagguaacagguccgguuauucugguauuuucuccguugaaggcaaaagcugcaucaaucggugcuuuuauguggaguugauaaggggaaggaaagaggaaccugaagucugguggaccucaaacaguauuguuguguuuuguggcaccccagguacauauggaacaggcucauggccugauggggcggauaucaaucucaugccuauauaa

SEQ ID NO: 46833 - RNA, 1413 nt, Artificial Sequence
  derived and/or modified CDS sequence (wt) from neuraminidase__InfluenzaA__ABD60782
augaauccaaaucaaaaaauaauaaccauuggaucaaucaguauagcaaucggaauaauuagucuaauguugcaaauaggaaauauuauuucaauaugggcuagucacucaauccaaacuggaagucaaaaccacacuggaauaugcaaccaaagaaucaucacauaugaaaacagcaccugggugaaucacacauauguuaauauuaacaacacuaauguuguugcuggaaaggacaaaacuucagugacauuggccggcaauucaucucuuuguucuaucaguggaugggcuauauacacaaaagacaacagcauaagaauuggcuccaaaggagauguuuuugucauaagagaaccuuucauaucauguucucacuuggaaugcagaaccuuuuuucugacccaaggugcucuauuaaaugacaaacauucaaauggaaccguuaaggacagaaguccuuauagggccuuaaugagcuguccucuaggugaagcuccguccccauacaauucaaaguuugaaucaguugcauggucagcaagcgcaugccaugauggcaugggcugguuaacaaucggaauuucugguccagacaauggagcuguggcuguacuaaaauacaacggaauaauaacugaaaccauaaaaaguuggaaaaagcgaauauugagaacacaagagucugaaugugucugugugaacgggucauguuucaccauaaugaccgauggcccgaguaauggggccgccucguacaaaaucuucaagaucgaaaaggggaagguuacuaaaucaauagaguugaaugcacccaauuuccauuaugaggaauguuccuguuacccagacacuggcacagugauguguguaugcagggacaacuggcaugguucaaaucgaccuugggugucuuuuaaucaaaacuuggauuaucaaauaggauacaucugcaguggaguguucggugacaauccgcgucccaaagauggaaagggcagcuguaauccagugacuguugauggagcagacggaguuaagggguuuucauacaaauaugguaaugguguuuggauaggaaggacuaaaaguaacagacuuagaaagggguuugagaugauuugggauccuaauggauggacagauaccgacagugauuucucagugaaacaggauguuguggcaauaacugauuggucaggguacagcggaaguuucguucaacauccugaguuaacaggauuggacuguauaagaccuugcuucuggguugaguuagucagaggacugccuagagaaaauacaacaaucuggacuagugggagcagcauuucuuuuuguggcguugauagugauacugcaaacuggucuuggccagacggugcugaguugccguucaccauugacaaguag

SEQ ID NO: 46834 - RNA, 1410 nt, Artificial Sequence
  derived and/or modified CDS sequence (wt) from neuraminidase__InfluenzaA__ABD60793
augaauccaaaucaaaagauaauaacaauuggcucugucucucucaccauugcaacaauaugcuuccucaugcagauugccauccugguaacuacuguaacauugcauuucaagcaauaugagugcgacucccccgugaacaaccaaguaaugccgugugaaccaauaauaauagaaaggaacauaacagagauaguguauuugacuaacaccaccauagaaaaagagauaugccccaaauuaguggaauacaggaauuggucaaagccacaauguaaaauuacaggauuugcaccuuuuucuaaggacaauucaauucggcuuucugcugguggggacauuugggugacgagagaaccuuaugugucaugcgauccuggcaaguguuaucaauuugcacucgggcaggggaccacacuagacaacaaacauucaaaugacacaauacaugauagaaccccucaucgaacucuauugaugaaugaguuggguguuccauuucauuugggaaccaggcaaguguguauagcaugguccagcucaaguugucacgauggaaaagcauggcugcauguuugugucacuggguaugauaaaaaugcaacugcuagcuucauuuacgaugggaggcuuguagacagcauuguuucauggucucaaaauauccucaggacccaggagucggaaugcguuuguaucaaugggacuuguacaguaguaaugacugauggaagugcuucagaaagagcugauacuaaaauacuauucauugaagaggggaaaauuguucauauuagcccauugucaggaagugcucagcauguagaggaguguuccuguuauccucgauauccuggugucagauguaucugcagagacaacuggaaaggcucuaauaggcccgucguagauauaaaugugaaagauuauagcauugauuccaguuaugugugcucagggcuuguuggcgacacacccagaaacaacgacagaucuagcaauagcuauugccggaauccuaacaaugagaaagggaaucacggagugaaaggcugggccuuugacgauggaaaugacuuguggaugggaagaacgaucagcgaggauucacgcucagguuaugaaaccuucaaagucauuggugguugguccacaccuaauuccaaauugcagauaaauaggcaagucauaguugacagcgacaauaggucagguuauucugguauuuucucuguugagggcaaaagcugcaucaauaggugcuuuuauguggaguugauaaggggaagggaacaggaaacuagaguaugguggaccucaaacaguauuauuguguuuuguggcacuucagguaccuaugggacaggcucauggccugauggggcggacaucaaucucaugccuauauaa

SEQ ID NO: 46835 - RNA, 1410 nt, Artificial Sequence; identical to SEQ ID NO: 46531
  derived and/or modified CDS sequence (wt) from neuraminidase__InfluenzaA__ABD60804

SEQ ID NO: 46836 - RNA, 1410 nt, Artificial Sequence; identical to SEQ ID NO: 46767
  derived and/or modified CDS sequence (wt) from neuraminidase__InfluenzaA__ABD60815

SEQ ID NO: 46837 - RNA, 1410 nt, Artificial Sequence; identical to SEQ ID NO: 46726
  derived and/or modified CDS sequence (wt) from neuraminidase__InfluenzaA__ABD60826

SEQ ID NO: 46838 - RNA, 1410 nt, Artificial Sequence
  derived and/or modified CDS sequence (wt) from neuraminidase__InfluenzaA__ABD60837
augaauccaaaucaaaagauaauaacgauuggcucuguuucucucaccauugccacaauaugcuuccuuaugcaaauugccguccugguaacuacuguaacauugcauuucaagcaauaugaaugcaacucccccccaaacaaccaagugaugcugugugaaccaacaauaauagaaagaaacauaacagagauaguguaucugaccaacaccaccauagagaaggaaauaugccccaaacuagcagaauacagaaauuggucaaagccgcaauguaacauuacaggauuugcaccuuuuucuaaggacaauucgauucggcuuuccgcugguggggacaucugggugacaagagaaccuuaugugucaugcgauccugacaaguguuaucaauuugcccuuggacagggaacaacacuaaacaacggacauucaaaugacacaguacaugauaggaccccuuaucggacccuauugaugaaugaguuggguguuccauuucauuugggaaccaagcaagugugcauagcaugguccagcucaaguugucacgauggaaaagcauggcugcauguuuguguaacgggggaugaugaaaaugcaacugcuagcuucauuuacaaugggaggcuuguagauaguauugguucaugguccaaaaaaauccucaggacccaggagucggaaugcguuuguaucaauggaacuuguacaguaguaaugacugaugggagugcuucaggaaaagcugauacuaaaauacuauucauugaggaggggaaaaucguucauacuagccuauugucaggaagugcucagcaugucgaggagugcuccuguuauccucgauacccuggugucagaugugucugcagagacaacuggaaaggcuccaauaggcccaucguagauauaaauguaaaggauuauagcauuguuuccaguuaugugugcucaggacuuguuggagacacacccagaaaaaacgacagcuccagcaguagccauugcuuggauccuaacaaugaggaagguggucauggagugaaaggcugggccuuugaugauggaaaugacguguggaugggaagaacgaucagcgagaaguuacgcucaggauaugaaaccuucaaagucauugaaggcugguccaaaccuaacuccaaauugcagauaaauaggcaagucauaguugacagagguaauagguccgguuauucugguauuuucucuguugaaggcaaaagcugcaucaaucggugcuuuuauguggaguugauaaggggaaggaaacaggaaacugaagucuuguggaccucaaacaguauuguuguguuuuguggcaccucagguacauauggaacaggcucauggccugauggggcggacaucaaucucaugccuauauaa

SEQ ID NO: 46839 - RNA, 1410 nt, Artificial Sequence
  derived and/or modified CDS sequence (wt) from neuraminidase__InfluenzaA__ABD60848
augaauccaaaucaaaagauaauaacgauugguucuguuucucucaccauugccacaauaugcuuccuuaugcaaguugccauccugguaacuacuguaacauugcauuucaagcaauaugaaugcaacucccccccaaacaaccaagugaugcugugugaaccaacaauaauagaaagaaacauaacagagauaguguaucugaccaacaccaccauagagaaggaaauaugccccaaacuagcagaauacagaaauuggucaaagccgcaauguaacauuacaggauuugcaccuuuuucuaaggacaauucgauucggcuuuccgcugguggggacaucugggugacaagagaaccuuaugugucaugcgauccugacaaguguuaucaauuugcccuuggacagggaacaacacuaaacaacgggcauucaaaugacacaguacaugauaggaccccuuaucggacccuauugaugaaugaguuggguguuccauuucauuugggaaccaagcaagugugcauagcaugguccagcucaaguugucacgauggaaaagcauggcugcauguuuguguaacgggggaugaugaaaaugcaacugccagcuucauuuacaaugggaggcuuguagauaguauugguucaugguccaaaaaaauccucaggacccaggagucggaaugcguuuguaucaauggaacuuguacagugguaaugacugaugggagugcuucaggaaaagcugauacuaaaauacuauucauugaggaggggaaaaucguucauacuagccuauugucaggaagugcucagcaugucgaggagugcuccuguuauccucgauauccuggugucagaugugucugcagagacaacuggaaaggcuccaauaggcccaucguagauauaaauguaaaggauuauagcauuguuuccaguuaugugugcucaggacuuguuggagacacacccagaaaaaacgacagcuccagcaguagccauugcuuggauccuaacaaugaggaagguggucauggagugaaaggcugggccuuugaugauggaaaugauguguggaugggaagaacaaucagcgagaaguuacgcucaggauaugaaaccuucaaagucauugaaggcugguccaaaccuaacuccaaacugcagauaaauaggcaagucauaguugacagagguaauagguccgguuauucugguauuuucucuguugaaggcaaaagcugcaucaaucggugcuuuuauguggaguugauaaggggaaggaaacaggaaacugaaguuuuguggaccucaaacaguauuguuguguuuuguggcaccucagguacauauggaacaggcucauggccugauggggcggacaucaaucucaugccuauauaa

SEQ ID NO: 46840 - RNA, 1413 nt, Artificial Sequence
  derived and/or modified CDS sequence (wt) from neuraminidase__InfluenzaA__ABD60881
augaauccaaaucaaaaaauaauaaccauuggaucaaucaguauagcaaucggaauaauuagucuaauguugcaaauaggaaauauuauuucaauaugggcuagucacucaauccaaacuggaagucaaaaccacacuggaauaugcaaccaaagaaucaucacauaugaaaacagcaccugggugaaucacacauauguuaauauuaacaacacuaauguuguugcuggaaaggacaaaacuucagugacauuggccggcaauucaucucuuuguucuaucaguggaugggcuauauacacaaaagacaacagcauaagaauuggauccaaaggagauguuuuugucauaagagaaccuuucauaucauguucucacuuggaaugcagaaccuuuuuucugacccaaggugcucuauuaaaugacaaacauucaaaugggaccguuaaggacagaaguccuuauagggccuuaaugagcugcccucuaggugaagcuccguccccauacaauucaaaguuugaaucaguugcauggucagcaagcgcaugccaugauggcaugggcugguuaacaaucggaauuucugguccagacaauggagcuguggcuguacuaaaauacaacggcauaauaacugaaaccauaaaaaguuggaaaaagcgaauauuaagaacacaagagucugaaugugucugugugaacgggucauguuucaccauaaugaccgauggcccgaguaauggggccgccucguacaaaaucuucaagaucgaaaaggggaagguuacuaaaucaauagaguugaaugcacccaauuuucauuaugaggaauguuccuguuacccagacacuggcacagugauguguguaugcagggacaacuggcaugguucaaaucgaccuugggugucuuuuaaucaaaaccuggauuaucaaauaggauacaucugcagugggguguucggugacaauccgcgucccaaagauggagagggcagcuguaauccagugacuguugauggagcagacggaguaaagggguuuucauacaaauaugguaaugguguuuggauaggaaggacuaaaaguaacagacuuagaaagggguuugagaugauuugggauccuaauggauggacagauaccgacaguaauuucucagugaaacaggauguuguggcaauaacugauuggucaggguacagcggaaguuucguucaacauccugaguuaacaggauuggacuguauaagaccuugcuucuggguugaguuagucagaggacugccuagagaaaauacaacaaucuggacuagugggagcagcauuucuuuuuguggcguaaauagugauacugcaaacuggucuuggccagacggugcugaguugccguucaccauugacaaguag

SEQ ID NO: 46841 - RNA, 1413 nt, Artificial Sequence
  derived and/or modified CDS sequence (wt) from neuraminidase__InfluenzaA__ABD60892
augaauccaaaucaaaaaauaauaaccauuggaucaaucaguauagcaauuggaauaauuagucuaauguugcaaauaggaaauauuauuucaauaugggcuagucacucaauccaaacuggaagucaaaaccacacuggaauaugcaaccaaagagucaucacauaugaaaacagcaccugggugaaucacacauauguuaauauuaacaacacuaauguuguugcuggaaaggacaaaacuucagugacauuggccggcaauucaucucuuuguucuaucaguggaugggcuauauacacaaaagacaacagcauaagaauuggauccaaaggagauguuuuugucauaagagaaccuuucauaucauguucucacuuggaaugcagaaccuuuuuucugacccaaggugcucuauuaaaugacaaacauucaaaugggaccguuaaggacagaaguccuuauagggccuuaaugagcugcccucuaggugaagcuccguccccauacaauucaaaguuugaaucaguugcauggucagcaagcgcaugccaugauggcaugggcugguuaacaaucggaauuucugguccagacaauggagcuguggcuguacuaaaauacaauggcauaauaacugaaaccauaaaaaguuggaaaaagcgaauauuaagaacacaagagucugaaugugucugugugaacgggucauguuucaccauaaugaccgauggcccgaguaauggggccgccucguacaaaaucuucaagaucgaaaaggggaagguuacuaaaucaauagaguugaaugcacccaauuuccauuaugaggaauguuccuguuacccagacacuggcacagugauguguguaugcagggacaacuggcaugguucaaaucgaccuugggugucuuuuaaucaaaaccuggauuaucaaauaggauacaucugcagugggguguucggugacaauccgcgucccaaagauggagagggcagcuguaauccagugacuguugauggagcagacggaguaaagggguuuucauacaaauaugguaaugguguuuggauaggaaggacuaaaaguaacagacuuagaaagggguuugagaugauuugggauccuaauggauggacagauaccgacaguaauuucucagugaaacaggauguuguggcaauaacugauuggucaggguacagcggaaguuucguucaacauccugaguuaacaggauuggacuguauaagaccuugcuucuggguugaguuagucagaggacugccuagagaaaauacaacaaucuggacuagugggagcagcauuucuuuuuguggcguaaauagugauacugcaaacuggucuuggccagacggugcugaguugccguucaccauugacaaguag

SEQ ID NO: 46842 - RNA, 1413 nt, Artificial Sequence; identical to SEQ ID NO: 46840
  derived and/or modified CDS sequence (wt) from neuraminidase__InfluenzaA__ABD60903

SEQ ID NO: 46843 - RNA, 1413 nt, Artificial Sequence; identical to SEQ ID NO: 46427
  derived and/or modified CDS sequence (wt) from neuraminidase__InfluenzaA__ABD60914

SEQ ID NO: 46844 - RNA, 1410 nt, Artificial Sequence
  derived and/or modified CDS sequence (wt) from neuraminidase__InfluenzaA__ABD60925
augaauccaaaucaaaagauaauaacaauuggcucuguuucucucaccauugccacaauaugcuuccuuaugcaaauugccaucuugguaacuacuguaacauugcauuucaagcagcaugaaugcaacucccccccaaacaaccaaguaaugcugugugaaccaacaauaauagaaagaaacauaacagagauaguguaucugaccaacaccaccauagagaaggaaauaugccccaaacuagcagaauacagaaauuggucaaagccgcaauguaacauuacaggauuugcaccuuuuucuaaggacaauucgauucggcuuuccgcugguggggacaucugggugacaagagaaccuuaugugucaugcgauccugacaaguguuaucaauuugcccuugggcagggaacaacacuaaacaacgggcauucaaaugacacaguacaugauaggaccccuuaccggacccuauugaugaaugaauuggguguuccauuucauuugggaaccaggcaagugugcauagcaugguccagcucaaguugucacgauggaaaagcauggcugcauguuuguguaacuggggaugauaaaaaugcaacugcuagcuucauuuacaaugggaggcuuguagauaguauugguucaugguccaaaaaaauacucagaacccaggagucggaaugcguuuguaucaauggaacuuguacaguaguaaugacugaugggagcgcuucaggaaaagcugauacuaaaauacuauucauugaggaggggaaaaucguucauauuagcacauugucaggaagugcucagcaugucgaggagugcuccuguuauccucgauauccuggugucagaugugucugcagagacaacuggaaaggcuccaauaggcccauuguagauauaaauauaaaggauuauagcauuguuuccaguuaugugugcucaggacuuguuggagacacacccagaaaaaacgacagcuucagcaguagccauugccuagauccuaacaaugaggaagguggucauggagugaaaggcugggccuuugaugauggaaaugacguguggaugggaagaacgaucagcgagaaguuacgcucagguuaugaaaccuucaaagucaucgaaggcugguccaaaccuaacuccaaauuacagauaaauaggcaaguuauaguugaaagagguaacagguccgguuauucuggcauuuucuccguugaaggcaaaagcugcaucaaucggugcuuuuauguggaguugauaaggggaaggaaagaggaaacugaagucugguggaccucaaacaguauuguuguguuuuguggcaccucagguacauauggaacaggcucauggccugauggggcggacaucaaucucaugccuauauaa

SEQ ID NO: 46845 - RNA, 1413 nt, Artificial Sequence
  derived and/or modified CDS sequence (wt) from neuraminidase__InfluenzaA__ABD60947
augaauccaaaucagaaaauaauaaccauuggaucaaucuguauggcaaucggaauaauuagucuaauauugcaaauagggaauauuaucucaauauggguuagccacucaauucaaacuggaagucaaaaccauacuggaauaugcaaccaaagaaucauuaccuaugaaaauagcaccuggguaaaucaaacauauguuaauauuagcaacacuaacguuguugcuggaaaggacacaacuucaaugacauuagccggcaauucaucucuuuguccuauccgugggugggcuauauacagcaaagacaacagcauaagaauugguuccaaaggagauguuuuugucauaagagaaccuuuuauaucauguucucacuuggaaugcagaaccuuuuuucugacccaaggcgcucuauuaaaugacaagcauucaaaugggaccauuaaggacagaagcccuuauagggccuuaaugagcuguccuauaggugaagcuccgucuccauacaauucaagguuugaaucgguugcuuggucagcaagugcaugucaugauggcaugggcuggcuaacaaucggaauuucugguccagaugauggagcaguggcuguacuaaaauacaacggcauaauaacugaaaccauaaaaaguuggaggaagcaaauauuaagaacacaagagucugaaugugucuguguaaacgguucauguuuuaccauaaugaccgauggcccgagugaugggccggccucuuacagaaucuucaaaaucgagaaggggaagauuacuaaaucaauagaguuggaugcacccaauucucauuacgaggaauguuccuguuacccagacaccggcacagugaugugugugugcagagacaauuggcaugguucgaaucgaccuugggugucuuuuaaucaaaaccuggauuaucaaauaggauacaucugcagugggguuuucggugacaauccgcgucccaaagaugggaaaggcagcugugauccaguaaauguugauggagcagacggaguaaagggguuuucauacagguaugguaaugguguuuggauaggaaggacuaaaaguaacagcuccagaaagggauuugagaugauuugggauccuaauggauggacagauaccgauaguaauuucuuagugaaacaggauguaguggcaaugacugauuggucaggguacagcggaaguuucguucaacauccugagcuaacaggauuggacuguaugaggccuugcuucuggguugaauuaaucagaggacgacccagagaaaaaacaacaaucuggacuagugggagcagcauuucuuuuuguggcgugaauagugauacuguaaauuggucuuggccagacggugccgaguugccauucaccauugacaaguag

SEQ ID NO: 46846 - RNA, 1410 nt, Artificial Sequence
  derived and/or modified CDS sequence (wt) from neuraminidase__InfluenzaA__ABD61263
augaauccaaaucaaaagauaauaacaauuggcucuguuucucucaccauugccacaauaugcuuccuuaugcaaauugccauccugguaacuacuguaacauugcauuucaagcagcaugaaugcaacucccccccaaacaaccaaguaaugcugugugaaccaacaauaauagaaagaaacauaacagagauaguguaucugaccaacaccaccauagagaaggaaauaugccccaaacuagcagaauacagaaauuggucaaagccgcaauguaacauuacaggauuugcaccuuuuucuaaggacaauucgauucggcuuuccgcugguggggacaucugggugacaagagaaccuuaugugucaugcgauccugacaaguguuaucaauuugcccuugggcagggaacaacacuaaacaacgggcauucaaaugacacaguacaugauaggaccccuuaccggacccuauugaugaaugaauuggguguuccauuucauuugggaaccaggcaagugugcauagcaugguccagcucaaguugucacgauggaaaagcauggcugcauguuuguguaacuggggaugauaaaaaugcaacugcuagcuucauuuacaaugggaggcuuguagauaguauugguucaugguccaaaaaaauacucagaacccaggagucggaaugcguuuguaucaauggaacuuguacaguaguaaugacugaugggagcgcuucaggaaaagcugauacuaaaauacuauucauugaggaggggaaaaucguucauauuagcacauugucaggaagugcucagcaugucgaggagugcuccuguuauccucgauauccuggugucagaugugucugcagagacaacuggaaaggcuccaauaggcccauuguagauauaaauguaaaggauuauagcauuguuuccaguuaugugugcucaggacuuguuggagacacacccagaaaaaacgacagcuucagcaguagccauugccuagauccuaacaaugaggaagguggucauggaaugaaaggcugggccuuugaugauggaaaugacguauggaugggaagaacgaucagcgagaaguuacgcucagguuaugaaaccuucaaagucaucgaaggcugguccaaaccuaacuccaaauuacagguaaauaggcaaguuauaguugaaagagguaacagguccgguuauucugguauuuucuccguugaaggcaaaagcugcaucaaucggugcuuuuauguggaguugauaaggggaaggaaagaggaaacugaagucugguggaccucaaacaguauuguuguguuuuguggcaccucagguacauauggaacaggcucauggccugauggggcggauaucaaucucaugccuauauaa

SEQ ID NO: 46847 - RNA, 1410 nt, Artificial Sequence; identical to SEQ ID NO: 46217
  derived and/or modified CDS sequence (wt) from neuraminidase__InfluenzaA__ABD61274

SEQ ID NO: 46848 - RNA, 1410 nt, Artificial Sequence
  derived and/or modified CDS sequence (wt) from neuraminidase__InfluenzaA__ABD61285
augaauccaaaucaaaagauaauaacgauuggcucuguuucucucaccauuuccacaauaugcuucuucaugcaaauugccaucuugauaacuacuguaacauugcauuucaagcaauaugaauucaacucccccccaaacaaccaagugaugcugugugaaccaacaauaauagaaagaaacauaacagagauaguguaucugaccaacaccaccauagagaaggaaauaugccccaaacuagcagaauacagaaauuggucaaagccgcaaugugacauuacaggauuugcaccuuuuucuaaggacaauucgauuaggcuuuccgcugguggggacaucugggugacaagagaaccuuaugugucaugcgauccugacaaguguuaucaauuugcccuuggacagggaacaacacuaaacaacgugcauucaaaugacacaguacaugauaggacccccuaucggacccuauugaugaaugaguuagguguuccauuucaucuggggaccaagcaagugugcauagcaugguccagcucaaguugucaugauggaaaagcauggcugcauguuuguguaacgggggaugauaaaaaugcaacugcuagcuucauuuacaaugggaggcuuguagauaguauuguuucaugguccaaagaaauccucaggacccaggagucagaaugcguuuguaucaauggaacuuguacaguaguaaugacugaugggaaugcuucaggaaaagcugauacuaaaauacuauucauugaggaggggaaaaucguucauacuagcacauugucaggaagugcucagcaugucgaggagugcuccugcuauccucgauauccuggugucagaugugucugcagagacaacuggaaaggcuccaauaggcccauuguagauauaaacauaaaggauuauagcauuguuuccaguuaugugugcucaggacuuguuggagacacacccagaaaaaacgacagcuccagcaguagccauugcuuggauccuaacaaugaagaagguggucauggagugaaaggcugggccuuugaugauggaaaugacguguggaugggaagaacgaucagcgagaaguuacgcucaggauaugaaaccuucaaagucauugaaggcugguccaacccuaauuccaaauugcagauaaauaggcaagucauaguugacagagguaauagguccgguuauucugguauuuucucuguugaaggcaaaagcugcaucaaucggugcuuuuauguggaguugauaaggggaagaaaagaggaaacugaagucuuguggaccucaaacaguauuguuguguuuuguggcaccucagguacauauggaacaggcucauggccugauggggcggacaucaaucucaugccuauauaa

SEQ ID NO: 46849 - RNA, 1410 nt, Artificial Sequence; identical to SEQ ID NO: 46603
  derived and/or modified CDS sequence (wt) from neuraminidase__InfluenzaA__ABD61296

SEQ ID NO: 46850 - RNA, 1410 nt, Artificial Sequence; identical to SEQ ID NO: 46767
  derived and/or modified CDS sequence (wt) from neuraminidase__InfluenzaA__ABD61307

SEQ ID NO: 46851 - RNA, 1410 nt, Artificial Sequence
  derived and/or modified CDS sequence (wt) from neuraminidase__InfluenzaA__ABD61318
augaauccaaaucaaaagauaauaacgauuggcucuguuucucucaccauugccacaauaugcuuccuuaugcaaauugccauccugguaacuacuguaacguugcauuucaagcaauaugaaugcaacucccccccaaacaaccaagugaugcugugugaaccaacaauaauagaaagaaacauaacagagauaguguaucugaccaacaccaccauagagaaggaaauaugccccaaacuagcagaauacagaaauuggucaaagccgcaauguaacauuacaggauuugcaccuuuuucuaaggacaauucgauucggcuuuccgcugguggggacaucugggugacaagagaaccuuaugugucaugcgauccugacaaguguuaucaauuugcccuuggacagggaacaacacuaaacaacgggcauucaaaugacacaguacaugauaggaccccuuaucgaacccuauugaugaaugaguuggguguuccauuucauuugggaaccaagcaagugugcauagcaugguccagcucaaguugucacgauggaaaagcauggcugcauguuuguguaacgggggaugaugaaaaugcaacugcuagcuucauuuacaaugggaggcuuguagauaguaucgguucaugguccaaaaaaauccucaggacccaggagucggaaugcguuuguaucaauggaacuuguacaguaguaaugacugaugggagugcuucaggaaaagcugauacuaaaauacuauucauugaggaggggaaaaucguucauacuagcucauugucaggaagugcucagcaugucgaggagugcuccuguuauccucgauauccuggugucagaugugucugcagagacaacuggaaaggcuccaauaggcccaucguagauauaaauguaaaggauuauagcauuguuuccaguuaugugugcucaggacuuguuggagacacacccagaaaaaacgacagcuccagcaguagccauugcuuggauccuaacaaugaggaagguggucauggagugaaaggcugggccuuugaugauggaaaugacguguggaugggaagaacgaucagcgagaaguuacgcucaggauaugaaaccuucaaagucauugaaggcugguccaaaccuaacuccaaauugcagauaaauaggcaagucauaguugacagagguaauaggucugguuauucugguauuuucucuguugaaagcaaaagcugcaucaauaggugcuuuuauguggaguugauaaggggaaggaaacaggaaacugaagucuuguggaccucaaacaguauuguuguguuuuguggcaccucagguacauauggaacaggcucauggccugauggggcggacaucaaucucaugccuauauaa

SEQ ID NO: 46852 - RNA, 1410 nt, Artificial Sequence
  derived and/or modified CDS sequence (wt) from neuraminidase__InfluenzaA__ABD61340
augaauccaaaucaaaagauaauaacgauuggcucuguuucucucaccauugccacaauaugcuuccuuaugcaaauugccauccugguaacuacuguaacauugcauuucaagcaauaugaaugcaacucccccccaaacaaccaagugaugcugugugaaccaacaauaauagaaagaaacauaacagagauaguguaucugaccaacaccaccauagagaaggaaauaugccccaaacuagcagaauacagaaauuggucaaagccgcaauguaacauuacaggauuugcaccuuuuucuaaggacaauucgauucggcuuuccgcugguggggacaucugggugacaagagaaccuuaugugucaugcgauccugacaaguguuaucaauuugcccuuggacagggaacaacacuaaacaacggacauucaaaugacacaguacaugauaggaccccuuaucggacccuauugaugaaugaguuggguguuccauuucauuugggaaccaagcaagugugcauagcaugguccagcucaaguugucacgauggaaaagcauggcugcauguuuguguaacgggggaugaugaaaaugcaacugcuagcuucauuuacaaugggaggcuuguagauaguauugguucaugguccaaaaaaauccucaggacccaggagucggaaugcguuuguaucaauggaacuuguacaguaguaaugacugaugggagugcuucaggaaaggcugauacuaaaauacuauucauugaggaggggaaaaucguucauacuagccuauugucaggaagugcucagcaugucgaggagugcuccuguuauccucgauacccuggugucagaugugucugcagagacaacuggaaaggcuccaauaggcccaucguagauauaaauguaaaggauuauagcauuguuuccaguuaugugugcucaggacuuguuggagacacacccagaaaaaacgacagcuccagcaguagccauugcuuggauccuaacaaugaggaagguggucauggagugaaaggcugggccuuugaugauggaaaugacguguggaugggaagaacgaucagcgagaaguuacgcucaggauaugaaaccuucaaagucauugaaggcugguccaaaccuaacuccaaauugcagauaaauaggcaagucauaguugacagagguaauagguccgguuauucugguauuuucucuguugaaggcaaaagcugcaucaaucggugcuuuuauguggaguugauaaggggaaggaaacaggaaacugaagucuuguggaccucaaacaguauuguuguguuuuguggcaccucagguacauauggaacaggcucauggccugauggggcggacaucaaucucaugccuauauaa

SEQ ID NO: 46853 - RNA, 1410 nt, Artificial Sequence
  derived and/or modified CDS sequence (wt) from neuraminidase__InfluenzaA__ABD61351
augaauccaaaucaaaagauaauaacgauuggcucuguuucucucaccauugccacaauaugcuuccuuaugcaaauugccauccugguaacuacuguaacauugcauuucaagcaauaugaaugcaacucccccccaaacaaccaagugaugcugugugaaccaacaauaauagaaagaaacauaacagagauaguguaucugaccaacaccaccauagagaaggaaauaugccccaaacuagcagaauacagaaauuggucaaagccgcaauguaacauuacaggauuugcaccuuuuucuaaggacaauucgauucggcuuuccgcugguggggacaucugggugacaagagaaccuuaugugucaugcgauccugacaaguguuaucaauuugcccuuggacagggaacaacacuaaacaacggacauucaaaugacacaguacaugauaggaccccuuaucggacccuauugaugaaugaguuggguguuccauuucauuugggaaccaagcaagugugcauagcaugguccagcucaaguugucacgauggaaaagcauggcugcauguuuguguaacgggggaugaugaaaaugcaacugcuagcuucauuuacaaugggaggcuuguagauaguauugguucaugguccaaaaaaauccucaggacccaggagucggaaugcguuuguaucaauggaacuuguacaguaguaaugacugaugggagugcuucaggaaaagcugauacuaaaauacuauucauugaggaggggaaaaucguucauacuagccuauugucaggaagugcucagcaugucgaggagugcuccuguuauccucgauauccuggugucagaugugucugcagagacaacuggaaaggcuccaauaggcccaucguagauauaaauguaaaggauuauagcauuguuuccaguuaugugugcucaggacuuguuggagacacacccagaaaaaacgacagcuccagcaguagccauugcuuggauccuaacaaugaggaagguggucauggagugaaaggcugggccuuugaugauggaaaugacguguggaugggaagaacgaucagcgagaaguuacgcucaggauaugaaaccuucaaagucauugaaggcugguccaaaccuaacuccaaauugcagauaaauaggcaagucauaguugauagagguaauagguccgguuauucugguauuuucucuguugaaggcaaaagcugcaucaaucggugcuuuuauguggaguugauaaggggaaggaaacaggaaacugaagucuuguggaccucaaacaguauuguuguguuuuguggcaccucagguacauauggaacaggcucauggccugauggggcggacaucaaucucaugccuauauaa

SEQ ID NO: 46854 - RNA, 1410 nt, Artificial Sequence
  derived and/or modified CDS sequence (wt) from neuraminidase__InfluenzaA__ABD61362
augaauccaaaucaaaagauaauaacgauuggcucuguuucucucaccauugccacaauaugcuuccuuaugcaaauugccauccugguaacuacuguaacauugcauuucaagcaauaugaaugcaacucucccccaaacaaccaagugaugcugugugaaccaacaauaauagaaagaaacauaacagagauaguauaucugaccaacaccaccauagagaaggaaguaugccccaaacuagcagaauacagaaauuggucaaagccgcaauguaacauuacaggauuugcaccuuuuucuaaggacaauucgauucggcuuuccgcugguggggacaucuggguaacaagagaaccuuaugugucaugcgauccugacaaguguuaucaauuugcccuuggacagggaacaacacuaaacaacgggcauucaaaugacacaguacaugauaggaccccuuaucgaacccuauugaugaaugaguuggguguuccauuucauuugggaaccaagcaagugugcauagcaugguccagcucaaguugucacgauggaaaagcauggcugcauguuuguguaacgggggaugaugaaaaugcaacugcuagcuucauuuacaaugggaggcuuguagauaguauugguucaugguccaaaaaaauccucaggacccaggagucggaaugcguuuguaucaauggaacuuguacaguaguaaugacugaugggagugcuucaggaaaagcugauacuaaaauacuauucauugaggaggggaaaaucguucauacuagcucauugucaggaagugcucagcaugucgaggagugcuccuguuauccucgauauccuggugucagaugugucugcagagacaacuggaaaggcuccaauaggcccaucguagauauaaauguaaaggauuauagcauuguuuccaguuaugugugcucaggacuuguuggagacacacccagaaaaaacgacagcuccagcaguagccauugcuuggauccuaacaaugaggaagguggucauggagugaaaggcugggccuuugaugauggaaaugacguguggaugggaagaacgaucagcgagaaguuacgcucaggauaugaaaccuucaaagucauugaaggcugguccaaaccuaacuccaaauugcagauaaauaggcaagucauaguugacagagguaauagguccgguuauucugguauuuucucuguugaaggcaaaagcugcaucaaucggugcuuuuauguggaguugauaaggggaaggaaacaggaaacugaagucuuguggaccucaaacaguauuguuguguuuuguggcaccucagguacauauggaacaggcucauggccugauggggcggacaucgaucucaugccuauauaa

SEQ ID NO: 46855 - RNA, 1410 nt, Artificial Sequence; identical to SEQ ID NO: 46838
  derived and/or modified CDS sequence (wt) from neuraminidase__InfluenzaA__ABD61373

SEQ ID NO: 46856 - RNA, 1410 nt, Artificial Sequence
  derived and/or modified CDS sequence (wt) from neuraminidase__InfluenzaA__ABD61384
augaauccaaaucaaaagauaauaacgauuggcucuguuucucucaccauugccacaauaugcuuccuuaugcaaauugccauccugguaacuacuguaacguugcauuucaagcaauaugaaugcaacucccccccaaacaaccaagugaugcugugugaaccaacaauaauagaaagaaacauaacagagauaguguaucugaccaacaccaccauagagaaggaaauaugccccaaacuagcagaauacagaaauuggucaaagccgcaauguaacauuacaggauuugcaccuuuuucuaaggacaauucgauucggcuuuccgcugguggggacaucugggugacaagagaaccuuaugugucaugcgauccugacaaguguuaucaauuugcccuuggacagggaacaacacuaaacaacgggcauucaaaugacacaguacaugauaggaccccuuaucgaacccuauugaugaaugaguuggguguuccauuucauuugggaaccaagcaagugugcauagcaugguccagcucaaguugucacgauggaaaagcauggcugcauguuuguguaacgggggaugaugaaaaugcaacugcuagcuucauuuacaaugggaggcuuguagauaguaucgguucaugguccaaaaaaauccucaggacccaggagucggaaugcguuuguaucaauggaacuuguacaguaguaaugacugaugggagugcuucaggaaaagcugauacuaaaauacuauucauugaggaggggaaaaucguucauacuagcucauugucaggaagugcucagcaugucgaggagugcuccuguuauccucgauauccuggugucagaugugucugcagagacaacuggaaaggcuccaauaggcccaucguagauauaaauauaaaggauuauagcauuguuuccaguuaugugugcucaggacuuguuggagacacacccagaaaaaacgacagcuccagcaguagccauugcuuggauccuaacaaugaggaagguggucauggagugaaaggcugggccuuugaugauggaaaugacguguggaugggaagaacgaucagcgagaaguuacgcucaggauaugaaaccuucaaagucauugaaggcugguccaaaccuaacuccaaauugcagauaaauaggcaagucauaguugacagagguaauagguccgguuauucugguauuuucucuguugaaagcaaaagcugcaucaauaggugcuuuuauguggaguugauaaggggaaggaaacaggaaacugaagucuuguggaccucaaacaguauuguuguguuuuguggcaccucagguacauauggaacaggcucauggccugauggggcggacaucaaucucaugccuauauaa

SEQ ID NO: 46857 - RNA, 1410 nt, Artificial Sequence; identical to SEQ ID NO: 46807
  derived and/or modified CDS sequence (wt) from neuraminidase__InfluenzaA__ABD61395

SEQ ID NO: 46858 - RNA, 1410 nt, Artificial Sequence; identical to SEQ ID NO: 46839
  derived and/or modified CDS sequence (wt) from neuraminidase__InfluenzaA__ABD61406

SEQ ID NO: 46859 - RNA, 1413 nt, Artificial Sequence
  derived and/or modified CDS sequence (wt) from neuraminidase__InfluenzaA__ABD61521
augaauccaaaucaaaaaauaauaaccauuggaucaaucaguauagcaaucggaauaauuagucuaauguugcaaauaggaaauauuauuucaauaugggcuagucacucaauccaaacuggaagucaaaaccacacuggaauaugcaaccaaagaaucaucacauaugaaaacagcaccugggugaaucacacauauguuaauauuaacaacacuaauguuguugcuggaaaggacaaaacuucagugacauuggccggcaauucaucucuuuguucuaucaguggaugggcuauauacacaaaagacaacagcauaagaauuggauccaaaggagauguuuuugucauaagagaaccuuucauaucauguucucacuuggaaugcagaaccuucuuucugacccaaggugcucuauuaaaugacaaacauucaaaugggaccguuaaggacagaaguccuuauagggccuuaaugagcugcccucuaggugaagcuccguccccauacaauucaaaguuugaaucaguugcauggucagcaagcgcaugccaugauggcaugggcugguuaacaaucggaauuucugguccagacaauggagcuguggcuguacuaaaauacaacggcauaauaacugaaaccauaaaaaguuggaaaaagcgaauauuaagaacacaagagucugaaugugucugugugaacgggucauguuucaccauaaugaccgauggcccgaguaauggggccgccucguacaaaaucuucaagaucgaaaaggggaagguuacuaaaucaauagaguugaaugcacccaauuuucauuaugaggaauguuccuguuacccagacacuggcacagugauguguguaugcagggacaacuggcaugguucaaaucgaccuugggugucuuuuaaucaaaaccuggauuaucaaauaggauacaucugcagugggguguucggugacaauccgcgucccaaagauggagagggcagcuguaauccagugacuguugauggagcagacggaguaaagggguuuucauacaaauaugguaaugguguuuggauaggaaggacuaaaaguaacagacuuagaaagggguuugagaugauuugggauccuaauggauggacagauaccgacaguaauuucucagugaaacaggauguuguggcaauaacugauuggucaggguacagcggaaguuucguucaacauccugaguuaacaggauuggacuguauaagaccuugcuucuggguugaguuagucagaggacugccuagagaaaauacaacaaucuggacuagugggagcagcauuucuuuuuguggcguaaauagugauacugcaaacuggucuuggccagacggugcugaguugccguucaccauugacaaguag

SEQ ID NO: 46860 - RNA, 1410 nt, Artificial Sequence
  derived and/or modified CDS sequence (wt) from neuraminidase__InfluenzaA__ABD61532
augaauccaaaucaaaagauaauaacaauuggcucuguuucucucaccauugcaacaauaugcuuccuuaugcaaauugccauccugguaacuacuguaacauugcauuucaagcaauaugagugcagcucccccccaaacaaccaaguaaugccgugugaaccaauaauaauagaaagaaacauaacagagauaguguauuugacuaacaccaccauagagaaagagauaugccccaaacuaguggaauacagaaauuggucaaagccgcaauguaaaauuacaggauuugcaccuuuuucuaaggacaauucaauucggcuuuccgcugguggggacauuugggugacgagagaaccuuaugugucaugcgauccuggcaaguguuaucaauuugcacucgggcagggaaccacacuaaacaacaagcauucaaaugacacaauacaugauaggaccccuuaucgaacccuauugaugaaugaguuggguguuccauuucauuugggaaccaagcaagugugcauagcaugguccagcucaaguugucacgauggaaaagcauggcugcauguuugugucacugggcaugauaaaaaugcaacugcuagcuucauuuacgaugggaggcuuguagacaguauugguucaugguccaaaaauauccucaggacccaggagucggaaugcguuuguaucaaugggacuuguacaguaguaaugacugauggaagugcuucagaaagagcugauacuaaaauacuauucauugaagaggggaaaaucguucauauuagcccauugucaggaagugcucagcauguagaggaguguuccuguuauccucgauauccuggugucagaugugucugcagagacaacuggaaaggcuccaauaggcccaucguagauauaaaugugaaagauuauagcauuguuuccaguuaugugugcucagggcuuguuggcgacacacccagaaaaaacgacagauccagcaguagcuauugccggaauccuaacaaugagaaagggaaucauggagugaaaggcugggccuuugacgauggaaaugacguguggaugggaagaacgauuggcgaggaguuacgcucagguuaugaaaccuucaaagucauuggugguugguccacaccuaacuccaaauugcagauaaauaggcaagucauaguugacagcgagaauagguccgguuauucugguauuuucucuguugagggcaaaagcugcaucaauaggugcuuuuauguggaguugauaaggggaagggaacaggaaacuagagucugguggaccucaaacaguauuguuguguuuuguggcaccucagguacauauggaacaggcucauggccugauggagcggacaucagucucaugccuauauaa

SEQ ID NO: 46861 - RNA, 1413 nt, Artificial Sequence
  derived and/or modified CDS sequence (wt) from neuraminidase__InfluenzaA__ABD61543
augaauccaaaucaaaaaauaauaaccauuggaucaaucaguauagcaaucggaauaauuagucuaauguugcaaauaggaaauauuauuucaauaugggcuagucacucaauccaaacuggaagucaaaaccacacuggaauaugcaaccaaagaaucaucacauaugaaaacagcaccugggugaaucacacauauguuaauauuaacaacacuaauguuguugcuggaaaggacaaaacuucagugacauuggccggcaauucaucucuuuguucuaucaguggaugggcuauauacacaaaagacaacagcauaagaauuggauccaaaggagauguuuuugucauaagagaaccuuucauaucauguucucacuuggaaugcagaaccuuuuuucugacccaaggugcucuauuaaaugacaaacauucaaaugggaccguuaaggacagaaguccuuauagggccuuaaugagcugcccucuaggugaagcuccguccccauacaauucaaaguuugaaucaguugcauggucagcaagcgcaugccaugauggcaugggcugguuaacaaucggaauuucugguccagacaauggagcuguggcuguacuaaaauacaacggcauaauaacugaaaccauaaaaaguuggaaaaagcgaauauuaagaacacaagagucugaaugugucugugugaacgggucauguuucaccauaaugaccgauggcccgaguaauggggccgccucguacaaaaucuucaagaucgaaaaggggaagguuacuaaaucaauagaguugaaugcacccaauuuucauuaugaggaauguuccuguuacccagacacuggcacagugauguguguaugcagggacaacuggcaugguucaaaucgaccuugggugucuuuuaaucaaaaccuggauuaucaaauaggauacaucugcagugggguguucggugacaauccgcgucccaaagauggagagggcagcuguaauccagugacuguugauggagcagacggaguaaagggguuuucauacaaauaugguaaugguguuuggauaggaaggacuaaaaguaacagacuuagaaagggguuugagaugauuugggauccuaauggauggacagauaccgacaguaauuucucagugaaacaggauguuguggcaauaacugauuggucaggguacagcggaaauuucguucaacauccugaguuaacaggauuggacuguauaagaccuugcuucuggguugaguuagucagaggacugccuagagaaaauacaacaaucuggacuagugggagcagcauuucuuuuuguggcguaaauagugauacugcaaacuggucuuggccagacggugcugaguugccguucaccauugacaaguag

SEQ ID NO: 46862 - RNA, 1413 nt, Artificial Sequence; identical to SEQ ID NO: 46840
  derived and/or modified CDS sequence (wt) from neuraminidase__InfluenzaA__ABD63066

SEQ ID NO: 46863 - RNA, 1410 nt, Artificial Sequence
  derived and/or modified CDS sequence (wt) from neuraminidase__InfluenzaA__ABD77601
augaauccaaaucaaaagauaauaacgauuggcucuguuucucucaccauugccacaauaugcuuccuuaugcaaauugccauccugguaacuacuguaacauugcauuucaagcaauaugaaugcaacucccccccaaacaaccaagugaugcugugugaaccaacaauaauagaaagaaacauaacagagauaguauaucugaccaacaccaccauagagaaggaaauaugccccaaacuagcagaauacagaaauuggucaaagccgcaauguaacauuacaggauuugcaccuuuuucuaaggacaauucgauucggcuuuccgcugguggggacaucugggugacaagagaaccuuaugugucaugcgauccugacaaguguuaucaauuugcccuuggacagggaacaacacuaaacaacgggcauucaaaugacacaguacaugauaggaccccuuaucgaacccuauugaugaaugaguuggguguuccauuucauuugggaaccaagcaagugugcauagcaugguccagcucaaguugucacgauggaaaagcauggcugcauguuuguguaacgggggaugaugaaaaugcaacugcuagcuucauuuacaaugggaggcuuguagauaguauugguucaugguccaaaaaaauccucaggacccaggagucggaaugcguuuguaucaauggaacuuguacaguaguaaugacugaugggagugcuucaggaaaagcugauacuaaaauucuauucauugaggaggggaaaaucguucauacuagcucauugucaggaagugcucagcaugucgaggagugcuccuguuauccucgauauccuggugucagaugugucugcagagacaacuggaaaggcuccaauaggcccaucguagauauaaauguaaaggauuauagcauuguuuccaguuaugugugcucaggacuuguuggagacacacccagaaaaaacgacagcuccagcaguagccauugcuuggauccuaacaaugaggaagguggucauggagugaaaggcugggccuuugaugauggaaaugacguguggaugggaagaacgaucagcgagaaguuacgcucaggauaugaaaccuucaaagucauugaaggcugguccaaaccuaacuccaaauugcagauaaauaggcaagucauaguugacagaggcaauagguccgguuauucugguauuuucucuguugaaggcaaaagcugcaucaaucggugcuuuuauguggaguugauaaggggaaggaaacaggaaaccgaagucuuguggaccucaaacaguauuguuguguuuuguggcaccucagguacauauggaacaggcucauggccugauggggcggacaucaaucucaugccuauauaa

SEQ ID NO: 46864 - RNA, 1410 nt, Artificial Sequence
  derived and/or modified CDS sequence (wt) from neuraminidase__InfluenzaA__ABD77612
augaauccaaaucaaaagauaauaacgauuggcucuguuucacucaccauugccacaauaugcuuccuuaugcaaauugccauccugguaacuacuguaacguugcauuucaagcaauaugaaugcaacucccccccaaacaaccaagugaugcugugugaaccaacaauaauagaaagaaacauaacagagauaguguaucugaccaacaccaccauagagaaggaaaugugccccaaacuagcagaauacagaaauugguuaaagccgcaauguaacauuacaggauuugcaccuuuuucuaaggacaauucgauucggcuuuccgcugguggggacaucugggugacaagagaaccuuaugugucaugcgauccugacaaguguuaucaauuugcccuuggacagggaacaacacuaaacaacgggcauucaaaugacacaguacaugauaggaccccuuaucgaacccuauugaugaaugaauuggguguuccauuucauuugggaaccaagcaagugugcauagcaugguccagcucaaguugucacgauggaaaagcauggcugcauguuuguguaacgggggaugaugaaaaugcaacugcuagcaucauuuacaaugggaggcuuguagauaguaucgguucaugguccaaaaaaauccucaggacccaggagucggaaugcguuuguaucaauggaacuuguacaguaguaaugacugaugggagugcuucaggaaaagcugauacuaaaauacuauucauuaaggaggggaaaaucguucauacuagcucauugucaggaagugcucagcaugucgaggagugcuccuguuauccucgauauccuggugucagaugugucugcagagacaacuggaaaggcuccaauaggcccaucguagauauaaauguaaaggauuauagcauuguuuccaguuaugugugcucaggacuuguuggagacacacccagaaaaaacgacagcuccagcaguagccauugcuuggauccuaacaaugaggaagguggucauggagugaaaggcugggccuuugaugauggaaaugacguguggaugggaagaacgaucagcgagaaguuacgcucaggauaugaaaccuucaaagucauugaaggcugguccaaagcuaacuccaaauugcagauaaacaggcaagucauaguugacagagguaauagguccgguuauucugguauuuucucuguugaaagcaaaagcugcaucaauaggugcuuuuauguggaguugauaaggggaaggaaacaggaaacugaagucuuguggaccucaaacaguauuguuguguuuuguggcaccucagguacauauggaacaggcucauggccugauggggcggacaucaaucucaugccuauauaa

SEQ ID NO: 46865 - RNA, 1410 nt, Artificial Sequence
  derived and/or modified CDS sequence (wt) from neuraminidase__InfluenzaA__ABD77634
augaauccaaaucaaaagauaauaacgauuggcucuguuucacucaccauugccacaauaugcuuccuuaugcaaauugccauccugguaacuacuguaacguugcauuucaagcaauaugaaugcaacucccccccaaacaaccaagugaugcugugugaaccaacaauaauagaaagaaacauaacagagauaguguaucugaccaacaccaccauagagaaggaaaugugccccaaacuagcagaauacagaaauuggucaaagccgcaauguaacauuacaggauuugcaccuuuuucuaaggacaauucgauucggcuuuccgcugguggggacaucugggugacaagagaaccuuaugugucaugcgauccugacaaguguuaucaauuugcccuuggacagggaacaacacuaaacaacgggcauucaaaugacacaguacaugauaggaccccuuaucgaacccuauugaugaaugaauuggguguuccauuucauuugggaaccaagcaagugugcauagcaugguccagcucaaguugucacgauggaaaagcauggcugcauguuuguguaacgggggaugaugaaaaugcaacugcuagcaucauuuacaaugggaggcuuguagauaguaucgguucaugguccaaaaaaauccucaggacccaggagucggaaugcguuuguaucaauggaacuuguacaguaguaaugacugaugggagugcuucaggaaaagcugauacuaaaauacuauucauuaaggaggggaaaaucguucauacuagcucauugucaggaagugcucagcaugucgaggagugcuccuguuauccucgauauccuggugucagaugugucugcagagacaacuggaaaggcuccaauaggcccaucguagauauaaauguaaaggauuauagcauuguuuccaguuaugugugcucaggacuuguuggagacacacccagaaaaaacgacagcuccagcaguagccauugcuuggauccuaacaaugaggaagguggucauggagugaaaggcugggccuuugaugauggaaaugacguguggaugggaagaacgaucagcgagaaguuacgcucaggauaugaaaccuucaaagucauugaaggcugguccaaagcuaacuccaaauugcagauaaacaggcaagucauaguugacagagguaauagguccgguuauucugguauuuucucuguugaaagcaaaagcugcaucaauaggugcuuuuauguggaguugauaaggggaaggaaacaggaaacugaagucuuguggaccucaaacaguauuguuguguuuuguggcaccucagguacauauggaacaggcucauggccugauggggcggacaucaaucucaugccuauauaa

SEQ ID NO: 46866 - RNA, 1410 nt, Artificial Sequence; identical to SEQ ID NO: 46865
  derived and/or modified CDS sequence (wt) from neuraminidase__InfluenzaA__ABD77645

SEQ ID NO: 46867 - RNA, 1410 nt, Artificial Sequence
  derived and/or modified CDS sequence (wt) from neuraminidase__InfluenzaA__ABD77656
augaauccaaaucaaaagauaauaacgauuggcucuguuucacucaccauugccacaauaugcuuccuuaugcaaauugccauccugguaacuacuguaacguugcauuucaagcaauaugaaugcaacucccccccaaacaaccaagugaugcugugugaaccaacaauaauagaaagaaacauaacagagauaguguaucugaccaacaccaccauagagaaggaaaugugccccaaacuagcagaauacagaaauuggucaaagccgcaauguaacauuacaggauuugcaccuuuuucuaaggacaauucgauucggcuuuccgcugguggggacaucugggugacaagagaaccuuaugugucaugcgauccugacaaguguuaucaauuugcccuuggacagggaacaacacuaaacaacgggcauucaaaugacacaguacaugauaggaccccuuaucgaacccuauugaugaaugaguuggguguuccauuucauuugggaaccaagcaagugugcauagcaugguccagcucaaguugucacgauggaaaagcauggcugcauguuuguguaacgggggaugaugaaaaugcaacugcuagcaucauuuacaaugggaggcuuguagauaguaucgguucaugguccaaaaaaauccucaggacccaggagucggaaugcguuuguaucaauggaacuuguacaguaguaaugacugaugggagugcuucaggaaaagcugauacuaaaauacuauucauuaaggaggggaaaaucguucauacuagcucauugucaggaagugcucagcaugucgaggagugcuccuguuauccucgauauccuggugucagaugugucugcagagacaacuggaaaggcuccaauaggcccaucguagauauaaauguaaaggauuauagcauuguuuccaguuaugugugcucaggacuuguuggagacacacccagaaaaaacgacagcuccagcaguagccauugcuuggauccuaacaaugaggaagguggucauggagugaaaggcugggccuuugaugauggaaaugacguguggaugggaagaacgaucagcgagaaguuacgcucaggauaugaaaccuucaaagucauugaaggcugguccaaagcuaacuccaaauugcagauaaacaggcaagucauaguugacagagguaauagguccgguuauucugguauuuucucuguugaaagcaaaagcugcaucaauaggugcuuuuauguggaguugauaaggggaaggaaacaggaaacugaagucuuguggaccucaaacaguauuguuguguuuuguggcaccucagguacauauggaacaggcucauggccugauggggcggacaucaaucucaugccuauauaa

SEQ ID NO: 46868 - RNA, 1410 nt, Artificial Sequence
  derived and/or modified CDS sequence (wt) from neuraminidase__InfluenzaA__ABD77700
augaauccaaaucaaaagauaauaacgauuggcucuguuucucucacuauugccacaauaugcuuccuuaugcaaauugccauccugguaacuacuguaacacugcauuucaagcaauaugaaugcaacucccccccaaacaaccaaguaaugcugugugaaccaacaauaauagaaagaaacauaacagagauaguguaucugaccaacaccaccauagagaaggaaauaugccccaaacuagcagaauacagaaauuggucaaagccgcaauguaaaauuacaggauuugcaccuuuuucuaaggacaauucaauucggcuuuccgcugguggggacauuugggugacaagagaaccuuaugugucaugcgauccugacaaguguuaucaauuugcccuuggacagggaacaacacuaaacaacaggcauucaaaugacacaguacaugauaggaccccuuaucgaacccuauugaugaaugaguuggguguuccauuucauuugggaaccaagcaagugugcauagcaugguccagcucaaguugucacgauggaaaagcauggcugcauguuuguguaacugggcaugaugaaaaugcaacugcuagcuucauuuacgaugggaggcuuguagauaguauugguucaugguccaaaaaaauccucaggacccaggagucggaaugcguuuguaucaauggaacuuguacaguaguaaugacugaugggagugcuucaggaagagcugauacuaaaauacuauucauugaggaggggaaaaucguucauauuagcccauugucaggaagugcucagcaugucgaggagugcuccuguuauccucgauauccuggugucagaugugucugcagagacaacuggaaaggcuccaauaggcccaucguagauauaaauguaaaggauuauagcauuguuuccaguuaugugugcucaggacuuguuggagacacacccagaaaaaacgacagcuccagcaguagccauugccugaauccuaacaaugaggaagggggucauggagugaaaggcugggccuuugaugauggaaaugacguguggaugggaagaacgaucagcgagaaguuacgcucagguuaugaaaccuucaaagucauugaaggaugguccaaaccuaacuccaaauugcagauaaauaggcaagucauaguugacagagguaauagguccgguuauucugguauuuuuucuguugaaggcaaaagcugcaucaaucggugcuuuuauguggaguugauaaggggaaggaaacaggaaacugaagucugguggaccucaaacaguauuguuguguuuuguggcaccucagguacauauggaacaggcucauggccugauggggcggacaucaaucucaugccuauauaa

SEQ ID NO: 46869 - RNA, 1413 nt, Artificial Sequence; identical to SEQ ID NO: 46840
  derived and/or modified CDS sequence (wt) from neuraminidase__InfluenzaA__ABD77722

SEQ ID NO: 46870 - RNA, 1413 nt, Artificial Sequence; identical to SEQ ID NO: 46840
  derived and/or modified CDS sequence (wt) from neuraminidase__InfluenzaA__ABD77733

SEQ ID NO: 46871 - RNA, 1410 nt, Artificial Sequence
  derived and/or modified CDS sequence (wt) from neuraminidase__InfluenzaA__ABD77744
augaauccaaaucaaaagauaauaacgauuggcucuguuucucucaccauugccacaauaugcuuccuuaugcaaauugucauccugguaacuacuguaacauugcauuucaagcaauaugaaugcaacucccccccaaacaaccaagugaugcugugugaaccaacaauaauagaaagaaacauaacagagauaguguaucugaccaacaccaccauagagaaggaaauaugccccaaacuagcagaauacagaaauuggucaaagccgcaauguaacauuacuggauuugcaccuuuuucuaaggacaauucgauucggcuuuccgcugguggggacaucugggugacaagagaaccuuaugugucaugcgauccugacaaguguuaucaauuugcccuuggacagggaacaacacuaaacaacgggcauucaaaugacacaguacaugauaggaccccuuaucggacccuauugaugaaugaguuggguguuccauuucauuugggaaccaagcaagugugcauagcaugguccagcucaaguugucacgauggaaaagcauggcugcauguuuguguaacgggugaugaugaaaaugcaacugcuagcuucauuuacaaugggaggcuuguagauaguauagguucaugguccaaaaaaauccucaggacccaggagucggaaugcguuuguaucaauggaacuuguacaguaguaaugacugauggaagugcuucaggaaaagcugauacuaaaauacuauucauugaggaggggaaaaucguucauacuagccuauugucagggagugcucagcaugucgaggagugcuccuguuauccucgauauccuggugucagaugugucugcagagacaacuggaaaggcuccaauaggcccaucguagauauaaauguaaaggauuauagcauuguuuccaguuaugugugcucaggacuuguuggagacacacccagaaaaaacgacagcuccagcaguagccauugcuuggauccuaacaaugaggaagguggucauggagugaaaggcugggccuuugaugauggaaaugacguguggaugggaagaacgaucagcgagaaguuacgcucaggauaugaaaccuucaaagucauugaaggcugguccaaaccuaacuccaaacugcagauaaauaggcaagucauaguugacagagguaauagguccgguuauucugguauuuucucuguugaaggcaaaagcugcaucaaucggugcuuuuauguggaguugauaaggggaaggaaacaggaaacugaagucuuguggaccucaaacaguauuguuguguuuuguggcaccucagguacauauggaacaggcucauggccugauggggcggacaucaaucucaugccuauauaa

SEQ ID NO: 46872 - RNA, 1410 nt, Artificial Sequence; identical to SEQ ID NO: 46867
  derived and/or modified CDS sequence (wt) from neuraminidase__InfluenzaA__ABD77755

SEQ ID NO: 46873 - RNA, 1410 nt, Artificial Sequence; identical to SEQ ID NO: 46865
  derived and/or modified CDS sequence (wt) from neuraminidase__InfluenzaA__ABD77766

SEQ ID NO: 46874 - RNA, 1410 nt, Artificial Sequence
  derived and/or modified CDS sequence (wt) from neuraminidase__InfluenzaA__ABD77777
augaauccaaaucaaaagauaauaacgauuggcucuguuucucucaccauugccacaauaugcuuccuuaugcaaauugucauccugguaacuacuguaacauugcauuucaagcaauaugaaugcaacucccccccaaacaaccaagugaugccgugugaaccaacaauaauagaaagaaacauaacagagauaguguaucugaccaacaccaccauagagaaggaaauaugccccaaacuagcagaauacagaaauuggucaaagccgcaauguaacauuacuggauuugcaccuuuuucuaaagacaauucgauucggcuuuccgcugguggggacaucugggugacaagagaaccuuaugugucaugcgauccugacaaguguuaucaauuugcccuuggacagggaacaacacuaaacaacgggcauucaaaugacacaguacaugauaggaccccuuaucggacccuauugaugaaugaguuggguguuccauuucauuugggaaccaagcaagugugcauagcaugguccagcucaaguugucacgauggaaaagcauggcugcauguuuguguaacgggugaugaugaaaaugcaacugcuagcuucauuuacaaugggaggcuuguagauaguauagguucaugguccaaaaaaauccucaggacccaggagucggaaugcguuuguaucaauggaacuuguacaguaguaaugacugauggaagugcuucaggaaaagcugauacuaaaauacuauucauugaggaggggaaaaucguucauacuagccuauugucagggagugcucagcaugucgaggagugcuccuguuauccucgguauccuggugucagaugugucugcagagacaacuggaaaggcuccaauaggcccaucguagauauaaauguaaaggauuauagcauuguuuccaguuaugugugcucaggacuuguuggagacacacccagaaaaaacgacagcuccagcaguagccauugcuuggauccuaacaaugaggaagguggucauggagugaaaggcugggccuuugaugauggaaaugacguguggaugggaagaacgaucagcgagaaguuacgcucaggauaugaaaccuucaaagucauugaaggcugguccaaaccuaacuccaaacugcagauaaauaggcaagucauaguugacagagguaauagguccgguuauucugguauuuucucuguugaaggcaaaagcugcaucaaucggugcuuuuauguggaguugauaaggggaaggaaacaggaaacugaagucuuguggaccucaaacaguauuguuguguuuuguggcaccucagguacauauggaacaggcucauggccugauggggcggacaucaaucucaugccuauauaa

SEQ ID NO: 46875 - RNA, 1410 nt, Artificial Sequence
  derived and/or modified CDS sequence (wt) from neuraminidase__InfluenzaA__ABD77788
augaauccaaaucaaaagauaauaacgauuggcucuguuucucucaccauugccacaauaugcuuccuuaugcaaauugucauccugguaacuacuguaacauugcauuucaagcaauaugaaugcaacucccccccaaacaaccaagugaugccgugugaaccaacaauaauagaaagaaacauaacagagauaguguaucugaccaacaccaccauagagaaggaaauaugccccaaacuagcagaauacagaaauuggucaaagccgcaauguaacauuacuggauuugcaccuuuuucuaaggacaauucgauucggcuuuccgcugguggggacaucugggugacaagagaaccuuaugugucaugcgauccugacaaguguuaucaauuugcccuuggacagggaacaacacuaaacaacgggcauucaaaugacacaguacaugauaggaccccuuaucggacccuauugaugaaugaguuggguguuccauuucauuugggaaccaagcaagugugcauagcaugguccagcucaaguugucacgauggaaaagcauggcugcauguuuguguaacgggugaugaugaaaaugcaacugcuagcuucauuuacaaugggaggcuuguagauaguauagguucaugguccaaaaaaauccucaggacccaggagucggaaugcguuuguaucaauggaacuuguacaguaguaaugacugauggaagugcuucaggaaaagcugauacuaaaauacuauucauugaggaggggaaaaucguucauacuagccuauugucagggagugcucagcaugucgaggagugcuccuguuauccucgguauccuggugucagaugugucugcagagacaacuggaaaggcuccaauaggcccaucguagauauaaauguaaaggauuauagcauuguuuccaguuaugugugcucaggacuuguuggagacacacccagaaaaaacgacagcuccagcaguagccauugcuuggauccuaacaaugaggaagguggucauggagugaaaggcugggccuuugaugauggaaaugacguguggaugggaagaacgaucagcgagaaguuacgcucaggauaugaaaccuucaaagucauugaaggcugguccaaaccuaacuccaaacugcagauaaauaggcaagucauaguugacagagguaauagguccgguuauucugguauuuucucuguugaaggcaaaagcugcaucaaucggugcuuuuauguggaguugauaaggggaaggaaacaggaaacugaagucuuguggaccucaaacaguauuguuguguuuuguggcaccucagguacauauggaacaggcucauggccugauggggcggacaucaaucucaugccuauauaa

SEQ ID NO: 46876 - RNA, 1362 nt, Artificial Sequence
  derived and/or modified CDS sequence (wt) from neuraminidase__InfluenzaA__ABD77799
augaauccaaaccagaaaauaauaaccauugggucaaucuguaugguagucggaauaauuagccuaauauugcaaauagggaauauaaucucaauauggauuagccauucaauucaaaccggaaaucaaaaccauacuggaauaugcaaccaaggcaucauuaccuauaacguuguugcugggcaggacucaacuucagugauauuaaccggcaauucaucucuuugucccauccgugggugggcuauacacagcaaagacaauggcauaagaauugguuccaaaggagacguuuuugucauaagagagccuuuuauuucauguucucacuuggaaugcaggaccuuuuuucugacucaaggcgccuuacugaaugacaagcauucaaaugggaccguuaaggacagaagcccuuauagggccuuaaugagcugcccugucggugaagcuccguccccguacaauucaagguuugaaucgguugcuuggucagcaagugcaugucaugauggcaugggcuggcuaacaaucggaauuucugguccagauaauggagcaguggcuguauuaaaauacaacggcauaauaacugaaaccauaaaaaguuggaggaagaaaauauugagaacacaagagucugaauguaccuguguaaaugguucauguuuuaccauaaugaccgauggcccaaguaaugggcuggccucguacaaaauuuucaagaucgagaaggggaagguuacuaaaucaauagaguugaaugcaccuaauucucacuacgaggaauguuccuguuacccugauaccggcaaagugaugugugugugcagagacaauuggcacgguucgaaccgaccauggguguccuucgaccaaaaccuagauuaucaaauaggauacaucugcagugggguuuucggugacaacccgcgucccaaagauggaacaggcagcuguggcccagugucugcugauggagcaaacggaguaaagggauuuucauauagguaugguaaugguguuuggauaggaaggacuaaaagugacaguuccagacauggguuugagaugauuugggauccuaauggauggacagagacugauaguagguucucugugagacaagauguuguggcaaugacugaucggucaggguacagcggaaguuucguucaacauccugagcuaacagggcuagacuguaugaggccuugcuucuggguugaauuaaucaggggacgaccugaggaggaaacaaucuggacuagugggagcaucauuucuuuuuguggcgugaauagugauacuguagauuggucuuggccagacggugcugaguugccguucaccauugacaaguag

SEQ ID NO: 46877 - RNA, 1410 nt, Artificial Sequence
  derived and/or modified CDS sequence (wt) from neuraminidase__InfluenzaA__ABD77810
augaauccaaaucagaaaauaauaaccauuggaucaaucuguaugguagucggaauaauuagccuaauauugcaaauagggaauauugucucaauauggauuagccauucaauucaaacuggaaaucaaaaccauacuggaacuugcaaccaaagcaucauuaccuauaaaaauagcaccuggguaaaucaaacauaugucaauauuagcaacacuaacguuguugcugggaaggauacaacuucagugauauuagccggcaauucaucucuuugcccuauccgugggugggcuauauacagcaaagauaauggcguaagaauugguuccaaaggagauguuuuugucauaagagaacccuuuauuucauguucucacuuggaaugcaggaccuuuuuucugacccaaggcgcccuguugaaugacaagcauucaaaugggaccguuaaggacagaagcccuuauagggccuuaaugagcugcccuguuggugaagcuccguccccguacaacucaagguuugaaucgguugcuuggucagcaagugcaugucaugauggcaugggcuggcuaacaaucggaauuucugguccagaugauggagcaguggcuguguuaaaauacaacggcauaauaacugaaaccauaaaaaguuggaggaaggaaauauugagaacacaagagucugaaugugucugcguaaaugguucauguuucacuauaaugaccgacggcccgaguggugggccggccucguacaaaauuuucaagaucgagaaggggaagguuacuaaaucaauagaguuggaugcaccuaauucucacuacgaggaauguuccuguuacccugauaccagcaaagugaugugugugugcagagacaauuggcacgguucgaaccgaccaugggugucuuucgaucaaaaucuggauuaucaaaugggauacaucugcagugggguuuucggugacaauccgcgucccaaagauggaaaaggcagcugugguccaguguauguugauggagcaaacggaguaaagggauuuucauacagguaugguaaugguguuuggauagggaggacuaaaaguaacaguuccagacagggguucgagaugauuugggauccuaauggguggacagagacugauaguaauuucuuuacgaaacaagauguaguggcaguaaccgauuggucaggguacagcggaaguuucguucaacauccugagcuaacagggcuggacuguaugaggccuugcuucuggguugaauuaaucaggggacgaccuaaagaaaauacaaucuggaccagugggagcagcauuucuuuuuguggugugaauagugauacuguagauuggucuuggccagacggugccgaguugccauucaccauugacaaguag

SEQ ID NO: 46878 - RNA, 1410 nt, Artificial Sequence
  derived and/or modified CDS sequence (wt) from neuraminidase__InfluenzaA__ABD77832
augaauccaaaucaaaagauaauaacuauuggcucuguuucucucacuauugccacaauaugcuuccuuaugcaaauugccauccugguaacuacuguaacauuacauuucaagcaauaugaaugcaacucccccccaaacaaccaaguaaugcugugugaaccaacaauaauagaaagaaacauaacagagauaguguaucugaccaacaccaccauagagaaggaaauaugccccaaacuagcagaauacagaaauuggucaaagccgcaauguaaaauuacaggauuugcaccuuuuucuaaggacaauucaauucggcuuuccgcugguggggacauuugggugacaagagaaccuuaugugucaugugauccugacaaguguuaucaauuugcccuuggacagggaacaacacuaaacaacaggcauucaaaugacacaguacaugauaggaccccuuaucgaacccuauugaugaaugaguuggguguuccauuucauuugggaaccaagcaagugugcauagcaugguccagcucaaguugucacgauggaaaagcauggcugcauguuuguguaacugggcaugaugaaaaugcaacugcuagcuucauuuacggugggaggcuuguagauaguauugguucaugguccaaaaaaauccucaggacccaggagucggaaugcguuuguaucaauggaacuuguacaguaguaaugacugauggaagugcuuccggaagagcugauacuaaaauacuauucauugaagaggggaaaaucguucauauuaguccauugucaggaagugcucagcaugucgaggagugcuccuguuauccucgauauucuggugucagaugugucugcagagacaacuggaaaggcuccaauaggcccaucguagauauaaaugugaaagauuauagcauuguuuccaguuaugugugcucaggacuuguuggagacacacccagaaaaaacgacagcuccagcaguagccauugccugaauccuaacaaugaggaagggggucauggagugaaaggcugggccuuugaugauggaaaugacguguggaugggaagaacgaucagcgagaaguuucgcucagguuaugaaaccuucaaagucauuggaggcugguccaaaccuaacuccaaauugcagauaaauaggcaagucauaguugacagaggcaauagguccgguuauucugguauuuucucuguugaaggcaaaagcugcaucaaucggugcuuuuauguggaguugauaaggggaaggaaacaggaaacugaagucugguggaccucaaacaguauuguuguguuuuguggcaccucagguacauauggaacaggcucauggccugauggggcggacaucaaucucaugccuauauaa

SEQ ID NO: 46879 - RNA, 1410 nt, Artificial Sequence
  derived and/or modified CDS sequence (wt) from neuraminidase__InfluenzaA__ABD77876
augaauccaaaucaaaagauaauaacgauuggcucuguuucucucacuauugccacaauaugcuuccuuaugcaaauugccauccugguaacuacuguaacauugcauuucaagcaauaugaaugcaacucccccccaaacaaccaaguaaugcugugugaaccaacaauaauagaaagaaacauaacagagauaguguaucugaccaacaccaccauagagaaggaaauaugccccaaacuagcagaauacagaaauuggucaaagccgcaauguaaaauuacaggauuugcaccuuuuucuaaggacaauucaauucggcuuuccgcugguggggacauuugggugacaagagaaccuuaugugucaugcgauccugacaaguguuaucaauuugcccuuggacagggaacaacacuaaacaacaggcauucaaaugacacaguacaugauaggaccccuuaucgaacccuauugaugaaugaguuggguguuccauuucauuugggaaccaagcaagugugcauagcaugguccagcucaaguugucacgauggaaaagcauggcugcauguuuguguaacugggcaugaugaaaaugcaacugcuagcuucauuuacgaugggaggcuuguagauaguauugguucaugguccaaaaaaauccucaggacccaggagucggaaugcguuuguaucaauggaacuuguacaguaguaaugacugaugggagugcuucaggaagagcugauacuaaaauacuauucauugaggaggggaaaaucguucauauuagcccauugucaggaagugcucagcaugucgaggagugcuccuguuauccucgauacucuggugucagaugugucugcagagacaacuggaaaggcuccaauaggcccaucguagauauaaauguaaaggauuauagcauuguuuccaguuaugugugcucaggacuugucggagacacacccagaaaaaacgacagcuccagcaguagccauugccugaauccuaacaaugaggaagggggucauggagugaaaggcugggccuuugaugauggaaaugacguguggaugggaagaacgaucagcgagaaguuacgcucagguuaugaaaccuucaaagucauugaaggcugguccaaaccuaacuccaaauugcagauaaauaggcaagucauaguugacagagguaauagguccgguuauucugguauuuucucuguugaaggcaaaagcugcaucaaucggugcuuuuauguggaguugauaaggggaaggaaacaggaaacugaagucugguggaccucaaacaguauuguuguguuuuguggcacaucagguacauauggaacaggcucauggccugauggggcggacaucaaucucaugccuauauaa

SEQ ID NO: 46880 - RNA, 1410 nt, Artificial Sequence
  derived and/or modified CDS sequence (wt) from neuraminidase__InfluenzaA__ABD77887
augaauccaaaucaaaagauaauaacgauuggcucuguuucucucacuauugccacaauaugcuuccuuaugcaaauugccauccugguaacuacuguaacauugcauuucaagcaauaugaaugcaacucccccccaaacaaccaaguaaugcugugugaaccaacaauaauagaaagaaacauaacagagauaguguaucugaccaacaccaccauagagaaggaaauaugccccaaacuagcagaauacagaaauuggucaaagccgcaauguaaaauuacaggauuugcaccuuuuucuaaggacaauucaauucggcuuuccgcugguggggacauuugggugacaagagaaccuuaugugucaugcgauccugacaaguguuaucaauuugcccuuggacagggaacaacacuaaacaacaggcauucaaaugacacaguacaugauaggaccccuuaucgaacccuauugaugaaugaguuggguguuccauuucauuugggaaccaagcaagugugcauagcaugguccagcucaaguugucacgauggaaaagcauggcugcauguuuguguaacugggcaugaugaaaaugcaacugcuagcuucauuuacgaugggaggcuuguagauaguauugguucaugguccaaaaaaauccucaggacccaggagucggaaugcguuuguaucaauggaacuuguacaguaguaaugacugaugggagugcuucaggaagagcugauacuaaaauacuauucauugaggaggggaaaaucguucauauuagcccauugucaggaagugcucagcaugucgaggagugcuccuguuauccucgauacccuggugucagaugugucugcagagacaacuggaaaggcuccaauaggcccaucguagauauaaauguaaaggauuauagcauuguuuccaguuaugugugcucaggacuugucggagacacacccagaaaaaacgacagcuccagcaguagccauugccugaauccuaacaaugaggaagggggucauggaguaaaaggcugggccuuugaugauggaaaugacguguggaugggaagaacgaucagcgagaaguuacgcucagguuaugaaaccuucaaagucauugaaggcugguccaaaccuaacuccaaauugcagauaaauaggcaagucauaguugacagagguaauagguccgguuauucugguauuuucucuguugaaggcaaaagcugcaucaaucgaugcuuuuauguggaguugauaaggggaaggaaacaggaaacugaagucugguggaccucaaacaguauuguuguguuuuguggcacaucagguacauauggaacaggcucauggccugauggggcggacaucaaucucaugccuauauaa

SEQ ID NO: 46881 - RNA, 1410 nt, Artificial Sequence
  derived and/or modified CDS sequence (wt) from neuraminidase__InfluenzaA__ABD77898
augaauccaaaucaaaagauaauaacgauuggcucuguuucucucacuauugcuacaauaugcuuccuuaugcaaauugccauccugguaacuacuguaacauugcauuucaagcaauaugaaugcaacucccccccaaacaaccaaguaaugcugugugaaccaacaauaauagaaagaaacauaacagagauaguguaucugaccaacaccaccauagagaaggaaauaugccccaaacuagcagaauacagaaauuggucaaagccgcaauguaaaauuacaggauuugcaccuuuuucuaaggacaauucaauucggcuuuccgcugguggggacauuugggugacaagagaaccuuaugugucaugcgauccugacaaguguuaucaauuugcccuuggacagggaacaacacuaaacaacaggcauucaaaugacacaguacaugauaggaccccuuaucgaacccuauugaugaaugaguuggguguuccauuucauuugggaaccaagcaagugugcauagcaugguccagcucaaguugucacgauggaaaagcauggcugcauguuuguguaacugggcaugaugaaaaugcaacugcuagcuucauuuacgaugggaggcuuguagauaguauugguucaugguccaaaaaaauccucaggacccaggagucagaaugcguuuguaucaauggaacuuguacaguaguaaugacugaugggagugcuucaggaagagcugauacuaaaauacuauucauugaggaggggaaaaucauucauauuagcccauugucaggaagugcucagcaugucgaggagugcuccuguuauccucgauacccuggugucagaugugucugcagagacaacuggaaaggcuccaauaggcccaucguagauauaaauguaaaggauuauagcauuguuuccaguuaugugugcucaggacuugucggagacacacccagaaaaaacgacagcuccagcaguagccauugccugaauccuaacaaugaggaagggggucauggagugaaaggcugggccuuugaugauggaagugacguguggaugggaagaacgaucagcgagaaguuacgcucagguuaugaaaccuucaaagucauugaaggcugguccaaaccuaacuccaaauugcagauaaauaggcaagucauaguugacagagguaauagguccgguuauucugguauuuucucuguugaaggcaaaagcugcaucaaucggugcuuuuauguggaguugauaaggggaaggaaacaggaaacugaagucugguggaccucaaacaguauuguuguguuuuguggcacaucagguacauauggaacaggcucauggccugauggggcggacaucaaucucaugccuauauaa

SEQ ID NO: 46882 - RNA, 1410 nt, Artificial Sequence
  derived and/or modified CDS sequence (wt) from neuraminidase__InfluenzaA__ABD77909
augaauccaaaucaaaagauaauaacgauuggcucuguuucucucacuauugccacaauaugcuuccuuaugcaaauugccauccugguaacuacuguaacauugcauuucaagcaauaugaaugcaacucccccccaaacaaccaaguaaugcugugugaaccaacaauaauagaaagaaacauaacagagauaguguaucugaccaacaccaccauagagaaggaaauaugccccaaacuagcagaauacagaaauuggucaaagccgcaauguaaaauuacaggauuugcaccuuuuucuaaggacaauucaauucggcuuuccgcugguggggacauuugggugacaagagaaccuuaugugucaugcgauccugacaaguguuaucaauuugcccuuggacagggaacaacacuaaacaacaggcauucaaaugacacaguacaugauaggaccccuuaucgaacccuauugaugaaugaguuggguguuccauuucauuugggaaccaagcaagugugcauagcaugguccagcucaaguugucacgauggaaaagcauggcugcauguuuguguaacugggcaugaugaaaaugcaacugcuagcuucauuuacgaugggaggcuuguagauaguauugguucaugguccaaaaaaauccucaggacccaggagucggaaugcguuuguaucaauggaacuuguacaguaguaaugacugaugggagugcuucaggaagagcugauacuaaaauacuauucauugaggaggggaaaaucguucauauuagcccauugucaggaagugcucagcaugucgaggagugcuccuguuauccucgauacccuggugucagaugugucugcagagacaacuggaaaggcuccaacaggcccaucguagauauaaauguaaaggauuauagcauuguuuccaguuaugugugcucaggacuugucggagacacacccagaaaaaacgacagcuccagcaguagccauugccugaauccuaacaaugaggaagggggucauggaguaaaaggcugggccuuugaugauggaaaugacguguggaugggaagaacgaucagcgagaaguuacgcucagguuaugaaaccuucaaagucauugaaggcugguccaaaccuaacuccaaauugcagauaaauaggcaagucauaguugacagagguaauaguuccgguuauucugguauuuucucuguugaaggcaaaagcugcaucaaucgaugcuuuuauguggaguugauaaggggaaggaaacaggaaacugaagucugguggaccucaaacaguauuguuguguuuuguggcacaucagguacauauggaacaggcucauggccugauggggcggacaucaaucucaugccuauauaa

SEQ ID NO: 46883 - RNA, 1413 nt, Artificial Sequence; identical to SEQ ID NO: 46840
  derived and/or modified CDS sequence (wt) from neuraminidase__InfluenzaA__ABD77920

SEQ ID NO: 46884 - RNA, 1413 nt, Artificial Sequence; identical to SEQ ID NO: 46840
  derived and/or modified CDS sequence (wt) from neuraminidase__InfluenzaA__ABD77931

SEQ ID NO: 46885 - RNA, 1413 nt, Artificial Sequence
  derived and/or modified CDS sequence (wt) from neuraminidase__InfluenzaA__ABD77942
augaauccaaaucaaaaaauaauaaccauuggaucaaucaguauagcaaucggaauaauuagucuaauguugcaaauaggaaauauuauuucaauaugggcuagucacucaauccaaacuggaagucaaaaccacacuggaauaugcaaccaaagaaucaucacauaugaaaacagcaccugggugaaucacacauauguuaauauuaacaacacuaauguuguugcuggaaaggacaaaacuucagugacauuggccggcaauucaucucuuuguucuaucaguggaugggcuauauacacaaaagacaacagcauaagaauuggauccaaaggagauguuuuugucauaagagaaccuuucauaucauguucucacuuggaaugcagaaccuucuuucugacccaaggugcucuauuaaaugacaaacauucaaaugggaccguuaaggacagaaguccuuauagggccuuaaugagcugcccucuaggugaagcuccguccccauacaauucaaaguuugaaucaguugcauggucagcaagcgcaugccaugauggcaugggcugguuaacaaucggaauuucugguccagacaauggagcuguggcuguacuaaaauacaacggcauaauaacugaaaccauaaaaaguuggaaaaagcgaauauuaagaacacaagagucugaaugugucugugugaacgggucauguuucaccauaaugaccgauggcccgaguaauggggccgccucguacaaaaucuucaagaucgaaaaggggaagguuacuaaaucaauagaguugaaugcacccaauuuucauuaugaggaauguuccuguuacccagacacuggcacagugauguguguaugcagggacaacuggcaugguucaaaucgaccuugggugucuuuuaaucaaaaccuggauuaucaaauaggauacaucugcagugggguguucggugacaauccgcgucccaaagauggagagggcagcuguaauccagugacuguugauggagcagacggaguaaagggguuuucauacaaauaugguaaugguguuuggauaggaaggacuaaaaguaacagacuuagaaagggguuugagaugauuugggauccuaauggauggacagauaccgacaguaauuucucagugaaacaggauguuguggcaauaacugauuggucaggguacagcggaaguuucguucaacauccugaguuaacaggauuggacuguauaagaccuugcuucuggguugaguuagucagaggacugccuagagaaaauacaacaaucuggacuagugggagcagcauuucuuuuuguggcguaaauagugauacugcaaacuggucuuggccagacggugcugaguugccguucacuauugacaaguag

SEQ ID NO: 46886 - RNA, 1413 nt, Artificial Sequence
  derived and/or modified CDS sequence (wt) from neuraminidase__InfluenzaA__ABD77953
augaauccaaaucaaaaaauaauaaccauuggaucaaucaguauagcaaucggaauaauuagucuaauguugcaaauaggaaauauuauuucaauaugggcuagucacucaauccaaacuggaagucaaaaccacacuggaauaugcaaccaaagaaucaucacauaugaaaacagcaccugggugaaucacacauauguuaauauuaacaacacuaauguuguugcuggaaaggacaaaacuucagugacauuggccggcaauucaucucuuuguucuaucaguggaugggcuauauacacaaaagacaacagcauaagaauuggauccaaaggagauguuuuugucauaagagaaccuuucauaucauguucucacuuggaaugcagaaccuucuuucugacccaaggugcucuauuaaaugacaaacauucaaaugggaccguuaaggacagaaguccuuauagggccuuaaugagcugcccucuaggugaagcuccguccccauacaauucaaaguuugaaucaguugcauggucagcaagcgcaugccaugauggcaugggcugguuaacaaucggaauuucugguccagacaauggagcuguggcuguacuaaaauacaacggcauaauaacugaaaccauaaaaaguuggaaaaagcgaauauuaagaacacaagagucugaaugugucugugugaacgggucauguuucaccauaaugaccgauggcccgaguaauggggccgccucguacaaaaucuucaagaucgaaaaggggaagguuacuaaaucaauagaguugaaugcacccaauuuucauuaugaggaauguuccuguuacccagacacuggcacagugauguguguaugcagggacaacuggcaugguucaaaucgaccuugggugucuuuuaaucaaaaccuggauuaucaaauaggauacaucugcagugggguguucggugacaauccgcgucccaaagauggagagggcagcuguaauccagugacuguugauggagcagacggaguaaagggguuuucauacaaauaugguaaugguguuuggauaggaaggacuaaaaguaacagacuuagaaagggguuugagaugauuugggauccuaauggauggacagauaccgacaguaauuucucagugaaacaggauguuguggcaauaacugauuggucaggguacagcggaaguuucguucaacauccugaguuaacaggauuggacuguauaagaccuugcuucuugguugaguuagucagaggacugccuagagaaaauacaacaaucuggacuagugggagcagcauuucuuuuuguggcguaaauagugauacugcaaacuggucuuggccagacggugcugaguugccguucaccauugacaaguaa

SEQ ID NO: 46887 - RNA, 1413 nt, Artificial Sequence
  derived and/or modified CDS sequence (wt) from neuraminidase__InfluenzaA__ABD77964
augaauccaaaucaaaaaauaauaaccauuggaucaaucaguauagcaaucggaauaauuagucuaauguugcaaauaggaaauauuauuucaauaugggcuagucacucaauccaaacuagaagucaaaaccacacuggaauaugcaaccaaagaaucaucacauaugaaaacagcaccugggugaaucacacauauguuaauauuaacaacacuaauguuguugcuggaaaggacaaaacuucagugacauuggccggcaauucaucucuuuguucuaucaguggaugggcuauauacacaaaagacaacagcauaagaauuggauccaaaggagauguuuuugucauaagagaaccuuucauaucauguucucacuuggaaugcagaaccuuuuuucugacccaaggugcucuauuaaaugacaaacauucaaaugggaccguuaaggacagaaguccuuauagggccuuaaugagcugcccucuaggugaagcuccguccccauacaauucaaaguuugaaucaguugcauggucagcaagcgcaugccaugauggcaugggcugguuaacaaucggaauuucugguccagacaauggagcuguggcuguacuaaaauacaacggcauaauaacugaaaccauaaaaaguuggaaaaagcgaauauuaagaacacaagagucugaaugugucugugugaacgggucauguuucaccauaaugaccgauggcccgaguaauggggccgccucguacaaaaucuucaagaucgaaaaggggaagguuacuaaaucaauagaguugaaugcacccaauuuucauuaugaggaauguuccuguuacccagacacuggcacagugauguguguaugcagggacaacuggcaugguucaaaucgaccuugggugucuuuuaaucaaaaccuggauuaucaaauaggauacaucugcagugggguguucggugacaauccgcgucccaaagauggagagggcagcuguaauccagugacuguugauggagcagacggaguaaagggguuuucauacaaauaugguaaugguguuuggauaggaaggacuaaaaguaacagacuuagaaagggguuugagaugauuugggauccuaauggauggacagauaccgacaguaauuucucagugaaacaggauguuguggcaauaacugauuggucaggguacagcggaaguuucguucaacauccugaguuaacaggauuggacuguauaagaccuugcuucuggguugaguuagucagaggacugccuagagaaaauacaacaaucuggacuagugggagcagcauuucuuuuuguggcguaaauagugauacugcaaacuggucuuggccagacggugcugaguugccguucaccauugacaaguag

SEQ ID NO: 46888 - RNA, 1413 nt, Artificial Sequence
  derived and/or modified CDS sequence (wt) from neuraminidase__InfluenzaA__ABD77975
augaauccaaaucaaaaaauaauaaccauuggaucaaucaguauagcaaucggaauaauuagucuaauguugcaaauaggaaauauuauuucaauaugggcuagucacucaauccaaacuggaagucaaaaccacacuggaauaugcaaccaaagaaucaucacauaugaaaacagcaccugggugaaucacacauauguuaauauuaacaacacuaauguuguugcuggaaaggacaaaacuucagugacauuggccggcaauucaucucuuuguuccaucaguggaugggcuauauacacaaaagacaacagcauaagaauuggauccaaaggagauguuuuugucauaagagaaccuuucauaucauguucucacuuggaaugcagaaccuuuuuucugacccaaggugcucuauuaaaugacaaacauucaaaugggaccguuaaggacagaaguccuuauagggccuuaaugagcugcccucuaggugaagcuccguccccauacaauucaaaguuugaaucaguugcauggucagcaagcgcaugccaugauggcaugggcugguuaacaaucggaauuucugguccagacaauggagcuguggcuguacuaaaauacaacggcauaauaacugaaaccauaaaaaguuggaaaaagcgaauauuaagaacacaagagucugaaugugucugugugaacgggucauguuucaccauaaugaccgauggcccgaguaauggggccgccucguacaaaaucuucaagaucgaaaaggggaagguuacuaaaucaauagaguuaaaugcacccaauuuucauuaugaggaauguuccuguuacccagacacuggcacagugauguguguaugcagggacaacuggcaugguucaaaucgaccuugggugucuuuuaaucaaaaccuggauuaucaaauaggauacaucugcagugggguguucggugacaauccgcgucccaaagauggagagggcagcuguaauccagugacuguugauggagcagacggaguaaagggguuuucauacaaauaugguaaugguguuuggauaggaaggacuaaaaguaacagacuuagaaagggguuugagaugauuugggauccuaauggauggacagauaccgacaguaauuucucagugaaacaggauguuguggcaauaacugauuggucaggguacagcggaaguuucguucaacauccugaguuaacaggauuggacuguauaagaccuugcuucuggguugaguuagucagaggacugccuagagaaaauacaacaaucuggacuagugggagcagcauuucuuuuuguggcguaaauagugauacugcaaacuggucuuggccagacggugcugaguugccguucaccauugacaaguag

SEQ ID NO: 46889 - RNA, 1413 nt, Artificial Sequence
  derived and/or modified CDS sequence (wt) from neuraminidase__InfluenzaA__ABD77986
augaauccaaaucaaaaaauaauaaccauuggaucaaucaguauagcaaucggaauaauuagucuaauguugcaaauaggaaauauuauuucaauaugggcuagucacucaauccaaacuggaagucaaaaccacacuggaauaugcaaccaaagaaucaucacauaugaaaacagcaccugggugaaucacacauauguuaauauuaacaacacuaauguuguugcuggaaaggacaaaacuucagugacauuggccggcaauucaucucuuuguuccaucaguggaugggcuauauacacaaaagacaacagcauaagaauuggauccaaaggagauguuuuugucauaagagaaccuuucauaucauguucucacuuggaaugcagaaccuuuuuucugacccaaggugcucuauuaaaugacaaacauucaaaugggaccguuaaggacagaaguccuuauagggccuuaaugagcugcccucuaggugaagcuccguccccauacaauucaaaguuugaaucaguugcauggucagcaagcgcaugccaugauggcaugggcugguuaacaaucggaauuucugguccagacaauggagcuguggcuguacuaaaauacaacggcauaauaacugaaaccauaaaaaguuggaaaaagcgaauauuaagaacacaagagucugaaugugucugugugaacgggucauguuucaccauaaugaccgauggcccgaguaauggggccgccucguacaaaaucuucaagaucgaaaaggggaagguuacuaaaucaauagaguugaaugcacccaauuuucauuaugaggaauguuccuguuacccagacacuggcacagugauguguguaugcagggacaacuggcaugguucaaaucgaccuugggugucuuuuaaucaaaaccuggauuaucaaauaggauacaucugcagugggguguucggugacaauccgcgucccaaagauggagagggcagcuguaauccagugacuguugauggagcagacggaguaaagggguuuucauacaaauaugguaaugguguuuggauaggaaggacuaaaaguaacagacuuagaaagggguuugagaugauuugggauccuaauggauggacagauaccgacaguaauuucucagugaaacaggauguuguggcaauaacugauuggucaggguacagcggaaguuucguucaacauccugaguuaacaggauuggacuguauaagaccuugcuucuggguugaguuagucagaggacugccuagagaaaauacaacaaucuggacuagugggagcagcauuucuuuuuguggcguaaauagugauacugcaaacuggucuuggccagacggugcugaguugccguucaccauugacaaguag

SEQ ID NO: 46890 - RNA, 1413 nt, Artificial Sequence
  derived and/or modified CDS sequence (wt) from neuraminidase__InfluenzaA__ABD77997
augaauccaaaucaaaaaauaauaaccauuggaucaaucaguauagcaaucggaauacuuagucuaauguugcaaauaggaaauauuauuucaauaugggcuagucacucaauccaaacuggaagucaaaaccacacuggaauaugcaaccaaagaaucaucacauaugaaaacagcaccugggugaaucacacauauguuaauauuaacaacacuaauguuguugcuggaaaggacaaaacuucagugacauuggccggcaauucaucucuuuguuccaucaguggaugggcuauauacacaaaagacaacagcauaagaauuggauccaaaggagauguuuuugucauaagagaaccuuucauaucauguucucacuuggaaugcagaaccuuuuuucugacccaaggugcucuauuaaaugacaaacauucaaaugggaccguuaaggacagaaguccuuauagggccuuaaugagcugcccucuaggugaagcuccguccccauacaauucaaaguuugaaucaguugcauggucagcaagcgcaugccaugauggcaugggcugguuaacaaucggaauuucugguccagacaauggagcuguggcuguacuaaaauacaacggcauaauaacugaaaccauaaaaaguuggaaaaagcgaauauuaagaacacaagagucugaaugugucugugugaacgggucauguuucaccauaaugaccgauggcccgaguaauggggccgccucguacaaaaucuucaagaucgaaaaggggaagguuacuaaaucaauagaguugaaugcacccaauuuucauuaugaggaauguuccuguuacccagacacuggcacagugauguguguaugcagggacaacuggcaugguucaaaucgaccuugggugucuuuuaaucaaaaccuggauuaucaaauaggauacaucugcagugggguguucggugacaauccgcgucccaaagauggagagggcagcuguaauccagugacuguugauggagcagacggaguaaagggguuuucauacaaauaugguaaugguguuuggauaggaaggacuaaaaguaacagacuuagaaagggguuugagaugauuugggauccuaauggauggacagauaccgacaauaauuucucagugaaacaggauguuguggcaauaacugauuggucaggguacagcggaaguuucguucaacauccugaguuaacaggauuggacuguauaagaccuugcuucuggguugaguuagucagaggacugccuagagaaaauacaacaaucuggacuagugggagcagcauuucuuuuuguggcguaaauagugauacugcaaacuggucuuggccagacggugcugaguugccguucaccauugacaaguag

SEQ ID NO: 46891 - RNA, 1413 nt, Artificial Sequence
  derived and/or modified CDS sequence (wt) from neuraminidase__InfluenzaA__ABD78008
augaauccaaaucaaaaaauaauaaccauuggaucaaucaguauagcaaucggaauaauuagucuaauguugcaaauaggaaauauuauuucaauaugggcuagucacucaauccaaacuggaagucaaaaccacacuggaauaugcaaccaaagaaucaucacauaugaaaacagcaccugggugaaucacacauauguuaauauuaacaacacuaauguuguugcuggaaaggacaaaacuucagugacauuggccggcaauucaucucuuuguuccaucaguggaugggcuauauacacaaaagacaacagcauaagaauuggauccaaaggagauguuuuugucauaagagaaccuuucauaucauguucucacuuggaaugcagaaccuuuuuucugacccaaggugcucuauuaaaugacaaacauucaaaugggaccguuaaggacagaaguccuuauagggccuuaaugagcugcccucuaggugaagcuccguccccauacaauucaaaguuugaaucaguugcauggucagcaagcgcaugccaugauggcaugggcugguuaacaaucggaauuucugguccagacaauggagcuguggcuguacuaaaauacaacggcauaauaacugaaaccauaaaaaguuggaaaaagcgaauauuaagaacacaagagucugaaugugucugugugaacgggucauguuucaccauaaugaccgauggcccgaguaauggggccgccucguacaaaaucuucaagaucgaaaaggggaagguuacuaaaucaauagaguugaaugcacccaauuuucauuaugaggaauguuccuguuacccagacacuggcacagugauguguguaugcagggacaacuggcaugguucaaaucgaccuugggugucuuuuaaucaaaaccuggauuaucaaauaggauacaucugcagugggguguucggugacaauccgcgucccaaagauggagagggcagcuguaauccagugacuguugauggagcagacggaguaaagggguuuucauacaaauaugguaaugguguuuggauaggaaggacuaaaaguaacagacuuagaaagggguuugagaugauuugggauccuaauggauggacagauaccgacaguaauuucucagugaaacaggauguuguggcaauaacugauuggucaggguacagcggaaguuucguucaacauccugaguuaacaggauuggacuguauaagaccuugcuucuggguugaguuagucagaggacugccuagagaaaauacaacaauuuggacuagugggagcagcauuucuuuuuguggcguaaauagugauacugcaaacuggucuuggccagacggugcugaguugccguucaccauugacaaguag

SEQ ID NO: 46892 - RNA, 1413 nt, Artificial Sequence; identical to SEQ ID NO: 46840
  derived and/or modified CDS sequence (wt) from neuraminidase__InfluenzaA__ABD78019

SEQ ID NO: 46893 - RNA, 1413 nt, Artificial Sequence
  derived and/or modified CDS sequence (wt) from neuraminidase__InfluenzaA__ABD78030
augaauccaaaucaaaaaauaauaaccauuggaucaaucaguauagcaauuggaauaauuagucuaauguugcaaauaggaaauauuauuucaauaugggcuagucacucaauccaaacuggaagucaaaaccacacuggaauaugcaaccaaagaaucaucacauaugaaaacagcaccugggugaaucacacauauguuaauauuaacaacacuaauguuguugcuggaaaggacaaaacuucagugacauuggccggcaauucaucucuuuguucuaucaguggaugggcuauauacacaaaagacaacagcauaagaauuggauccaaaggagauguuuuugucauaagagaaccuuucauaucauguucucacuuggaaugcagaaccuuuuuucugacccaaggugcucuauuaaaugacaaacauucaaauaggaccguuaaggacagaaguccuuauagggccuuaaugagcugcccucuaggugaagcuccguccccauacaauucaaaguuugaaucaguugcauggucagcaagcgcaugccaugauggcaugggcugguuaacaaucggaauuucugguccagacaauggagcuguggcuguacuaaaauacaauggcauaauaacugaaaccauaaaaaguuggaaaaagcgaauauuaagaacacaagagucugaaugugucugugugaacgggucauguuucaccauaaugaccgauggcccgaauaauggggccgccucguacaaaaucuucaagaucgaaaaggggaagguuacuaaaucaauagaguugaaugcacccaauuuccauuaugaggaauguuccuguuacccagacacuggcacagugauguguguaugcagggacaacuggcaugguucaaaucgaccuugggugucuuuuaaucaaaaccuggauuaucaaauaggauacaucugcagugggguguucggugacaauccgcgucccaaagauggagagggcagcuguaauccagugacuguugauggagcagacggaguaaagggguuuucauacaaauaugguaaugguguuuggauaggaaggacuaaaaguaacagacuuagaaagggguuugagaugauuugggauccuaauggauggacagauaccgacaguaauuucucagugaaacaggauguuguggcaauaacugauuggucaggguacagcggaaguuucguucaacauccugaguuaacaggauuggacuguauaagaccuugcuucuggguugaguuagucagaggacugccuagagaaaauacaacaaucuggacuagugggagcagcauuucuuuuuguggcguaaauagugauacugcaaacuggucuuggccagacggugcugaguugccguucaccauugacaaguag

SEQ ID NO: 46894 - RNA, 1413 nt, Artificial Sequence
  derived and/or modified CDS sequence (wt) from neuraminidase__InfluenzaA__ABD78041
augaauccaaaucaaaaaauaauaaccauuggaucaaucaguauagcaaucggaauaauuagucuaauguugcaaauaggaaauauuauuucaauaugggcuagucacucaauccaaacuggaagucaaaaccacacuggaauaugcaaccaaagaaucaucacauaugaaaacagcaccugggugaaucacacauauguuaauauuaacaacacuaauguuguugcuggaaaggacaaaacuucagugacauuggccggcaauucaucucuuuguucuaucaguggaugggcuauauacacaaaagacaacagcauaagaauuggauccaaaggagauguuuuugucauaagagaaccuuucauaucauguucucacuuggaaugcagaaccuuuuuucugacccaaggugcucuauuaaaugacaaacauucaaaugggaccguuaaggacagaaguccuuauagggccuuaaugagcugcccucuaggugaagcuccguccccauacaauucaaaguuugaaucaguugcauggucagcaagcgcaugccaugauggcaugggcugguuaacaaucggaauuucugguccagacaauggagcuguggcuguacuaaaauacaacggcauaauaacugaaaccauaaaaaguuggaaaaagcgaauauuaagaacacaagagucugaaugugucugugugaacgggucauguuucaccauaaugaccgauggcccgaguaauggggccgccucguacaaaaucuucaagaucgaaaaggggaagguuacuaaaucaauagaguugaaugcacccaauuuucauuaugaggaauguuccuguuacccagacacuagcacagugauguguguaugcagggacaacuggcaugguucaaaucgaccuugggugucuuuuaaucaaaaccuggauuaucaaauaggauacaucugcagugggguguucggugacaauccgcgucccaaagauggagagggcagcuguaauccagugacuguugauggagcagacggaguaaagggguuuucauacaaauaugguaaugguguuuggauaggaaggacuaaaaguaacagacuuagaaagggguuugagaugauuugggauccuaauggauggacagauaccgacaguaauuucucagugaaacaggauguuguggcaauaacugauuggucaggguacagcggaaguuucguucaacauccugaguuaacaggauuggacuguauaagaccuugcuucuggguugaguuagucagaggacugccuagagaaaauacaacaaucuggacuagugggagcagcauuucuuuuuguggcguaaauagugauacugcaaacuggucuuggccagacggugcugaguugccguucaccauugacaaguag

SEQ ID NO: 46895 - RNA, 1410 nt, Artificial Sequence; identical to SEQ ID NO: 46875
  derived and/or modified CDS sequence (wt) from neuraminidase__InfluenzaA__ABD78052

SEQ ID NO: 46896 - RNA, 1413 nt, Artificial Sequence
  derived and/or modified CDS sequence (wt) from neuraminidase__InfluenzaA__ABD78063
augaauccaaaucaaaaaauaauaaccauuggaucaaucaguauagcaaucggaauaauuagccuaauguugcaaauaggaaacauuauuucaauaugggcuagucacucaauccaaacuggaagucaaaaccacacuggaguaugcaaccaaagaaucaucacauaugaaaacagcaccugggugaaucacacauauguuaauauuaacaacaccaauguuauugcuggaaaggacaaaacuucagugacauuggccggcaauucaucucuuuguucuaucaguggaugggcuauauacacaaaagacaacagcauaagaauugguuccaaaggagauguuuuugucauaagagagccuuucauaucauguucucacuuggaaugcagaaccuuuuuucugacccaaggugcucuauuaaaugacaaacauucaaaugggaccguuaaggacagaagucccuauagggcuuuaaugagcuguccucuaggugaagcuccguccccauacaauucaaaguuugaaucaguugcuuggucagcaagcgcaugccaugauggcaugggcugguuaacaaucggaauuucugguccagacaauggagcaguggcuguacuaaaauacaacgguauaauaacugaaaccauaaaaaguuggaaaaagcaaauauuaagaacacaagagucugaaugugucugugugaacgggucauguuucaccauaaugaccgauggcccgaguaauggggccgccucguacaaaaucuucaagaucgaaaagggaaagguuacuaaaucaauagaguugaaugcacccaauuuucauuaugaggaguguuccuguuacccagacacuggcacagugauguguguaugcagggacaacuggcaugguucaaaucgacccugggugucuuuuaaucaaaaccuggauuaucaaauaggauacaucugcagugggguguucggugacaauccgcgucccaaagauggagagggcagcuguaauccagugacuguugauggagcaaacggaguaaagggguuuucauacaaauaugguaaugguguuuggauaggaaggacuaaaaguaacagacuuagaaagggguuugagaugauuugggauccuaauggauggacagauaccgacagugauuucucagugaaacaggauguuguggcaauaacugauuggucaggguacagcggaaguuucguucaacauccugaguuaacaggauuggacuguauaagaccuugcuucuggguugaguuagucagaggacugccaaaagaaaauacaacaaucuggacuagugggagcagcauuucuuuuuguggcguaaauagugauacugcaaacuggucuuggccagacggugcugaguugccguuuaccauugacaaguag

SEQ ID NO: 46897 - RNA, 1413 nt, Artificial Sequence
  derived and/or modified CDS sequence (wt) from neuraminidase__InfluenzaA__ABD78074
augaauccaaaucaaaaaauaauaaccauuggaucaaucaguauagcaaucggaauaauuagccuaauguugcaaauaggaaacauuauuucaauaugggcuagucacucaauccaaacuggaagucaaaaccacacuggaguaugcaaccaaagaaucaucacauaugaaaacagcaccugggugaaucacacauauguuaauauuaacaacaccaauguuauugcuggaaaggacaaaacuucagugacauuggccggcaauucaucucuuuguucuaucaguggaugggcuauauacacaaaagacaacagcauaagaauugguuccaaaggagauguuuuugucauaagagagccuuucauaucauguucucacuuggaaugcagaaccuuuuuucugacccaaggugcucuauuaaaugacaaacauucaaaugggaccguuaaggacagaagccccuauagggcuuuaaugagcuguccucuaggugaagcuccguccccauacaauucaaaguuugaaucaguugcuuggucagcaagcgcaugccaugauggcaugggcugguuaacaaucggaauuucugguccagacaauggagcaguggcuguacuaaaauacaacggcauaauaacugaaaccauaaaaaguuggaaaaagcaaauauuaagaacacaagagucugaaugugucugugugaacgggucauguuucaccauaaugaccgauggcccgaguaauggggccgccucguacaaaaucuucaagaucgaaaagggaaagguuacuaaaucaauagaguugaaugcacccaauuuucauuaugaggaauguuccuguuacccagacacuggcacagugauguguguaugcagggacaacuggcaugguucaaaucgacccugggugucuuuuaaucaaaaccuggauuaucaaauaggauacaucugcagugggguguucggugacaauccgcgucccaaagauggagagggcagcuguaauccagugacuguugauggagcaaacggaguaaagggguuuucauacaaauaugguaaugguguuuggauaggaaggacuaaaaguaacagacuuagaaagggguuugagaugauuugggauccuaauggauggacagauaccgacagugauuucucagugaaacaggauguuguggcaauaacugauuggucuggguacagcggaaguuucguucaacauccugaguuaacaggauuggacuguauaagaccuugcuucuggguugaguuagucagaggacugccaaaagaaaauacaacaaucuggacuagugggagcagcauuucuuuuuguggcguaaauagugauacugcaaacuggucuuggccagacggugcugaguugccguuuaccauugacaaguag

SEQ ID NO: 46898 - RNA, 1413 nt, Artificial Sequence; identical to SEQ ID NO: 46897
  derived and/or modified CDS sequence (wt) from neuraminidase__InfluenzaA__ABD78085

SEQ ID NO: 46899 - RNA, 1413 nt, Artificial Sequence; identical to SEQ ID NO: 46897
  derived and/or modified CDS sequence (wt) from neuraminidase__InfluenzaA__ABD78096

SEQ ID NO: 46900 - RNA, 1410 nt, Artificial Sequence
  derived and/or modified CDS sequence (wt) from neuraminidase__InfluenzaA__ABD78118
augaauccaaaucaaaagauaauaacuauuggcucuguuucucucacuauugccacaauaugcuuccuuaugcaaauugccauccugguaacuacuguaacauuacauuucaagcaauaugaaugcaacucccccccaaacaaccaaguaaugcugugugaaccaacaauaauagaaagaaacauaacagagauaguguaucugaccaacaccaccauagagaaggaaaugugccccaaacuagcagaauacagaaauuggucaaagccgcaauguaaaauuacaggauuugcaccuuuuucuaaggacaauucaauucggcuuuccgcugguggggacauuugggugacaagagaaccuuaugugucaugugauccugacaaguguuaucaauuugcccuuggacagggaacaacacuaaacaacaggcauucaaaugacacaguacaugauaggaccccuuaucgaacccuauugaugaaugaguuggguguuccauuucauuugggaaccaagcaagugugcauagcaugguccagcucaaguugucacgauggaaaagcauggcugcauguuuguguaacugggcaugaugaaaaugcaacugcuagcuucauuuacgaugggaggcuuguagauaguauugguucaugguccaaaaaaauccucaggacccaggagucggaaugcguuuguaucaauggaacuuguacaguaguaaugacugauggaagugcuuccggaagagcugauacuaaaauacuauucauugaagaggggaaaaucguucauauuaguccauugucaggaagugcucagcaugucgaggagugcuccuguuauccucgauauucuggugucagaugugucugcagagacaacuggaaaggcuccaauaggcccaucguagauauaaaugugaaagauuauagcauuguuuccaguuaugugugcucaggacuuguuggagacacacccagaaaaaacgacagcuccagcaguagccauugccugaauccuaacaaugaggaagggggucauggagugaaaggcugggccuuugaugauggaaaugacguguggaugggaagaacgaucagcgagaaguuucgcucagguuaugaaaccuucaaagucauuggaggcugguccaaaccuaacuccaaauugcagauaaauaggcaagucauaguugacagagguaauagguccgguuauucugguauuuucucuguugaaggcaaaagcugcaucaaucggugcuuuuauguggaguugauaaggggaaggaaacaggaaacugaagucugguggaccucaaacaguauuguuguguuuuguggcaccucagguacauauggaacaggcucauggccugauggggcggacaucaaucucaugccuauauaa

SEQ ID NO: 46901 - RNA, 1410 nt, Artificial Sequence; identical to SEQ ID NO: 46900
  derived and/or modified CDS sequence (wt) from neuraminidase__InfluenzaA__ABD78129

SEQ ID NO: 46902 - RNA, 1410 nt, Artificial Sequence; identical to SEQ ID NO: 46345
  derived and/or modified CDS sequence (wt) from neuraminidase__InfluenzaA__ABD79035

SEQ ID NO: 46903 - RNA, 1353 nt, Artificial Sequence
  derived and/or modified CDS sequence (wt) from neuraminidase__InfluenzaA__ABD79115
augaauccaaaucagaaaauaauaaccauuggaucaaucuguaugguagucggaauaauuagccuaauauuucaaauagggaauauugucucaauauggauuagccauucaauuacuggaacuugcaaccgaagcaucuaugucaauauuagcaacacuaacguuguugcugggaaggauacaacuucagugauauuagccggcaauucaucucuuugcccuauccguggaugggcuauauacagcaaagauaauggcguaagaauugguuccaaaggagauguuuuugucauaagagaacccuuuauuucauguucucacuuggaaugcaggaccuuuuuucugacccaaggcgcccuguugaaugacaagcauucaaaugggaccguuaaggacagaagcccuuauaggaccuuaaugagcugcccuguuggugaagcuccguccccguacaauucaagguuugaaucgguugcuuggucagcaagugcaugucaugauggcaugggcuggcuaacaaucggaauuucugguccagaugauggagcaguggcuguguuaaaauacaacggcauaauaacuggaaccauaaaaaguuggaggaaggaaauauugagaacacaagagucugaaugugucugcguaaaugguucauguuucacuauaaugaccgacggcccgaguggugggccggccucguacaaaaucuucaagauugagaaggggaagguuacuaaaucaauagaguuggaugcaccuaauucucacuacgaggaauguuccugcuacccugauaccagcaaggugaugugugugugcagagacaauuggcacgguucgaaccgaccaugggugucuuucgaucaaaaucuggauuaucaaaugggauacaucugcagugggguuuucggugacaauccgcgucccaaagauggaaaaggcagcugugguccaguguauguugauggagcaaacggaguaaagggauuuucauacagguaugguaaugguguuuggauaggaaggacuaaaaguagcaguuccagacagggguuugagaugauuugggauccuaauggguggacagagacugauaguaauuucuuuaugaaacaagauguaguggcaguaaccgauuggucaggguacagcggaaguuucguucaacauccugagcuaacagggcuggacuguaugaggccuugcuucuggguugaauuaaucaggggacgaccuaaagaaaauacaaucuggaccagugggagcagcauuucuuuuuguggugugaauagugauacuguagauuggucuuggccagacggugcugaguugccauucaccauugacaaguag

SEQ ID NO: 46904 - RNA, 1410 nt, Artificial Sequence
  derived and/or modified CDS sequence (wt) from neuraminidase__InfluenzaA__ABD79126
augaauccaaaucaaaagauaauaacaauuggcucuguuucucucacuauuaccacaauaugcuuccuuaugcaaauugccauccugguaauuacuguaacauugcauuucaagcaaugugaaugcaacucccccccaaacaaccaaguaaugcugugugaaccaacaauaauagaaagaaacauaacagagauaguguaucugaccaacaccaccauagagaaagaaauaugccccaaacuagcagaauacagaaauuggucaaagccgcaauguaaaauuacaggauuugcaccuuuuucuaaggacaauucaauucggcuuuccgcugguggagacauuugggugacaagagaaccuuaugugucaugcgauccuggcaaguguuaucaauuugcccuuggacagggaacaacacuaaacaacaggcauucaaaugacacaguacacgauaggaccccuuaucgaacccuauugaugaaugaguuggguguuccauuucauuugggaaccaagcaagugugcauagcaugguccagcucaaguugucacgauggaaaagcauggcugcauguuuguguaacugggcauaaugaaaaugcaacugcgaguuucauuuacgaugggaggcuuguagauaguauugguucaugguccaaaaauauccucaggacccaggagucggaaugcguuuguaucaauggaacuuguacaguaguaaugacugauggaagugcuucaggaagagcugauacuaaaauacuauucauugaagaggggaaaaucguucauauuagcccauugucaggaagugcucagcaugucgaggagugcuccuguuauccucgauauccuggugucagaugugucugcagagacaacuggaaaggcuccaauaggcccaucguagauauaaaugugaaagauuauagcauuguuuccaguuaugugugcucaggacuuguuggagacacacccagaaaaaacgacagcuccagcaguagcuauugccuggauccuaacaaugaggaagggggucauggagugaaaggcugggccuuugaugauggaaaugauguguggaugggaagaacgaucagugagaaguuacguucagguuaugaaaccuucaaagucauuggaggcugguccaagccuaacuccaaauugcagauaaauaggcaagucauaguugacaaagguaauagguccgguuauucugguauuuucucuguugaaggcaaaagcugcaucaaucggugcuuuuauguggaguugauaaggggaaggaaacaggaaacugaagucugguggaccucaaacaguauuguuguguuuuguggcaccucagguacauauggaacaggcucauggccugauggggcggacaucaaucucaugccuauauaa

SEQ ID NO: 46905 - RNA, 1410 nt, Artificial Sequence
  derived and/or modified CDS sequence (wt) from neuraminidase__InfluenzaA__ABD79137
augaauccaaaucaaaagauaauaacaauuggcucuguuucucucacuauuaccacaauaugcuuccuuaugcaaauugccauccugguaauuacuguaacauugcauuucaagcaaugugaaugcaacucccccccaaacaaccaaguaaugcugugugaaccaacaauaauagaaagaaacauaacagagauaguguaucugaccaacaccaccauagagaaagaaauaugccccaaacuagcagaauacagaaauuggucaaagccgcaauguaaaauuacaggauuugcaccuuuuucuaaggacaauucaauucggcuuuccgcugguggagacauuugggugacaagagaaccuuaugugucaugcgauccuggcaaguguuaucaauuugcccuuggacagggaacaacacuaaacaacaggcauucaaaugacacaguacacgauaggaccccuuaucgaacccuauugaugaaugaguuggguguuccauuucauuugggaaccaagcaaguaugcauagcaugguccagcucaaguugucacgauggaaaagcauggcugcauguuuguguaacugggcauaaugaaaaugcaacugcgaguuucauuuacgaugggaggcuuguagauaguauugguucaugguccaaaaauauccucaggacccaggagucggaaugcguuuguaucaauggaacuuguacaguaguaaugacugauggaagugcuucaggaagagcugauacuaaaauacuauucauugaagaggggaaaaucguucauauuagcccauugucaggaagugcucagcaugucgaggagugcuccuguuauccucgauauccuggugucagaugugucugcagagacaacuggaaaggcuccaauaggcccaucguagauauaaaugugaaagauuauagcauuguuuccaguuaugugugcucaggacuuguuggagacacacccagaaaaaacgacagcuccagcaguagcuauugccuggauccuaacaaugaggaagggggucauggagugaaaggcugggccuuugaugauggaaaugauguguggaugggaagaacgaucagugagaaguuacgcucagguuaugaaaccuucaaagucauuggaggcugguccaagccuaacuccaaauugcagauaaauaggcaagucauaguugacaaagguaauagguccgguuauucugguauuuucucuguggaaggcaaaagcugcaucaaucggugcuuuuauguggaguugauaaggggaaggaaacaggaaacugaagucugguggaccucaaacaguauuguuguguuuuguggcaccucagguacauauggaacaggcucauggccugauggggcggacaucaaucucaugccuauauaa

SEQ ID NO: 46906 - RNA, 1410 nt, Artificial Sequence
  derived and/or modified CDS sequence (wt) from neuraminidase__InfluenzaA__ABD79148
augaauccaaaucaaaagauaauaacaauuggcucuguuucucucacuauuaccacaauaugcuuccuuaugcaaauugccauccugguaauuacuguaacauugcauuucaagcaaugugaaugcaacucccccccaaacaaccaaguaaugcugugugaaccaacaauaauagaaagaaacauaacagagauaguguaucugaccaacaccaccauagagaaagaaauaugccccaaacuagcagaauacagaaauuggucaaagccgcaauguaaaauuacaggauuugcaccuuuuucuaaggacaauucaauucggcuuuccgcugguggagacauuugggugacaagagaaccuuaugugucaugcgauccuggcaaguguuaucaauuugcccuuggacagggaacaacacuaaacaacaggcauucaaaugacacaguacacgauaggaccccuuaucgaacccuauugaugaaugaguuggguguuccauuucauuugggaaccaagcaagugugcauagcaugguccagcucaaguugucacgauggaaaagcauggcugcauguuuguguaacugggcauaaugaaaaugcaacugcgaguuucauuuacgaugggaggcuuguagauaguauugguucaugguccaaaaauauccucaggacccaggagucggaaugcguuuguaucaauggaacuuguacaguaguaaugacugauggaagugcuucaggaagagcugauacuaaaauacuauucauugaagaggggaaaaucguucauauuagcccauugucaggaagugcucagcaugucgaggagugcuccuguuauccucgauauccuggugucagaugugucugcagagacaacuggaaaggcuccaauaggcccaucguagauauaaaugugaaagauuauagcauuguuuccaguuaugugugcucaggacuuguuggagacacacccagaaaaaacgacagcuccagcaguagcuauugccuggauccuaacaaugaggaagggggucauggagugaaaggcugggccuuugaugauggaaaugauguguggaugggaagaacgaucagugagaaguuacgcucagguuaugaaaccuucaaagucauuggaggcugguccaagccuaacuccaaauugcagauaaauaggcaagucauaguugacaaagguaauagguccgguuauucugguauuuucucuguugaaggcaaaagcugcaucaaucggugcuuuuauguggaguugauaaggggaaggaaacaggaaacugaagucugguggaccucaaacaguauuguuguguuuuguggcaccucagguacauauggaacaggcucauggccugauggggcggacaucaaucucaugccuauauaa

SEQ ID NO: 46907 - RNA, 1410 nt, Artificial Sequence; identical to SEQ ID NO: 46906
  derived and/or modified CDS sequence (wt) from neuraminidase__InfluenzaA__ABD79159

SEQ ID NO: 46908 - RNA, 1410 nt, Artificial Sequence
  derived and/or modified CDS sequence (wt) from neuraminidase__InfluenzaA__ABD79170
augaauccaaaucaaaagauaauaacaauuggcucuguuucucucacuauuaccacaauaugcuuccuuaugcaaauugccauccugguaauuacuguaacauugcauuucaagcaaugugaaugcaacucccccccaaacaaccaaguaaugcugugugaaccaacaauaauagaaagaaacauaacagagauaguguaucugaccaacaccaccauagagaaagaaauaugccccaaacuagcagaauacagaaauuggucaaagccgcaauguaaaauuacaggauuugcaccuuuuucuaaggacaauucaauucggcuuuccgcugguggagacauuugggugacaagagaaccuuaugugucaugcgauccuggcaaguguuaucaauuugcccuuggacagggaacaacacuaaacaacaggcauucaaauaacacaguacaugauaggaccccuuaucgaacccuauugaugaaugaguuggguguuccauuucauuugggaaccaagcaagugugcauagcaugguccagcucaaguugucacgauggaaaagcauggcugcauguuuguguaacugggcauaaugaaaaugcaacugcgaguuucauuuacgaugggaggcuuguagauaguauugguucaugguccaaaaauauccucaggacccaggagucggaaugcguuuguaucaauggaacuuguacaguaguaaugacugauggaagugcuucaggaagagcugauacuaaaauacuauucauuaaagaggggaaaaucguucauguuagcccauugucaggaagugcucagcaugucgaggagugcuccuguuauccucgauauccuggugucagaugugucugcagagacaacuggaaaggcuccaauaggcccaucguagauauaaaugugaaagauuauagcauuguuuccaguuaugugugcucaggacuuguuggagacacacccaggaaaaacgacagcuccagcaguagcuauugccuggauccuaacaaugaggaagggggucauggagugaaaggcugggccuuugaugauggaaaugauguguggaugggaagaacgaucagcgagaaguuacgcucagguuaugaaaccuucaaagucauuggaggcugguccaaaccuaacuccaaauugcagauaaauaggcaagucauaguugacaaagguaauagguccgguuauucugguauuuucucuguugaaggcaaaagcugcaucaaucggugcuuuuauguggaguugauaaggggaaggaaacaggaaacugaagucugguggaccucaaacaguauuguuguguuuuguggcaccucagguacauauggaacaggcucauggccugauggggcggacaucaaucucaugccuauauaa

SEQ ID NO: 46909 - RNA, 1410 nt, Artificial Sequence
  derived and/or modified CDS sequence (wt) from neuraminidase__InfluenzaA__ABD79181
augaauccaaaucaaaagauaauaacaauuggcucuguuucucucacuauuaccacaauaugcuuccuuaugcaaauugccauccugguaauuacuguaacauugcauuucaagcaaugugaaugcaacucccccccaaacaaccaaguaaugcugugugaaccaacaauaauagaaagaaacauaacagagauaguguaucugaccaacaccaccauagagaaagaaauaugccccaaacuagcagaauacagaaauuggucaaagccgcaauguaaaauuacaggauuugcaccuuuuucuaaggacaauucaauucggcuuuccgcugguggagacauuugggugacaagagaaccuuaugugucaugcgauccuggcaaguguuaucaauuugcccuuggacagggaacaacacuaaacaacaggcauucaaaugacacaguacacgauaggaccccuuaucgaacccuauugaugaaugaguuggguguuccauuucauuugggaaccaagcaaguaugcauagcaugguccagcucaaguugucacgauggaaaagcauggcugcauguuuguguaacugggcauaaugaaaaugcaacugcgaguuucauuuacgaugggaggcuuguagauaguauugguucaugguccaaaaauauccucaggacccaggagucggaaugcguuuguaucaauggaacuuguacaguaguaaugacugauggaagugcuucaggaagagcugauacuaaaauacuauucauugaagaggggaaaaucguucauauuagcccauugucaggaagugcucagcaugucgaggagugcuccuguuauccucgauauccuggugucagaugugucugcagagacaacuggaaaggcuccaauaggcccaucguagauauaaaugugaaagauuauagcauuguuuccaguuaugugugcucaggacuuguuggagacacacccagaaaaaacgacagcuccagcaguagcuauugccuggauccuaacaaugaggaagggggucauggagugaaaggcugggccuuugaugauggaaaugauguguggaugggaagaacgaucagugagaaguuacgcucagguuaugaaaccuucaaagucauuggaggcugguccaagccuaacuccaaauugcagauaaauaggcaagucauaguugacaaagguaauagguccgguuauucugguauuuucucuguugaaggcaaaagcugcaucaaucggugcuuuuauguggaguugauaaggggaaggaaacaggaaacugaagucugguggaccucaaacaguauuguuguguuuuguggcaccucagguacauauggaacaggcucauggccugauggggcggacaucaaucucaugccuauauaa

SEQ ID NO: 46910 - RNA, 1410 nt, Artificial Sequence; identical to SEQ ID NO: 46906
  derived and/or modified CDS sequence (wt) from neuraminidase__InfluenzaA__ABD79192

SEQ ID NO: 46911 - RNA, 1410 nt, Artificial Sequence
  derived and/or modified CDS sequence (wt) from neuraminidase__InfluenzaA__ABD79203
augaauccaaaucaaaagauaauaacaauuggcucuguuucucucacuauuaccacaauaugcuuccuuaugcaaauugccauccugguaauuacuguaacauugcauuucaagcaaugugaaugcaacucccccccaaacaaccaaguaaugcugugugaaccaacaauaauagaaagaaacauaacagagauaguguaucugaccaacaccaccauagagaaagaaaaaugccccaaacuagcagaauacagaaauuggucaaagccgcaauguaaaauuacaggauuugcaccuuuuucuaaggacaauucaauucggcuuuccgcugguggagacauuugggugacaagagaaccuuaugugucaugcgauccuggcaaguguuaucaauuugcccuuggacagggaacaacacuaaacaacaggcauucaaaugacacaguacacgauaggaccccuuaucgaacccuauugaugaaugaguuggguguuccauuucauuugggaaccaagcaagugugcauagcaugguccagcucaaguugucacgauggaaaagcauggcugcauguuuguguaacugggcauaaugaaaaugcaacugcgaguuucauuuacgaugggaggcuuguagauaguauugguucaugguccaaaaauauccucaggacccaggagucggaaugcguuuguaucaauggaacuuguacaguaguaaugacugauggaagugcuucaggaagagcugauacuaaaauacuauucauugaagaggggaaaaucguucauauuagcccauugucaggaagugcucagcaugucgaggagugcuccuguuauccucgauauccuggugucagaugugucugcagagacaacuggaaaggcuccaauaggcccaucguagauauaaauaugaaagauuauagcauuguuuccaguuaugugugcucaggacuuguuggagacacacccagaaaaaacgacagcuccagcaguagcuauugccuggauccuaacaaugaggaagggggucauggagugaaaggcugggccuuugaugauggaaaugauguguggaugggaagaacgaucagugagaaguuacgcucagguuaugaaaccuucaaagucauuggaggcugguccaagccuaacuccaaauugcagauaaauaggcaagucauaguugacaaagguaauagguccgguuauucugguauuuucucuguugaaggcaaaagcugcaucaaucggugcuuuuauguggaguugauaaggggaaggaaacaggaaacugaagucugguggaccucaaacaguauuguuguguuuuguggcaccucagguacauaugggacaggcucauggccugauggggcggacaucaaucucaugccuauauaa

SEQ ID NO: 46912 - RNA, 1410 nt, Artificial Sequence
  derived and/or modified CDS sequence (wt) from neuraminidase__InfluenzaA__ABD79214
augaauccaaaucaaaagauaauaacaauuggcucuguuucucucacuauuaccacaauaugcuuccuuaugcaaauugccauccugguaauuacuguaacauugcauuucaagcaaugugaaugcaacucccccccaaacaaccaaguaaugcugugugaaccaacaauaauagaaagaaacauaacagagauaguauaucugaccaacaccaccauagagaaagaaauaugccccaaacuagcagaauacagaaauuggucaaagccgcaauguaaaauuacaggauuugcaccuuuuucuaaggacaauucaauucggcuuuccgcugguggagacauuugggugacaagagaaccuuaugugucaugcgauccuggcaaguguuaucaauuugcccuuggacagggaacaacacuaaacaacaggcauucaaaugacacaguacacgauaggaccccuuaucgaacccuauugaugaaugaguuggguguuccauuucauuugggaaccaagcaagugugcauagcaugguccagcucaaguugucacgauggaaaagcauggcugcauguuuguguaacugggcauaaugaaaaugcaacugcgaguuucauuuacgaugggaggcuuguagauaguauugguucaugguccaaaaauauccucaggacccaggagucggaaugcguuuguaucaauggaacuuguacaguaguaaugacugauggaagugcuucaggaagagcugauacuaaaauacuauucauugaagaggggaaaaucguucauauuagcccauugucaggaagugcucagcaugucgaagagugcuccuguuauccucgauauccuggugucagaugugucugcagagacaacuggaaaggcuccaauaggcccaucguagauauaaaugugaaagauuauagcauuguuuccaguuaugugugcucaggacuuguuggagacacacccagaaaaaacgacagcuccagcaguagcuauugccuggauccuaacaaugaggaagggggucauggagugaaaggcugggccuuugaugauggaaaugauguguggaugggaagaacgaucagugagaaguuacgcucagguuaugaaaccuucaaagucauuggaggcugguccaagccuaacuccaaauugcagauaaauaggcaagucauaguugacaaagguaauagguccgguuauucugguauuuucucuguugaaggcaaaagcugcaucaaucggugcuuuuauguggaguugauaaggggaaggaaacaggaaacugaagucugguggaccucaaacaguauuguuguguuuuguggcaccucagguacauauggaacaggcucauggccugauggggcggacaucaaucucaugccuauauaa

SEQ ID NO: 46913 - RNA, 1410 nt, Artificial Sequence
  derived and/or modified CDS sequence (wt) from neuraminidase__InfluenzaA__ABD79236
augaauccaaaucaaaagauaauaacaauuggcucuguuucucucacuauuaccacaauaugcuuccuuaugcaaauugccauccugguaauuacuguaacauugcauuucaagcaaugugaaugcaacucccccccaaacaaccaaguaaugcugugugaaccaacaauaauagaaagaaacauaacagagauaguguaucugaccaacaccaccauagagaaagaaauaugccccaaacuagcagaauacagaaauuggucaaagccgcaauguaaaauuacaggauuugcaccuuuuucuaaggacaauucaauucggcuuuccgcugguggagacauuugggugacaagagaaccuuaugugucaugcgauccuggcaaguguuaucaauuugcccuuggacagggaacaacacuaaacaacaggcauucaaauaacacagcacaugauaggaccccuuaucgaacccuauugaugaaugaguuggguguuccauuucauuugggaaccaagcaagugugcauagcaugguccagcucaaguugucacgauggaaaagcauggcugcauguuuguguaacugggcauaaugaaaaugcaacugcgaguuucauuuacgaugggaggcuuguagauaguauugguucaugguccaaaaauauccucaggacccaggagucggaaugcguuuguaucaauggaacuuguacaguaguaaugacugauggaagugcuucaggaagagcugauacuaaaauacuauucauuaaagaggggaaaaucguucauauuagcccauugucaggaagugcucagcaugucgaggagugcuccuguuauccucgauauccuggugucagaugugucugcagagacaacuggaaaggcuccaauaggcccaucguagauauaaaugugaaagauuauagcauuguuuccaguuaugugugcucaggacuuguuggagacacacccaggaaaaacgacagcuccagcaguagcuauugccuggauccuaacaaugaggaagggggucauggagugaaaggcugggccuuugaugauggaaaugauguguggaugggaagaacgaucagcgagaaguuacgcucagguuaugaaaccuucaaagucauuggaggcugguccaaaccuaacuccaaauugcagauaaauaggcaagucauaguugacaaagguaauagguccgguuauucugguauuuucucuguugaaggcaaaagcugcaucaaucggugcuuuuauguggaguugauaaggggaaggaaacaggaaacugaagucugguggaccucaaacaguauuguuguguuuuguggcaccucagguacauauggaacaggcucauggccugauggggcggacaucaaucucaugccuauauaa

SEQ ID NO: 46914 - RNA, 1410 nt, Artificial Sequence
  derived and/or modified CDS sequence (wt) from neuraminidase__InfluenzaA__ABD79247
augaauccaaaucaaaagauaauaacaauuggcucuguuucucucacuauuaccacaauaugcuuccuuaugcaaauugccauccugguaauuacuguaacauugcauuucaagcaaugugaaugcaacccccccccaaacaaccaaguaaugcugugugaaccaacaauaauagaaagaaacauaacagagauaguguaucugaccaacaccaccauagagaaagaaauaugccccaaacuagcagaauacagaaauuggucaaagccgcaauguaaaauuacaggauuugcaccuuuuucuaaggacaauucaauucggcuuuccgcugguggagacauuugggugacaagagaaccuuaugugucaugcgauccuggcaaguguuaucaauuugcccuuggacagggaacaacacuaaacaacaggcauucaaaugacacaguacaugauaggaccccuuaucgaacccuauugaugaaugaguuggguguuccauuucauuugggaaccaagcaagugugcauagcaugguccagcucaaguugucacgauggaaaagcauggcugcauguuuguguaacugggcauaaugaaaaugcaacugcgagcuucauuuacgaugggaggcuuguagauaguauugguucaugguccaaaaauauccucaggacccaggagucggaaugcguuuguaucaauggaacuuguacaguaguaaugacugauggaagugcuucaggaagagcugauacuaaaauacuauucauugaagaggggaaaaucguucauaucagcccauugucaggaagugcucagcaugucgaggagugcuccuguuauccucgauauccuggugucagaugugucugcagagacaacuggaaaggcuccaauaggcccaucguagauauaaaugugaaagauuauagcauuguuuccaguuaugugugcucaggacuuguuggagacacacccagaaaaaacgacagcuccagcaguagcuauugccuggauccuaacaaugaggaagggggucauggagugaaaggcugggcauuugaugauggaaaugauguguggaugggaagaacgaucagcgagaaguuacgcucagguuaugaaaccuucaaagucaugggaggcugguccaaaccuaacuccaaauugcagauaaauaggcaagucauaguugacagagguaauagguccgguuauucugguauuuucucuguugaaggcaaaagcugcaucaaucggugcuuuuauguggaguugauaaggggaaggaaacaggaaacugaagucugguggaccucaaacaguauuguuguguuuuguggcaccucagguacauauggaacaggcucauggccugauggggcggacaucaaucucaugccuauauaa

SEQ ID NO: 46915 - RNA, 1410 nt, Artificial Sequence; identical to SEQ ID NO: 46378
  derived and/or modified CDS sequence (wt) from neuraminidase__InfluenzaA__ABD94737

SEQ ID NO: 46916 - RNA, 1410 nt, Artificial Sequence; identical to SEQ ID NO: 46740
  derived and/or modified CDS sequence (wt) from neuraminidase__InfluenzaA__ABD94748

SEQ ID NO: 46917 - RNA, 1413 nt, Artificial Sequence; identical to SEQ ID NO: 46840
  derived and/or modified CDS sequence (wt) from neuraminidase__InfluenzaA__ABD94759

SEQ ID NO: 46918 - RNA, 1410 nt, Artificial Sequence
  derived and/or modified CDS sequence (wt) from neuraminidase__InfluenzaA__ABD94770
augaauccaaaucaaaagauaauaacgauuggcucuguuucucucaccauugccacaauaugcuuccuuaugcaaauugccauccugguaacuacuguaacauugcauuucaagcaauaugaaugcaacucccccccaaacaaccaagugaugcugugugaaccaacaauaauagaaagaaacauaacagagauaguguaucugaccaacaccaccauagagaaggaaauaugccccaaacuagcagaauacagaaauuggucaaagccgcaauguaacauuacuggauuugcaccuuuuucuaaggacaauucgauucggcuuuccgcugguggggacaucugggugacaagagaaccuuaugugucaugcgauccugacaaguguuaucaauuugcccuuggacagggaacaacacuaaacaacgggcauucaaaugacacaguacaugauaggaccccuuaucggacccuauugaugaaugaguuggguguuccauuucauuugggaaccaagcaagugugcauagcaugguccagcucaaguugucacgauggaaaagcauggcugcauguuuguguaacgggugaugaugaaaaugcaacugcuagcuucauuuacaaugggaggcuuguagauaguauagguucaugguccaaaaaaauccucaggacccaggagucggaaugcguuuguaucaauggaacuuguacaguaguaaugacugauggaagugcuucaggaaaagcugauacuaaaauacuauucauugaggaggggaaaaucguucauacuagccuauugucagggagugcucagcaugucgaggagugcuccuguuauccucgauauccuggugucagaugugucugcagagacaacuggaaaggcuccaauaggcccaucguagauauaaauguaaaggauuauagcauuguuuccaguuaugugugcucaggacuuguuggagacacacccagaaaaaacgacagcuccagcaguagccauugcuuggauccuaacaaugaggaagguggucauggagugaaaggcugggccuuugaugauggaaaugacguguggaugggaagaacgaucagcgagaaguuacgcucaggauaugaaaccuucaaagucauugaaggcugguccaaaccuaacuccaaacugcagauaaauaggcaagucauaguugacagagguaauagguccgguuauucugguauuuucucuguugaaggcaaaagcugcaucaaucggugcuuuuauguggaguugauaaggggaaggaaacaggaaacugaagucuuguggaccucaaacaguauuguuguguuuuguggcaccucagguacauauggaacaggcucauggccugauggggcggacaucaaucucaugccuauauaa

SEQ ID NO: 46919 - RNA, 1413 nt, Artificial Sequence; identical to SEQ ID NO: 46897
  derived and/or modified CDS sequence (wt) from neuraminidase__InfluenzaA__ABD94792

SEQ ID NO: 46920 - RNA, 1413 nt, Artificial Sequence; identical to SEQ ID NO: 46897
  derived and/or modified CDS sequence (wt) from neuraminidase__InfluenzaA__ABD94803

SEQ ID NO: 46921 - RNA, 1413 nt, Artificial Sequence; identical to SEQ ID NO: 46897
  derived and/or modified CDS sequence (wt) from neuraminidase__InfluenzaA__ABD94814

SEQ ID NO: 46922 - RNA, 1410 nt, Artificial Sequence
  derived and/or modified CDS sequence (wt) from neuraminidase__InfluenzaA__ABD94825
augaauccaaaucaaaagauaauaacgauuggcucuguuucucucacuauugccacaauaugcuuccuuaugcaaauugccauccugguaacuacuguaacauugcauuucaagcaauaugaaugcagcucucccccaaacaaccaaguaaugcugugugaaccaacaauaauagaaagaaacauaacagagauaguguaucugaccaacaccaccauagagaaggaaauaugccccaaacuagcagaauacagaaauuggucaaagccgcaauguaaaauuacaggauuugcaccuuuuucuaaggacaauucaauucggcuuuccgcugguggggacauuugggugacaagggagccuuaugugucgugcgauccugacaaguguuaucaauuugcccuuggacagggaacaacacuaaacaacaggcauucaaaugacacaguacaugauaggaccccuuaucgaacccuauugaugaaugaguuggguguuccauuucauuugggaaccaagcaagugugcauagcaugguccagcucaaguugucacgauggaaaagcauggcugcauguuuguguaacugggcaugaugaaaaugcaacugcuagcuucauuuacgaugggaggcuuguagauaguauugguucaugguccaaaaaaauccucaggacccaggagucggaaugcguuuguaucaauggaacuuguacaguaguaaugacugaugggagugcuucaggaagagcugauacuaaaauacuauucauugaggaggggaaaaucguucauaucagcccacugucaggaagugcucagcaugucgaggagugcuccuguuauccucgauauccuggugucagaugugucugcagagacaacuggaaaggcuccaauaggcccaucguagauauaaauguaaaggauuauagcauuguuuccaguuaugugugcucaggacuuguuggagacacacccagaaaaaacgacagcuccagcaguagucauugccugaauccuaacaaugaggaagggggucauggagugaaaggcugggccuuugaugauggaaaugacguguggaugggaagaacgaucagcgagaaguuccgcucagguuaugaaaccuucaaagucauugaaggcugguccaaaccuaacuccaaauugcagauaaauaggcaagucauaguugacagagguaauagguccgguuauucugguauuuucucuguugaaggcaaaagcugcaucaaucggugcuuuuauguggaguugauaaggggaaggaaacaggaaacugaagucugguggaccucaaacaguauuguuguguuuuguggcaccucagguacauauggaacaggcucauggccugauggggcggacaucaaucucaugccuauauaa

SEQ ID NO: 46923 - RNA, 1410 nt, Artificial Sequence
  derived and/or modified CDS sequence (wt) from neuraminidase__InfluenzaA__ABD94847
augaauccaaaucaaaagauaauaacgauuggcucuguuucucucacuauugccacaauaugcuuccuuaugcaaauugccauccugguaacuacuguaacauugcauuucaagcaauaugaaugcaacucccccccaaacaaccaaguaaugcugugugaaccaaaaauaauagaaagaaacauaacagagauaguguaucugacaaacaccaccauagagaaggaaauaugccccaaacuagcagaauacagaaauuggucaaagccgcaauguaaaauuacaggauuugcaccuuuuucuaaggacaauucaauucggcuuuccgcugguggggacauuugggugacaagagaaccuuaugugucaugcgauccugacaaguguuaucaauuugcccuuggacagggaacaacacuaaacaacaggcauucaaaugacacaguacaugauaggaccccuuaucgaacccuauugaugaaugaguuggguguuccauuucauuugggaaccaagcaagugugcauagcaugguccagcucaaguugucacgauggaaaagcauggcugcauguuuguguaacugggcaugaugaaaaugcaacugcuagcuucauuuacgaugggaggcuuguagauaguauugguucaugguccaaaaaaauccucaggacccaggagucggaaugcguuuguaucaauggaacuuguacaguaguaaugacugaugggagugcuucaggaagagcuguuacuaaaauacuauucauugaagaggggaaaaucguucauauuagcccauuguuaggaagugcucagcaugucgaggagugcuccuguuauccucgauauccuggugucagaugugucugcagagacaacuggaaaggcuccaauaggcccaucguagauauaaauguaaaggauuauagcauuguuuccaguuaugugugcucaggacuuguuggagacacacccagaaaaaacgacagcuccagcaguagccauugccugaauccuaacaaugaggaagggggucauggagugaaaggcugggccuuugaugauggaaaugacguguggaugggaagaacgaucagcgagaaguuacgcucagguuaugaaaccuucaaagucauugaaggcugguccaaaccuaacuccaaauugcagauaaauaggcaagucauaguugacagagguaauagguccgguuauucugguauuuucucuguugaaggcaaaagcugcaucaaucggugcuuuuauguggaguugauaaggggaaggaaacaggaaacugaagucugguggaccucaaacaguauuguuguguuuuguggcaccucagguacauauggaacaggcucauggccugauggggcggacaucaaucucaugccuauauaa

SEQ ID NO: 46924 - RNA, 1410 nt, Artificial Sequence
  derived and/or modified CDS sequence (wt) from neuraminidase__InfluenzaA__ABD94858
augaauccaaaucaaaagauaauaacgauuggcucuguuucucucacuauugccacaauaugcuuccuuaugcaaauugccauccugguaacuacuguaacauugcauuucaagcaauaugaaugcaacucccccccaaacaaccaaguaaugcugugugaaccaacaauaauagaaagaaacauaacagagauaguguaucugaccaacaccaccauagagaaggaaauaugccccaaacuagcagaauacagaaauuggucaaagccgcaauguaaaauuacaggauuugcaccuuuuucuaaggacaauucaauucggcuuuccgcugguggggacauuugggugacaagagaaccuuaugugucaugcgauccugacaaguguuaucaauuugcccuuggacagggaacaacacuaaacaacaggcauucaaaugacacaguacaugauaggaccccuuaucgaacccuauugaugaaugaguuggguguuccauuucauuugggaaccaagcaagugugcauagcaugguccagcucaaguugucacgauggaaaagcauggcugcauguuuguguaacugggcaugaugaaaaugcaacugcuagcuucauuuacgaugggaggcuuguagauaguauugguucaugguccaaaaaaauccucaggacccaggagucggaaugcguuuguaucaauggaacuuguacaguaguaaugacugaugggagugcuucaggaagagcugauacuaaaauacuauucauugaggaggggaaaaucguucauauuagcccauugucaggaagugcucagcaugucgaggagugcuccuguuauccucgauacccuggugucagaugugucugcagagacaacuggaaaggcuccaauaggcccaucguagauauaaauguaaaggauuauagcauuguuuccaguuaugugugcucaggacuugucggagacacacccagaaaaaacgacagcuccagcaguagccauugccugaauccuaacaaugaggaagggggucauggagugaaaggcugggccuuugaugauggaaaugacguguggaugggaagaacgaucagcgagaaguuacgcucagguuaugaaaccuucaaagucauugaaggcugguccaaaccuaacuccaaauugcagauaaauaggcaagucauaguugacagagguaauagguccgguuauucugguauuuucucuguugaaggcaaaagcugcaucaaucggugcuuuuauguggaguugauaaggggaaggaaacaggaaacugaagucugguggaccucaaacaguauuguuguguuuuguggcacaucagguacauauggaacaggcucauggccugauggggcggacaucaaucucaugccuauauaa

SEQ ID NO: 46925 - RNA, 1410 nt, Artificial Sequence
  derived and/or modified CDS sequence (wt) from neuraminidase__InfluenzaA__ABD94880
augaauccaaaucaaaagauaauaacgauuggcucuguuucucucacuauugccacaauaugcuuccuuaugcaaauugccauccugguaacuacuguaacauugcauuucaagcaauaugaaugcaacucccccccaaacaaccaaguaaugcugugugaaccaacaauaauagaaagaaacauaacagagauaguguaucugaccaacaccaccauagagaaggaaauaugccccaaacuagcagaauacagaaauuggucaaagccgcaauguaaaauuacaggauuugcaccuuuuucuaaggacaauucaauucggcuuuccgcugguggggacauuugggugacaagagaaccuuaugugucaugcgauccugacaaguguuaucaauuugcccuuggacagggaacaacacuaaacaacaggcauucaaaugacacaguacaugauaggaccccuuaucgaacccuauugaugaaugaguuggguguuccauuucauuugggaaccaagcaagugugcauagcaugguccagcucaaguugucacgauggaaaagcauggcugcauguuuguguaacugggcaugaugaaaaugcaacugcuagcuucauuuacgaugggaggcuuguagauaguauugguucaugguccaaaaaaauccucaggacccaggagucggaaugcguuuguaucaauggaacuuguacaguaguaaugacugaugggagugcuucaggaagagcugauacuaaaauacuauucauugaggaggggaaaaucguucauauuagcccauugucagggagugcucagcaugucgaggagugcuccuguuauccucgauacccuggugucagaugugucugcagagacaacuggaaaggcuccaauaggcccaucguagauauaaauguaaaggauuauagcauuguuuccaguuaugugugcucaggacuugucggagacacacccagaaaaaacgacagcuccagcaguagccauugccugaauccuaacaaugaggaagggggucauggagugaaaggcugggccuuugaugauggaaaugacguguggaugggaagaacgaucagcgagaaguuacgcucagguuaugaaaccuucaaagucauugaaggcugguccaaaccuaacuccaaauugcagauaaauaggcaagucauaguugacagagguaauagguccgguuauucugguauuuucucuguugaaggcaaaagcugcaucaaucggugcuuuuauguggaguugauaaggggaaggaaacaggaaacugaagucugguggaccucaaacaguauuguuguguuuuguggcacaucagguacauauggaacaggcucauggccugauggggcggacaucaaucucaugccuauauaa

SEQ ID NO: 46926 - RNA, 1410 nt, Artificial Sequence
  derived and/or modified CDS sequence (wt) from neuraminidase__InfluenzaA__ABD94891
augaauccaaaucaaaagauaauaacaauuggcucuguuucucucacuauuaccacaauaugcuuccuuaugcaaauugccauccugguaauuacuguaacauugcauuucaagcaaugugaaugcaacucccccccaaacaaccaaguaaugcugugugaaccaacaauaauagaaagaaacauaacagagauaguguaucugaccaacaccaccauagagaaagaaauaugccccaaacuagcagaauacagaaauuggucaaagccgcaauguaaaauuacaggauuugcaccuuuuucuaaggacaacucaauucggcuuuccgcugguggagacauuugggugacaagagaaccuuaugugucaugcgauccuggcaaguguuaucaauuugcccuuggacagggaacaacacuaaacaacaggcauucaaaugacacaguacaugauaggaccccuuaucgaacccuauugaugaaugaguuggguguuccauuucauuugggaaccaagcaagugugcauagcaugguccagcucaaguugucacgauggaaaagcauggcugcauguuuguguaacugggcauaaugaaaaugcaacugcgagcuucauuuacgaugggaggcuuguagauaguauugguucaugguccaaaaauauccucaggacccaggagucggaaugcguuuguaucaauggaacuuguacaguaguaaugacugauggaagugcuucaggaagagcugauacuaaaguacuauucauugaagaggggaaaaucguucauauuagccaauugucaggaagugcucagcaugucgaggagugcuccuguuauccucgauauccuggugucagaugugucugcagagacaacuggaaaggcucuaauaggcccaucguagauauaaaugugaaagauuauagcauuguuuccaguuauguaugcucaggacuuguuggagacacacccagaaaaaacgacagcuccagcaguagcuauugccuggauccuaacaaugaggaagggggucauggagugaaaggcugggccuuugaugauggaaaugauguguggaugggaagaacgaucagcgagaaguuacgcucagguuaugaaaccuucaaagucauuggaggcugguccaaaccuaacuccaaauugcagauaaauaggcaagucauaguugacagagguaauagguccgguuauucugguauuuucucuguugaaggcaaaagcugcaucaaucggugcuuuuauguggaguugauaaggggaaggaaacaggaaacugaagucugguggaccucaaacaguauuguuguguuuuguggcaccucagguacauauggaacaggcucauggccugauggggcggacaucaaucucaugccuauauaa

SEQ ID NO: 46927 - RNA, 1410 nt, Artificial Sequence; identical to SEQ ID NO: 46906
  derived and/or modified CDS sequence (wt) from neuraminidase__InfluenzaA__ABD94902

SEQ ID NO: 46928 - RNA, 1410 nt, Artificial Sequence
  derived and/or modified CDS sequence (wt) from neuraminidase__InfluenzaA__ABD94924
augaauccaaaucaaaagauaauaacgauuggcucuguuucucucacuauugccacaauaugccuccuuaugcaaauugccauccugguaacuacuguaacauugcauuucaagcaauaugaaugcaacucccccccaaacaaccaaguaaugcugugugaaccaacaauaauagaaagaaacauaacagagauaguguaucugaccaacaccaccauagagaaggaaauaugccccaaacuagcagaauacagaaauuggucaaagccgcaauguaaaauuacaggauuugcaccuuuuucuaaggacaauuccauucggcuuuccgcugguggggacauuugggugacaagagaaccuuaugugucaugcgauccugacaaguguuaucaauuugcccuuggacagggaacaacacuaaacaacaggcauucaaaugacacaguacaugauaggaccccuuaucgaacccuauugaugaaugaguuggguguuccauuucauuugggaaccaagcaggugugcauagcaugguccagcucaaguugucacgauggaaaagcauggcugcauguuuguguaacugggcaugaugaaaaugcaacugcuagcuucauuuacgaugggaggcuuguagauaguauugguucaugguccaaaaaaauccucaggacccaggagucggaaugcguuuguaucaauggaacuuguacaguaguaaugacugaugggagugcuucaggaagagcugauacuaaaauacuauucauugaggaagggaaaaucguucauauuagccaauuguuaggaagugcucagcaugucgaggagugcuccuguuauccucgauauccuggugucagaugugucugcagagacaacuggaaaggcuccaauaggcccaucguagauauaaauguaaaggauuauagcauuguuuccaguuaugugugcucaggacuuguuggagacacacccagaaaaaacgacagcuccagcaguagccauugccugaauccuaacaaugaggaagggggucauggagugaaaggcugggccuuugaugauggaaaugacguguggaugggaagaacgaucagcgagaaguuacgcucagguuaugaaaccuucaaagucauugaaggcugguccaaaccuaacuccaaauugcagauaaauaggcaagucauaguugacagagguaauagguccgguuauucugguauuuucucuguugaaggcaaaagcugcaucaaucggugcuuuuauguggaguugauaaggggaaggaaacaggaaacugaagucugguggaccucaaacaguauuguuguguuuuguggcaccucagguacauauggaacaggcucauggccugauggggcggacaucaaucucaugccuauauaa

SEQ ID NO: 46929 - RNA, 1410 nt, Artificial Sequence
  derived and/or modified CDS sequence (wt) from neuraminidase__InfluenzaA__ABD94946
augaauccaaaucaaaaaauaauaacgauuggcucuguuucucucaccauugccacaauaugcuuccuuacgcaaauugccauccugguaacuacuguaacauugcauuucaagcaauaugaaugcaacucccccccaaacaaccaagugaugcugugugaaccaacaauaauagaaagaaacauaacagagauaguguaucugaccaacaccaccauagagaaggaaauaugccccaaacuggcagaauacagaaauuggucaaagccgcaaugcaacauuacuggauuugcaccuuuuucuaaggacaauucgauucggcuuuccgcugguggggacaucuggguuacaagagaaccuuaugugucaugcgauccugacaaauguuaucaauuugcccuuggacagggaacaacacuaaacaacgggcauucaaaugacacaguacaugauaggaccccuuauaggacccuauugaugaaugaguuggguguuccauuucauuugggaaccaagcaagugugcauagcaugguccagcucaaguugucacgauggaaaagcauggcugcauguuuguguaacgggggaugauaaaaaugcaacugcuagcuucauuuacaaugggaggcuuguagauaguauagguucaugguccaaaaaaauccucaggacccaggagucggaaugcguuuguaucaauggaacuuguacaguaguaaugacugaugggagugcuucaggaaaagcugauacuaaaauacuauucauugaggaggggaaaaucguucauacuagccuauugucagggagugcucagcaugucgaggagugcuccuguuauccucgauauccuggugucagaugugucugcagagacaacuggaaaggcuccaauaggcccaucguagauauaaauguaaaggauuauagcauuguuuccaguuaugugugcucaggacuuguuggagacacacccagaaaaaacgacagauccagcaguagccauugcuuggauccuaacaaugaggaagguggucauggaguaaaaggcugggccuuugaugauggaaaugacguguggaugggaagaacgaucagcgagaaguuacgcucaggauaugaaaccuucaaagucauugaaggcugguccaaaccuaacuccaaacugcagauaaauaggcaagucauaguugacagagauaauagguccgguuauucugguauuuucucuguugaaggcaaaagcugcaucaaucggugcuuuuauguggaguugauaaggggaaggaaccaggaaacugaagucuuguggaccucaaacaguauuguuguguuuuguggcaccucagguacauauggaacaggcucauggccugauggggcggacaucaaucucaugccuauauaa

SEQ ID NO: 46930 - RNA, 1410 nt, Artificial Sequence
  derived and/or modified CDS sequence (wt) from neuraminidase__InfluenzaA__ABD94957
augaauccaaaucaaaagauaauaacgauuggcucuguuucucucaccauuuccacaauaugcuucuucaugcaaauugccaucuugauaacuacuguaacauugcauuuuaagcaauaugaauucaacucccccccaaacaaccaagugaugcugugugaaccaacaauaauagaaagaaacauaacagagauaguguaucugaccaacaccaccauagagaaggaaauaugccccaaacuagcagaauacaggaauuggucaaagccgcaaugugacauuacaggauuugcaccuuuuucuaaggacaauucgauuaggcuuuccgcugguggggacaucugggugacaagagaaccuuaugugucaugcgauccugacaaguguuaucaauuugcccuuggacagggaacaacacuaaacaacgugcauucaaaugacacaguacaugauaggaccccuuaucggacccuauugaugaaugaguuagguguuccauuucaucuggggaccaagcaagugugcauagcaugguccagcucaaguugucacgauggaaaagcauggcugcauguuuguguaacgggggaugauaaaaaugcaacugcuagcuucauuuacaaugggaggcuuguagauaguauuguuucaugguccaaaaaaauccucaggacccaggagucagaaugcguuuguaucaauggaacuuguacaguaguaaugacugaugggagugcuucaggaaaagcugauacuaaaauacuauucauugaggaggggaaaaucguucauacuagcacauugucaggaagugcucagcaugucgaggagugcuccugcuauccucgauauccuggugucagaugugucugcagagacaacuggaaaggcuccaauaggcccaucguagauauaaacauaaaggauuauagcauuguuuccaguuaugugugcucaggacuuguuggagacacacccagaaaaaacgacagcuccagcaguagccauugcuuggauccuaacaaugaagaagguggucauggagugaaaggcugggccuuugaugauggaaaugacguguggaugggaagaacgaucagcgagaaguuacgcucaggauaugaaaccuucaaagucauugaaggcugguccaacccuaauuccaaauugcagauaaauaggcaagucauaguugacagagguaauagguccgguuauucugguauuuucucuguugaaagcaaaagcugcaucaaucggugcuuuuauguggaguugauaaggggaagaaaagaggaaacugaagucuuguggaccucaaacaguauuguuguguuuuguggcaccucagguacauauggaacaggcucauggccugauggggcggacaucaaucucaugccuauauaa

SEQ ID NO: 46931 - RNA, 1413 nt, Artificial Sequence
  derived and/or modified CDS sequence (wt) from neuraminidase__InfluenzaA__ABD94968
augaauccaaaucaaaaaauaauaaccauuggaucaaucaguauagcaaucggaauaauuagucuaauguugcaaauaggaaauauuauuucaauaugggcuagucacucaauccaaacuggaagucaaaaccacacuggaauaugcaaccaaagaaucaucacauaugaaaacagcaccugggugaaucacacauauguuaauauuaacaacacuaauguuguugcuggaaaggacaaaacuucagugacauuggccggcaauucaucucuuuguucuaucaguggaugggcuauauacacaaaagacaacagcauaagaauuggauccaaaggagauguuuuugucauaagagaaccuuucauaucauguucucacuuggaaugcagaaccuuuuuucugacccaaggugcucuauuaaaugacaaacauucaaaugggaccguuaaggacagaaguccuuauagggccuuaaugagcugcccucuaggugaagcuccguccccauacaauucaaaguuugaaucaguugcauggucagcaagcgcaugccaugauggcaugggcugguuaacaaucggaauuucugguccagacaauggagcuguggcuguacuaaaauacaacggcauaauaacugaaaccauaaaaaguuggaaaaagcgaauauuaagaacacaagagucugaaugugucugugugaacgggucauguuucaccauaaugaccgauggcccgaguaauggggccgccucguacaaaaucuucaagaucgaaaaggggaagguuacuaaaucaauagaguugaaugcacccaauuuucauuaugaggaauguuccuguuacccagacacuggcacagugauguguguaugcagggacaacuggcaugguucaaaucgaccuugggugucuuuuaaucaaaaccuggauuaucaaauaggauacaucugcagugggguguucggugacaauccgcgucccaaagauggagagggcagcuguaauccagugacuguugauggagcagacggaguaaagggguuuucauacaaauaugguaaugguguuuggauaggaagaacuaaaaguaacagacuuagaaagggguuugagaugauuugggauccuaauggauggacagauaccgacaguaauuucucagugaaacaggauguuguggcaauaacugauuggucaggguacagcggaaguuucguucaacauccugaguuaacaggauuggacuguauaagaccuugcuucuggguugaguuagucagaggacugccuagagaaaauacaacaaucuggacuagugggagcagcauuucuuuuuguggcguaaauagugauacugcaaacuggucuuggccagacggugcugaguugccguucaccauugacaaguag

SEQ ID NO: 46932 - RNA, 1413 nt, Artificial Sequence; identical to SEQ ID NO: 46840
  derived and/or modified CDS sequence (wt) from neuraminidase__InfluenzaA__ABD94990

SEQ ID NO: 46933 - RNA, 1413 nt, Artificial Sequence
  derived and/or modified CDS sequence (wt) from neuraminidase__InfluenzaA__ABD95001
augaauccaaaucaaaaaauaauaaccauuggaucaaucaguauagcaaucggaauaauuagucuaauguugcaaauaggaaauauuauuucaauaugggcuagucacucaauccaaacuggaagucaaaaccacacuggaauaugcaaccaaagaaucaucacauaugaaaacagcaccugggugaaucacacauauguuaauauucacaacacuaauguuguugcuggaaaggacaaaacuucagugacauuggccggcaauucaucucuuuguucuaucaguggaugggcuauauacacaaaagacaacagcauaagaauuggauccaaaggagauguuuuugucauaagagaaccuuucauaucauguucucacuuggaaugcagaaccuuuuuucugacccaaggugcucuauuaaaugacaaacauucaaaugggaccguuaaggacagaaguccuuauagggccuuaaugagcugcccucuaggugaagcuccguccccauacaauucaaaauuugaaucaguugcauggucagcaagcgcaugccaugauggcaugggcugguuaacaaucggaauuucugguccagacaauggagcuguggcuguacuaaaauacaacggcauaauaacugaaaccauaaaaaguuggaaaaagcgaauauuaagaacacaagagucugaaugugucugugugaacgggucauguuucaccauaaugaccgauggcccgaguaauggggccgccucguacaaaaucuucaagaucgaaaaggggaagguuacuaaaucaauagaguugaaugcacccaauuuucauuaugaggaauguuccuguuacccagacacuggcacagugauguguguaugcagggacaacuggcaugguucaaaucgaccuugggugucuuuuaaucaaaaccuggauuaucaaauaggauacaucugcagugggguguucggugacaauccgcgucccaaagauggagagggcagcuguaauccagugacuguugauggagcagacggaguaaagggguuuucauacaaauaugguaaugguguuuggauaggaaggacuaaaaguaacagacuuagaaagggguuugagaugauuugggauccuaauggauggacagauaccgacaguaauuucucaaugaaacaggauguuguggcaauaacugauuggucaggguacagcggaaguuucguucaacauccugaguuaacaggauuggacuguauaagaccuugcuucuggguugaguuagucagaggacugccuagagaaaauacaacaaucuggacuagugggagcagcauuucuuuuuguggcguaaauagugauacugcaaacuggucuuggccagacggugcugaguugccguucaccauugacaaguag

SEQ ID NO: 46934 - RNA, 1413 nt, Artificial Sequence
  derived and/or modified CDS sequence (wt) from neuraminidase__InfluenzaA__ABD95012
augaauccaaaucaaaaaauaauaaccauuggaucaaucaguauagcaaucggaauaauuagucuaauguugcaaauaggaaauauuauuucaauaugggcuagucacucaauccaaacuggaagucaaaaccacacuggaauaugcaaccaaagaaucaucacauaugaaaacagcaccugggugaaucacacauauguuaauauuaacaacacuaauguuguugcuggaaaggacaaaacuucagugacauuggccggcaauucaucucuuuguucuaucaguggaugggcuauauacacaaaagacaacagcauaagaauuggauccaaaggagauguuuuugucauaagagaaccuuucauaucauguucucacuuggaaugcagaaccuuuuuucugacccaaggugcucuauuaaaugacaaacauucaaaugggaccguuaaggacagaaguccuuauagggccuuaaugagcugcccucuaggugaagcuccguccccauacaauucaaaguuugaaucaguugcauggucagcaagcgcaugccaugauggcaugggcugguuaacaaucggaauuucugguccagacaauggagcuguggcuguacuaaaauacaacggcauaauaacugaaaccauaaaaaguuggaaaaagcgaauauuaagaacacaagagucugaaugugucugugugaacgggucauguuucaccauaaugaccgauggcccgaguaauggggccgccucguacaaaaucuucaagaucgaaaaggggaagguuacuaaaucaauagaguugaaugcacccaauuuucauuaugaggaauguuccuguuacccagacacuggcacagugauguguguaugcagggacaacuggcaugguucaaaucgaccuugggugucuuuuaaucaaaaccuggauuaucaaauaggauacaucugcagugggguguucggugacaauccgcgucccaaagauggagagggcagcuguaauccagugacuguugauggagcagacggaguaaagggguuuucauacaaauaugguaaugguguuuggauaggaaggacuaaaaguaacagacuuagaaagggguuugagaugauuugggauccuaauggauggacaaauaccgacaguaauuucucagugaaacaggauguuguggcaauaacugauuggucaggguacagcggaaguuucguucaacauccugaguuaacaggauuggacuguauaagaccuugcuucuggguugaguuagucagaggacugccuagagaaaauacaacaaucuggacuagugggagcagcauuucuuuuuguggcguaaauagugauacugcaaacuggucuuggccagacggugcugaguugccguucaccauugacaaguag

SEQ ID NO: 46935 - RNA, 1413 nt, Artificial Sequence; identical to SEQ ID NO: 46889
  derived and/or modified CDS sequence (wt) from neuraminidase__InfluenzaA__ABD95023

SEQ ID NO: 46936 - RNA, 1413 nt, Artificial Sequence
  derived and/or modified CDS sequence (wt) from neuraminidase__InfluenzaA__ABD95034
augaauccaaaucaaaaaauaauaaccauuggaucaaucaguauagcaaucggaauaauuagucuaauguugcaaauaggaaauauuauuucaauaugggcuagucacucaauccaaacuggaagucaaaaccacacuggaauaugcaaccaaagaaucaucacauaugaaaacagcaccugggugaaucacacauauguuaauauuaacaacacuaauguuguugcuggaaaggacaaaacuucagugacauuggccggcaauucaucucuuuguucuaucaguggaugggcuauauacacaaaagacaacagcauaagaauuggauccaaaggagauguuuuugucauaagagaaccuuucauaucauguucucacuuggaaugcagaaccuuuuuucugacccaaggugcucuauuaaaugacaaacauucaaaugggaccguuaaggacagaaguccuuauagggccuuaaugagcugcccucuaggugaagcuccguccccauacaauucaaaguuugaaucaguugcauggucagcaagcgcaugccaugauggcaugggcugguuaacaaucggaauuucugguccagacaauggagcuguggcuguacuaaaauacaacggcauaauaacugaaaccauaaaaaguuggaaaaagcgaauauuaagaacacaagagucugaaugugucugugugaacgggucauguuucaccauaaugaccgauggcccgaguaauggggccgccucguacaaaaucuucaagaucgaaaaggggaagguuacuaaaucaauagaguugaaugcacccaauuuucauuaugaggaauguuccuguuacccagacacuggcacagugauguguguaugcagggacaacuggcaugguucaaaucgaccuugggugucuuuuaaucaaaaccuggauuaucaaauaggauacaucugcagugggguguucggugacaauccgcgucccaaagauggagagggcagcuguaauccagugacuguugauggagcagacggaguaaagggguuuucauacaaauaugguaaugguguuuggauaggaaggacuaaaaguaacagacuuagaaagggguuugagaugauuugggauccuaauggauggacagauaccgacaguaauuucucagugaaacaggauguuguggcaauaacugauuggucaggguacagcggaaguuucauucaacauccugaguuaacaggauuggacuguauaagaccuugcuucuggguugaguuagucagaggacugccuagagaaaauacaacaaucuggacuagugggagcagcauuucuuuuuguggcguaaauagugauacugcaaacuggucuuggccagacggugcugaguugccguucaccauugacaaguag

SEQ ID NO: 46937 - RNA, 1413 nt, Artificial Sequence
  derived and/or modified CDS sequence (wt) from neuraminidase__InfluenzaA__ABD95056
augaauccaaaucaaaaaauaauaaccauuggaucaaucaguauagcaaucggaauaauuagccuaauguugcaaauaggaaacauuauuucaauaugggcuagucacucaauccaaacuggaagucaaaaccacacuggaguaugcaaccaaagaaucaucacauaugaaaacagcaccugggugaaucacacauauguuaauauuaacaacaccaauguuauugcuggaaaggacaaaacuucagugacauuggccggcaauucaucucuuuguucuaucaguggaugggcuauauacacaaaagacaacagcauaagaauugguuccaaaggagauguuuuugucauaagagagccuuucauaucauguucucacuuggaaugcagaaccuuuuuucugacccaaggugcucuauuaaaugacaaacauucaaaugggaccguuaaggacagaagccccuauagggcuuuaaugagcuguccucuaggugaagcuccguccccauacaauucaaaguuugaaucaguugcuuggucagcaagcgcaugccaugauggcaugggcugguuaacaaucggaauuucugguccagacaauggagcaguggcuguacuaaaauacaacggcauaauaacugaaaccauaaaaaguuggaaaaagcaaauauuaagaacacaagagucugaaugugucugugugaacgggucauguuucaccauaaugaccgauggcccgaguaauggggccgccucguacaaaaucuucaagaucgaaaagggaaagauuacuaaaucaauagaguugaaugcacccaauuuucauuaugaggaauguuccuguuacccagacacuggcacagugauguguguaugcagggacaacuggcaugguucaaaucgacccugggugucuuuuaaucaaaaccuggauuaucaaauaggauacaucugcagugggguguucggugacaauccgcgucccaaagauggagagggcagcuguaauccagugacuguugauggagcaaacggaguaaagggguuuucauacaaauaugguaaugguguuuggauaggaaggacuaaaaguaacagacuuagaaagggguuugagaugauuugggauccuaauggauggacagauaccgacagugauuucucagugaaacaggauguuguggcaauaacugauuggucuggguacagcggaaguuucguucaacauccugaguuaacaggauugaacuguauaagaccuugcuucuggguugaguuagucagaggacugccaaaagaaaauacaacaaucuggacuagugggagcagcauuucuuuuuguggcguaaauagugauacugcaaacuggucuuggccagacggugcugaguugccguuuaccauugacaaguag

SEQ ID NO: 46938 - RNA, 1413 nt, Artificial Sequence; identical to SEQ ID NO: 46897
  derived and/or modified CDS sequence (wt) from neuraminidase__InfluenzaA__ABD95067

SEQ ID NO: 46939 - RNA, 1413 nt, Artificial Sequence; identical to SEQ ID NO: 46897
  derived and/or modified CDS sequence (wt) from neuraminidase__InfluenzaA__ABD95078

SEQ ID NO: 46940 - RNA, 1413 nt, Artificial Sequence; identical to SEQ ID NO: 46937
  derived and/or modified CDS sequence (wt) from neuraminidase__InfluenzaA__ABD95089

SEQ ID NO: 46941 - RNA, 1413 nt, Artificial Sequence; identical to SEQ ID NO: 46897
  derived and/or modified CDS sequence (wt) from neuraminidase__InfluenzaA__ABD95100

SEQ ID NO: 46942 - RNA, 1413 nt, Artificial Sequence
  derived and/or modified CDS sequence (wt) from neuraminidase__InfluenzaA__ABD95111
augaauccaaaucaaaaaauaauaaccauuggaucaaucaguauagcaaucggaaugauuagccuaauguugcaaauaggaaacauuauuucaauaugggcuagucacucaauccaaacuggaagucaaaaccacacuggaguaugcaaccaaagaaucaucacauaugaaaacagcaccugggugaaucacacauauguuaauauuaacaacaccaauguuauugcuggaaaggacaaaacuucagugacauuggccggcaauucaucucuuuguucuaucaguggaugggcuauauacacaaaagacaacagcauaagaauugguuccaaaggagauguuuuugucauaagagagccuuucauaucauguucucacuuggaaugcagaaccuuuuuucugacccaaggugcucuauuaaaugacaaacauucaaaugggaccguuaaggacagaagccccuauagggcuuuaaugagcuguccucuaggugaagcuccguccccauacaauucaaaguuugaaucaguugcuuggucagcaagcgcaugccaugauggcaugggcugguuaacaaucggaauuucugguccagacaauggagcaguggcuguacuaaaauacaacggcauaauaacugaaaccauaaaaaguuggaaaaagcaaauauuaagaacacaagagucugaaugugucugugugaacgggucauguuucaccauaaugaccgauggcccgaguaauggggccgccucguacaaaaucuucaagaucgaaaagggaaagguuacuaaaucaauagaguugaaugcacccaauuuucauuaugaggaauguuccuguuacccagacacuggcacagugauguguguaugcagggacaacuggcaugguucaaaucgacccugggugucuuuuaaucaaaaccuggauuaucaaauaggauacaucugcagugggguguucggugacaauccgcgucccaaagauggagagggcagcuguaauccagugacuguugauggagcaaacggaguaaagggguuuucauacaaauaugguaaugguguuuggauaggaaggacuaaaaguaacagacuuagaaagggguuugagaugauuugggauccuaauggauggacagauaccgacagugauuucucagugaaacaggauguuguggcaauaacugauuggucuggguacagcggaaguuucguucaacauccugaguuaacaggauuggacuguauaagaccuugcuucuggguugaguuagucagaggacugccaaaagaaaauacaacaaucuggacuagugggagcagcauuucuuuuuguggcguaaauagugauacugcaaacuggucuuggccagacggugcugaguugccguuuaccauugacaaguag

SEQ ID NO: 46943 - RNA, 1413 nt, Artificial Sequence; identical to SEQ ID NO: 46942
  derived and/or modified CDS sequence (wt) from neuraminidase__InfluenzaA__ABD95122

SEQ ID NO: 46944 - RNA, 1413 nt, Artificial Sequence; identical to SEQ ID NO: 46897
  derived and/or modified CDS sequence (wt) from neuraminidase__InfluenzaA__ABD95144

SEQ ID NO: 46945 - RNA, 1413 nt, Artificial Sequence; identical to SEQ ID NO: 46897
  derived and/or modified CDS sequence (wt) from neuraminidase__InfluenzaA__ABD95155

SEQ ID NO: 46946 - RNA, 1413 nt, Artificial Sequence
  derived and/or modified CDS sequence (wt) from neuraminidase__InfluenzaA__ABD95166
augaauccaaaucaaaaaauaauaaccauuggaucaaucaguauagcaaucggaaugauuagccuaauguugcaaauaggaaacauuauuucaauaugggcuagucacucaauccaaacuggaagucaaaaccacacuggaguaugcaaccaaagaaucaucacauaugaaaacagcaccugggugaaucacacauauguuaauauuaacaacaccaauguuauugcugaaaaggacaaaacuucagugacauuggccggcaauucaucucuuuguucuaucaguggaugggcuauauacacaaaagacaacagcauaagaauugguuccaaaggagauguuuuugucauaagagagccuuucauaucauguucucacuuggaaugcagaaccuuuuuucugacccaaggugcucuauuaaaugacaaacauucaaaugggaccguuaaggacagaagccccuauagggcuuuaaugagcuguccucuaggugaagcuccguccccauacaauucaaaguuugaaucaguugcuuggucagcaagcgcaugccaugauggcaugggcugguuaacaaucggaauuucugguccagacaauggagcaguggcuguacuaaaauacaacggcauaauaacugaaaccauaaaaaguuggaaaaagcaaauauuaagaacacaagagucugaaugugucuguguuaacgggucauguuucaccauaaugaccgauggcccgaguaauggggccgccucguacaaaaucuucaagaucgaaaagggaaagguuacuaaaucaauagaguugaaugcacccaauuuucauuaugaggaauguuccuguuacccagacacuggcacagugauguguguaugcagggacaacuggcaugguucaaaucgacccugggugucuuuuaaucaaaaccuggauuaucaaauaggauacaucugcagugggguguucggugacaauccgcgucccaaagauggagagggcagcuguaauccagugacuguugauggagcaaacggaguaaagggguuuucauacaaauaugguaaugguguuuggauaggaaggacuaaaaguaacagacuuagaaagggguuugagaugauuugggauccuaauggauggacagauaccgacagugauuucucagugaaacaggauguuguggcaauaacugauuggucuggguacagcggaaguuucguucaacauccugaguuaacaggauuggacuguauaagaccuugcuucuggguugaguuagucagaggacugccaaaagaaaauacaacaaucuggacuagugggagcagcauuucuuuuuguggcguaaauagugauacugcaaacuggucuuggccagacggugcugaguugccguuuaccauugacaaguag

SEQ ID NO: 46947 - RNA, 1413 nt, Artificial Sequence; identical to SEQ ID NO: 46937
  derived and/or modified CDS sequence (wt) from neuraminidase__InfluenzaA__ABD95177

SEQ ID NO: 46948 - RNA, 1413 nt, Artificial Sequence
  derived and/or modified CDS sequence (wt) from neuraminidase__InfluenzaA__ABD95188
augaauccaaaucaaaaaauaauaaccauuggaucaaucaguacaacaaucggaauaauuagccuaauguugcaaauaggaaacauuauuucaauaugggcuagucacucaauccaaacuggaagucaaaaccacacuggaguaugcaaccaaagaaucaucacauaugaaaacagcaccugggugaaucacacauauguuaauauuaacaacaccaauguuauugcuggaaaggacaaaacuucagugacauuggccggcaauucaucucuuuguucuaucaguggaugggcuauauacacaaaagacaacagcauaagaauugguuccaaaggagauguuuuugucauaagagagccuuucauaucauguucucacuuggaaugcagaaccuuuuuucugacccaaggugcucuauuaaaugacaaacauucaaaugggaccguuaaggacagaagccccuauagggcuuuaaugagcuguccucuaggugaagcuccguccccauacaauucaaaguuugaaucaguugcuuggucagcaagcgcaugccaugauggcaugggcugguuaacaaucggaauuucugguccagacaauggagcaguggcuguacuaaaauacaacggcauaauaacugaaaccauaaaaaguuggaaaaagcaaauauuaagaacacaagagucugaaugugucugugugaacgggucauguuucaccauaaugaccgauggcccgaguaauggggccgccucguacaaaaucuucaagaucgaaaagggaaagguuacuaaaucaauagaguugaaugcacccaauuuucauuaugaggaauguuccuguuacccagacacuggcacagugauguguguaugcagggacaacuggcaugguucaaaucgacccugggugucuuuuaaucaaaaccuggauuaucaaauaggauacaucugcagugggguguucggugacaauccgcgucccaaagauggagagggcagcuguaauccagugacuguugauggagcaaacggaguaaagggguuuucauacaaauaugguaaugguguuuggauaggaaggacuaaaaguaacagacuuagaaagggguuugagaugauuugggauccuaauggauggacagauaccgacagugauuucucagugaaacaggauguuguggcaauaacugauuggucuggguacagcggaaguuucguucaacauccugaguuaacaggauuggacuguauaagaccuugcuucuggguugaguuagucagaggacugccaaaagaaaauacaacaaucuggacuagugggagcagcauuucuuuuuguggcguaaauagugauacugcaaacuggucuuggccagacggugcugaguugccguuuaccauugacaaguag

SEQ ID NO: 46949 - RNA, 1413 nt, Artificial Sequence; identical to SEQ ID NO: 46937
  derived and/or modified CDS sequence (wt) from neuraminidase__InfluenzaA__ABD95199

SEQ ID NO: 46950 - RNA, 1413 nt, Artificial Sequence
  derived and/or modified CDS sequence (wt) from neuraminidase__InfluenzaA__ABD95210
augaauccaaaucaaaaaauaauaaccauuggaucaaucaguauagcaaucggaauaauuagucuaauguugcaaauaggaaauauuauuucaauaugggcuagucacucaauccaaacuggaagucaaaaccacacuggaauaugcaaccaaagaaucaucacauaugaaaacagcaccugggugaaucacacauauguuaauauuaacaacacuaauguuguugcuggaaaagacaaaacuucagugacauuggccggcaauucaucucuuuguucuaucaguggaugggcuauauacacaaaagacaacagcauaagaauuggcuccaaaggagauguuuuugucauaagagaaccuuucauaucauguucucacuuggaaugcagaaccuuuuuucugacccaaggugcucuauuaaaugacaaacauucaaaugggaccguuaaggacagaaguccuuauagggccuuaaugagcuguccucuaggugaagcuccguccccauacaauucaaaguuugaaucaguugcauggucagcaagcgcaugccaugauggcaugggcugguuaacaaucggaauuucugguccagacaauggagcuguggcuguacuaaaauacaacggaauaauaacugaaaccauaaaaaguuggaaaaagcgaauauuaagaacacaagagucugaaugugucugugugaacgggucauguuucaccauaaugaccgauggcccgaguaauggggccgccucguacaaaaucuucaagaucgaaaaggggaagguuacuaaaucaauagaguugaaugcacccaauuuucauuaugaggaauguuccuguuacccagacacuggcacagugauguguguaugcagggacaacuggcaugguucaaaucgaccuugggugucuuuuaaucaaaacuuggauuaucaaauaggauacaucugcaguggaguguucggugacaauccgcgucccaaagauggagagggcagcuguaauccagugacuguugauggagcagacggaguaaagggguuuucauacaaauaugguaaugguguuuggauaggaaggacuaaaaguaacagacuuagaaagggguuugagaugauuugggauccuaauggauggacagauaccgacagugauuucucagugaaacaggauguuguggcaauaacugauuggucaggguacagcggaaguuucguucaacauccugaguuaacaggauuggacuguauaagaccuugcuucuggguugaguuagucagaggacugccuagagaaaauacaacaaucuggacuagugggagcagcauuucuuuuuguggcguuaauagugauacugcaaauuggucuuggccagacggugcugaguugccguucaccauugacaaguag

SEQ ID NO: 46951 - RNA, 1413 nt, Artificial Sequence
  derived and/or modified CDS sequence (wt) from neuraminidase__InfluenzaA__ABD95221
augaauccaaaucaaaaaauaauaaccauuggaucaaucaguauagcaaucggaaugauuagccuaauguugcaaauaggaaacauuauuucaauaugggcuagucacucaauccaaacuggaagucaaaaccacacuggaguaugcaaccaaagaaucaucacauaugaaaacagcaccugggugaaucacacauauguuaauauuaacaacaccaauguuauugcuggaaaggacaaaacuucagugacauuggccggcaauucaucucuuuguucuaucaguggaugggcuauauacacaaaagacaacagcauaagaauugguuccaaaggagauguuuuugucauaagagagccuuucauaucauguucucacuuggaaugcagaaccuuuuuucugacccaaggugcucuauuaaaugacaaacauucaaaugggaccguuaaggacagaagccccuauagggcuuuaaugagcuguccucuaggugaagcuccguccccauacaauucaaaguuugaaucaguugcuuggucagcaagcgcaugccaugauggcaugggcugguuaacaaucggaauuucugguccagacaauggagcaguggcuguacuaaaauacaacggcauaauaacugaaaccauaaaaaguuggaaaaagcaaauauuaagaacacaagagucugaaugugucugugugaacgggucauguuucaccauaaugaccgauggcccgaguaauggggccgccucguacaaaaucuucaagaucgaaaagggaaagguuacuaaaucaauagaguugaaugcacccaauucucauuaugaggaauguuccuguuacccagacacuggcacagugauguguguaugcagggacaacuggcaugguucaaaucgacccugggugucuuuuaaucaaaaccuggauuaucaaauaggauacaucugcagugggguguucggugacaauccgcgucccaaagauggagagggcagcuguaauccagugacuguugauggagcaaacggaguaaagggguuuucauacaaauaugguaaugguguuuggauaggaaggacuaaaaguaacagacuuagaaagggguuugagaugauuugggauccuaauggauggacagauaccgacagugauuucucagugaaacaggauguuguggcaauaacugauuggucuggguacagcggaaguuucguucaacauccugaguuaacaggauuggacuguauaagaccuugcuucuggguugaguuagucagaggacugccaaaagaaaauacaacaaucuggacuagugggagcagcauuucuuuuuguggcguaaauagugauacugcaaacuggucuuggccagacggugcugaguugccguuuaccauugacaaguag

SEQ ID NO: 46952 - RNA, 1413 nt, Artificial Sequence; identical to SEQ ID NO: 46942
  derived and/or modified CDS sequence (wt) from neuraminidase__InfluenzaA__ABD95232

SEQ ID NO: 46953 - RNA, 1413 nt, Artificial Sequence
  derived and/or modified CDS sequence (wt) from neuraminidase__InfluenzaA__ABD95243
augaauccaaaucaaaaaauaauaaccauugguucaaucaguauagcaaucggaauaauuagccuaauguugcaaauaggaaacauuauuucaauaugggcuagucacucaauccaaacuggaagucaaaaccacacuggaguaugcaaccaaagaaucaucacauaugaaaacagcaccugggugaaucacacauauguuaauauuaacaacaccaauguuauugcuggaaaggacaaaacuucagugacauuggccggcaauucaucucuuuguucuaucaguggaugggcuauauacacaaaagacaacagcauaagaauugguuccaaaggagauguuuuugucauaagagagccuuucauaucauguucucacuuggaaugcagaaccuuuuuucugacccaaggugcucuauuaaaugacaaacauucaaaugggaccguuaaggacagaagccccuauagggcuuuaaugagcuguccucuaggugaagcuccguccccauacaauucaaaguuugaaucaguugcuuggucagcaagcgcaugccaugauggcaugggcugguuaacaaucggaauuucugguccagacaauggagcaguggcuguacuaaaauacaacggcauaauaacugaaaccauaaaaaguuggaaaaagcaaauauuaagaacacaagagucugaaugugucugugugaacgggucauguuucaccauaaugaccgauggcccgaguaauggggccgccucguacaaaaucuucaagaucgaaaagggaaagguuacuaaaucaauagaguugaaugcacccaauuuucauuaugaggaauguuccuguuacccagacacuggcacagugauguguguaugcagggacaacuggcaugguucaaaucgacccugggugucuuuuaaucaaaaccuggauuaucaaauaggauacaucugcagugggguguucggugacaauccgcgucccaaagauggagagggcagcuguaauccagugacuguugauggagcaaacggaguaaagggguuuucauacaaauaugguaaugguguuuggauaggaaggacuaaaaguaacagacuuagaaagggguuugagaugauuugggauccuaauggauggacagauaccgacagugauuucucagugaaacaggauguuguggcaauaacugauuggucuggguacagcggaaguuucguucaacauccugaguuaacaggauuggacuguauaagaccuugcuucuggguugaguuagucagaggacugccaaaagaaaauacaacaaucuggacuagugggagcagcauuucuuuuuguggcguaaauagugauacugcaaacuggucuuggccagacggugcugaguugccguuuaccauugacaaguag

SEQ ID NO: 46954 - RNA, 1413 nt, Artificial Sequence
  derived and/or modified CDS sequence (wt) from neuraminidase__InfluenzaA__ABD95254
augaauccaaaucaaaaaauaauaaccauuggaucaaucaguauagcaaucggaaugauuagccuaauguugcaaauaggaaacauuauuucaauaugggcuagucacucaauccaaacuggaagucaaaaccacacuggaguaugcaaccaaagaaucaucacauaugaaaacagcaccugggugaaucacacauauguuaauauuaacaacaccaauguuauugcuggaaaggacaaaacuucagugacauuggccggcaauucaucucuuuguucuaucaguggaugggcuauauacacaaaagacaacagcauaagaauugguuccaaaggagauguuuuugucauaagagagccuuucauaucauguucucacuuggaaugcagaaccuuuuuucugacccaaggugcucuauuaaaugacaaacauucaaaugggaccguuaaggacagaagccccuauagggcuuuaaugagcuguccucuaggugaagcuccguccccauacaauucaaaguuugaaucaguugcuuggucagcaagcgcaugccaugauggcaugggcugguuaacaaucggaauuucugguccagacaauggagcaguggcuguacuaaaauacaacggcauaauaacugaaaccauaaaaaguuggaaaaagcaaauauugagaacacaagagucugaaugugucugugugaacgggucauguuucaccauaaugaccgauggcccgaguaauggggccgccucguacaaaaucuucaagaucgaaaagggaaagguuacuaaaucaauagaguugaaugcacccaauuuucauuaugaggaauguuccuguuacccagacacuggcacagugauguguguaugcagggacaacuggcaugguucaaaucgacccugggugucuuuuaaucaaaaccuggauuaucaaauaggauacaucugcagugggguguucggugacaauccgcgucccaaagauggagagggcagcuguaauccagugacuguugauggagcaaacggaguaaagggguuuucauacaaauaugguaaugguguuuggauaggaaggacuaaaaguaacagacuuagaaagggguuugagaugauuugggauccuaauggauggacagauaccgacagugauuucucagugaaacaggauguuguggcaauaacugauuggucuggguacagcggaaguuucguucaacauccugaguuaacaggauuggacuguauaagaccuugcuucuggguugaguuagucagaggacugccaaaagaaaauacaacaaucuggacuagugggagcagcauuucuuuuuguggcguaaauagugauacugcaaacuggucuuggccagacggugcugaguugccguuuaccauugacaaguag

SEQ ID NO: 46955 - RNA, 1413 nt, Artificial Sequence; identical to SEQ ID NO: 46950
  derived and/or modified CDS sequence (wt) from neuraminidase__InfluenzaA__ABD95265

SEQ ID NO: 46956 - RNA, 1413 nt, Artificial Sequence; identical to SEQ ID NO: 46897
  derived and/or modified CDS sequence (wt) from neuraminidase__InfluenzaA__ABD95276

SEQ ID NO: 46957 - RNA, 1413 nt, Artificial Sequence
  derived and/or modified CDS sequence (wt) from neuraminidase__InfluenzaA__ABD95287
augaauccaaaucaaaaaauaauaaccauuggaucaaucaguguagcaaucggaauaauuagccuaauguugcaaauaggaaacauuauuucaauaugggcuagucacucaauccaaacuggaagucaaaaccacacuggaguaugcaaccaaagaaucaucacauaugaaaacagcaccugggugaaucacacauauguuaauauuaacaacaccaauguuauugcuggaaaggacaaaacuucagugacauuggccggcaauucaucucuuuguucuaucaguggaugggcuauauacacaaaagacaacagcauaagaauugguuccaaaggagauguuuuugucauaagagagccuuucauaucauguucucacuuggaaugcagaaccuuuuuucugacccaaggugcucuauuaaaugacaaacauucaaaugggaccguuaaggacagaagucccuauagggcuuuaaugagcuguccucuaggugaagcuccguccccauacaauucaaaguuugaaucaguugcuuggucagcaagcgcaugccaugauggcaugggcugguuaacaaucggaauuucugguccagacaauggagcaguggcuguacuaaaauacaacggcauaauaacugaaaccauaaaaaguuggaaaaagcaaauauuaagaacacaagagucugaaugugucugugugaacgggucauguuucaccauaaugaccgauggcccgaguaauggggccgccucguacaaaaucuucaagaucgaaaagggaaagguuacuaaaucaauagaguugaaugcacccaauuuucauuaugaggaauguuccuguuacccagacacuggcacagugauguguguaugcagggacaacuggcaugguucaaaucgacccugggugucuuuuaaucaaaaccuggauuaucaaauaggauacaucugcagugggguguucggugacaauccgcgucccaaagauggagagggcagcuguaauccagugacugucgauggagcaaacggaguaaagggguuuucauacaaauaugguaaugguguuuggauaggaaggacuaaaaguaacagacuuagaaagggguuugagaugauuugggauccuaauggauggacagauaccgacagugauuucucagugaaacaggauguuguggcaauaacugauuggucaggguacagcggaaguuucguucaacauccugaguuaacaggauuggacuguauaagaccuugcuucuggguugaguuagucagaggacuaccaaaagaaaauacaacaaucuggacuagugggagcagcauuucuuuuuguggcguaaauagugauacugcaaacuggucuuggccagacggugcugaguugccguuuaccauugacaaguag

SEQ ID NO: 46958 - RNA, 1413 nt, Artificial Sequence; identical to SEQ ID NO: 46953
  derived and/or modified CDS sequence (wt) from neuraminidase__InfluenzaA__ABD95298

SEQ ID NO: 46959 - RNA, 1413 nt, Artificial Sequence
  derived and/or modified CDS sequence (wt) from neuraminidase__InfluenzaA__ABD95309
augaauccaaaucaaaaaauaauaaccauuggaucaaucaguauagcaaucggaaugauuagccuaauguugcaaauaggaaacauuauuucaauaugggcuagucacucaauccaaacuggaagucaaaaccacacuggaguaugcaaccaaagaaucaucacauaugaaaacagcaccugggugaaucacacauauguuaauauuaacaacaccaauguuauugcuggaaaggacaaaacuucagugacauuggccggcaauucaucucuuuguucuaucaguggaugggcuauauacacaaaagacaacagcauaagaauugguuccaaaggagauguuuuugucauaagagagccuuucauaucauguucucacuuggaaugcagaaccuuuuuucugacccaaggugcucuauuaaaugacaaacauucaaaugggaccguuaaggacagaagccccuauagggcuuuaaugagcuguccucuaggugaagcuccguccccauacaauucaaaguuugaaucaguugcuuggucagcaagcgcaugccaugauggcaugggcugguuaacaaucggaauuucugguccagacaauggagcaguggcuguacuaaaauacaacggcauaauaacugaaaccauaaaaaguuggaaaaagcaaauauuaagaacacaagagucugaaugugucugugugaacgggucauguuucaccauaaugaccgauggcccgaguaauggggccgccucguacaaaaucuucaagaucgaaaagggaaagguuacuaaaucaauagaguugaaugcacccaauuuucauuaugaggaauguuccuguuacccagacacuggcacagugauguguguaugcagggacaacuggcaugguucaaaucgacccugggugucuuuuaaucaaaaccuggauuaucaaauaggauacaucugcagugggguguucggugacaauccgcgucccaaagauggagagggcagcuguaauccagugacuguugauggagcaaacggaguaaagggguuuucauacaaauaugguaaugguguuuggauaggaaggacuaaauguaacagacuuagaaagggguuugagaugauuugggauccuaauggauggacagauaccgacagugauuucucagugaaacaggauguuguggcaauaacugauuggucuggguacagcggaaguuucguucaacauccugaguuaacaggauuggacuguauaagaccuugcuucuggguugaguuagucagaggacugccaaaagaaaauacaacaaucuggacuagugggagcagcauuucuuuuuguggcguaaauagugauacugcaaacuggucuuggccagacggugcugaguugccguuuaccauugacaaguag

SEQ ID NO: 46960 - RNA, 1413 nt, Artificial Sequence; identical to SEQ ID NO: 46897
  derived and/or modified CDS sequence (wt) from neuraminidase__InfluenzaA__ABD95320

SEQ ID NO: 46961 - RNA, 1413 nt, Artificial Sequence; identical to SEQ ID NO: 46937
  derived and/or modified CDS sequence (wt) from neuraminidase__InfluenzaA__ABD95331

SEQ ID NO: 46962 - RNA, 1413 nt, Artificial Sequence
  derived and/or modified CDS sequence (wt) from neuraminidase__InfluenzaA__ABD95342
augaauccaaaucagaaaauaauaaccauuggaucaaucuguauggcaaucgggauaauuagucuaauauugcaaauaggaaauauuauuucaauauggguuagccacucaauccaaacuggaagucaaaaccacacuggaauaugcaaccaaagaaucaucaccuaugaaaauagcaccuggguaaaucaaacauauguuaauauuaacaacacuaacguuguugcuggaaaggacacaacuucagugacacuagccggcaauucaucucuuuguccuguccgugggugggcuauauacagcaaagacaacagcauaagaauugguuccaaaggagauguuuuugucauaagagaaccuuuuauaucauguucucacuuggaaugcagaaccuuuuuucuaacccaaggugcucuauuaaaugacaagcauucaaaugggaccguuaaggacagaagcccuuauagggccuuaaugagcuguccuauaggugaagcuccgucuccauacaauucaagguuugaaucaguugcuuggucagcaagcgcaugucaugauggcaugggcuggcuaacaaucggaauuucuggaccagaugauggagcaguggcuguacuaaaauacaacggcauaauaacugaaaccauaaaaaguuggaggaaacgaauauuaagaacacaagagucugaaugugucuguauaaacgguucauguuuuaccauaaugaccgauggcccaaguaaugggccggccucguacagaaucuucaaaaucgagaaggggaaaauuacuaaaucaauagaguuggaugcacccaauucucacuacgaggaauguuccuguuacccagacaccggcacagugaugugugugugcagagacaauuggcaugguucgaaucgaccuugggugucuuuuaaucaaaaccuggauuaucaaauaggauacaucugcagugggguuuucggugacaauccgcgucccaaagauggaaaaggcagcugugguccaguaacuguugauggagcagacggaguaaagggguuuucauacagguaugguaauggugucuggauaggaaggacuaaaaguaacagcuccagaaagggauuugagaugauuugggauccuaauggauggacagauaccgauaguaauuucuuagugaaacaggauguaguggcaaugacugauuggucaggguacagcggaaguuucguucaacauccugagcuaacaggauuggacuguaugaggccuugcuucuggguugaauuaaucagagggcgaccuagagaaaagacaacaaucuggacuagugggagcagcauuucuuuuuguggcgugaauagugauacuguaaauuggucuuggccagacggugccgaguugccauucaccauugacaaguag

SEQ ID NO: 46963 - RNA, 1413 nt, Artificial Sequence
  derived and/or modified CDS sequence (wt) from neuraminidase__InfluenzaA__ABD95353
augaauccaaaucagaaaauaauaaccauuggaucaaucuguauggcaaucggaauaauuagucuaauauugcaaauagggaauauuaucucaauauggguuagccacucaauucaaacuggaagucaaaaccauacaggaauaugcaaccaaagaaucauuaccuaugaaaauagcaccuggguaaaucaaacauauguuaauauuagcaacacuaacguuguugcuggaaaggacacaacuucaaugacauuagccggcaauucaucucuuuguccuauccgugggugggcuauauacagcaaagacaacagcauaagaauugguuccaaaggagauguuuuugucauaagagaaccuuuuauaucauguucucacuuggaaugcagaaccuuuuuucugacccaaggcgcucuauuaaaugacaagcauucaaaugggaccguuaaggacagaagcccuuauagggccuuaaugagcuguccuauaggugaagcuccgucuccauacaauucaagguuugaaucgguugcuuggucagcaagugcaugucacgauggcaugggcuggcuaacaaucggaauuucugguccagaugauggagcaguggcuguacuaaaauacaacggcauaauaacugaaaccauaaaaaguuggaggaagcaaauauuaagaacacaagagucugaaugugucuguguaaacgguucauguuuuaccauaaugaccgauggcccgagugaugggccggccucguacagaaucuucaaaaucgagaaggggaagauuacuaaaucaauagaguuggaugcacccaauucucauuacgaggaauguuccuguuacccagacaccggcacagugaugugugugugcagagacaauuggcaugguucgaaucgaccuugggugucuuuuaaucaaaaccuggauuaucaaauaggauacaucugcagugggguuuucggugacaauccgcgucccaaagauggaaaaggcaguugugauccaguaaauguugauggagcagacggaguaaagggguuuucauacagauaugguaaugguguuuggauaggaaggacuaaaaguaacagcuccagaaagggauuugagaugauuugggauccuaauggauggacagauaccgauaguaauuucuuagugaaacaggauguaguggcaaugacugauuggucaggguacagcggaaguuucguucaacauccugagcuaacaggauuggacuguaugaggccuugcuucuggguugaauuaaucagaggacgacccagagaaaaaacaacaaucuggacuagugggagcagcauuucuuuuuguggcgugaauagugauacuguaaauuggucuuggccagacggugccgaguugccauucaccauugacaaguag

SEQ ID NO: 46964 - RNA, 1413 nt, Artificial Sequence; identical to SEQ ID NO: 46840
  derived and/or modified CDS sequence (wt) from neuraminidase__InfluenzaA__ABE11660

SEQ ID NO: 46965 - RNA, 1413 nt, Artificial Sequence
  derived and/or modified CDS sequence (wt) from neuraminidase__InfluenzaA__ABE11671
augaauccaaaucaaaaaauaauaaccauuggaucaaucaguauagcaaucggaauaauuagucuaauguugcaaauaggaaauauuauuucaauaugggcuagucacucaauccaaacuggaagucaaaaccacacuggaguaugcaaccaaagaaucaucacauaugaaaacagcaccugggugaaucacacauauguuaauauuaacaacacuaauguuguugcuggaaaggacaaaacuucagugacauuggccggcaauucaucucuuuguucuaucaguggaugggcuauauacacaaaagacaacagcauaagaauugguuccaaaggagauguuuuugucauaagagagccuuucauaucauguucucacuuggaaugcagaaccuuuuuucugacccaaggugcucuauuaaaugacaaacauucaaaugggaccguuaaggacagaagucccuauagggccuuaaugagcuguccucuaggugaagcuccguccccauacaauucaaaguuugaaucaguugcuuggucagcaagcgcaugccaugauggcaugggcugguuaacaaucggaauuucugguccagacaauggagcaguggcuguacuaaaauacaacggcauaauaacugaaaccauaaaaaguuggaaaaagcaaauauuaagaacacaagagucugaaugugucugugugaacgggucauguuucaccauaaugaccgauggcccgaguaauggggccgccucguacaaaaucuucaagaucgaaaagggaaagguuaauaaaucaauagaguugaaugcacccaauuuucauuaugaggaauguuccuguuacccagauacuggcacagugauguguguaugcagggacaacuggcaugguucaaaucgaccuugggugucuuuuaaucaaaaccuggauuaucaaauaggauacaucugcagugggguguucggugacaauccccgucccaaagauggagagggcagcuguaauccagugacuguugauggagcaaacggaguaaagggguuuucauacaaauaugguaaugguguuuggauaggaaggacuaaaaguaacagacuuagaaagggguuugagaugauuugggauccuaauggauggacagauaccgacagugauuucucagugaaacaggauguuguggcaauaacugauuggucaggguacagcggaaguuucguucaacauccugaguuaacaggauuggacuguauaagaccuugcuucuggguugaguuagucagaggacugccuagagaaaauacaacaaucuggacuagugggagcagcauuucuuuuuguggcguaaauagugauacugcaaacuggucuuggccagacggugcugaguugccguucaccauugacaaguag

SEQ ID NO: 46966 - RNA, 1413 nt, Artificial Sequence
  derived and/or modified CDS sequence (wt) from neuraminidase__InfluenzaA__ABE11682
augaauccaaaucaaaaaauaauaaccauuggaucaaucaguauagcaaucggaauaauuagucuaauguugcaaauaggaaauauuauuucaauaugggcuagucacucaauccaaacuggaagucaaaaccacacuggaauaugcaaccaaagaaucaucacauaugaaaacagcaccugggugaaucacacauauguuaauauuaacaacacuaauguuguugcuggagaggacaaaacuucagugacauuggccggcaauucaucucuuuguucuaucaguggaugggcuauauacacaaaagacaacagcauaagaauuggcuccaaaggagauguuuuugucauaagagaaccuuucauaucauguucucacuuggaaugcagaaccuuuuuucugacccaaggugcucuauuaaaugacaaacauucaaaugggaccguuaaggacagaaguccuuauagggccuuaaugagcuguccucuaggugaagcuccguccccauacaauucaaaguuugaaucaguugcauggucagcaagcgcaugccaugauggcaugggcugguuaacaaucggaauuucugguccagacaauggagcuguggcuguacuaaaauacaacggaauaauaacugaaaccauaaaaaguuggaaaaagcgaauauuaagaacacaagagucugaaugugucugugugaacgggucauguuucaccauaaugaccgauggcccgaguaauggggccgccucguacaaaaucuucaagaucgaaaaggggaagguuacuaaaucaauagaguugaaugcacccaauuuucauuaugaggaauguuccuguuacccagacacuggcacagugauguguguaugcagagacaacuggcaugguucaaaucgaccuugggugucuuuuaaucaaaacuuggauuaucaaauaggauacaucugcaguggaguguucggugacaauccgcgucccaaagauggagagggcagcuguaauccagugacuguugauggagcagacggaguaaagggguuuucauacaaauaugguaaugguguuuggauaggaaggacuaaaaguaacagacuuagaaagggguuugagaugauuugggauccuaauggauggacagauaccgacagugauuucucagugaaacaggauguuguggcaauaacugauuggucaggguacagcggaaguuucguucaacauccugaguuaacaggauuggacuguauaagaccuugcuucuggguugaguuagucagaggacugccuagagaaaauacaacaaucuggacuagugggagcagcauuucuuuuuguggcguuaauagugauacugcaaacuggucuuggccagacggugcugaguugccguucaccauugacaaguag

SEQ ID NO: 46967 - RNA, 1413 nt, Artificial Sequence; identical to SEQ ID NO: 46897
  derived and/or modified CDS sequence (wt) from neuraminidase__InfluenzaA__ABE11693

SEQ ID NO: 46968 - RNA, 1413 nt, Artificial Sequence
  derived and/or modified CDS sequence (wt) from neuraminidase__InfluenzaA__ABE11704
augaauccaaaucaaaaaauaauaaccauuggaucaaucaguauagcaaucggaauaauuagccuaauguugcaaauaggaaacauuauuucaauaugggcuagucacucaauccaaacuggaagucaaaaccacacuggaguaugcaaccaaagaaucaucacauaugaaaacagcaccugggugaaucacacauauguuaauauuaacaacaccaauguuauugcuggaaaggacaaaacuucagugacauuggccggcaauucaucucuuuguucuaucaguggaugggcuauauacacaaaagacaacagcauaagaauugguuccaaaggagauguuuuugucauaagagagccuuucauaucauguucucacuuggaaugcagaaccuuuuuucugacccaaggugcucuauuaaaugacaaacauucaaaugggaccguuaaggacagaagccccuauagggcuuuaaugagcuguccucuaggugaagcuccguccccauacaauucaaaguuugaaucaguugcuuggucagcaagcgcaugccaugauggcaugggcugguuaacaaucggaauuucugguccagacaauggagcaguggcuguacuaaaauacaacggcauaauaacugaaaccauaaaaaguuggaaaaagcaaauauuaagaacacaagagucugaaugugucugugugaacgggucauguuucaccauaaugaccgauggcccgaguaauggggccgccucauacaaaaucuucaagaucgaaaagggaaagguuacuaaaucaauagaguugaaugcacccaauuuucauuaugaggaauguuccuguuacccagacacuggcacagugauguguguaugcagggacaacuggcaugguucaaaucgacccugggugucuuuuaaucaaaaccuggauuaucaaauaggauacaucugcagugggguguucggugacaauccgcgucccaaagauggagagggcagcuguaauccagugacuguugauggagcaaacggaguaaagggguuuucauacaaauaugguaaugguguuuggauaggaaggacuaaaaguaacagacuuagaaagggguuugagaugauuugggauccuaauggauggacagauaccgacagugauuucucagugaaacaggauguuguggcaauaacugauuggucuggguacagcggaaguuucguucaacauccugaguuaacaggauuggacuguauaagaccuugcuucuggguugaguuagucagaggacugccaaaagaaaauacaacaaucuggacuagugggagcagcauuucuuuuuguggcguaaauagugauacugcaaacuggucuuggccagacggugcugaguugccguuuaccauugacaaguag

SEQ ID NO: 46969 - RNA, 1413 nt, Artificial Sequence; identical to SEQ ID NO: 46897
  derived and/or modified CDS sequence (wt) from neuraminidase__InfluenzaA__ABE11715

SEQ ID NO: 46970 - RNA, 1413 nt, Artificial Sequence; identical to SEQ ID NO: 46937
  derived and/or modified CDS sequence (wt) from neuraminidase__InfluenzaA__ABE11726

SEQ ID NO: 46971 - RNA, 1413 nt, Artificial Sequence
  derived and/or modified CDS sequence (wt) from neuraminidase__InfluenzaA__ABE11737
augaauccaaaucaaaaaauaauaaccauuggaucaaucaguauagcaaucggaaugauuagccuaauguugcaaauaggaaacauuauuucaauaugggcuagucacucaauccaaacuggaagucaaaaccacacuggaguaugcaaccaaagaaucaucacauaugaaaacagcaccugggugaaucacacauauguuaauauuaacaacaccaauguuauugcuggaaaggacaaaacuucagugacauuggccggcaauucaucucuuuguucuaucaguggaugggcuauauacacaaaagacaacagcauaagaauugguuccaaaggagauguuuuugucauaagagagccuuucauaucauguucucacuuggaaugcagaaccuuuuuucugacccaaggugcucuauuaaaugacaaacauucaaaugggaccguuaaggacagaagccccuauagggcuuuaaugagcuguccucuaggugaagcuccguccccauacaauucaaaguuugaaucaguugcuuggucagcaagcgcaugccaugauggcaugggcugguuaacaaucggaauuucugguccagacaauggagcaguggcuguacuaaaauacaacggcauaauaacugaaaccauaaaaaguuggaaaaagcaaauauuaagaacacaagagucugaaugugucugugugaacgggucauguuucaccauaaugaccgauggcccgaguaauggggccgccucguacaaaaucuucaagaucgaaaagggaaagguuacuaaaucaauagaguugaaugcacccaauuuucauuaugaggaauguuccuguuacccagacacuggcacagugauguguguaugcagggacaauuggcaugguucaaaucgacccugggugucuuuuaaucaaaaccuggauuaucaaauaggauacaucugcagugggguguucggugacaauccgcgucccaaagauggagagggcagcuguaauccagugacuguugauggagcaaacggaguaaagggguuuucauacaaauaugguaaugguguuuggauaggaaggacuaaaaguaacagacuuagaaagggguuugagaugauuugggauccuaauggauggacagauaccgacagugauuucucagugaaacaggauguuguggcaauaacugauuggucuggguacagcggaaguuucguucaacauccugaguuaacaggauuggacuguauaagaccuugcuucuggguugaguuagucagaggacugccaaaagaaaauacaacaaucuggacuagugggagcagcauuucuuuuuguggcguaaauagugauacugcaaacuggucuuggccagacggugcugaguugccguuuaccauugacaaguag

SEQ ID NO: 46972 - RNA, 1413 nt, Artificial Sequence; identical to SEQ ID NO: 46897
  derived and/or modified CDS sequence (wt) from neuraminidase__InfluenzaA__ABE11815

SEQ ID NO: 46973 - RNA, 1413 nt, Artificial Sequence; identical to SEQ ID NO: 46937
  derived and/or modified CDS sequence (wt) from neuraminidase__InfluenzaA__ABE11826

SEQ ID NO: 46974 - RNA, 1413 nt, Artificial Sequence; identical to SEQ ID NO: 46937
  derived and/or modified CDS sequence (wt) from neuraminidase__InfluenzaA__ABE11837

SEQ ID NO: 46975 - RNA, 1413 nt, Artificial Sequence; identical to SEQ ID NO: 46937
  derived and/or modified CDS sequence (wt) from neuraminidase__InfluenzaA__ABE11848

SEQ ID NO: 46976 - RNA, 1413 nt, Artificial Sequence
  derived and/or modified CDS sequence (wt) from neuraminidase__InfluenzaA__ABE11859
augaauccaaaucaaaaaauaauaaccauuggaucaaucaguauagcaaucggaaugauuagccuaauguugcaaauaggaaacauuauuucaauaugggcuagucacucaauccaaacuggaagucaaaaccacacuggaguaugcaaccaaagaaucaucacauaugaaaacagcaccugggugaaucacacauauguuaauauuaacaacaccaauguuauugcuggaaaggacaaaacuucagugacauuggccggcaauucaucucuuuguucuaucaguggaugggcuauauacacaaaagacaacagcauaagaauugguuccaaaggagauguuuuugucauaagagagccuuucauaucauguucucacuuggaaugcagaaccuuuuuucugacccaaggugcucuauuaaaugacaaacauucaaaugggaccguuaaggacagaagccccuauagggcuuuaaugagcuguccucuaggugaagcuccguccccauacaauucaaaguuugaaucaguugcuuggucagcaagcgcaugccaugauggcaugggcugguuaacaaucggaauuucugguccagacaauggagcaguggcuguacuaaaauacaacggcauaauaacugaaaccauaaaaaguuggaaaaagcaaauauuaagaacacaagagucugaaugugucugugugaacgggucauguuucaccauaaugaccgauggcccgaguaauggggccgccucguacaaaaucuucaagaucgaaaagggaaagguuacuaaaucaauagaguugaaugcacccaauuuucauuaugaggaauguuccugcuacccagacacuggcacagugauguguguaugcagggacaacuggcaugguucaaaucgacccugggugucuuuuaaucaaaaccuggauuaucaaauaggauacaucugcagugggguguucggugacaauccgcgucccaaagauggagagggcagcuguaauccagugacuguugauggagcaaacggaguaaagggguuuucauacaaauaugguaaugguguuuggauaggaaggacuaaaaguaacagacuuagaaagggguuugagaugauuugggauccuaauggauggacagauaccgacagugauuucucagugaaacaggauguuguggcaauaacugauuggucuggguacagcggaaguuucguucaacauccugaguuaacaggauuggacuguauaagaccuugcuucuggguugaguuagucagaggacugccaaaagaaaauacaacaaucuggacuagugggagcagcauuucuuuuuguggcguaaauagugauacugcaaacuggucuuggccagacggugcugaguugccguuuaccauugacaaguag

SEQ ID NO: 46977 - RNA, 1413 nt, Artificial Sequence
  derived and/or modified CDS sequence (wt) from neuraminidase__InfluenzaA__ABE11903
augaauccaaaucaaaaaauaauaaccauuggaucaaucaguauggcaauaggaauaauuagucuaauauugcaaauaggaaauauuauuucaauaugggcuagccacucaauccaaacuggaagucaaaacuacacuggaauaugcaaccaaagaaucauuacauaugaaaauagcaccuggguaaaucaaacauauguuaauauuaacaacacuaauguuguugcuggaaaggacaaaaccucaaugacauuggccggcaauucaucucuuugccccauccguggaugggcuauauacacaaaagacaacagcauaagaauugguuccaaaggagauguuuuugucauaagagagccuuuuauaucauguucucauuuggaaugcagaaccuuuuuucugacccaaggugcucuauuaaaugacaagcauucaaaugggaccguuaaggacagaagcccuuauagggccuuaaugagcuguccucuaggugaagcuccgucuccauacaauucaagauuugaaucaguugcuuggucagcaagcgcuugccaugauggcuugggcuggcuaacaaucggaauuucugguccagauaauggagcaguggcuguacuaaaauacaacggcauaauaacugaaaccauaaaaaguuggaagaagcaaaucuuaagaacacaagagucugaaugugucugugugaacgguucauguuuuaccauaaugaccgauggcccgaguaauggggcugcaucguacagaaucuucaaaaucgagaaggggagaguuacuaaaucaauagaguuggaugcacccaauuaucauuacgaggaauguuccuguuacccagacaccggcacagugaugugugugugcagggacaauuggcacgguucaaaucgaccuugggugucuuuuaaucaaaaccuggauuaucaaauaggauacaucugcagugggguguucggugacaauccgcgucccaaagauggagaaggcagcuguaauccagugacuguugauggagcagacggaguaaagggguuuucauacagauaugguaaugguguuuggauaggaaggacuaaaaguaacagacucagaaagggauuugagaugauuugggacccuaauggauggacagauaccgacagugauuucucaaugaaacaggaugucguggcaaugacugauuggucaggguacagcggaaguuuuguccaacauccugagcuaacaggauuggacuguaugagaccuugcuucuggguugaauuagucagagggcuaccuagagaaaauacaacaaucuggacuagugggagcagcauuucuuuuuguggcguaaauagcgagacugcaaacuggucuuggccagacggugcugaguugccauucaccauugacaaguag

SEQ ID NO: 46978 - RNA, 1413 nt, Artificial Sequence
  derived and/or modified CDS sequence (wt) from neuraminidase__InfluenzaA__ABE11925
augaauccaaaucaaaaaauaauaaccauuggaucaaucaguauugcaauuggaauaauuagucugauauugcaaauaggaaauauuauuucaauaugggcuagccacucaauccaaacuggaagucaaaaccacacuggaauaugcaaccaaagaaucauuacauaugaaaauagcaccuggguaaaucaaacauauguuaauauuaacaacacuaauguuguugcaggaaaggacaaaaccucaaugacauuggccggcaauucaucucuuugcccuauccguggaugggcuauauacacaaaagacaacagcauaagaauugguuccaaaggagauguuuuugucauaagagagccuuuuauaucauguucucacuuggaaugcagaaccuuuuuucugacccaaggugcucuauuaaaugacaagcauucaaaugggaccguuaaggacagaagcccuuauagggccuuaaugagcuguccucuaggugaagcuccgucuccauacaauucaagauuugaaucaguugcuuggucagcaagcgcaugccaugauggcuugggcuggcuaacaaucggaauuucugguccagauaacggggcaguggcuguacuaaaauacaacggcauaauaacugaaaccauuaaaaguuggaagaagcgaauauuaagaacacaagagucugaaugugucuguaugaacgguucauguuuuaccauaaugaccgauggcccgaguaauggggccgcaucguacagaaucuucaaaaucgagaaggggaaaguuacuaaaucaauagaguuggaugcacccaauuaucauuacgaggaauguucauguuacccagacaccggcacagugaugugugugugcagggacaauuggcacgguucaaaucgaccuugggugucuuuuaaucaaaaccuggauuaucaaauaggauacaucugcagugggguguucggugacaauccgcgucccaaagauggagaaggcagcuguaauccagugacugcugauggagcagacggaguaaagggguuuucauacagauaugguaaugguguuuggauaggaaggacuaaaaguaacagacucagaaagggauuugagaugauuugggauccuaauggauggacagauaccgacagugauuucucaaugaaacaggauaucguggcaaugacugauuggucaggguacagcggaaguuuuguucaacauccugagcuaacaggauuagacuguaugagaccuugcuucuggguugaauuagucagagggcuaccuagagaaaauacaacaaucuggacuagugggagcagcauuucuuuuuguggcguaaauagcgauacugcaaacuggucuuggccagacggugccgaguugccauucaccauugacaaguag

SEQ ID NO: 46979 - RNA, 1413 nt, Artificial Sequence
  derived and/or modified CDS sequence (wt) from neuraminidase__InfluenzaA__ABE11952
augaauccaaaucaaaaaauaauaaccauuggaucaaucaguauggcaauaggaauaauuagucuaauauugcaaauaggaaauauuauuucaauaugggcuagccacucaauccaaacuggaagucaaaacuacacuggaauaugcaaccaaagaaucauuacauaugaaaauagcaccuggguaaaucaaacauauguuaauauuaacaacacuaauguuguugcuggaaaggacaaaaccucaaugacauuggccggcaauucaucucuuugccccauccguggaugggcuauauacacaaaagacaacagcauaagaauugguuccaaaggagauguuuuugucauaagagagccuuuuauaucauguucucauuuggaaugcagaaccuuuuuucugacccaaggugcucuauuaaaugacaagcauucaaaugggaccguuaaggacagaagcccuuauagggccuuaaugagcuguccucuaggugaagcuccgucuccauacaauucaagauuugaaucaguugcuuggucagcaagcgcuugccaugauggcuugggcuggcuaacaaucggaauuucugguccagauaauggagcaguggcuguacuaaaauacaacggcauaauaacugaaaccauaaaaaguuggaagaagcaaaucuuaagaacacaagagucugaaugugucugugugaacgguucauguuuuaccauaaugaccgauggcccgaguaauggggcugcaucguacagaaucuucaaaaucgagaaggggagaguuacuaaaucaauagaguuggaugcacccaauuaucauuacgaggaauguuccuguuacccagacaccggcacagugaugugugugugcagggacaauuggcacgguucaaaucgaccuugggugucuuuuaaucaaaaccuggauuaucaaauaggauacaucugcagugggguguucggugacaauccgcgucccaaagauggagaaggcagcuguaauccagugacuguugauggagcagacggaguaaagggguuuucauacagauaugguaaugguguuuggauaggaaggacuaaaaguaacagacucagaaagggauuugagaugauuugggacccuaauggauggacagauaccgacagugauuucucaaugaaacaggaugucguggcaaugacugauuggucaggguacagcggaaguuuuguccaacauccugagcuaacaggauuggacuguaugagaccuugcuucuggguugaauuagucagagggcuaccuagagaaaauacaacaaucuggacuagugggagcagcauuucuuuuuguggcguaaauagcgagacugcagacuggucuuggccagacggugcugaguugccauucaccauugacaaguag

SEQ ID NO: 46980 - RNA, 1413 nt, Artificial Sequence
  derived and/or modified CDS sequence (wt) from neuraminidase__InfluenzaA__ABE12035
augaauccaaaucaaaaaauaauaaccauuggaucaaucaguauugcaauuggaauaauuagucugauauugcaaauaggaaauauuauuucaauaugggcuagccacucaauccaaacuggaagucaaaaccacacuggaauaugcaaccaaagaaucauuacauaugaaaauagcaccuggguaaaucaaacauauguuaauauuaacaacacuaauguuguugcuggaaaggacaaaaccucaaugacauuggccggcaauucaucucuuugcccuauccguggaugggcuauauacacaaaagacaacagcauaagaauugguuccaaaggagauguuuuugucauaagagagccuuuuauaucauguucucacuuggaaugcagaaccuuuuuucugacccaaggugcucuauuaaaugacaagcauucaaaugggaccguuaaggacagaagcccuuauagggccuuaaugagcuguccucuaggugaagcuccgucuccauacaauucaagauuugaaucaguugcuuggucagcaagcgcaugccaugauggcuugggcuggcuaacaaucggaauuucugguccagauaauggggcaguggcuguacuaaaauacaacggcauaauaacugaaaccauuaaaaguuggaagaagcgaauauuaagaacacaagagucugaaugugucuguaugaacgguucauguuuuaccauaaugaccgauggcccgaguaauggggccgcaucguacagaaucuucaaaaucgagaaggggagaguuacuaaaucaauagaguuggaugcacccaauuaucauuacgaggaauguucauguuacccagacaccggcacagugaugugugugugcagggacaauuggcacgguucaaaucgaccuugggugucuuuuaaucaaaaccuggauuaucaaauaggauacaucugcagugggguguucggugacaauccgcgucccaaagauggagaaggcagcuguaauccagugacuguugauggagcagacggaguaaagggguuuucauacagauaugguaaugguguuuggauaggaaggacuaaaaguaacagacucagaaagggauuugagaugauuugggauccuaauggauggacagauaccgacagugauuucucaaugaaacaggauaucguggcaaugacugauuggucaggguacagcggaaguuuuguucaacauccugagcuaacaggauuggacuguaugagaccuugcuucuggguugaauuagucagagggcuaccuagagaaaauacaacaaucuggacuagugggagcagcauuucuuuuuguggcguaaauagcgauacugcaaacuggucuuggccagacggugccgaguugccauucaccauugacaaguag

SEQ ID NO: 46981 - RNA, 1410 nt, Artificial Sequence; identical to SEQ ID NO: 46755
  derived and/or modified CDS sequence (wt) from neuraminidase__InfluenzaA__ABE12094

SEQ ID NO: 46982 - RNA, 1410 nt, Artificial Sequence; identical to SEQ ID NO: 46875
  derived and/or modified CDS sequence (wt) from neuraminidase__InfluenzaA__ABE12126

SEQ ID NO: 46983 - RNA, 1413 nt, Artificial Sequence
  derived and/or modified CDS sequence (wt) from neuraminidase__InfluenzaA__ABE12263
augaauccaaaucaaaaaauaauaaccauuggaucaaucaguauagcaaucggaauaauuagccuaauguugcaaauaggaaacauuauuucaauaugggcuagucacucaauccaaacuggaagucaaaaccacacuggaguaugcaaccaaagaaucaucacauaugaaaacagcaccugggugaaucacacauauguuaauauuaacaacaccaauguuauugcuggaaaggacaaaacuucagugacauuggccggcaauucgucucuuuguucuaucaguggaugggcuauauacacaaaagacaacagcauaagaauugguuccaaaggagauguuuuugucauaagagagccuuucauaucauguucucacuuggaaugcagaaccuuuuuucugacccaaggugcucuauuaaaugacaaacauucaaaugggaccguuaaggacagaagccccuauagggcuuuaaugagcuguccucuaggugaagcuccguccccauacaauucaaaguuugaaucaguugcuuggucagcaagcgcaugccaugauggcaugggcugguuaacaaucggaauuucugguccagacaauggagcaguggcuguacuaaaauacaacggcauaauaacugaaaccauaaaaaguuggaaaaagcaaauauuaagaacacaagagucugaaugugucugugugaacgggucauguuucaccauaaugaccgauggcccgaguaauggggccgccucguacaaaaucuucaagaucgaaaaggggaagguuacuaaaucaauagaguugaaugcacccaauuuucauuaugaggaauguuccuguuacccagacacuggcacagugauguguguaugcagggacaacuggcaugguucaaaucgacccugggugucuuuuaaucaaaaccuggauuaucaaauaggauacaucugcagugggguguucggugacaauccgcgucccaaagauggagagggcagcuguaauccagugacuguugauggagcaaacggaguaaagggguuuucauacaaauaugguaaugguguuuggauaggaaggacuaaaaguaacagacuuagaaagggguuugagaugauuugggauccuaauggauggacagauaccgacagugauuucucagugaaacaggauguuguggcaauaacugauuggucuggguacagcggaaguuucguucaacauccugaguuaacaggauuggacuguauaagaccuugcuucuggguugaguuagucagaggacugccaaaagaaaauacaacaaucuggacuagugggagcagcauuucuuuuuguggcguaaauagugauacugcaaacuggucuuggccagacggugcugaguugccguuuaccauugacaaguag

SEQ ID NO: 46984 - RNA, 1410 nt, Artificial Sequence
  derived and/or modified CDS sequence (wt) from neuraminidase__InfluenzaA__ABE12626
augaauccaaaucaaaagauaauaacaauuggcucugucucucucaccauugcaacaauaugcuuccucaugcagauugccauccugguaacuacuguaacauugcauuucaagcaauaugagugcgacucccccgcgaacaaccaaguaaugccgugugaaccaauaauaauagaaaggaacauaacagagauaguguauuugacuaacaccaccauagagaaagagauaugccccaaauuaguggaauacaggaaauggucaaagccgcaauguaaaauuacaggauuugcaccuuuuucuaaggacaauucaauucggcuuucugcugguggggacauuugggugacgagagaaccuuaugugucaugcgauccuggcaaguguuaucaauuugcacucgggcagggaaccacacuagacaacaaacauucaaaugacacaauacaugauagaaucccucaucgaacccuauugaugaaugaguuggguguuccauuucauuugggaaccaggcaaguguguauagcaugguccagcucaaguugucacgauggaaaagcauggcugcauguuugugucacuggggaugauaaaaaugcaacugcuagcuucauuuacgaugggaggcuuguggacaguauugguucauggucucaaaauauccucaggacccaggagucggaaugcguuuguaucaaugggacuuguacaguaguaaugacugauggaagugcuucaggaagagcugauacuagaauacuauucauugaagaggggaaaauuguucauauuagcccauugucaggaagugcucagcauguagaggaguguuccuguuauccucgauauccuggugucagauguaucugcagagacaacuggaaaggcucuaauaggcccgucguagauauaaaugugaaagauuauagcauugauuccaguuaugugugcucagggcuuguuggcgacacacccagaaacaacgacagaucuagcaauagcuauugccggaauccuaacaaugagagagggaaucacggagugaaaggcugggccuuugacgauggaaaugacguguggaugggaagaacgaucagcaaggauucacgcucagguuaugaaaccuucaaagucauuggugguugguccacaccuaauuccaaaucgcagauaaauaggcaagucauaguugacagcgauaauaggucagguuauucuggcauuuucucuguugagggcaaaagcugcaucaauaggugcuuuuauguggaguugauaaggggaagggaacaggagacuagaguaugguggaccucaaacaguauuguuguguuuuguggcacuucagguaccuaugggacaggcucauggccugauggggcggacaucaaucucaugccuauauaa

SEQ ID NO: 46985 - RNA, 1410 nt, Artificial Sequence
  derived and/or modified CDS sequence (wt) from neuraminidase__InfluenzaA__ABE12650
augaauccaaaucaaaagauaauaacgauuggcucuguuucucucacuauugccacaauauguuuccuuaugcaaauugccauccugguaacuacuguaacauugcauuucaagcaauaugaaugcaacucccccccaaacaaccaaguaaugcugugugaaccaacaauaauagaaagaaacauaacagagauaguguaucugaccaacaccaccauagagaaggaaauaugccccaaacuagcagaauacagaaauuggucaaagccgcaauguaaaauuacaggauuugcaccuuuuucuaaggacaauucaauucggcuuuccgcugguggggacauuugggugacaagagaaccuuaugugucaugcgauccugacaaguguuaucaauuugcccuuggacagggaacaacacuaaacaacaggcauucaaaugacacaguacaugauaggaccccuuaucgaacccuauugaugaaugaguuggguguuccauuucauuugggaaccaagcaagugugcauagcaugguccagcucaaguugucacgauggaaaagcauggcugcauguuuguguaacugggcaugaugaaaaugcaacugcuagcuucauuuacgaugggaggcuuguagauaguauugguucaugguccaaaaaaauccucaggacccaggagucggaaugcguuuguaucaauggaacuuguacaguaguaaugacugaugggagugcuucaggaagagcugauacuaaaauacuauucauuaaggaggggaaaaucguucauauuagcccauuguuaggaagugcucaacaugucgaggagugcuccuguuauccucgauauccuggugucagaugugucugcagagacaacuggaaaggcuccaauaggcccaucguagauauaaauguaaaggauuauagcauuguuuccaguuaugugugcucaggacuuguuggagacacacccagaaaaaacgacagcuccagcaguagccauugccugaauccuaacaaugaggaagggggucauggagugaaaggcugggccuuugaugauggaaaugacguguggaugggaagaacgaucagcgagaaguuacgcucagguuaugaaaccuucaaagucauugaaggcugguccaaaccuaacuccaaauugcagauaaauaggcaagucauaguugacagagguaauagguccgguuauucugguauuuucucuguugaaggcaaaagcugcaucaaucggugcuucuauguggaguugauaaggggaaggaaacaggaaacugaagucugguggaccucaaacaguauuguuguguuuuguggcaccucagguacauauggaacaggcucauggccugauggggcggacaucaaucucaugccuauauaa
